United States Patent Application Publication US 2011/0183924 A1 - sequence listing, part 262

SEQ ID NO: 736297 - DNA, 2084 bp, Homo sapiens
cggacgcccggcgagtggcggaaagcgagaccccggcgccgagtgaggtcggccaggctgctgccgacttccccgctggcccctttgttcccctcccggggccctgccggcggcgggtcccggttgcccgcgccagagcctcaggccggctccttttgcccttgagaagggttcgctgccaggccttcgagttccgggcgcagctcccgggagagccggcgccctgcctggcccggcggcctcctctcgggcacgaaggcttgctgctgcttctccagaacttcccttcctcgtagacacagcaaagagacttttaaaaaaccatggcagatgtggacccagatacattgctggaatggctacagatgggacagggagatgaaagggacatgcaactaatagcccttgaacagctatgcatgctgcttttgatgtctgacaacgtggatcgttgttttgaaacatgtcctcctcgcactttcttaccagccctttgcaaaatttttcttgatgaaagtgctccagacaatgtattagaggtgacagcccgtgccataacatactacctggatgtatctgcggaatgtacccgaaggattgttggggtagatggagctataaaagcactttgtaatcgtttggttgtagttgaacttaacaacaggactagcagagacttagctgaacagtgtgtaaaggtattagaactgatatgtactcgtgagtcaggagcagtctttgaggctggtggtttgaattgtgtgcttaccttcattcgtgacagtggacatctagttcataaagacaccttgcactctgctatggctgtggtatcaagactctgtggcaaaatggagcctcaagattcttctttagaaatttgtgtagaatctctgtctagtttattaaagcatgaagatcatcaggtttcagatggagctctgcgatgctttgcatcactggctgaccgatttacccgtcgtggtgttgacccagctccattagccaagcatggattaactgaggagctgttatctcgaatggctgctgctggtggtactgtttcaggaccatcatcagcatgcaaaccaggtcgcagcaccacaggagctccatccaccactgcagattccaaattgagtaatcaggtgtcaacaattgtaagtctgctctcaacactttgcagaggctctccggtagtaacacatgatcttctgaggtcggagcttccagattcaattgaaagtgcattgcagggtgatgaaagatgtgtgcttgatactatgcgtttggttgaccttctcttggtgctattatttgaaggacgaaaagctttgccaaagtctagtgctggatctacaggcagaatcccaggactccggagattagatagttctggggagcgctcacatcggcagcttatagattgtattcgaagtaaagataccgatgcacttatagatgcaattgacacaggagcctttgaagtaaattttatggatgatgtaggtcagactctattaaactgggcctctgcttttggaactcaggaaatggtagaatttctttgtgagagaggtgcagatgttaatagaggtcaaaggtcatcatcattacattatgctgcatgttttggaagacctcaagtagcaaagactctgttacggcatggtgcaaatccagatctgagagatgaagatgggaaaactccattagataaagctcgagaaaggggccatagtgaagtggtagctattcttcagtctccaggtgattggatgtgtccagttaataaaggagatgataagaaaaagaaagatacaaacaaagatgaagaagaatgtaatgagcccaaaggagatccggaaatggcacccatatacttgaaaaggttattgccagtgtttgcacaaacatttcagcaaactatgctgccttcaataaggaaagcaagtcttgctctaattcgaaaaatgattcatttttgctctgaagcactgttaaaagaagtttgtgattctgatgttggtcacaatttgcctacaatactagtggaaatcactgcaactgtcctggatcaagag

SEQ ID NO: 736298 - DNA, 1891 bp, Homo sapiens; identical to SEQ ID NO: 461240

SEQ ID NO: 736299 - DNA, 2137 bp, Homo sapiens; identical to SEQ ID NO: 49224

SEQ ID NO: 736300 - DNA, 2424 bp, Homo sapiens
tgcagcattttccagtcacatatcagggttatactgaactgcaacaaagatcaacttttaaaaattagccttcttaaaatacaaaatgatttaagtattttaaagataatttatttgccttgctcttgccttctaacattagccatttcatggagaggctaaaacttatactccaaaaaatgtggaagcacattttaatgggagtaaaattaaaaaattttgagaaagggtaaaatcttatgaatatgcatcttcttagctttatcttccctttgataggtaggcacttatgctcttccatctgctccatgtcaaatagggctcagggaagccagtcatttccttagcgagatgattactcctttgccttgaaacatttattgggcccaccatgtatggatcagtgtgtggtagtgagtcatactcccaaatcagtgattcccaagtcttggctttgggaaccagtatgccttgtattctcttaaaaagcaacaataatttcttgaaacaaaattagttcagaattgatttaaaatatttcagtgtgccatatagctctgtcccttggtttggttggccttgttttttcctgtgaagaatgaaagggcaaaggtgataccaaaatgaaacagctttggagtgatatctttaggagcctggaagccatttttgtaattttgttgtctatataaatgctacctttgcctggaggtagtgcgcctgtggctgtgtacatccagagggcaacagtaatagccaacaaccagacaaactagtgaagttaatctgtgagtgatgattttatgatacttatatgcaaattaaaggcagaagttagtttcttctcaagatgcctttttggctgaacattaccatttttctttccccagggtttgaaagaaaagggccttttttggatttaactatattctgtctgcattctattcttcatgcgtaggtttctactagaacctgtggaggggggacaccaaatttagattgagtcagtccatgctgataagaagcgtgaggaccttgttggacacagagcttctagatctttccacctgtagcctctaccctgttcctgcactttacctgaaactgtgcctctggtctttagaccagctgttggaacatatcactcacccactcctctgttatagcaaagggccagctgggatggtacacgctgtgtaatcagacaccttctcgacaagtacagctgatgtttctcactgttgccttaccattctctgagccatctttgatgttgatttgtaaaaaaaaacaaaaaacaaaaaaaaaacctagtagcaaaactcctgttaaactcagagcttgtatgtggtggtcattcaacatccttatttctagatttacacaaactgtaccaactgtaatctttttctggcacgcgtatgtggtcagatgcttcataaacgtgagccaacttgggttgtaaacattggacataatatacaaattggggaattttggatgactgcataatcctgtcattagagatttcataagacagaagataactgtttatttgtaatttaacacatttttagaaaagatgatctttaatttctttccctcagttgtgtatacagctatacaccatactaacaccgtactatgtcataggaacttaaagttagatgtatctaaatcccttcacttttctaagacttctctgtgctcccacccctgaagtcttcaaatcatttttcatctgtgaagtcactgaggtactgggcttgactatagtggtaacagttaaggggagttgaactattgatcttccaagaagaaagggaccagatagtgttaagatgctgcagttgtgttactgtgaagaaaagattcgcttccactttcagcaggctatataaatatatatacatatatatatatattttcactttggtaaaaaaaagttgaaaaatctgaggagaacataattaccttcacaaattatttatagatacactgggtgagaagcttactgtagggcagtcacccaaaaaaaactaattttagtgctttcaatagtgtaatatttgtatctattaccatggcagcagtgtctgctgcacactgtgtcctattactgtaaatctcctggtttataattcttatggaaactaatttgttttgtaatggaatccagagcagatatgtataatatgatcaggattgtcctacagttgtaaataagaataggtcctgtttattttgacatctttttacaaatgcattgtattagggtgtgaatattctgaaccatcctcttgtttaaagtttggaaatttttattgttaaatgtaacattttaatggttgtaataattatttgtatagatatgaatatagtattttatttaagaaaataaactttgcatttttgcattgtaaa

SEQ ID NO: 736301 - DNA, 2019 bp, Homo sapiens
ccccaaccgcctctcagccatgcgggaggccttcgccaggagccgcagcatcagcaccgacgtgtgacctgggcccgcccccgggatcctggccttgaaggtcctgagacaatggggggattcctttggcacacccacctggccccaggccccaagtggggcttggctgagccctcctggaatccctgtcctcaggggaggcccaggcttggggagcccccaggctcgtggcagggataaggctcattgaacacaaatgtgtcctggggggaggcacagctggggcctggggctagaaggaccaggtgaccatacagccggctgggcatgcaccagggctctcaggcacagaggccaccgttactcctgatgattctgtctcagacccaacaacctggccttcccaggaggtctccatgtgtcaccccctccctgggtctcacccttctcacctgctcaaggaagggatgacctcagtgaggcccagggccctgcagcaaggccctccctggcaattgcagaccaaggattctgctcctccaccttgaactccagcctctttctctccatttttccctctctctcccctacccgtctctccctctctctcacacacacactcttccgggttcaagggccaagcgtctgcctaggctgagacacgtgctgagctccctgaagatggaccagctgccccctagaagggagactttcaggggcatcagggcccttgggatgctccgccctgaccagctttttggtggcagagggaggcacggggagagggagaggccatgtcgcagtccccctgccgtgggagaggcaacgcggaaatgtatagacccagtgctcagccagaaacagggccagcaagcggcagtgaacggaggcagcccggggctcgtcagggtgggcagagccatggcccaggggttgaaaacccccgagttccccgtgagacttggctggcccttcccacccctgggcctcagtctccccatcttgtgtgatgaggagagaccctgaggacagaggtcttcaggctgtgggtctcaacaggaactgagatccccaagggagacagagttgcaggtcacctcccctacctgcttctcagcaggacctaggaggcctggcccagctcctggtggaccccaagcagccagagcctactgctgccatctgaagacctcatctgagcccactttccaccaagcgcccacccaggctgaggtctcctgggaattctcacccgctctcctgctgctaaggaaatgacgtcaatggctaccccagagaaatgccccacatcccaggacaccagccatcaggaaggcagctcttcctcacccagaaagaggcaattatttcctctcagcagcctggccccaggagcccccttccctctctggggctctgcctctccttttgtgccctgccatggagccccagggccggggcagcccctctctgcccagggaaggcaccgccctcaaagacaaggcttggccgggcagtgaccttccctgagcggaggggtggcttgagcaggacacttcttgcccttactcaaaaacgaaatggccagtttccagaggcgtcgggggaacggctgacgaagtcacaatcgttatgttctcaattgttttcctcctcttactttctctcctgcctcgtttggacaggccagtggcattcgcccttgaggtccctcgcagccccggccccccgggcccgcccacacctctggcttcctctgtgcatcctgtgaagtctgtttctgatgcgttggcgtggggggtgggctgggtggggtggggatgagggcccagccctcatgattccatttcccaattcctttctggtctccatcctctctgtagatatgtagatctctttgaaacgaagtaagcacccatccctcccagctcactcggctccaccgtggggacctgctgggggagccgctggctccctgaggaaagtgaaagccaataaaacatctcccacactctcatg

SEQ ID NO: 736302 - DNA, 1299 bp, Homo sapiens
ggattaatgaggaaatcattctgtggctctagtcataatttatgcttaataacattgatagtagccctttgcgctataactctacctaaagactcacatcatttggcagagagagagtcgttgaagtcccaggaattcaggactgggcaggttaagacctcagacaaggtagtagaggtagacttgtggacaaggctcgggtcccagcccaccgcaccccaactttaatcagagtggttcactattgatctatttttgtgtgatagctgtgtggcgtgggccaaacatttaatgagaagttactgtgcaccaaactgccgaacaccattctaaactattcatatatattagtcatttaattcttacataacttgagaggtagacagatatccttattttagagatgaggaaaccaagagaacttaggtcattagcgcaaggttgtagagtaagcggcaaagccaagacacaaagctgggtggtttggtttcagagccagtgcttttcccctctactgtactgcctctcaaccaacacagggttgcacaggcccattctctgatttttttcctcttgtcctctgcctctccctctagctcccacttcctctctgctctagttcattttctttagagcagcccgagtgatcatgaagtgcaaatcttgccatgtcagtcccctgcttagaaccctccaatggctcactttctctttaggcaaaagtctttaccccatgccttctcccatctcatctcaaccccctcatttgttggctgtctgctgtcagccactcttctttcaggtcctcagatgcactgcaccctctcctgcctgggggtctttgctcctgctactacctctgcttgaacagctcctcaccttccttcctccaaccctacccttgtataggtgacttttgttcatccttcagaattcaactcacatgtctcttgcatggagaaccctcacctactgtgttgagaccctgtccagcccccaggtgggatcctctctcgacttcccatacatttctttcacagcatttacatagtccatgatagtttacttgtgggattatttggttaatctttgcctttaacaccagggttccttgggtgaaggagcttctttatcttggtaacagcattatttcaagcataacttgtaatatagttatattacatatataacatatatatatataacataacatatataacatatataacaagcataacttgttatatagtcttgtatatagcaaagaccccaataaatatttggagaacaaaaaaaaat

SEQ ID NO: 736303 - DNA, 521 bp, Homo sapiens; identical to SEQ ID NO: 45594

SEQ ID NO: 736304 - DNA, 654 bp, Homo sapiens
gctctggcccggaacatctggatgtgaaagggcatttggtgattgcacctctttctccagatctgccacagcaagagtggagagatcaaccccgtgaaggtggccaacctggtgaaggcgtacgtggacaagtacaggcacatgcgcaggcacaagaaaccagaggccggggaggagccgcccacgcagggggccgagggctgaggccaggcaatcacgggctatgcccggggagctgtcgggagtggcgggaatcggggccatgcccggggagctgtcgggagtggcgggaatcggggccatgcccggggagctgtcgggagtggcgggaaatggggggcatcaccatgcctgccgtcgggttcctgcgctgacacctggtctgtgcacctgtgttgctcacagttgaaaactggacacttttgtatgtatattatagagacactgtttccattctaatttatcaaaaatggattatctttagaaacctcttgattgacttactacttggaagataaagcacttggtgatcaagaggggctcctggtggggtggcgcgtccttgataaatctctaggtggcctcccgccaacagctgctgtgtacctttggctctgaattaggaatatctttactttctcttttccaattatg

SEQ ID NO: 736305 - DNA, 5535 bp, Homo sapiens
gagcgcacggcggcggcagaggcggcggcggccgggcctaggagcgactctcggtcgtgcagcggcggcgagcgctcgcgagcggctgcgggacgcgaggtttccggagctgagctcaatgtgcagcaatggatgacgacagcctggatgagcttgtggcccggagcccagggccggatggacacccacaggtcggccctgcggacccggcaggtgactttgaagaaagcagcgtgggcagcagtggggactctggggacgacagtgacagcgagcatggagatggcacagacggagaagacgagggggcgtctgaggaggaagacctggaagacagatctggttccgaggattctgaagacgacggggagacattgctggaggtagcgggtactcaggggaaactggaagccgctggctctttcaattctgatgatgatgcagagagctgcccaatctgtctcaacgcattcagagaccaggccgtggggacgccggagaactgtgcccattacttctgcctggactgcattgtcgaatggtccaagaatgccaattcctgtccagttgatcgaactctatttaagtgcatttgtattcgagctcaatttggtggtaaaatcttaaaaaagatcccagtggagaacaccaaagcgagcgaggaggaggaggacccgaccttctgtgaggtgtgcggcaggagcgaccgtgaggacaggcttttgctctgcgacggctgcgatgcggggtaccacatggaatgcttggacccccctctccaggaggtgccggtggacgagtggttctgcccggaatgtgctgcgcctggtgttgtccttgccgctgatgcgggtcccgtgagtgaggaggaggtctccctgctcttggctgatgtggtgcccaccaccagcaggcttcggcctcgagcaggtaggacccgggcgatagccaggacacggcagagtgagagagtgagagcaaccgtgaaccggaaccggatctccacggccaggagggtccagcacacaccagggcgcctcgggtcttccctgctggatgaagccatcgaggctgtggcgactggcctgagcactgccgtgtatcagcgccccctgacgccgcgcactcccgcccgacggaagaggaagacaagaagacggaagaaagtgccgggaagaaagaaaaccccgtccggaccatccgcaaaaagtaagagctcagcgacaagatctaagaaacgccaacatcgagtgaagaagagaagagggaagaaggtaaagagtgaagccaccactcgctctcgaatcgcgcggacgctgggcctgcgcaggcctgttcacagcagctgcatcccgtcagtgttgaagccagtggagccctctttggggctgctgagagcggatattggagctgcctctctgtctctgtttggagatccttatgagctggatcccttcgacagcagtgaagagctttctgcaaaccctctttcccctctgagtgccaagagacgggctctgtcccggtcagccctgcagtcccaccagcccgtggccaggcccgtctccgtggggctttccaggaggcgcctccctgccgcggtgccagagccagacttggaggaggagccagtgcctgacctgctgggcagcatcctgtcgggccagagcctcctgatgctgggcagcagtgatgtcatcatccaccgcgacggctccctcagcgccaagagggcggctccagtttcttttcagcgaaactcaggcagtctgtccagaggggaagaaggattcaagggctgcctgcagccccgagcactgccctccgggagcccggcccaaggcccgtcaggaaacaggccacagagcacagggctcagctgtcaaggcaggtcccgcacccccgcccgcaccgcgggggcgcctgtgaggctggacttgccagcagcccctggggcggttcaggctcggaacttgtcaaatgggagtgtgcctggcttcagacagagccacagcccctggttcaacggcaccaacaagcacaccttgccccttgcctctgccgcgtctaagatctcaagcagagattctaagcccccatgtcgcagtgtggtgccggggcctcccctgaagccagcgcccagaagaacagacatctctgagctacccaggataccaaagatcaggagagatgacggtggtggcagacgggatgcggccccggcccacgggcagagcattgagatccccagtgcctgcatcagccgactgactggcagggagggcaccgggcagccagggcgaggcacacgggcagagagcgaggccagcagcagggtgccccgggagcccggggtgcacacgggcagctcccggcccccagcccccagctcccatggcagtttggccccactgggaccatcaagagggaaaggggtcgggtcgacctttgagagcttccggatcaatattcctggaaacatggcacattccagccagctctccagccctggcttctgtaacacgttccggcctgtggacgataaggagcagaggaaggagaacccctcacccctcttctccatcaagaagacgaagcagctgcggagcgaggtctacgacccatccgaccccaccggctccgactccagcgcccctggcagcagccccgagaggtctggccccggcctcctgccctctgagatcacacgaaccatctccatcaacagcccgaaggcccagacggtgcaggctgtgcgctgcgtcacctcctacacggtggagagcatctttggtacagagcccgaaccccctctcggaccgtcctccgccatgtccaagcttccgggggtgcagtggcctgcccgagggggccctctgacacggagcgagaggagcccacagagagccagggcctgggctgccccggctgcggaggccatcccccccagagccctgggatgaggaggatggggcgtcttgcagcaccttctttggctctgaggagcggacggtgacctgtgtgactgtcgtggagccggaagccccacccagcccggacgtgctgcaggctgccacccacagagtcgtggagctcaggcccccttcccggtcccgctccacatccagctcccgcagcaggaagaaggccaagaggaagagggtgtccagggagcacggacggacgcgctctgggacgcgctctgaatccagggacaggagctcgaggtcagcgtcaccatcagtgggtgaggagcgccccaggaggcagcggtccaaggccaagagccggcggtcctccagtgaccgctccagcagccgagagcgagctaagaggaagaaagccaaggacaagagcagggagcacaggcggggcccctggggccacagccggaggacgtcccggtcgcggtcggggagccctggcagctcttcctatgagcactatgagagtaggaagaagaagaaaaggagatcagcgtccagacctcggggaagggagtgctcccccaccagcagcctggagaggctctgcaggcacaagcatcagcgggaacgcagccacgagcggccagacaggaaggagagtgtggcgtggccccgagaccggaggaagcggaggtcccggtccccaagctcggagcacagggcacgggagcacaggcggcctcggtcccgtgagaagtggccgcagacccggtcccattccccagagaggaagggggctgtgagggaggcttccccagcgccccttgcacagggggagccagggcgggaagacctccccaccaggttgccagccttgggggaagcacatgtctcgccggaggtggctacggccgacaaggcccccctgcaggctccccctgtcctggaggtggcagctgagtgtgagccggacgacctggacctggattatggcgactccgtggaggccggacacgtctttgatgatttctcaagcgacgccgttttcatccagctcgatgacatgagctcgccaccttctcccgaaagcacagactcttccccggagcgagacttcccactgaagcctgcgttgcccccagccagcctggccgtggccgccatccagagggaggtgtcattgatgcacgatgaagacccttcgcagcccccacccctgccagagggcacccaggagccacatttgctcaggccggacgcggctgagaaggctgaggcacccagttccccggatgtggcgcctgcggggaaggaagacagcccctctgcgagtgggagggtacaggaggcagcccggcctgaggaggtggtttcgcagacccccctgctgcggtccagagccctggtgaagcgggtcacctggaacctgcaggagtcggagagcagcgcccccgccgaggacagagccccccgggcaccacttcacaggccacagaagccccgagaaggagcctgggacatggaggatgtggcccccacaggggtcaggcaggcgttctccgagctgccctttcccagtcacgtgcttccggaacccgggttcccagacacagacccctctcaggtttacagccccggcctgccgcctgccccggcccagccctcaagcatcccaccctgcgcactggtcagccagcccacggtccagttcatccttcaggggagcctgccgctagtgggctgtggggcagcacagaccctggccccagtgcccgctgccctgaccccagcctcagagccagccagtcaagccactgcagccagcaactcggaggagaagaccccggcccccaggctagctgcggagaaaaccaagaaggaggagtacatgaagaagctgcacatgcaggagcgtgctgtggaggaggtgaagctggccatcaagcccttctaccagaagagggaggtgaccaaggaggagtacaaggacatcctgcgcaaggccgtgcagaagatctgccacagcaagagtggagagatcaaccccgtgaaggtggccaacctggtgaaggcgtacgtggacaagtacaggcacatgcgcaggcacaagaaaccagaggccggggaggagccgcccacgcagggggccgagggctgaggccaggcaatcacgggctatgcccggggagctgtcgggagtggcgggaatcggggccatgcccggggagctgtcgggagtggcgggaatcggggccatgcccggggagctgtcgggagtggcgggaaatggggggcatcaccatgcctgccgtcgggttcctgcgctgacacctggtctgtgcacctgtgttgctcacagttgaaaactggacacttttgtatgtatattatagagacactgtttccattctaatttatcaaaaatggattatctttagaaacctcttgattgacttactacttggaagataaagcacttggtgatcaagaggggctcctggtggggtggcgcgtccttgataaatctctaggtggcctcccgccaacagctgctgtgtacctttggctctgaattaggaatatctttactttctcttttccaattatg

SEQ ID NO: 736306 - DNA, 1198 bp, Homo sapiens
gctggaccggtccggattctgggaatcgtcgaccacgcgtccggtcgaggacagagccccccgggcaccacttcacaggccacagaagccccgagaaggagcctgggacatggaggatgtggcccccacaggggtcaggcaggcgttctccgagctgccctttcccagtcacgtgcttccggaacccgggttcccagacacagacccctctcaggtttacagccccggcctgccgcctgccccggcccagccctcaagcatcccaccctgcgcactggtcagccagcccacggtccagttcatccttcaggggagcctgccgctagtgggctgtggggcagcacagaccctggccccagtgcccgctgccctgaccccagcctcagagccagccagtcaagccactgcagccagcaactcggaggagaagaccccggcccccaggctagctgcggagaaaaccaagaaggaggagtacatgaagaagctgcacatgcaggagcgtgctgtggaggaggtgaagctggccatcaagcccttctaccagaagagggaggtgaccaaggaggagtacaaggacatcctgcgcaaggccgtgcagaagatctgccacagcaagagtggagagatcaaccccgtgaaggtggccaacctggtgaaggcgtacgtggacaagtacaggcacatgcgcaggcacaagaaaccagaggccggggaggagccgcccacgcagggggccgagggctgaggccaggcaatcacgggctatgcccggggagctgtcgggagtggcgggaatcggggccatgcccggggagctgtcgggagtggcgggaatcggggccatgcccggggagctgtcgggagtggcgggaaatggggggcatcaccatgcctgccgtcgggttcctgcgctgacacctggtctgtgcacctgtgttgctcacagttgaaaactggacacttttgtatgtatattatagagacactgtttccattctaatttatcaaaaatggattatctttagaaacctcttgattgacttactacttggaagataaagcacttggtgatcaagaggggctcctggtggggtggcgcgtccttgataaatctctaggtggcctcccgccaacagctgctgtgtacctttggctctgaattaggaatatctttactttctcttttccaattatg

SEQ ID NO: 736307 - DNA, 5173 bp, Homo sapiens
gagcgcacggcggcggcagaggcggcggcggccgggcctaggagcgactctcggtcgtgcagcggcggcgagcgctcgcgagcggctgcgggacgcgaggtttccggagctgagctcaatgtgcagcaatggatgacgacagcctggatgagcttgtggcccggagcccagggccggatggacacccacaggtcggccctgcggacccggcaggtgactttgaagaaagcagcgtgggcagcagtggggactctggggacgacagtgacagcgagcatggagatggcacagacggagaagacgagggggcgtctgaggaggaagacctggaagacagatctggttccgaggattctgaagacgacggggagacattgctggaggtagcgggtactcaggggaaactggaagccgctggctctttcaattctgatgatgatgcagagagctgcccaatctgtctcaacgcattcagagaccaggccgtggggacgccggagaactgtgcccattacttctgcctggactgcattgtcgaatggtccaagaatgccaattcctgtccagttgatcgaactctatttaagtgcatttgtattcgagctcaatttggtggtaaaatcttaaaaaagatcccagtggagaacaccaaagcgagcgaggaggaggaggacccgaccttctgtgaggtgtgcggcaggagcgaccgtgaggacaggcttttgctctgcgacggctgcgatgcggggtaccacatggaatgcttggacccccctctccaggaggtgccggtggacgagtggttctgcccggaatgtgctgcgcctggtgttgtccttgccgctgatgcgggtcccgtgagtgaggaggaggtctccctgctcttggctgatgtggtgcccaccaccagcaggcttcggcctcgagcaggtaggacccgggcgatagccaggacacggcagagtgagagagtgagagcaaccgtgaaccggaaccggatctccacggccaggagggtccagcacacaccagggcgcctcgggtcttccctgctggatgaagccatcgaggctgtggcgactggcctgagcactgccgtgtatcagcgccccctgacgccgcgcactcccgcccgacggaagaggaagacaagaagacggaagaaagtgccgggaagaaagaaaaccccgtccggaccatccgcaaaaagtaagagctcagcgacaagatctaagaaacgccaacatcgagtgaagaagagaagagggaagaaggtaaagagtgaagccaccactcgctctcgaatcgcgcggacgctgggcctgcgcaggcctgttcacagcagctgcatcccgtcagtgttgaagccagtggagccctctttggggctgctgagagcggatattggagctgcctctctgtctctgtttggagatccttatgagctggatcccttcgacagcagtgaagagctttctgcaaaccctctttcccctctgagtgccaagagacgggctctgtcccggtcagccctgcagtcccaccagcccgtggccaggcccgtctccgtggggctttccaggaggcgcctccctgccgcggtgccagagccagacttggaggaggagccagtgcctgacctgctgggcagcatcctgtcgggccagagcctcctgatgctgggcagcagtgatgtcatcatccaccgcgacggctccctcagcgccaagagggcggctccagtttcttttcagcgaaactcaggcagtctgtccagaggggaagaaggattcaagggctgcctgcagccccgagcactgccctccgggagcccggcccaaggcccgtcaggaaacaggccacagagcacagggctcagctgtcaaggcaggtcccgcacccccgcccgcaccgcgggggcgcctgtgaggctggacttgccagcagcccctggggcggttcaggctcggaacttgtcaaatgggagtgtgcctggcttcagacagagccacagcccctggttcaacggcaccaacaagcacaccttgccccttgcctctgccgcgtctaagatctcaagcagagattctaagcccccatgtcgcagtgtggtgccggggcctcccctgaagccagcgcccagaagaacagacatctctgagctacccaggataccaaagatcaggagagatgacggtggtggcagacgggatgcggccccggcccacgggcagagcattgagatccccagtgcctgcatcagccgactgactggcagggagggcaccgggcagccagggcgaggcacacgggcagagagcgaggccagcagcagggtgccccgggagcccggggtgcacacgggcagctcccggcccccagcccccagctcccatggcagtttggccccactgggaccatcaagagggaaaggggtcgggtcgacctttgagagcttccggatcaatattcctggaaacatggcacattccagccagctctccagccctggcttctgtaacacgttccggcctgtggacgataaggagcagaggaaggagaacccctcacccctcttctccatcaagaagacgaagcagctgcggagcgaggtctacgacccatccgaccccaccggctccgactccagcgcccctggcagcagccccgagaggtctggccccggcctcctgccctctgagatcacacgaaccatctccatcaacagcccgaaggcccagacggtgcaggctgtgcgctgcgtcacctcctacacggtggagagcatctttggtacagagcccgaaccccctctcggaccgtcctccgccatgtccaagcttccgggggtgcagtggcctgcccgagggggccctctgacacggagcgagaggagcccacagagagccagggcctgggctgccccggctgcggaggccatcccccccagagccctgggatgaggaggatggggcgtcttgcagcaccttctttggctctgaggagcggacggtgacctgtgtgactgtcgtggagccggaagccccacccagcccggacgtgctgcaggctgccacccacagagtcgtggagctcaggcccccttcccggtcccgctccacatccagctcccgcagcaggaagaaggccaagaggaagagggtgtccagggagcacggacggacgcgctctgggacgcgctctgaatccagggacaggagctcgaggtcagcgtcaccatcagtgggtgaggagcgccccaggaggcagcggtccaaggccaagagccggcggtcctccagtgaccgctccagcagccgagagcgagctaagaggaagaaagccaaggacaagagcagggagcacaggcggggcccctggggccacagccggaggacgtcccggtcgcggtcggggagccctggcagctcttcctatgagcactatgagagtaggaagaagaagaaaaggagatcagcgtccagacctcggggaagggagtgctcccccaccagcagcctggagaggctctgcaggcacaagcatcagcgggaacgcagccacgagcggccagacaggaaggagagtgtggcgtggccccgagaccggaggaagcggaggtcccggtccccaagctcggagcacagggcacgggagcacaggcggcctcggtcccgtgagaagtggccgcagacccggtcccattccccagagaggaagggggctgtgagggaggcttccccagcgccccttgcacagggggagccagggcgggaagacctccccaccaggttgccagccttgggggaagcacatgtctcgccggaggtggctacggccgacaaggcccccctgcaggctccccctgtcctggaggtggcagctgagtgtgagccggacgacctggacctggattatggcgactccgtggaggccggacacgtctttgatgatttctcaagcgacgccgttttcatccagctcgatgacatgagctcgccaccttctcccgaaagcacagactcttccccggagcgagacttcccactgaagcctgcgttgcccccagccagcctggccgtggccgccatccagagggaggtgtcattgatgcacgatgaagacccttcgcagcccccacccctgccagagggcacccaggagccacatttgctcaggccggacgcgggtttacagccccggcctgccgcctgccccggcccagccctcaagcatcccaccctgcgcactggtcagccagcccacggtccagttcatccttcaggggagcctgccgctagtgggctgtggggcagcacagaccctggccccagtgcccgctgccctgaccccagcctcagagccagccagtcaagccactgcagccagcaactcggaggagaagaccccggcccccaggctagctgcggagaaaaccaagaaggaggagtacatgaagaagctgcacatgcaggagcgtgctgtggaggaggtgaagctggccatcaagcccttctaccagaagagggaggtgaccaaggaggagtacaaggacatcctgcgcaaggccgtgcagaagatctgccacagcaagagtggagagatcaaccccgtgaaggtggccaacctggtgaaggcgtacgtggacaagtacaggcacatgcgcaggcacaagaaaccagaggccggggaggagccgcccacgcagggggccgagggctgaggccaggcaatcacgggctatgcccggggagctgtcgggagtggcgggaatcggggccatgcccggggagctgtcgggagtggcgggaatcggggccatgcccggggagctgtcgggagtggcgggaaatggggggcatcaccatgcctgccgtcgggttcctgcgctgacacctggtctgtgcacctgtgttgctcacagttgaaaactggacacttttgtatgtatattatagagacactgtttccattctaatttatcaaaaatggattatctttagaaacctcttgattgacttactacttggaagataaagcacttggtgatcaagaggggctcctggtggggtggcgcgtccttgataaatctctaggtggcctcccgccaacagctgctgtgtacctttggctctgaattaggaatatctttactttctcttttccaattatg

SEQ ID NO: 736308 - DNA, 3128 bp, Homo sapiens; identical to SEQ ID NO: 387235

SEQ ID NO: 736309 - DNA, 2844 bp, Homo sapiens; identical to SEQ ID NO: 387239

SEQ ID NO: 736310 - DNA, 5688 bp, Homo sapiens
gagcgcacggcggcggcagaggcggcggcggccgggcctaggagcgactctcggtcgtgcagcggcggcgagcgctcgcgagcggctgcgggacgcgaggtttccggagctgagctcaatgtgcagcaatggatgacgacagcctggatgagcttgtggcccggagcccagggccggatggacacccacaggtcggccctgcggacccggcaggtgactttgaagaaagcagcgtgggcagcagtggggactctggggacgacagtgacagcgagcatggagatggcacagacggagaagacgagggggcgtctgaggaggaagacctggaagacagatctggttccgaggattctgaagacgacggggagacattgctggaggtagcgggtactcaggggaaactggaagccgctggctctttcaattctgatgatgatgcagagagctgcccaatctgtctcaacgcattcagagaccaggccgtggggacgccggagaactgtgcccattacttctgcctggactgcattgtcgaatggtccaagaatgccaattcctgtccagttgatcgaactctatttaagtgcatttgtattcgagctcaatttggtggtaaaatcttaaaaaagatcccagtggagaacaccaaagcgagcgaggaggaggaggacccgaccttctgtgaggtgtgcggcaggagcgaccgtgaggacaggcttttgctctgcgacggctgcgatgcggggtaccacatggaatgcttggacccccctctccaggaggtgccggtggacgagtggttctgcccggaatgtgctgcgcctggtgttgtccttgccgctgatgcgggtcccgtgagtgaggaggaggtctccctgctcttggctgatgtggtgcccaccaccagcaggcttcggcctcgagcaggtaggacccgggcgatagccaggacacggcagagtgagagagtgagagcaaccgtgaaccggaaccggatctccacggccaggagggtccagcacacaccagggcgcctcgggtcttccctgctggatgaagccatcgaggctgtggcgactggcctgagcactgccgtgtatcagcgccccctgacgccgcgcactcccgcccgacggaagaggaagacaagaagacggaagaaagtgccgggaagaaagaaaaccccgtccggaccatccgcaaaaagtaagagctcagcgacaagatctaagaaacgccaacatcgagtgaagaagagaagagggaagaaggtaaagagtgaagccaccactcgctctcgaatcgcgcggacgctgggcctgcgcaggcctgttcacagcagctgcatcccgtcagtgttgaagccagtggagccctctttggggctgctgagagcggatattggagctgcctctctgtctctgtttggagatccttatgagctggatcccttcgacagcagtgaagagctttctgcaaaccctctttcccctctgagtgccaagagacgggctctgtcccggtcagccctgcagtcccaccagcccgtggccaggcccgtctccgtggggctttccaggaggcgcctccctgccgcggtgccagagccagacttggaggaggagccagtgcctgacctgctgggcagcatcctgtcgggccagagcctcctgatgctgggcagcagtgatgtcatcatccaccgcgacggctccctcagcgccaagagggcggctccagtttcttttcagcgaaactcaggcagtctgtccagaggggaagaaggattcaagggctgcctgcagccccgagcactgccctccgggagcccggcccaaggcccgtcaggaaacaggccacagagcacagggctcagctgtcaaggcaggtcccgcacccccgcccgcaccgcgggggcgcctgtgaggctggacttgccagcagcccctggggcggttcaggctcggaacttgtcaaatgggagtgtgcctggcttcagacagagccacagcccctggttcaacggcaccaacaagcacaccttgccccttgcctctgccgcgtctaagatctcaagcagagattctaagcccccatgtcgcagtgtggtgccggggcctcccctgaagccagcgcccagaagaacagacatctctgagctacccaggataccaaagatcaggagagatgacggtggtggcagacgggatgcggccccggcccacgggcagagcattgagatccccagtgcctgcatcagccgactgactggcagggagggcaccgggcagccagggcgaggcacacgggcagagagcgaggccagcagcagggtgccccgggagcccggggtgcacacgggcagctcccggcccccagcccccagctcccatggcagtttggccccactgggaccatcaagagggaaaggggtcgggtcgacctttgagagcttccggatcaatattcctggaaacatggcacattccagccagctctccagccctggcttctgtaacacgttccggcctgtggacgataaggagcagaggaaggagaacccctcacccctcttctccatcaagaagacgaagcagctgcggagcgaggtctacgacccatccgaccccaccggctccgactccagcgcccctggcagcagccccgagaggtctggccccggcctcctgccctctgagatcacacgaaccatctccatcaacagcccgaaggcccagacggtgcaggctgtgcgctgcgtcacctcctacacggtggagagcatctttggtacagagcccgaaccccctctcggaccgtcctccgccatgtccaagcttccgggggtgcagtggcctgcccgagggggccctctgacacggagcgagaggagcccacagagagccagggcctgggctgccccggctgcggaggccatcccccccagagccctgggatgaggaggatggggcgtcttgcagcaccttctttggctctgaggagcggacggtgacctgtgtgactgtcgtggagccggaagccccacccagcccggacgtgctgcaggctgccacccacagagtcgtggagctcaggcccccttcccggtcccgctccacatccagctcccgcagcaggaagaaggccaagaggaagagggtgtccagggagcacggacggacgcgctctgggacgcgctctgaatccagggacaggagctcgaggtcagcgtcaccatcagtgggtgaggagcgccccaggaggcagcggtccaaggccaagagccggcggtcctccagtgaccgctccagcagccgagagcgagctaagaggaagaaagccaaggacaagagcagggagcacaggcggggcccctggggccacagccggaggacgtcccggtcgcggtcggggagccctggcagctcttcctatgagcactatgagagtaggaagaagaagaaaaggagatcagcgtccagacctcggggaagggagtgctcccccaccagcagcctggagaggctctgcaggcacaagcatcagcgggaacgcagccacgagcggccagacaggaaggagagtgtggcgtggccccgagaccggaggaagcggaggtcccggtccccaagctcggagcacagggcacgggagcacaggcggcctcggtcccgtgagaagtggccgcagacccggtcccattccccagagaggaagggggctgtgagggaggcttccccagcgccccttgcacagggggagccagggcgggaagacctccccaccaggttgccagccttgggggaagcacatgtctcgccggaggtggctacggccgacaaggcccccctgcaggctccccctgtcctggaggtggcagctgagtgtgagccggacgacctggacctggattatggcgactccgtggaggccggacacgtctttgatgatttctcaagcgacgccgttttcatccagctcgatgacatgagctcgccaccttctcccgaaagcacagactcttccccggagcgagacttcccactgaagcctgcgttgcccccagccagcctggccgtggccgccatccagagggaggtgtcattgatgcacgatgaagacccttcgcagcccccacccctgccagagggcacccaggagccacatttgctcaggccggacgcggctgagaaggctgaggcacccagttccccggatgtggcgcctgcggggaaggaagacagcccctctgcgagtgggagggtacaggaggcagcccggcctgaggaggtggtttcgcagacccccctgctgcggtccagagccctggtgaagcgggtcacctggaacctgcaggagtcggagagcagcgcccccgccgaggacagagccccccgggcaccacttcacaggccacagaagccccgagaaggagcctgggacatggaggatgtggcccccacaggggtcaggcaggcgttctccgagctgccctttcccagtcacgtgcttccggaacccgggttcccagacacagacccctctcaggtgggtgtctgggctggagggctgtgggccgtgggcagtggcctggcacccgtgccacacacaccacactaggctggggctgaggcctcacagctcctgggcacagagctgctagctgtagggcccagtgctcagcaggggtgtccctcccaggtttacagccccggcctgccgcctgccccggcccagccctcaagcatcccaccctgcgcactggtcagccagcccacggtccagttcatccttcaggggagcctgccgctagtgggctgtggggcagcacagaccctggccccagtgcccgctgccctgaccccagcctcagagccagccagtcaagccactgcagccagcaactcggaggagaagaccccggcccccaggctagctgcggagaaaaccaagaaggaggagtacatgaagaagctgcacatgcaggagcgtgctgtggaggaggtgaagctggccatcaagcccttctaccagaagagggaggtgaccaaggaggagtacaaggacatcctgcgcaaggccgtgcagaagatctgccacagcaagagtggagagatcaaccccgtgaaggtggccaacctggtgaaggcgtacgtggacaagtacaggcacatgcgcaggcacaagaaaccagaggccggggaggagccgcccacgcagggggccgagggctgaggccaggcaatcacgggctatgcccggggagctgtcgggagtggcgggaatcggggccatgcccggggagctgtcgggagtggcgggaatcggggccatgcccggggagctgtcgggagtggcgggaaatggggggcatcaccatgcctgccgtcgggttcctgcgctgacacctggtctgtgcacctgtgttgctcacagttgaaaactggacacttttgtatgtatattatagagacactgtttccattctaatttatcaaaaatggattatctttagaaacctcttgattgacttactacttggaagataaagcacttggtgatcaagaggggctcctggtggggtggcgcgtccttgataaatctctaggtggcctcccgccaacagctgctgtgtacctttggctctgaattaggaatatctttactttctcttttccaattatg

SEQ ID NO: 736311 - DNA, 5192 bp, Homo sapiens
gagcgcacggcggcggcagaggcggcggcggccgggcctaggagcgactctcggtcgtgcagcggcggcgagcgctcgcgagcggctgcgggacgcgaggtttccggagctgagctcaatgtgcagcaatggatgacgacagcctggatgagcttgtggcccggagcccagggccggatggacacccacaggtcggccctgcggacccggcaggtgactttgaagaaagcagcgtgggcagcagtggggactctggggacgacagtgacagcgagcatggagatggcacagacggagaagacgagggggcgtctgaggaggaagacctggaagacagatctggttccgaggattctgaagacgacggggagacattgctggaggtagcgggtactcaggggaaactggaagccgctggctctttcaattctgatgatgatgcagagagctgcccaatctgtctcaacgcattcagagaccaggccgtggggacgccggagaactgtgcccattacttctgcctggactgcattgtcgaatggtccaagaatgccaattcctgtccagttgatcgaactctatttaagtgcatttgtattcgagctcaatttggtggtaaaatcttaaaaaagatcccagtggagaacaccaaagcgagcgaggaggaggaggacccgaccttctgtgaggtgtgcggcaggagcgaccgtgaggacaggcttttgctctgcgacggctgcgatgcggggtaccacatggaatgcttggacccccctctccaggaggtgccggtggacgagtggttctgcccggaatgtgctgcgcctggtgttgtccttgccgctgatgcgggtcccgtgagtgaggaggaggtctccctgctcttggctgatgtggtgcccaccaccagcaggcttcggcctcgagcaggtaggacccgggcgatagccaggacacggcagagtgagagagtgagagcaaccgtgaaccggaaccggatctccacggccaggagggtccagcacacaccagggcgcctcgggtcttccctgctggatgaagccatcgaggctgtggcgactggcctgagcactgccgtgtatcagcgccccctgacgccgcgcactcccgcccgacggaagaggaagacaagaagacggaagaaagtgccgggaagaaagaaaaccccgtccggaccatccgcaaaaagtaagagctcagcgacaagatctaagaaacgccaacatcgagtgaagaagagaagagggaagaaggtaaagagtgaagccaccactcgctctcgaatcgcgcggacgctgggcctgcgcaggcctgttcacagcagctgcatcccgtcagtgttgaagccagtggagccctctttggggctgctgagagcggatattggagctgcctctctgtctctgtttggagatccttatgagctggatcccttcgacagcagtgaagagctttctgcaaaccctctttcccctctgagtgccaagagacgggctctgtcccggtcagccctgcagtcccaccagcccgtggccaggcccgtctccgtggggctttccaggaggcgcctccctgccgcggtgccagagccagacttggaggaggagccagtgcctgacctgctgggcagcatcctgtcgggccagagcctcctgatgctgggcagcagtgatgtcatcatccaccgcgacggctccctcagcgccaagagggcggctccagtttcttttcagcgaaactcaggcagtctgtccagaggggaagaaggattcaagggctgcctgcagccccgagcactgccctccgggagcccggcccaaggcccgtcaggaaacaggccacagagcacagggctcagctgtcaaggcaggtcccgcacccccgcccgcaccgcgggggcgcctgtgaggctggacttgccagcagcccctggggcggttcaggctcggaacttgtcaaatgggagtgtgcctggcttcagacagagccacagcccctggttcaacggcaccaacaagcacaccttgccccttgcctctgccgcgtctaagatctcaagcagagattctaagcccccatgtcgcagtgtggtgccggggcctcccctgaagccagcgcccagaagaacagacatctctgagctacccaggataccaaagatcaggagagatgacggtggtggcagacgggatgcggccccggcccacgggcagagcattgagatccccagtgcctgcatcagccgactgactggcagggagggcaccgggcagccagggcgaggcacacgggcagagagcgaggccagcagcagggtgccccgggagcccggggtgcacacgggcagctcccggcccccagcccccagctcccatggcagtttggccccactgggaccatcaagagggaaaggggtcgggtcgacctttgagagcttccggatcaatattcctggaaacatggcacattccagccagctctccagccctggcttctgtaacacgttccggcctgtggacgataaggagcagaggaaggagaacccctcacccctcttctccatcaagaagacgaagcagctgcggagcgaggtctacgacccatccgaccccaccggctccgactccagcgcccctggcagcagccccgagaggtctggccccggcctcctgccctctgagatcacacgaaccatctccatcaacagcccgaaggcccagacggtgcaggctgtgcgctgcgtcacctcctacacggtggagagcatctttggtacagagcccgaaccccctctcggaccgtcctccgccatgtccaagcttccgggggtgcagtggcctgcccgagggggccctctgacacggagcgagaggagcccacagagagccagggcctgggctgccccggctgcggaggccatcccccccagagccctgggatgaggaggatggggcgtcttgcagcaccttctttggctctgaggagcggacggtgacctgtgtgactgtcgtggagccggaagccccacccagcccggacgtgctgcaggctgccacccacagagtcgtggagctcaggcccccttcccggtcccgctccacatccagctcccgcagcaggaagaaggccaagaggaagagggtgtccagggagcacggacggacgcgctctgggacgcgctctgaatccagggacaggagctcgaggtcagcgtcaccatcagtgggtgaggagcgccccaggaggcagcggtccaaggccaagagccggcggtcctccagtgaccgctccagcagccgagagcgagctaagaggaagaaagccaaggacaagagcagggagcacaggcggggcccctggggccacagccggaggacgtcccggtcgcggtcggggagccctggcagctcttcctatgagcactatgagagtaggaagaagaagaaaaggagatcagcgtccagacctcggggaagggagtgctcccccaccagcagcctggagaggctctgcaggcacaagcatcagcgggaacgcagccacgagcggccagacaggaaggagagtgtggcgtggccccgagaccggaggaagcggaggtcccggtccccaagctcggagcacagggcacgggagcacaggcggcctcggtcccgtgagaagtggccgcagacccggtcccattccccagagaggaagggggctgtgagggaggcttccccagcgccccttgcacagggggagccagggcgggaagacctccccaccaggttgccagccttgggggaagcacatgtctcgccggaggtggctacggccgacaaggcccccctgcaggctccccctgtcctggaggtggcagctgagtgtgagccggacgacctggacctggattatggcgactccgtggaggccggacacgtctttgatgatttctcaagcgacgccgttttcatccagctcgatgacatgagctcgccaccttctcccgaaagcacagactcttccccggagcgagacttcccactgaagcctgcgttgcccccagccagcctggccgtggccgccatccagagggaggtgtcattgatgcacgatgaagacccttcgcagcccccacccctgccagagggcacccaggagccacatttgctcaggccggacgcggctgagaaggctgaggcacccagttccccggatgtggcgcctgcggggaaggaagacagcccctctgcgagtgggagggtacaggaggcagcccggcctgaggaggtggtttcgcagacccccctgctgcggtccagagccctggtgaagcgggtcacctggaacctgcaggagtcggagagcagcgcccccgccgaggacagagccccccgggcaccacttcacaggccacagaagccccgagaaggagcctgggacatggaggatgtggcccccacaggggtcaggcaggcgttctccgagctgccctttcccagtcacgtgcttccggaacccgggttcccagacacagacccctctcaggtttacagccccggcctgccgcctgccccggcccagccctcaagcatcccaccaagcccttctaccagaagagggaggtgaccaaggaggagtacaaggacatcctgcgcaaggccgtgcagaagatctgccacagcaagagtggagagatcaaccccgtgaaggtggccaacctggtgaaggcgtacgtggacaagtacaggcacatgcgcaggcacaagaaaccagaggccggggaggagccgcccacgcagggggccgagggctgaggccaggcaatcacgggctatgcccggggagctgtcgggagtggcgggaaatggggggcatcaccatgcctgccgtcgggttcctgcgctgacacctggtctgtgcacctgtgttgctcacagttgaaaactggacacttttgtatgtatattatagagacactgtttccattctaatttatcaaaaatggattatctttagaaacctcttgattgacttactacttggaagataaagcacttggtgatcaagaggggctcctggtggggtggcgcgtccttgataaatctctaggtggcctcccgccaacagctgctgtgtacctttggctctgaattaggaatatctttactttctcttttccaattatg

SEQ ID NO: 736312 - DNA, 2305 bp, Homo sapiens
gtctatctactgaatataataagaacatgtttttcccaccttggtttggtttccttgtggcatagactgtagcaaggaatggaagttttccttccaatattcccagtgccagaacagcatctggcacacaaaggcattcaatatgagatggtaaattaatggacaaatgaatgatgaactaatgagtagaaaaatatataatgtatgtaaacacatttatctttcctgataagtacatgctctttgtttcaaatattttatttaattttataattcagctgttaaattattgaactctatatagcctctgtagcaatgaccaaagctttgttgagaatcatttttagtcagagcactgtttttcctccattttcctccatgggtttctcttccagtaacaaatgtgatccaaagaaatgtaagcatagacatgaaaagggataatgccgcctttaaaactgttttctagtttgttgttagaagttataaaaatacacaggaacacagcattcacttgaaaataaatttttaggcattttaaatagattaaagcagaagaaagagtgagaaagtaaccattctaaattcttaaaaagagaatagcacctatgaaaatgaaataaagaatcatgaataacatcaggaagtcaggaaatgcagaccaacagtaaaagaatgctattaatgtccaaatgacttatttttattttgtgcagcaaaactcatcagatttatctgccaaacccaaattctcaaagcctttcaacccactgcaaaacaaaggccattatgcattttctcatactggagattcctccgacaacatcatgctaactcagtttgtctcaaatgaataaggcaaggaatcataaaatcaagaaaaaatttccagaacaacttgacatttagagacaaatgtcaatgaagaaattatgctcagtattcgatcgggttttctgatttaggggtctgggaataaaacaagaatgtctcagtggcttcattactgctcccttttgtcttcaattaaatgaaaagaagatttatttccatgtgatttgattcaaagaaagtgctccataaatgcagaagagtaggttttgttggaaatcgtgtcagttgtaccctgaccataaaatatggtttctattttcataaaacagcattattcacatggcatttccaataatctggattgaaggaagaaaattttatgaaatagctttagataaattaataggccacgttcattttcttgtcaaaaagttactggtggggggatggtgggaaaaagttattagtgcaaatttcctagagaaaaaaccatttctctttcaaattttccagttgaattttatgttcgcttttgcttcttaggttctatcacttaatattgaaagttaatcagaaataaaatgtaaacttctatttcagatagctttgtaaccatttatcagaaagtataataatgtgatatgatatataatgtggtatttttcagtttacaaggcacttccatctggtcctaaaccctgcaaacaaaagtgtcaaggcagacctagtgcagagatgagggcatgggggctcagagaggtaaagtgacttgccaaagattgtgaagccagttaagggaaattggggatttttaggacatttgtctcccagaccatttctacagccaataaaagccttgaaaattacctacatctctagtaaatctttctgaggtcagttacacagttcaccattcccagaattctatgtaagagagaaattaagggagaatttggttgtcagcttccagggaggtaccttaaaacatccttattttctttcataatacaccataggcactttgtggaagttattttcttgtacagccagtgccacttttggatgacatacaaagcagcaggagttgacgctatgtgaagcaacacttctcttccatacttccatcacatttggctcacctacctgagtttcagccgtgaccatagtgcccagaggaacccgagcctttgattcatccttgctgttttgagaggcctagggagtgtctcttagcctcctgacatggaaagccttcatgctatgcaaataaagacagctgggggaacttctagttagtggtggtagattaaataagcatacctgagagaaattcaaagttagacttccacaaggcaccaaggtgcagcacacatgaaatatgaaagtgagaggttcaaaggaaatgactgaggatcagttagatggttctataccccacaaatatgtatgagagtcaacagaattttatgag

SEQ ID NO: 736313 - DNA, 1645 bp, Homo sapiens
atgtggttcgtgactgagccaattctctgggcatttttcctattcttaatgctaatgactatccactgctggtcctcttatctgtttactcaaaaacacaaactgactctcatccttgtgtttcaggatgtcatcagtatagctgacaatatccttaattcagcctcagtaaccaactggacagtcttactgcgggaagaaaagtatgccagctcacggttactagagacattagaaaacatcagcactctggtgcctccgacagctcttcctctgaatttttctcggaaattcattgactggaaagggattccagtgaacaaaagccaactcaaaaggggttacagctatcagattaaaatgtgtccccaaaatacatctattcccatcagaggccgtgtgttaattgggtcagaccaattccagagatcccttccagaaactattatcagcatggcctcgttgactctggggaacattctacccgtttccaaaaatggaaatgctcaggtcaatggacctgtgatatccacggttattcaaaactattccataaatgaagttttcctatttttttccaagatagagtcaaacctgagccagcctcattgtgtgttttgggatttcagtcatttgcagtggaacgatgcaggctgccacctagtgaatgaaactcaagacatcgtgacgtgccaatgtactcacttgacctccttctccatattgatgtcaccttttgtcccctctacaatcttccccgttgtaaaatggatcacctatgtgggactgggtatctccattggaagtctcattttatgcctgatcatcgaggctttgttttggaagcagattaaaaaaagccaaacctctcacacacgtcgtatttgcatggtgaacatagccctgtccctcttgattgctgatgtctggtttattgttggtgccacagtggacaccacggtgaacccttctggagtctgcacagctgctgtgttctttacacacttcttctacctctctttgttcttctggatgctcatgcttggcatcctgctggcttaccggatcatcctcgtgttccatcacatggcccagcatttgatgatggctgttggattttgcctgggttatgggtgccctctcattatatctgtcattaccattgctgtcacgcaacctagcaatacctacaaaaggaaagatgtgtgttggcttaactggtccaatggaagcaaaccactcctggcttttgttgtccctgcactggctattgtggctgtgaacttcgttgtggtgctgctagttctcacaaagctctggaggccgactgttggggaaagactgagtcgggatgacaaggccaccatcatccgcgtggggaagagcctcctcattctgacccctctgctagggctcacctggggctttggaataggaacaatagtggacagccagaatctggcttggcatgttatttttgctttactcaatgcattccaggtgagaacagtaacaataacctattgtattgtcaagtgattggaataagtagagaactcaggcaggtaaaaccactctggagattatctcatctccctgcctccagcaagaccatcagaaaaactgcatggaaacaataaataga

SEQ ID NO: 736314 - DNA, 1422 bp, Homo sapiens
gattgctgatggatcagtgagcctgtgttcatgccagtgagctgctgtggctcagatactgatactttctttccaaacagcataagaagtgattgagccacaagtatactgaaggaagggctccctcgagttgtggtgtgaagagataaatcaccagtcacagactatgcacccgactgctgctgttcagtccagggaaaatgaaagttggagtgctgtggctcatttctttcttcaccttcactgacggccacggtggcttcctggggaaaaatgatggcatcaaaacaaaaaaagaactcattgtgaataagaaaaaacatctaggcccagtcgaagaatatcagctgctgcttcaggtgacctatagagattccaaggagaaaagagatttgagaaattttctgaagctcttgaagcctccattattatggtcacatgggctaattagaattatcagagcaaaggctaccacagactgcaacagcctgaatggagtcctgcagtgtacctgtgaagacagctacacctggtttcctccctcatgccttgatccccagaactgctaccttcacacggctggagcactcccaagctgtgaatgtcatctcaacaacctcagccagagtgtcaatttctgtgagagaacaaagatttggggcactttcaaaattaatgaaaggtttacaaatgaccttttgaattcatcttctgctatatactccaaatatgcaaatggaattgaaattcaacttaaaaaagcatatgaaagaattcaaggttttgagtcggttcaggtcacccaatttcgaatgtcactcttgtcgcccaagttggagtgcaatggcacaatctaggctcactgcaaccctgcaacctctgcctaccgggttcaagagattcccctgcctcagcctcccaagtagctggaattacaggcacctgccaccacatccagctaactttttttgtatttttactagagacagggtttcaccatgttggccacactggtctcaaactcctgacctcaggtgatccgcctgcctcggcccccaaagtgctgggattacaggcatgagccaccacatctggcctaggaccttaaatattggaaagcatcctcaaaactgtgggtcagtgagtagaactacaaaacaatagcagtagggcagaaacttgaaagaaggcaggagatcatggtgacagtggatgggaaaaagtgagggttggggataagggttgcgggttgtcgaagggtggattttctccttcagcaactacaggagatatgatgcctcataattcggagccagaagtggggctttgggtgagatatctttgcacagataacatgtatacatcatagttcaaaacccagtagtcattgtttacagcaaataaagaaatatttagtaaatt

SEQ ID NO: 736315 - DNA, 4484 bp, Homo sapiens
gattgctgatggatcagtgagcctgtgttcatgccagtgagctgctgtggctcagatactgatactttctttccaaacagcataagaagtgattgagccacaagtatactgaaggaagggctccctcgagttgtggtgtgaagagataaatcaccagtcacagactatgcacccgactgctgctgttcagtccagggaaaatgaaagttggagtgctgtggctcatttctttcttcaccttcactgacggccacggtggcttcctggggaaaaatgatggcatcaaaacaaaaaaagaactcattgtgaataagaaaaaacatctaggcccagtcgaagaatatcagctgctgcttcaggtgacctatagagattccaaggagaaaagagatttgagaaattttctgaagctcttgaagcctccattattatggtcacatgggctaattagaattatcagagcaaaggctaccacagactgcaacagcctgaatggagtcctgcagtgtacctgtgaagacagctacacctggtttcctccctcatgccttgatccccagaactgctaccttcacacggctggagcactcccaagctgtgaatgtcatctcaacaacctcagccagagtgtcaatttctgtgagagaacaaagatttggggcactttcaaaattaatgaaaggtttacaaatgaccttttgaattcatcttctgctatatactccaaatatgcaaatggaattgaaattcaacttaaaaaagcatatgaaagaattcaaggttttgagtcggttcaggtcacccaatttcggacagttatacacctgtggaacctggtttaacttcactaaatcaaacctataacaagcaggaaaatactctgtaatcaatagaatggacatatcaatacaaagaaatggaagcatcgttgctgggtatgaagttgttggctccagcagtgcatctgaactgctgtcagccattgaacatgttgccgagaaggctaagacagcccttcacaagctgtttccattagaagacggctctttcagagtgttcggaaaagcccagtgtaatgacattgtctttggatttgggtccaaggatgatgaatataccctgccctgcagcagtggctacaggggaaacatcacagccaagtgtgagtcctctgggtggcaggtcatcagggagacttgtgtgctctctctgcttgaagaactgaacaagaatttcagtatgattgtaggcaatgccactgaggcagctgtgtcatccttcgtgcaaaatctttctgtcatcattcggcaaaacccatcaaccacagtggggaatctggcttcggtggtgtcgattctgagcaatatttcatctctgtcactggccagccatttcagggtgtccaattcaacaatggaggatgtcatcagtatagctgacaatatccttaattcagcctcagtaaccaactggacagtcttactgcgggaagaaaagtatgccagctcacggttactagagacattagaaaacatcagcactctggtgcctccgacagctcttcctctgaatttttctcggaaattcattgactggaaagggattccagtgaacaaaagccaactcaaaaggggttacagctatcagattaaaatgtgtccccaaaatacatctattcccatcagaggccgtgtgttaattgggtcagaccaattccagagatcccttccagaaactattatcagcatggcctcgttgactctggggaacattctacccgtttccaaaaatggaaatgctcaggtcaatggacctgtgatatccacggttattcaaaactattccataaatgaagttttcctatttttttccaagatagagtcaaacctgagccagcctcattgtgtgttttgggatttcagtcatttgcagtggaacgatgcaggctgccacctagtgaatgaaactcaagacatcgtgacgtgccaatgtactcacttgacctccttctccatattgatgtcaccttttgtcccctctacaatcttccccgttgtaaaatggatcacctatgtgggactgggtatctccattggaagtctcattttatgcctgatcatcgaggctttgttttggaagcagattaaaaaaagccaaacctctcacacacgtcgtatttgcatggtgaacatagccctgtccctcttgattgctgatgtctggtttattgttggtgccacagtggacaccacggtgaacccttctggagtctgcacagctgctgtgttctttacacacttcttctacctctctttgttcttctggatgctcatgcttggcatcctgctggcttaccggatcatcctcgtgttccatcacatggcccagcatttgatgatggctgttggattttgcctgggttatgggtgccctctcattatatctgtcattaccattgctgtcacgcaacctagcaatacctacaaaaggaaagatgtgtgttggcttaactggtccaatggaagcaaaccactcctggcttttgttgtccctgcactggctattgtggctgtgaacttcgttgtggtgctgctagttctcacaaagctctggaggccgactgttggggaaagactgagtcgggatgacaaggccaccatcatccgcgtggggaagagcctcctcattctgacccctctgctagggctcacctggggctttggaataggaacaatagtggacagccagaatctggcttggcatgttatttttgctttactcaatgcattccagggattttttatcttatgctttggaatactcttggacagtaagctgcgacaacttctgttcaacaagttgtctgccttaagttcttggaagcaaacagaaaagcaaaactcatcagatttatctgccaaacccaaattctcaaagcctttcaacccactgcaaaacaaaggccattatgcattttctcatactggagattcctccgacaacatcatgctaactcagtttgtctcaaatgaataaggcaaggaatcataaaatcaagaaaaaatttccagaacaacttgacatttagagacaaatgtcaatgaagaaattatgctcagtattcgatcgggttttctgatttaggggtctgggaataaaacaagaatgtctcagtggcttcattactgctcccttttgtcttcaattaaatgaaaagaagatttatttccatgtgatttgattcaaagaaagtgctccataaatgcagaagagtaggttttgttggaaatcgtgtcagttgtaccctgaccataaaatatggtttctattttcataaaacagcattattcacatggcatttccaataatctggattgaaggaagaaaattttatgaaatagctttagataaattaataggccacgttcattttcttgtcaaaaagttactggtggggggatggtgggaaaaagttattagtgcaaatttcctagagaaaaaaccatttctctttcaaattttccagttgaattttatgttcgcttttgcttcttaggttctatcacttaatattgaaagttaatcagaaataaaatgtaaacttctatttcagatagctttgtaaccatttatcagaaagtataataatgtgatatgatatataatgtggtatttttcagtttacaaggcacttccatctggtcctaaaccctgcaaacaaaagtgtcaaggcagacctagtgcagagatgagggcatgggggctcagagaggtaaagtgacttgccaaagattgtgaagccagttaagggaaattggggatttttaggacatttgtctcccagaccatttctacagccaataaaagccttgaaaattacctacatctctagtaaatctttctgaggtcagttacacagttcaccattcccagaattctatgtaagagagaaattaagggagaatttggttgtcagcttccagggaggtaccttaaaacatccttattttctttcataatacaccataggcactttgtggaagttattttcttgtacagccagtgccacttttggatgacatacaaagcagcaggagttgacgctatgtgaagcaacacttctcttccatacttccatcacatttggctcacctacctgagtttcagccgtgaccatagtgcccagaggaacccgagcctttgattcatccttgctgttttgagaggcctagggagtgtctcttagcctcctgacatggaaagccttcatgctatgcaaataaagacagctgggggaacttctagttagtggtggtagattaaataagcatacctgagagaaattcaaagttagacttccacaaggcaccaaggtgcagcacacatgaaatatgaaagtgagaggttcaaaggaaatgactgaggatcagttagatggttctataccccacaaatatgtatgagagtcaacagaattttatgag

SEQ ID NO: 736316 - DNA, 4229 bp, Homo sapiens
gattgctgatggatcagtgagcctgtgttcatgccagtgagctgctgtggctcagatactgatactttctttccaaacagcataagaagtgattgagccacaagtatactgaaggaagggctccctcgagttgtggtgtgaagagataaatcaccagtcacagactatgcacccgactgctgctgttcagtccagggaaaatgaaagttggagtgctgtggctcatttctttcttcaccttcactgacggccacggtggcttcctggggaaaaatgatggcatcaaaacaaaaaaagaactcattgtgaataagaaaaaacatctaggcccagtcgaagaatatcagctgctgcttcaggtgacctatagagattccaaggagaaaagagatttgagaaattttctgaagctcttgaagcctccattattatggtcacatgggctaattagaattatcagagcaaaggctaccacagactgcaacagcctgaatggagtcctgcagtgtacctgtgaagacagctacacctggtttcctccctcatgccttgatccccagaactgctaccttcacacggctggagcactcccaagctgtgaatgtcatctcaacaacctcagccagagtgtcaatttctgtgagagaacaaagatttggggcactttcaaaattaatgaaaggtttacaaatgaccttttgaattcatcttctgctatatactccaaatatgcaaatggaattgaaattcaacttaaaaaagcatatgaaagaattcaaggttttgagtcggttcaggtcacccaatttcgcccagtgtaatgacattgtctttggatttgggtccaaggatgatgaatataccctgccctgcagcagtggctacaggggaaacatcacagccaagtgtgagtcctctgggtggcaggtcatcagggagacttgtgtgctctctctgcttgaagaactgaacaagaatttcagtatgattgtaggcaatgccactgaggcagctgtgtcatccttcgtgcaaaatctttctgtcatcattcggcaaaacccatcaaccacagtggggaatctggcttcggtggtgtcgattctgagcaatatttcatctctgtcactggccagccatttcagggtgtccaattcaacaatggaggatgtcatcagtatagctgacaatatccttaattcagcctcagtaaccaactggacagtcttactgcgggaagaaaagtatgccagctcacggttactagagacattagaaaacatcagcactctggtgcctccgacagctcttcctctgaatttttctcggaaattcattgactggaaagggattccagtgaacaaaagccaactcaaaaggggttacagctatcagattaaaatgtgtccccaaaatacatctattcccatcagaggccgtgtgttaattgggtcagaccaattccagagatcccttccagaaactattatcagcatggcctcgttgactctggggaacattctacccgtttccaaaaatggaaatgctcaggtcaatggacctgtgatatccacggttattcaaaactattccataaatgaagttttcctatttttttccaagatagagtcaaacctgagccagcctcattgtgtgttttgggatttcagtcatttgcagtggaacgatgcaggctgccacctagtgaatgaaactcaagacatcgtgacgtgccaatgtactcacttgacctccttctccatattgatgtcaccttttgtcccctctacaatcttccccgttgtaaaatggatcacctatgtgggactgggtatctccattggaagtctcattttatgcctgatcatcgaggctttgttttggaagcagattaaaaaaagccaaacctctcacacacgtcgtatttgcatggtgaacatagccctgtccctcttgattgctgatgtctggtttattgttggtgccacagtggacaccacggtgaacccttctggagtctgcacagctgctgtgttctttacacacttcttctacctctctttgttcttctggatgctcatgcttggcatcctgctggcttaccggatcatcctcgtgttccatcacatggcccagcatttgatgatggctgttggattttgcctgggttatgggtgccctctcattatatctgtcattaccattgctgtcacgcaacctagcaatacctacaaaaggaaagatgtgtgttggcttaactggtccaatggaagcaaaccactcctggcttttgttgtccctgcactggctattgtggctgtgaacttcgttgtggtgctgctagttctcacaaagctctggaggccgactgttggggaaagactgagtcgggatgacaaggccaccatcatccgcgtggggaagagcctcctcattctgacccctctgctagggctcacctggggctttggaataggaacaatagtggacagccagaatctggcttggcatgttatttttgctttactcaatgcattccagggattttttatcttatgctttggaatactcttggacagtaagctgcgacaacttctgttcaacaagttgtctgccttaagttcttggaagcaaacagaaaagcaaaactcatcagatttatctgccaaacccaaattctcaaagcctttcaacccactgcaaaacaaaggccattatgcattttctcatactggagattcctccgacaacatcatgctaactcagtttgtctcaaatgaataaggcaaggaatcataaaatcaagaaaaaatttccagaacaacttgacatttagagacaaatgtcaatgaagaaattatgctcagtattcgatcgggttttctgatttaggggtctgggaataaaacaagaatgtctcagtggcttcattactgctcccttttgtcttcaattaaatgaaaagaagatttatttccatgtgatttgattcaaagaaagtgctccataaatgcagaagagtaggttttgttggaaatcgtgtcagttgtaccctgaccataaaatatggtttctattttcataaaacagcattattcacatggcatttccaataatctggattgaaggaagaaaattttatgaaatagctttagataaattaataggccacgttcattttcttgtcaaaaagttactggtggggggatggtgggaaaaagttattagtgcaaatttcctagagaaaaaaccatttctctttcaaattttccagttgaattttatgttcgcttttgcttcttaggttctatcacttaatattgaaagttaatcagaaataaaatgtaaacttctatttcagatagctttgtaaccatttatcagaaagtataataatgtgatatgatatataatgtggtatttttcagtttacaaggcacttccatctggtcctaaaccctgcaaacaaaagtgtcaaggcagacctagtgcagagatgagggcatgggggctcagagaggtaaagtgacttgccaaagattgtgaagccagttaagggaaattggggatttttaggacatttgtctcccagaccatttctacagccaataaaagccttgaaaattacctacatctctagtaaatctttctgaggtcagttacacagttcaccattcccagaattctatgtaagagagaaattaagggagaatttggttgtcagcttccagggaggtaccttaaaacatccttattttctttcataatacaccataggcactttgtggaagttattttcttgtacagccagtgccacttttggatgacatacaaagcagcaggagttgacgctatgtgaagcaacacttctcttccatacttccatcacatttggctcacctacctgagtttcagccgtgaccatagtgcccagaggaacccgagcctttgattcatccttgctgttttgagaggcctagggagtgtctcttagcctcctgacatggaaagccttcatgctatgcaaataaagacagctgggggaacttctagttagtggtggtagattaaataagcatacctgagagaaattcaaagttagacttccacaaggcaccaaggtgcagcacacatgaaatatgaaagtgagaggttcaaaggaaatgactgaggatcagttagatggttctataccccacaaatatgtatgagagtcaacagaattttatgag

SEQ ID NO: 736317 - DNA, 4381 bp, Homo sapiens
gattgctgatggatcagtgagcctgtgttcatgccagtgagctgctgtggctcagatactgatactttctttccaaacagcataagaagtgattgagccacaagtatactgaaggaagggctccctcgagttgtggtgtgaagagataaatcaccagtcacagactatgcacccgactgctgctgttcagtccagggaaaatgaaagttggagtgctgtggctcatttctttcttcaccttcactgacggccacggtggcttcctggggaaaaatgatggcatcaaaacaaaaaaagaactcattgtgaataagaaaaaacatctaggcccagtcgaagaatatcagctgctgcttcaggtgacctatagagattccaaggagaaaagagatttgagaaattttctgaagctcttgaagcctccattattatggtcacatgggctaattagaattatcagagcaaaggctaccacagactgcaacagcctgaatggagtcctgcagtgtacctgtgaagacagctacacctggtttcctccctcatgccttgatccccagaactgctaccttcacacggctggagcactcccaagctgtgaatgtcatctcaacaacctcagccagagtgtcaatttctgtgagagaacaaagatttggggcactttcaaaattaatgaaaggtttacaaatgaccttttgaattcatcttctgctatatactccaaatatgcaaatggaattgaaattcaacttaaaaaagcatatgaaagaattcaaggttttgagtcggttcaggtcacccaatttcgaaatggaagcatcgttgctgggtatgaagttgttggctccagcagtgcatctgaactgctgtcagccattgaacatgttgccgagaaggctaagacagcccttcacaagctgtttccattagaagacggctctttcagagtgttcggaaaagcccagtgtaatgacattgtctttggatttgggtccaaggatgatgaatataccctgccctgcagcagtggctacaggggaaacatcacagccaagtgtgagtcctctgggtggcaggtcatcagggagacttgtgtgctctctctgcttgaagaactgaacaagaatttcagtatgattgtaggcaatgccactgaggcagctgtgtcatccttcgtgcaaaatctttctgtcatcattcggcaaaacccatcaaccacagtggggaatctggcttcggtggtgtcgattctgagcaatatttcatctctgtcactggccagccatttcagggtgtccaattcaacaatggaggatgtcatcagtatagctgacaatatccttaattcagcctcagtaaccaactggacagtcttactgcgggaagaaaagtatgccagctcacggttactagagacattagaaaacatcagcactctggtgcctccgacagctcttcctctgaatttttctcggaaattcattgactggaaagggattccagtgaacaaaagccaactcaaaaggggttacagctatcagattaaaatgtgtccccaaaatacatctattcccatcagaggccgtgtgttaattgggtcagaccaattccagagatcccttccagaaactattatcagcatggcctcgttgactctggggaacattctacccgtttccaaaaatggaaatgctcaggtcaatggacctgtgatatccacggttattcaaaactattccataaatgaagttttcctatttttttccaagatagagtcaaacctgagccagcctcattgtgtgttttgggatttcagtcatttgcagtggaacgatgcaggctgccacctagtgaatgaaactcaagacatcgtgacgtgccaatgtactcacttgacctccttctccatattgatgtcaccttttgtcccctctacaatcttccccgttgtaaaatggatcacctatgtgggactgggtatctccattggaagtctcattttatgcctgatcatcgaggctttgttttggaagcagattaaaaaaagccaaacctctcacacacgtcgtatttgcatggtgaacatagccctgtccctcttgattgctgatgtctggtttattgttggtgccacagtggacaccacggtgaacccttctggagtctgcacagctgctgtgttctttacacacttcttctacctctctttgttcttctggatgctcatgcttggcatcctgctggcttaccggatcatcctcgtgttccatcacatggcccagcatttgatgatggctgttggattttgcctgggttatgggtgccctctcattatatctgtcattaccattgctgtcacgcaacctagcaatacctacaaaaggaaagatgtgtgttggcttaactggtccaatggaagcaaaccactcctggcttttgttgtccctgcactggctattgtggctgtgaacttcgttgtggtgctgctagttctcacaaagctctggaggccgactgttggggaaagactgagtcgggatgacaaggccaccatcatccgcgtggggaagagcctcctcattctgacccctctgctagggctcacctggggctttggaataggaacaatagtggacagccagaatctggcttggcatgttatttttgctttactcaatgcattccagggattttttatcttatgctttggaatactcttggacagtaagctgcgacaacttctgttcaacaagttgtctgccttaagttcttggaagcaaacagaaaagcaaaactcatcagatttatctgccaaacccaaattctcaaagcctttcaacccactgcaaaacaaaggccattatgcattttctcatactggagattcctccgacaacatcatgctaactcagtttgtctcaaatgaataaggcaaggaatcataaaatcaagaaaaaatttccagaacaacttgacatttagagacaaatgtcaatgaagaaattatgctcagtattcgatcgggttttctgatttaggggtctgggaataaaacaagaatgtctcagtggcttcattactgctcccttttgtcttcaattaaatgaaaagaagatttatttccatgtgatttgattcaaagaaagtgctccataaatgcagaagagtaggttttgttggaaatcgtgtcagttgtaccctgaccataaaatatggtttctattttcataaaacagcattattcacatggcatttccaataatctggattgaaggaagaaaattttatgaaatagctttagataaattaataggccacgttcattttcttgtcaaaaagttactggtggggggatggtgggaaaaagttattagtgcaaatttcctagagaaaaaaccatttctctttcaaattttccagttgaattttatgttcgcttttgcttcttaggttctatcacttaatattgaaagttaatcagaaataaaatgtaaacttctatttcagatagctttgtaaccatttatcagaaagtataataatgtgatatgatatataatgtggtatttttcagtttacaaggcacttccatctggtcctaaaccctgcaaacaaaagtgtcaaggcagacctagtgcagagatgagggcatgggggctcagagaggtaaagtgacttgccaaagattgtgaagccagttaagggaaattggggatttttaggacatttgtctcccagaccatttctacagccaataaaagccttgaaaattacctacatctctagtaaatctttctgaggtcagttacacagttcaccattcccagaattctatgtaagagagaaattaagggagaatttggttgtcagcttccagggaggtaccttaaaacatccttattttctttcataatacaccataggcactttgtggaagttattttcttgtacagccagtgccacttttggatgacatacaaagcagcaggagttgacgctatgtgaagcaacacttctcttccatacttccatcacatttggctcacctacctgagtttcagccgtgaccatagtgcccagaggaacccgagcctttgattcatccttgctgttttgagaggcctagggagtgtctcttagcctcctgacatggaaagccttcatgctatgcaaataaagacagctgggggaacttctagttagtggtggtagattaaataagcatacctgagagaaattcaaagttagacttccacaaggcaccaaggtgcagcacacatgaaatatgaaagtgagaggttcaaaggaaatgactgaggatcagttagatggttctataccccacaaatatgtatgagagtcaacagaattttatgag

SEQ ID NO: 736318 - DNA, 3069 bp, Homo sapiens
gattgctgatggatcagtgagcctgtgttcatgccagtgagctgctgtggctcagatactgatactttctttccaaacagcataagaagtgattgagccacaagtatactgaaggaagggctccctcgagttgtggtgtgaagagataaatcaccagtcacagactatgcacccgactgctgctgttcagtccagggaaaatgaaagttggagtgctgtggctcatttctttcttcaccttcactgacggccacggtggcttcctggggaaaaatgatggcatcaaaacaaaaaaagaactcattgtgaataagaaaaaacatctaggcccagtcgaagaatatcagctgctgcttcaggtgacctatagagattccaaggagaaaagagatttgagaaattttctgaagctcttgaagcctccattattatggtcacatgggctaattagaattatcagagcaaaggctaccacagactgcaacagcctgaatggagtcctgcagtgtacctgtgaagacagctacacctggtttcctccctcatgccttgatccccagaactgctaccttcacacggctggagcactcccaagctgtgaatgtcatctcaacaacctcagccagagtgtcaatttctgtgagagaacaaagatttggggcactttcaaaattaatgaaaggtttacaaatgaccttttgaattcatcttctgctatatactccaaatatgcaaatggaattgaaattcaacttaaaaaagcatatgaaagaattcaaggttttgagtcggttcaggtcacccaatttcgaaatggaagcatcgttgctgggtatgaagttgttggctccagcagtgcatctgaactgctgtcagccattgaacatgttgccgagaaggctaagacagcccttcacaagctgtttccattagaagacggctctttcagagtgttcggaaaagcccagtgtaatgacattgtctttggatttgggtccaaggatgatgaatataccctgccctgcagcagtggctacaggggaaacatcacagccaagtgtgagtcctctgggtggcaggtcatcagggagacttgtgtgctctctctgcttgaagaactgaacaagaatttcagtatgattgtaggcaatgccactgaggcagctgtgtcatccttcgtgcaaaatctttctgtcatcattcggcaaaacccatcaaccacagtggggaatctggcttcggtggtgtcgattctgagcaatatttcatctctgtcactggccagccatttcagggtgtccaattcaacaatggaggatgtcatcagtatagctgacaatatccttaattcagcctcagtaaccaactggacagtcttactgcgggaagaaaagtatgccagctcacggttactagagacattagaaaacatcagcactctggtgcctccgacagctcttcctctgaatttttctcggaaattcattgactggaaagggattccagtgaacaaaagccaactcaaaaggggttacagctatcagattaaaatgtgtccccaaaatacatctattcccatcagaggccgtgtgttaattgggtcagaccaattccagagatcccttccagaaactattatcagcatggcctcgttgactctggggaacattctacccgtttccaaaaatggaaatgctcaggtcaatggacctgtgatatccacggttattcaaaactattccataaatgaagttttcctatttttttccaagatagagtcaaacctgagccagcctcattgtgtgttttgggatttcagtcatttgcagtggaacgatgcaggctgccacctagtgaatgaaactcaagacatcgtgacgtgccaatgtactcacttgacctccttctccatattgatgtcaccttttgtcccctctacaatcttccccgttgtaaaatggatcacctatgtgggactgggtatctccattggaagtctcattttatgcctgatcatcgaggctttgttttggaagcagattaaaaaaagccaaacctctcacacacgtcgtatttgcatggtgaacatagccctgtccctcttgattgctgatgtctggtttattgttggtgccacagtggacaccacggtgaacccttctggagtctgcacagctgctgtgttctttacacacttcttctacctctctttgttcttctggatgctcatgcttggcatcctgctggcttaccggatcatcctcgtgttccatcacatggcccagcatttgatgatggctgttggattttgcctgggttatgggtgccctctcattatatctgtcattaccattgctgtcacgcaacctagcaatacctacaaaaggaaagatgtgtgttggcttaactggtccaatggaagcaaaccactcctggcttttgttgtccctgcactggctattgtggctgtgaacttcgttgtggtgctgctagttctcacaaagctctggaggccgactgttggggaaagactgagtcgggatgacaaggccaccatcatccgcgtggggaagagcctcctcattctgacccctctgctagggctcacctggggctttggaataggaacaatagtggacagccagaatctggcttggcatgttatttttgctttactcaatgcattccagggattttttatcttatgctttggaatactcttggacagtaagctgcgacaacttctgttcaacaagttgtctgccttaagttcttggaagcaaacagaaaagcaaaactcatcagatttatctgccaaacccaaattctcaaagcctttcaacccactgcaaaacaaaggccattatgcattttctcatactggagattcctccgacaacatcatgctaactcagtttgtctcaaatgaataaggcaaggaatcataaaatcaagaaaaaatttccagaacaacttgacatttagagacaaatgtcaatgaagaaattatgctcagtattcgatcgggttttctgatttaggggtctggtcaactgtgccggtccgctg

SEQ ID NO: 736319 - DNA, 3366 bp, Homo sapiens
cattagaacacaccatacaaatgttagttctatatggccaagacatctgatttaaatttgatgaaacacagcatgtcattgttttctagaacttaaccattttcgcttctagaatttcagtatgattgtaggcaatgccactgaggcagctgtgtcatccttcgtgcaaaatctttctgtcatcattcggcaaaacccatcaaccacagtggggaatctggcttcggtggtgtcgattctgagcaatatttcatctctgtcactggccagccatttcagggtgtccaattcaacaatggaggatgtcatcagtatagctgacaatatccttaattcagcctcagtaaccaactggacagtcttactgcgggaagaaaagtatgccagctcacggttactagagacattagaaaacatcagcactctggtgcctccgacagctcttcctctgaatttttctcggaaattcattgactggaaagggattccagtgaacaaaagccaactcaaaaggggttacagctatcagattaaaatgtgtccccaaaatacatctattcccatcagaggccgtgtgttaattgggtcagaccaattccagagatcccttccagaaactattatcagcatggcctcgttgactctggggaacattctacccgtttccaaaaatggaaatgctcaggtcaatggacctgtgatatccacggttattcaaaactattccataaatgaagttttcctatttttttccaagatagagtcaaacctgagccagcctcattgtgtgttttgggatttcagtcatttgcagtggaacgatgcaggctgccacctagtgaatgaaactcaagacatcgtgacgtgccaatgtactcacttgacctccttctccatattgatgtcaccttttgtcccctctacaatcttccccgttgtaaaatggatcacctatgtgggactgggtatctccattggaagtctcattttatgcctgatcatcgaggctttgttttggaagcagattaaaaaaagccaaacctctcacacacgtcgtatttgcatggtgaacatagccctgtccctcttgattgctgatgtctggtttattgttggtgccacagtggacaccacggtgaacccttctggagtctgcacagctgctgtgttctttacacacttcttctacctctctttgttcttctggatgctcatgcttggcatcctgctggcttaccggatcatcctcgtgttccatcacatggcccagcatttgatgatggctgttggattttgcctgggttatgggtgccctctcattatatctgtcattaccattgctgtcacgcaacctagcaatacctacaaaaggaaagatgtgtgttggcttaactggtccaatggaagcaaaccactcctggcttttgttgtccctgcactggctattgtggctgtgaacttcgttgtggtgctgctagttctcacaaagctctggaggccgactgttggggaaagactgagtcgggatgacaaggccaccatcatccgcgtggggaagagcctcctcattctgacccctctgctagggctcacctggggctttggaataggaacaatagtggacagccagaatctggcttggcatgttatttttgctttactcaatgcattccagggattttttatcttatgctttggaatactcttggacagtaagctgcgacaacttctgttcaacaagttgtctgccttaagttcttggaagcaaacagaaaagcaaaactcatcagatttatctgccaaacccaaattctcaaagcctttcaacccactgcaaaacaaaggccattatgcattttctcatactggagattcctccgacaacatcatgctaactcagtttgtctcaaatgaataaggcaaggaatcataaaatcaagaaaaaatttccagaacaacttgacatttagagacaaatgtcaatgaagaaattatgctcagtattcgatcgggttttctgatttaggggtctgggaataaaacaagaatgtctcagtggcttcattactgctcccttttgtcttcaattaaatgaaaagaagatttatttccatgtgatttgattcaaagaaagtgctccataaatgcagaagagtaggttttgttggaaatcgtgtcagttgtaccctgaccataaaatatggtttctattttcataaaacagcattattcacatggcatttccaataatctggattgaaggaagaaaattttatgaaatagctttagataaattaataggccacgttcattttcttgtcaaaaagttactggtggggggatggtgggaaaaagttattagtgcaaatttcctagagaaaaaaccatttctctttcaaattttccagttgaattttatgttcgcttttgcttcttaggttctatcacttaatattgaaagttaatcagaaataaaatgtaaacttctatttcagatagctttgtaaccatttatcagaaagtataataatgtgatatgatatataatgtggtatttttcagtttacaaggcacttccatctggtcctaaaccctgcaaacaaaagtgtcaaggcagacctagtgcagagatgagggcatgggggctcagagaggtaaagtgacttgccaaagattgtgaagccagttaagggaaattggggatttttaggacatttgtctcccagaccatttctacagccaataaaagccttgaaaattacctacatctctagtaaatctttctgaggtcagttacacagttcaccattcccagaattctatgtaagagagaaattaagggagaatttggttgtcagcttccagggaggtaccttaaaacatccttattttctttcataatacaccataggcactttgtggaagttattttcttgtacagccagtgccacttttggatgacatacaaagcagcaggagttgacgctatgtgaagcaacacttctcttccatacttccatcacatttggctcacctacctgagtttcagccgtgaccatagtgcccagaggaacccgagcctttgattcatccttgctgttttgagaggcctagggagtgtctcttagcctcctgacatggaaagccttcatgctatgcaaataaagacagctgggggaacttctagttagtggtggtagattaaataagcatacctgagagaaattcaaagttagacttccacaaggcaccaaggtgcagcacacatgaaatatgaaagtgagaggttcaaaggaaatgactgaggatcagttagatggttctataccccacaaatatgtatgagagtcaacagaattttatgag

SEQ ID NO: 736320 - DNA, 1734 bp, Homo sapiens
ccagagtataatatactggtgaagtactccttgacctcgaggtgtcatcaaaaatgtgacttcccaagaaaagccttctcccagtttgttaaatcactctgcccttcttattgtctaatgctgcactctgtctcctttacaatattttctatgctgctttccttaagggtaggtgttatgtcagtttctgtcacctctgttgacagaagacttgaatgcaagacctagcatattgctaggcccaaaataggcactcaataaaaccatttgagtgagtggaagaatggatgaaggcaacatgctcatagggaaagagacaggccaaggcagggccattgctacacaatgtgatgggtaccaaggcagagaggtggggtgaggacattgtgttagtctgttttgagctgctataacagaataccacagactgggtaatttataaagaacaggaatttgtttcctcacaggtctggaagtcaggaaatccaagatgaaggcactggcaggttcagttatctggtgaaggtctggtctttttgcttccaagatggcagtttgactgttgcgtattgaggagcgggggaagaatgctgtgtgctcatataacagaaggcagaaggacaaaaagggatgactccctctttgaagcccttttataagggcatctaatcccattcacaagacaggagcccttgtggcctaatcaccttttaaaggccctacctcttaatactgtcacattagcaacacctaagttttggaggagacacattcaaaccatagcaggtgtaaaagacaagcatttaatcagactgtttgtcagtcgataatttttccttccctgcaggagacatgtctatgagtggctgggagacctgtttaattctgggatatagaattaagatggccatctgcctgcaagtagagataagctgcattctccgaaatcaactttgttcatgataaaagtaacattctggcctccatatgccatattctttattgttaatttcttaaacagttaacaaattggttagagaagaggcaggctatctattgccccatcctctacttttttttttttttaaaactaaatacctaatcgttatattgttattcttttgactattattgctctccttaacacatataaaaatagaccaaactgacatgatcatattttataaaaatacgattttcttttcttgaaaaggaaacagaaaaaaggataaatggcttaaattgtctacttatcataactagaattagaaatcccagtctttgtggctgccaaaaaaaaaaaaaaagaataaatgaccaaaaaatgaagtcaaatgcaagtctttcatgactctctccctgtgactgttagtatgaggaaacttaatagttctgaaaataaagatgtaaatttctgcagaatgtaaaacaggataaagtaacaatagccaaaatgtggaaacaacccaaatgttcatccatagatgaatggataaacaaaatgaggtatatatgtacaatggactatgatttagcctaaaaagaagtgcaattcttatatatgctacaacatagatgaaccttgagaacattatactaagtgaaataagccagtcacagaagcacaaatatatgattctatgtatgtgaagaacctagaataggtaaattcatggagacagaaagtagtttccaggggctggtggtaggggagaatagagagttagtgtttaa

SEQ ID NO: 736321 - DNA, 634 bp, Homo sapiens
  misc_feature (603)..(604): n is a, c, g, or t
ccagagtataatatactggtgaagtactccttgacctcgaggtgtcatcaaaaatgtgacttcccaagaaaagccttctcccagtttgttaaatcactctgcccttcttattgtctaatgctgcactctgtctcctttacaatattttctatgctgctttccttaagggtaggtgttatgtcagtttctgtcacctctgttgacagaagacttgaatgcaagacctagcatattgctaggcccaaaataggcactcaataaaaccatttgagtgagtggaagaatggatgaaggcaacatgctcatagggaaagagacaggccaaggcagggccattgctacacaatgtgatgggtaccaaggcagagaggtggggtgaggacattgtgttagtctgttttgagctgctataacagaataccacagactgggtaatttataaagaacaggaatttgtttcctcacaggtctggaagtcaggaaatccaagatgaaggcactggcaggttcagttatctggtgaaggtctggtctttttgcttccaagatggcagtttgactgttgcgtattgaggagcgggggcagggactgcttcagtcganncggccgcgaatttagtagtagtagtcgacc

SEQ ID NO: 736322 - DNA, 504 bp, Homo sapiens
  misc_feature (495)..(496): n is a, c, g, or t
  misc_feature (498)..(498): n is a, c, g, or t
  misc_feature (500)..(503): n is a, c, g, or t
ggactagttagtcaaagtctatttctaaaacatacctccttttcgtcattgcaaaggagaagtacactttactttcaaggctgactttgggcattgagaacacagaaagatgatttcctacattcttagctaattaattttaagtgtagctggaagcctggtgaggcagaacttaaagaagatgctacttcttgacttttaagcagaggcagcaaatcacttacagtaaaaattactcaaggaaatcactcaattggctttttttgctatggaattgtgacttttttcctataatgccctagggaaagaatataactgtacctcccttccttccaatttcttcaatgtccatagctttaaagaagaggtcaaaattttgtataaaggactcaagaacctctcgaaaggacaagctctaagagtccaatctcttaccactctcagcgtcaaggttagggcaccttcattggaaggaaactgcacggtccagttccnntngnnnng

SEQ ID NO: 736323 - DNA, 161 bp, Homo sapiens
  misc_feature (1)..(1): n is a, c, g, or t
  misc_feature (3)..(3): n is a, c, g, or t
ngntggcccactgcactctgtgcaacacagggattcccattgcacaggatggccacagcctctttcaatgatggcattggaagactttcctgttaataagtaattctctagactgcagcagatagaaattgtaatgaatgaagcaacaaccctgccccaaa

SEQ ID NO: 736324 - DNA, 3949 bp, Homo sapiens
caggtgatctacccgcctccacctcccaaagtgttgtgattacaggcgtgagccaccacacccagccctttcactaatttttggcagagttcacaatcccatcctatgtcagaaacttgaacctaacttaagaaattttgagtcatttttttggaggactgaggctttgttctacctactcttgaagaatcctgatgaaatattcaaacacataaagggatggccctggaggtctatcctgcatacctggagagcttctctggtcctgcccaccttgaaagttgcagactttgttgtaacatctatgtgatgagcttccctgtgaagccccatttgacaggtgggccagcagtgttttatcagcactctgatggcccacatttcccaggaaaacttcttgaaacttaccgttgtgggcagtggtcagagcgtgtagttcttatgactgtcttgtttcatctgtggagcacgtgtggagcacgttggtacagcagtttctgtggggtttggcatgggtgattttggttagtaaccatcctccaattgttgcttgtgaaagtcattcataacttgttccttttacttagttttgttgttactgctgttgttgttggtttggttggttttgagaccgggtctggctctgtagcccaagctggaatgcggtggcgcgatcatggctccctgcagcctcaaactcctgggctcaagcaatcctcctgcctcagcctcccaagcagctgggaagataggcacgtgccaccacacccggctaattttttctttattttttttgtagagatgggggtctcactatgttgcccaggctggtctcaaactcctgggctcaagcgatcctttggcctcggcctcccaaagtgcatgagccaccatgcctggcctgtttagttttgtttcaagttgaaatacctttcttgtgttttctaattagaaaagtaatatctactcattgtaaaaactcaaacagtgcagaaatgtagaaagtagaaagtgtaagtccctggttgtcccttctgcctgagacaaccactgctcacagtttgatgtatatccttccagagactctcaaatttaagcaaataatttttattaccatgtctttttatttgaagacgtacatttgcctccaaagttcaacacaagttcaactgaccatatccttccatgacctgaatagatgctatcctttatcacgatgttcaattgcctttgaaagagagtagtccaggtatattcctgatcaaaatttggcatttttgatgatactactctacacagatcagactcatgtgcagaatcgtgcctggagagagaggtttggttaagacagagatttctggaaacattcaaattgcaaatggaaacttgaaacccacaatctaatgaggaatgtactggaaaaataatctgaagagttgacaaattgtgtactagattgaacacatggaatgcaatgcaatgagactttctgcactaaaacttatcctcatatgtacaacaatgatgtgtgtattatataacagtgatgtgtacatttctgacaccccatacataatatacacagtttgtataaatgcatacatttaaaaatatatatgtacaatacagctaacataaaactgtagtacgcctgaaggatattactagtgcctaatattgagtatgagtcactgcgtgttcgcatcaacttggaagtgcagtaattgttataaaattaatcagtgcagccaacattatttatgaatcacatctttgaaactgtgcagtagcatatacatatatatttttaaataacatttttcacagttttccagagttactgttgaaatctgcatcaccaaaaaaaaaaaaagcaagatttttttaacaatgtagacactcttcagacccagtaatctgcgtgtgatttcctatttgtagattcccaagagactttagcagtcaccagccttaatgcatgtacaggatattattgtgacttaatttatctgcagtttttaatccatgtgaaattggaatttataaacggacttggattaaacatgtctgcctttctaaggttgcaaatgttacattaaatgatttatgttgtaaatgagagaagttgagttgtacgtaaaagacatccaccaatttctgtgaatatttttacacggaaacttgagaatcaaaatacgttcaagtcagttgttctggctcccagtttataatctcgaaaagcaatctttttgtttcataaatggcttaaatgtagctcccacagattatcagtatgaagtctgacatttttcatggaaaagaagtatgtttttcttcattataactatagtttactatttgtctttgctatttcctgatacatacacatacgcacacacgcgcgcacatgcatgcacgtatgcacatgcacgctcccagtgtcccagtgaaggctcaacaggaagcttgagaaggtcatctcaatggccacagggttcctgttcaaccagtagccctgggatgccgctttgcttgtcattctttagtgtcacaagttagttccctgacttgtgtgcagtcagggaactgcacacaactgaaaccaacatggtggaatcatgtttgcaatatttggttgagtaaaataagataattttgaactaaagaagacggaggcattagaccagtggcttgacatgaagcatcccctatgtgggagggtaagtttgttaacttcatttttagtcttatctccaacccttttccttatcctcctccccaaactaaagaagcagaaacagcaacaaaagcaaaaccatcccttcacctgatccagcccatgtccttagattcaaatatcctttgtctttttcccattataccatctgacataactcactcgtgtctagagagaaaaatgcagaaagggtttgtttgcagatgggcagttcagttgagtcctcattaaccaggcagaggggtgcagaagaagcctgactcagggtcaccatggagaactcctcatcccagagatgggtgggacaggaacttggctttgcttcaccaaccactgagcttgatactctttcagaggtggtttgtgctaagaaacacccagcagtctttcaagaacgttctcttctgtagctttgcctgctacacagctgaagtctgtccctataagaattatatttgtaaaaagtaatacattttcgaagaaacccggatcaagtggaatcttgaaagtttttttaatgaaaggggaaaaacaacctgaccacataaactgcacttccaaccatttggaaccagagtttatgtcctcattttcccattctcagaagagcacagtttttcaatattacaacttcctggcaaatagcacaagaaatgttcagacttgagatttgtgttccctttgtccagattattctgtatatgtcaccaaaggggttaacttgtttgcttggcatgaggaaaattataaactccgttctcaaactaattacatctgcccacggttttggtttttattattttaattggcactccgaggcagcagggggtaaattttgtgttggctgcaaggggatttaggttcacagctcttactcacagtaatgggaatcaagggattaaatctctgtgtgttactttgaaaatccacctcttacagccaattttatagacattgatctgagggttgaattcagggcactaattgccagtcagtacaagggtcagcatttgtgttgaagcaccaggggtattgatgtagcctgaaaagctgaatcagggacttgggttttgttttgttttgttttttttacccatttttaaaataggaaagctcatccagaaatacttggatctagacatgatataacatagcaccaatgtttaggatttttagagtgctgttgggtaattaaaataatatcaatgttct

SEQ ID NO: 736325 - DNA, 2229 bp, Homo sapiens
tgactccgaggatgactcttctccgaaaggaacattatttatgaatcacatctttgaaactgtgcagtagcatatacatatatatttttaaataacatttttcacagttttccagagttactgttgaaatctgcatcaccaaaaaaaaaaaaagcaagatttttttaacaatgtagacactcttcagacccagtaatctgcgtgtgatttcctatttgtagattcccaagagactttagcagtcaccagccttaatgcatgtacaggatattattgtgacttaatttatctgcagtttttaatccatgtgaaattggaatttataaacggacttggattaaacatgtctgcctttctaaggttgcaaatgttacattaaatgatttatgttgtaaatgagagaagttgagttgtacgtaaaagacatccaccaatttctgtgaatatttttacacggaaacttgagaatcaaaatacgttcaagtcagttgttctggctcccagtttataatctcgaaaagcaatctttttgtttcataaatggcttaaatgtagctcccacagattatcagtatgaagtctgacatttttcatggaaaagaagtatgtttttcttcattataactatagtttactatttgtctttgctatttcctgatacatacacatacgcacacacgcgcgcacatgcatgcacgtatgcacatgcacgctcccagtgtcccagtgaaggctcaacaggaagcttgagaaggtcatctcaatggccacagggttcctgttcaaccagtagccctgggatgccgctttgcttgtcattctttagtgtcacaagttagttccctgacttgtgtgcagtcagggaactgcacacaactgaaaccaacatggtggaatcatgtttgcaatatttggttgagtaaaataagataattttgaactaaagaagacggaggcattagaccagtggcttgacatgaagcatcccctatgtgggagggtaagtttgttaacttcatttttagtcttatctccaacccttttccttatcctcctccccaaactaaagaagcagaaacagcaacaaaagcaaaaccatcccttcacctgatccagcccatgtccttagattcaaatatcctttgtctttttcccattataccatctgacataactcactcgtgtctagagagaaaaatgcagaaagggtttgtttgcagatgggcagttcagttgagtcctcattaaccaggcagaggggtgcagaagaagcctgactcagggtcaccatggagaactcctcatcccagagatgggtgggacaggaacttggctttgcttcaccaaccactgagcttgatactctttcagaggtggtttgtgctaagaaacacccagcagtctttcaagaacgttctcttctgtagctttgcctgctacacagctgaagtctgtccctataagaattatatttgtaaaaagtaatacattttcgaagaaacccggatcaagtggaatcttgaaagtttttttaatgaaaggggaaaaacaacctgaccacataaactgcacttccaaccatttggaaccagagtttatgtcctcattttcccattctcagaagagcacagtttttcaatattacaacttcctggcaaatagcacaagaaatgttcagacttgagatttgtgttccctttgtccagattattctgtatatgtcaccaaaggggttaacttgtttgcttggcatgaggaaaattataaactccgttctcaaactaattacatctgcccacggttttggtttttattattttaattggcactccgaggcagcagggggtaaattttgtgttggctgcaaggggatttaggttcacagctcttactcacagtaatgggaatcaagggattaaatctctgtgtgttactttgaaaatccacctcttacagccaattttatagacattgatctgagggttgaattcagggcactaattgccagtcagtacaagggtcagcatttgtgttgaagcaccaggggtattgatgtagcctgaaaagctgaatcagggacttgggttttgttttgttttgttttttttacccatttttaaaataggaaagctcatccagaaatacttggatctagacatgatataacatagcaccaatgtttaggatttttagagtgctgttgggtaattaaaataatatcaatgttct

SEQ ID NO: 736326 - DNA, 2223 bp, Homo sapiens
gaattgcttattaaataggcatactttatactgtggtttataatttcaaatataacttggggttatggtcctattcactaagagaatgaaagatatccatgagttaaaagaacaaaactaaaaatttcagatctaacaattgaaagaaaattgaggcagtaaatgacctcttttactcttttatgttttacaatattatcatgttatttacagttaatgctgaaataattctcaagtgcaggaatataaatgttaagtggttttatgattccaagctgatatatttcacctgttaaaaattatgctgctaaattagcattagaggccttatgtttggtaattacaagtgtctgggctattggcgcgtctctatatatgtgtgtgctttgttccagtttcttcaaattatctatgtataattgtatgaaatatttaaatagcaaagaagtcaaagaagattgttaaatattcaacaagaatcataaatacctttatatgtattttaaaagtattgggctgttctgaacatgattatgctggtctgtctgccttttagcctgactccttcactcttgtgtgtgaagtctattagcaactttcaataagctaagcaatgttgtaacttgcaaaaaagcctccactctgagaaacagggccttatagagtaggaatgttttcatactgggactactgaaattttgcagatgtgtgcatctgttccatttaaggtgcccttaaatgtgttgaatgtaatgtgttgaatgtttatgtgtaatggctaaagtatctatatgtatgtgcataaaactgtcacaagatgtattctcaggaatactgttacctggagtttgaaaggaataactattaaaaaaaaaagttggggaagattagaaaaaagctcaagataaatgttcaaaatattattaagtacatgactaaaagctaattactacatatgataaatgcagtgttggtaatagtagatcatttcttaagccatgatacttaatgatatttatcttattcagaggaaaaacaaaaaaggtacccacttcccatgtaggaaaaaattagactcagcaaagaggttgcttcttctgaaattagcttttgagagaccttggaataaaccatgtgttatccatgatagtatgactcagatccaattaaaacagtttaaattctggatataggatctcctatagcaaaacattttactttcatttttcagtatttgctgctttctagaattctattagataagctatgtcatttttctgaaaaagaaactgagttattgagtgtattaagacaaggcactgagaactacagtgtcaaaatcaaagggcataaatgggcatggcagtgctggtggaaaaatctgtggtactggtgatctggttagggcctgttgcacaggctgggagtaactggtttgctgtttcaagcctccaagagtaccttaaacaaggtgatagctcctctcttctttagcattatattcctttagtcaacaaagaactttctccactctgctgcccagctctgagagtatctgagatgagaataggatgtgtgtggaggggcttttagggaagaaagggtcataaatgaatagaagtacagtctgaaacatgaattaaatatccttcctcaagttataaaggatactttaatagaacacagtctccagaattcgctgctatcacaccaagtcatgctgttgccctgtgacctcacacttcccattccatggccttgtcttggcagggagtaaaaaatcccacttctttttactttagtgggtctcaactgcagcatttcagaaacaaattttgatttgacactcaggagaataaaaacaagttgagggcagaatgtatttggaaaagcttaagacaaatttactgatattattttatgatcatttaggattacagatcaatttacctccataaatctttgaattgtcactgtgaccacaggatgaaaatcctttattagccattttataggttaaaacaaaaaattgactacacagccgacttccctcagataactatgaagtctattatgagtactgaatgaccaaagaacatggaaaaaatgcatatgaataaatactgaaatgtttatgaaagatatttatgaaagatattaagacttctgtgtttaggtatgcacatatgataaaataaatctaaaaacattaaaaaaaactaa

SEQ ID NO: 736327 - DNA, 2223 bp, Homo sapiens
gaattgcttattaaataggcatactttatactgtggtttataatttcaaatataacttggggttatggtcctattcactaagagaatgaaagatatccatgagttaaaagaacaaaactaaaaatttcagatctaacaattgaaagaaaattgaggcagtaaatgacctcttttactcttttatgttttacaatattatcatgttatttacagttaatgctgaaataattctcaagtgcaggaatataaatgttaagtggttttatgattccaagctgatatatttcacctgttaaaaattatgctgctaaattagcattagaggccttatgtttggtaattacaagtgtctgggctattggcgcgtctctatatatgtgtgtgctttgttccagtttcttcaaattatctatgtataattgtatgaaatatttaaatagcaaagaagtcaaagaagattgttaaatattcaacaagaatcataaatacctttatatgtattttaaaagtattgggctgttctgaacatgattatgctggtctgtctgccttttagcctgactccttcactcttgtgtgtgaagtctattagcaactttcaataagctaagcaatgttgtaacttgcaaaaaagcctccactctgagaaacagggccttatagagtaggaatgttttcatactgggactactgaaattttgcagatgtgtgcatctgttccatttaaggtgcccttaaatgtgttgaatgtaatgtgttgaatgtttatgtgtaatggctaaagtatctatatgtatgtgcataaaactgtcacaagatgtattctcaggaatactgttacctggagtttgaaaggaataactattaaaaaaaaaagttggggaagattagaaaaaagctcaagataaatgttcaaaatattattaagtacatgactaaaagctaattactacatatgataaatgcagtgttggtaatagtagatcatttcttaagccatgatacttaatgatatttatcttattcagaggaaaaacaaaaaaggtacccacttcccatgtaggaaaaaattagactcagcaaagaggttgcttcttctgaaattagcttttgagagaccttggaataaaccatgtgttatccatgatagtatgactcagatccaattaaaacagtttaaattctggatataggatctcctatagcaaaacattttactttcatttttcagtatttgctgctttctagaattctattagataagctatgtcatttttctgaaaaagaaactgagttattgagtgtattaagacaaggcactgagaactacagtgtcaaaatcaaagggcataaatgggcatggcagtgctggtggaaaaatctgtggtactggtgatctggttagggcctgttgcacaggctgggagtaactggtttgctgtttcaagcctccaagagtaccttaaacaaggtgatagctcctctcttctttagcattatattcctttagtcaacaaagaactttctccactctgctgcccagctctgagagtatctgagatgagaataggatgtgtgtggaggggcttttagggaagaaagggtcataaatgaatagaagtacagtctgaaacatgaattaaatatccttcctcaagttataaaggatactttaatagaacacagtctccagaattcgctgctatcacaccaagtcatgctgttgccctgtgacctcacacttcccattccatggccttgtcttggcagggagtaaaaaatcccacttctttttactttagtgggtctcaactgcagcatttcagaaacaaattttgatttgacactcaggagaataaaaacaagttgagggcagaatgtatttggaaaagcttaagacaaatttactgatattattttatgatcatttaggattacagatcaatttacctccataaatctttgaattgtcactgtgaccacaggatgaaaatcctttattagccattttataggttaaaacaaaaaattgactacacagccgacttccctcagataactatgaagtctattatgagtactgaatgaccaaagaacatggaaaaaatgcatatgaataaatactgaaatgtttatgaaagatatttatgaaagatattaagacttctgtgtttaggtatgcacatatgataaaatatttcttaaaccccccccgcccccccc

SEQ ID NO: 736328 - DNA, 2133 bp, Homo sapiens
  misc_feature (1261)..(1261): n is a, c, g, or t
gggaaaggcttcagttatacctcaggtctgcggaaccaccaaagagtgcatttaggcgagaacccttataagtagatgtacatagaggattccatctgggactcagagctttctatccatctgagagccaacacaggagaaaaaccataggaaagtgacatgtaggagggctataggagaaactgatgattttacattttctagtctgcataggaagggaacacctggacgtgtgataaataggttagcacttcagttacaaacttcagtctttaagagtctgttgtgcagcggagtaggctttaaagaaacagtgcagcagtggtttcagtaataatcctcacttccatcagaatctgcctgggagggagcttttacaatgtacaagtggtgagaatgtttccaaggtgctaattatggacatagattctttgtgtgggttgatagctaccaatgggacagtgtagaaacaagtttccacctttctaaaaccagtttggtacatatctttttaaagatcgctttataaaaacaaaaagataacattaacatttattgaaacaagtcactctgagaagaccaggaacaaagttctcttggcagatctgggtgatgtgtgtgtctcacatttttatcatgtttttatgactgttttatcttgcaggtaagctttacagctttcagaggagttgtagtacactacagaaatatgtcttctttccaggttcaaaaagcaaaatctgattggcattgcattgaattattaattaaataaatttattaattggcattgcattgaatttataggttaattttgaaagaatgtggcgtctttgaaatgctgattttttttcactttaaaaaaatgacttttttttttaccactgatagtatttcatatggtccctcagtaatatttcttagagatggttaaaaataggttctgagtcatcttaagcatatttctaggaatttgttttattgctgtcatgaatataatggttttgctccagttcatttcatagtttaacatatcaaatattaggtatcttaaaaatcacaaatgctatttcaccctgcaggttagcagtattaaaatagaatcatcaaatcccccatcagtgggggcgggggggggggttgtagaaacagtctgatatggtttggctctgttccccacccaaatcccatctcaattttaatccccatgtgtcagaggagggccttggtgggagatgattggatcacgagggcagatttntcccttgctgttctcatgatagtgagttctcatgagagctgatggttttaaggtgtagcccttcctcgctgtctctctcctgtccccttgtgaagaaggtccttatttctcttttgcgttctgccatgactaagttttcggaggcctccccagccatgtggaactgtgtgtgagttaaacctctttcctttgcaaattacctagtctcaggtagttctttatagcagtgcaaaaatggacgtaataagtcttatgtacttattggtgagagagaaaatccgtgcattgttttcaaaagaattcattaacgtatcaattcaatttctataacctttgaagtggcagtaaatatgtagtaattgatacttgggagatagttgcccacttgggcaaaaacgcatgcagaaggtggagtttttaaatttaaaacatttttaaaatagcaaatgttaatattccagtttccattggtaggaaattttttagataagttcaggcatatgtatgcaatggaaagccactagaaatcttcaggcacacagataatgacaatgcaggttgctcatgaagtatttagtgaaccaggagagttttagaacaacaattatagcatgaccccattttgttagtatgtttttctgtgtgtatgtttagagcaacagagaaaaaaagatgtgggagaggacatataactacttatctctagtggtgggattctgaatgtataatacatatgttgtacttttatgtattttactttgtaacaaagtatctttcagttttataataacagtagagctattttttataaattagcctgatggaacaatcccttatgattaaagattcatgttgtaacctctaaaaaaaat

SEQ ID NO: 736329 - DNA, 10931 bp, Homo sapiens
  misc_feature (106)..(106): n is a, c, g, or t
  misc_feature (147)..(147): n is a, c, g, or t
  misc_feature (174)..(174): n is a, c, g, or t
  misc_feature (179)..(181): n is a, c, g, or t
  misc_feature (186)..(186): n is a, c, g, or t
  misc_feature (200)..(201): n is a, c, g, or t
gcggggggaggggaggggaggggagggggcgcggggccgcggcagcggagctcgcatcctcggcggggcggctgtgcaggaggcggcgcccgggctcagcgacgancgatcgacgccaaggcgcgcgaccgacgcggctgccggagngatcgcggcctcgagacacgactgcgnacgannngcgcncaggcccgcgcganngcgctccgggggctgaccgcggccggacggcgccccagcaccgggcgagggagcccgcgtcgcgcggaggtcagggagcctgagctggagccagggccccagtgggacctgacccaaagtctgaggtcaagctgggcccagagcctggcctggagctggagcccaaggcacagctggactacccttgtcatgcagaaggagctgggcattgtgccttcctgccctggcatgaagagccccaggccccacctcctgctaccattgctgctgctgctgctgctgctgctgggggctggggtgccaggtgcctggggtcaggctgggagcctggacttgcagattgatgaggagcagccagcgggtacactgattggcgacatcagtgcggggcttccggcaggcacggcagctcctctcatgtacttcatctctgcccaagagggcagcggcgtgggcacagacctggccattgacgaacacagtggggtcgtccgtacagcccgtgtcttggaccgtgagcagcgggaccgctaccgcttcactgcagtcactcctgatggtgccaccgtagaagttacagtgcgagtggctgacatcaacgaccatgctccagccttcccacaggctcgggctgccctgcaggtacctgagcatacagcttttggcacccgctacccactggagcctgctcgtgatgcagatgctgggcgtctgggaacccagggctatgcgctatctggtgatggggctggagagaccttccggctggagacacgccccggtccagatgggactccagtacctgagctggtagttactggggaactggaccgagagaaccgctcacactatatgctacagctggaggcctatgatggtggttcacccccccggagggcccaggccctgctggacgtgacactgctggacatcaatgaccatgccccggctttcaatcagagccgctaccatgctgtggtgtctgagagcctggcccctggcagtcctgtcttgcaggtgttcgcatctgatgccgatgctggtgtcaatggggctgtgacttacgagatcaaccggaggcagagcgagggtgatggacccttctccatcgacgcacacacggggctgctgcagttagagcggccactggactttgagcagcggcgggtccatgaactggtggtgcaagcacgagatggtggggctcaccctgagctgggctcggcctttgtgactgtgcatgtgcgagatgccaatgacaatcagccctccatgactgtcatctttctcagtgcagatggctccccccaagtgtctgaggccgccccacctggacagctcgttgctcgcatctctgtgtcagacccagatgatggtgactttgcccatgtcaatgtgtccctggaaggtggagagggccactttgccctaagcacccaagacagcgtcatctatctggtgtgtgtggctcggcggctggatcgagaggagagggatgcctataacttgagggttacagccacagactcaggctcacctccactgcgggctgaggctgcctttgtgctgcacgtcactgatgtcaacgacaatgcacctgcctttgaccgccagctctaccgacctgagcccctgcctgaggttgcgctgcctggcagctttgtagtgcgggtgactgctcgggatcctgaccaaggcaccaatggtcaggtcacttatagcctagcccctggcgcccacacccactggttctccattgaccccacctcaggcattatcactacggctgcctcactggactatgagttggaacctcagccacagctgattgtggtggccacagatggtggcctgccccctctagcctcctctgccacagttagcgtggccctgcaagatgtgaatgataatgagccccaattccagaggactttctacaatgcctcactgcctgagggcacccagcctggaacttgcttcctgcaggtgacagccacagacgcggatagtggcccatttggcctcctctcctattccttgggtgctggacttgggtcctccggatctcccccattccgcattgatgcccatagcggtgatgtgtgcacaacccggaccctggaccgtgaccaggggccctcaagctttgacttcacagtgacagctgtggatgggggaggcctcaagtccatggtatatgtgaaggtgtttctgtcagacgagaatgacaaccctcctcagttttatccacgggagtatgctgccagtataagtgcccagagtccaccaggcacagctgtgctgaggttgcgtgcccatgaccctgaccagggatcccatgggcgactctcctaccatatcctggctggcaacagccccccactttttaccttggatgagcaatcagggctgttgacagtagcctggcccttggccagacgggccaattctgtggtgcagctggagatcggggctgaggacggaggtggcctacaggcagaacccagtgcccgagtggacatcagcattgtgcctggaacccccacaccacccatatttgagcaactacagtatgttttttctgtgccagaggatgtggcaccaggcaccagtgtgggcatagtccaggcacacaacccaccaggtcgcttggcacctgtgaccctttccctatcaggtggggatccccgaggactcttctccctagatgcggtatcaggactgttgcaaacacttcgccctctggaccgggagctactgggaccagtgttggagctggaggtgcgagcaggcagtggagtgcccccagctttcgctgtagctcgggtgcgtgtgctgctggatgatgtgaatgacaactcccctgcctttcctgcacctgaagacacggtattgctaccaccaaacactgccccagggactcccatctatacactgcgggctcttgaccccgactcaggtgttaacagtcgagtcacctttaccctgcttgctgggggtggtggagccttcaccgtggaccccaccacaggccatgtacggcttatgaggcctctggggccctcaggagggccagcccatgagctggagctggaggcccgggatgggggctccccaccacgcaccagccactttcgactacgggtggtggtacaggatgtgggaacccgtgggctggctccccgattcaacagccctacctaccgtgtggacctgccctcaggcaccactgctggaactcaggtcctgcaagtgcaggcccaagcaccagatgggggccctatcacctatcaccttgcagcagagggagcaagtagcccctttggcctggagccacagagtgggtggctatgggtgcgggcagcactagaccgtgaggcccaggaattgtacatactgaaggtaatggcagtgtctgggtccaaagctgagttggggcagcagacaggcacagccaccgtgagggtcagcatcctcaaccagaatgaacacagtccccgcttgtctgaggatcccaccttcctggctgtggctgagaaccagcccccagggaccagcgtgggccgagtctttgccactgaccgagactcaggacccaatggacgtctgacctacagcctgcaacagctgtctgaagacagcaaggccttccgcatccacccccagactggagaagtgaccacactccaaaccctggaccgtgagcagcagagcagctatcagctcctggtgcaggtgcaggatggagggagcccaccccgcagcaccacaggcactgtgcatgttgcagtgcttgacctcaacgacaacagccccacgttcctgcaggcttcaggagctgctggtgggggcctccctatacaggtaccagaccgcgtgcctccaggaacactggtgacgactctgcaggcgaaggatccagatgagggggagaatgggaccatcttgtacacgctaactggtcctggctcagagcttttctctctgcaccctcactcaggggagctgctcactgcagctcccctgatccgagcagagcggccccactatgtgctgacactgagtgctcatgaccaaggcagccctcctcgaagtgccagcctccagctgctggtgcaggtgcttccctcagctcgcttggccgagccgcccccagatctcgcagagcgggacccagcggcaccagtgcctgtcgtgctgacggtgacagcagctgagggactgcggcccggctctctgttgggctcggtggcagcgccagagcccgcgggtgtgggtgcactcacctacacactggtgggcggtgccgatcccgagggcaccttcgcgctggatgcggcctcagggcgcttgtacctggcgcggcccctggacttcgaagctggcccgccgtggcgcgcgctcacggtacgcgctgaggggccgggaggcgcgggcgcgcggctgctgcgagtgcaggtgcaagtgcaggacgagaatgagcatgcgcccgcctttgcgcgcgacccgctggcgctggcgctgccagagaacccggagcccggcgcagcgctgtacactttccgcgcgtcggacgccgacggccccggccccaatagcgacgtgcgctaccgcctgctgcgccaggagccgcccgtgccggcgcttcgcctggacgcgcgcaccggggcgctcagcgctccgcgcggcctggaccgagagaccactcccgcgctgctgctgctggtggaagccaccgaccggcccgccaacgccagccgccgtcgtgcagcgcgcgtttcagcgcgcgtcttcgtcacggatgagaatgacaacgcgcctgtcttcgcctcgccgtcacgcgtgcgcctcccagaggaccagccgcctgggcccgcggccctgcacgtggtagcccgggacccggatctgggcgaggctgcacgcgtgtcctatcggctggcatctggcggggacggccacttccggctgcactcaagcactggagcgctgtccgtggtgcggccgttggaccgcgaacaacgagctgagcacgtactgacagtggtggcctcagaccacggctccccgccgcgctcggccacgcaggtcctgaccgtcagtgtcgctgacgtcaacgacgaggcgcctactttccagcagcaggagtacagcgtcctcttgcgtgagaacaaccctcctggcacatctctgctcaccctgcgagcaaccgaccccgacgtgggggccaacgggcaagtgacttatggaggcgtctctagcgaaagcttttctctggatcctgacactggtgttctcacgactcttcgggccctggatcgagaggaacaggaggagatcaacctgacagtgtatgcccaggacaggggctcacctcctcagttaacgcatgtcactgttcgagtggctgtggaggatgagaatgaccatgcaccaacctttgggagtgcccatctctctctggaggtgcctgagggccaggacccccagacccttaccatgcttcgggcctctgatccagatgtgggagccaatgggcagttgcagtaccgcatcctagatggggacccatcaggagcctttgtcctagaccttgcttctggagagtttggcaccatgcggccactagacagagaagtggagccagctttccagctgaggatagaggcccgggatggaggccagccagctctcagtgccacgctgcttttgacagtgacagtgctggatgccaatgaccatgctccagcctttcctgtgcctgcctactcggtggaggtgccggaggatgtgcctgcagggaccctgctgctgcagctacaggctcatgaccctgatgctggagctaatggccatgtgacctactacctgggcgccggtacagcaggagccttcctgctggagcccagctctggagaactgcgcacagctgcagccttggacagagaacagtgtcccagctacaccttttctgtgagtgcagtggatggtgcagctgctgggcccctaagcaccacagtgtctgtcaccatcacggtgcgcgatgtcaatgaccatgcacccaccttccccaccagtcctctgcgcctacgtctgccccgcccaggccccagcttcagtaccccaaccctggctctggccacactgagagctgaagatcgtgatgctggtgccaatgcttccattctgtaccggctggcaggcacaccacctcctggcactactgtggactcttacactggtgaaatccgcgtggcccgctctcctgtagctctaggcccccgagatcgtgtcctcttcattgtggccactgatcttggccgtccagctcgctctgccactggtgtgatcattgttggactgcagggggaagctgagcgtggaccccgctttccccgggctagcagtgaggctacgattcgtgagaatgcgcccccagggactcctattgtctcccccagggccgtccatgcaggaggcacaaatggacccatcacctacagcattctcagtgggaatgagaaagggacattgctccatccagcctagtacaggtgccatcacagttcgctcagcagaggggctagacttcgaggtgagtccacggctgcgactggtgctgcaggcagagagtggaggagcctttgccttcactgtgctgaccctgaccctgcaagatgccaacgacaatgctccccgtttcctgcggccccattatgtggccttccttcctgagtcccggcccttggaggggcccctgctgcaggtggaggcggatgacctggatcaaggctctggaggacagatttcctacagtctggctgcatcccagccggcacgtggattgttccacgtagacccaaccacaggcactatcactaccacagccatcctggaccgtgagatctgggctgaaacacggttggtgctgatggccacagacagagggagcccagccctggtgggctcagctaccttgacggtgatggtcatcgacaccaatgacaatcgccccaccatcccccaaccctgggagctccgagtgtcagaagatgcgttattgggctcagagattgcacaggtaacagggaatgatgtggactcaggacccgtgctgtggtatgtgctaagcccatctgggccccaggatcccttcagtgttggccgctatggaggccgtgtctccctcacggggcccctggactttgagcagtgtgaccgctaccagctgcagctgctggcacatgatgggcctcatgagggccgtgccaacctcacagtgcttgtggaggatgtcaatgacaatgcacctgccttctcacagagcctctaccaggtaatgctgcttgagcacacacccccaggcagtgccattctctccgtctctgccactgatcgggactcaggtgccaacggtcacatttcctaccacctggcttcccctgccgatggcttcagtgttgaccccaacaatgggaccctgttcacaatagtgggaacagtggccttgggccatgacgggtcaggagcagtggatgtggtgctggaagcacgagaccacggggctccaggccgggcagcacgagccacagtgcacgtgcagctgcaggaccagaacgaccacgccccgagcttcacattgtcacactaccgtgtggctgtgactgaagacctgccccctggctccactctgctcaccctggaggctacagatgctgatggaagccgcagccatgccgctgtggactacagcatcatcagtggcaactggggccgagtcttccagctggaacccaggctggctgaggctggggagagtgctggaccaggcccccgggcactgggctgcctggtgttgcttgaacctctagactttgaaagcctgacacagtacaatctaacagtggctgcagctgaccgtgggcagccaccccaaagctcagtcgtgccagtcactgtcactgtactagatgtcaatgacaacccacctgtctttacccgagcatcctaccgtgtgacagtacctgaggacacacctgttggagctgagctgctgcatgtagaggcctctgacgctgaccctggccctcatggcctcgtgcgtttcactgtcagctcaggcgacccatcagggctctttgagctggatgagagctcaggcaccttgcgactggcccatgccctggactgtgagacccaggctcgacatcagcttgtagtacaggctgctgaccctgctggtgcacactttgctttggcaccagtgacaattgaggtccaggatgtgaatgatcatggcccagccttcccactgaacttactcagcaccagcgtggccgagaatcagcctccaggcactctcgtgaccactctgcatgcaatcgacggggatgctggggcttttgggaggctccgttacagcctgttggaggctgggccaggacctgagggccgtgaggcatttgcactgaacagctcaacaggggagttgcgtgcgcgagtgccctttgactatgagcacacagaaagcttccggctgctggtgggtgctgctgatgctgggaatctctcagcctctgtcactgtgtcggtgctagtgactggagaggatgagtatgaccctgtatttctggcaccagctttccacttccaagtgcccgaaggtgcccggcgtggccacagcttgggtcacgtgcaggccacagatgaggatgggggtgccgatggcctggttctgtattcccttgccacctcttccccctattttggtattaaccagactacaggagccctgtacctgcgggtggacagtcgggcaccaggcagcggaacagccacctctgggggtgggggccggacccggcgggaagcaccacgggagctgaggctggaggtgatagcacgggggcctctgcctggttcccggagtgccacagtgcctgtgaccgtggatatcacccacaccgcactgggcctggcacctgacctcaacctgctattagtaggggccgtggcagcctccttgggagttgtggtggtgcttgcactggcagccctggtcctaggacttgttcgggcccgtagccgcaaggctgaggcagcccctggcccaatgtcacaggcagcacccctagccagtgactcactgcagaaactgggccgggagccacctagtccaccaccctctgagcacctctatcaccagactcttcccagctatggtgggccaggagctggaggaccctacccccgtggtggctccttggacccttcacattcaagtggccgaggatcagcagaggctgcagaggatgatgagatccgcatgatcaatgagttcccccgtgtggccagtgtggcctcctctctggctgcccgtggccctgactcaggcatccagcaggatgcagatggtctgagtgacacatcctgcgaaccacctgcccctgacacctggtataagggccgaaaggcagggctgctgctgccaggtgcaggagccactctctacagagaggaggggcccccagccactgccacagccttcctggggggctgtggcctgagccctgcacccactggggactatggcttcccagcagatggcaagccatgtgtggcaggtgcgctgacagccattgtggccggcgaggaggagctccgtggcagctataactgggactacctgctgagctggtgccctcagttccaaccactggccagtgtcttcacagagatcgctcggctcaaggatgaagctcggccatgtcccccagctccccgtatcgacccaccacccctcatcactgccgtggcccacccaggagccaagtctgtgccccccaagccagcaaacacagctgcagcccgggccatcttcccaccagcttctcaccgctcccccatcagccatgaaggctccctgtcctcagctgccatgtcccccagcttctcaccctctctgtctcctctggctgctcgctcacccgttgtctcaccatttggggtggcccagggtccctcagcctcagcactcagcgcagagtctggcctggagccacctgatgacacggagctgcacatctagctgtggcccaggctgggccccgacctgggatgcgcacagtgtccccaacgcaggccccactctgagcctgccctgggcagcctcggactatgactggctacggggaggccaccaccaggccccagctctccaccctgaactccccagccccctcagagtactaggaccacagaagccctgttgctcactgacctgtgaccaggtccaatgtggggagaaatatgaaggaggtagcagccctgggttctcctcagtgagggatccctgccctgcaccagcaccctgagatggagctgagactttatttattgggggtagggggatggaggaggtccctccaacatgtttggacccagctcctttgggttccactgacacccctgcccctgcccctgcccagaaccaagtgccatttctcactctggagccttaataaactgcaatttgtatccagtctccagctttgttctatagggatgactggaagacacctggcagagtattgtggatacctcaggaggcacagaggggtggtggggtggggatggcactgggagctcaggagcctagcctgaggctgatgatcacatctctctgcagctattcttttccctctaatatgggcaaagaggccagcagggcc

SEQ ID NO: 736330 - DNA, 3889 bp, Homo sapiens
cgggaggtggacgacctggagcagtgtgtcgctgacgtcaacgacgaggcgcctactttccagcagcaggagtacagcgtcctcttgcgtgagaacaaccctcctggcacatctctgctcaccctgcgagcaaccgaccccgacgtgggggccaacgggcaagtgacttatggaggcgtctctagcgaaagcttttctctggatcctgacactggtgttctcacgactcttcgggccctggatcgagaggaacaggaggagatcaacctgacagtgtatgcccaggacaggggctcacctcctcagttaacgcatgtcactgttcgagtggctgtggaggatgagaatgaccatgcaccaacctttgggagtgcccatctctctctggaggtgcctgagggccaggacccccagacccttaccatgcttcgggcctctgatccagatgtgggagccaatgggcagttgcagtaccgcatcctagatggggacccatcaggagcctttgtcctagaccttgcttctggagagtttggcaccatgcggccactagacagagaagtggagccagctttccagctgaggatagaggcccgggatggaggccagccagctctcagtgccacgctgcttttgacagtgacagtgctggatgccaatgaccatgctccagcctttcctgtgcctgcctactcggtggaggtgccggaggatgtgcctgcagggaccctgctgctgcagctacaggctcatgaccctgatgctggagctaatggccatgtgacctactacctgggcgccggtacagcaggagccttcctgctggagcccagctctggagaactgcgcacagctgcagccttggacagagaacagtgtcccagctacaccttttctgtgagtgcagtggatggtgcagctgctgggcccctaagcaccacagtgtctgtcaccatcacggtgcgcgatgtcaatgaccatgcacccaccttccccaccagtcctctgcgcctacgtctgccccgcccaggccccagcttcagtaccccaaccctggctctggccacactgagagctgaagatcgtgatgctggtgccaatgcttccattctgtaccggctggcaggcacaccacctcctggcactactgtggactcttacactggtgaaatccgcgtggcccgctctcctgtagctctaggcccccgagatcgtgtcctcttcattgtggccactgatcttggccgtccagctcgctctgccactggtgtgatcattgttggactgcagggggaagctgagcgtggaccccgctttccccgggctagcagtgaggctacgattcgtgagaatgcgcccccagggactcctattgtctcccccagggccgtccatgcaggaggcacaaatggacccatcacctacagcattctcagtgggaatgagaaagggacattgctccatccagcctagtacaggtgccatcacagttcgctcagcagaggggctagacttcgaggtgagtccacggctgcgactggtgctgcaggcagagagtggaggagcctttgccttcactgtgctgaccctgaccctgcaagatgctggggcttttgggaggctccgttacagcctgttggaggctgggccaggacctgagggccgtgaggcatttgcactgaacagctcaacaggggagttgcgtgcgcgagtgccctttgactatgagcacacagaaagcttccggctgctggtgggtgctgctgatgctgggaatctctcagcctctgtcactgtgtcggtgctagtgactggagaggatgagtatgaccctgtatttctggcaccagctttccacttccaagtgcccgaaggtgcccggcgtggccacagcttgggtcacgtgcaggccacagatgaggatgggggtgccgatggcctggttctgtattcccttgccacctcttccccctattttggtattaaccagactacaggagccctgtacctgcgggtggacagtcgggcaccaggcagcggaacagccacctctgggggtgggggccggacccggcgggaagcaccacgggagctgaggctggaggtgatagcacgggggcctctgcctggttcccggagtgccacagtgcctgtgaccgtggatatcacccacaccgcactgggcctggcacctgacctcaacctgctattagtaggggccgtggcagcctccttgggagttgtggtggtgcttgcactggcagccctggtcctaggacttgttcgggcccgtagccgcaaggctgaggcagcccctggcccaatgtcacaggcagcacccctagccagtgactcactgcagaaactgggccgggagccacctagtccaccaccctctgagcacctctatcaccagactcttcccagctatggtgggccaggagctggaggaccctacccccgtggtggctccttggacccttcacattcaagtggccgaggatcagcagaggctgcagaggatgatgagatccgcatgatcaatgagttcccccgtgtggccagtgtggcctcctctctggctgcccgtggccctgactcaggcatccagcaggatgcagatggtctgagtgacacatcctgcgaaccacctgcccctgacacctggtataagggccgaaaggcagggctgctgctgccaggtgcaggagccactctctacagagaggaggggcccccagccactgccacagccttcctggggggctgtggcctgagccctgcacccactggggactatggcttcccagcagatggcaagccatgtgtggcaggtgcgctgacagccattgtggccggcgaggaggagctccgtggcagctataactgggactacctgctgagctggtgccctcagttccaaccactggccagtgtcttcacagagatcgctcggctcaaggatgaagcgtggcccacccaggagccaagtctgtgccccccaagccagcaaacacagctgcagcccgggccatcttcccaccagcttctcaccgctcccccatcagccatgaaggctccctgtcctcagctgccatgtcccccagcttctcaccctctctgtctcctctggctgctcgctcacccgttgtctcaccatttggggtggcccagggtccctcagcctcagcactcagcgcagagtctggcctggagccacctgatgacacggagctgcacatctagctgtggcccaggctgggccccgacctgggatgcgcacagtgtccccaacgcaggccccactctgagcctgccctgggcagcctcggactatgactggctacggggaggccaccaccaggccccagctctccaccctgaactccccagccccctcagagtactaggaccacagaagccctgttgctcactgacctgtgaccaggtccaatgtggggagaaatatgaaggaggtagcagccctgggttctcctcagtgagggatccctgccctgcaccagcaccctgagatggagctgagactttatttattgggggtagggggatggaggaggtccctccaacatgtttggacccagctcctttgggttccactgacacccctgcccctgcccctgcccagaaccaagtgccatttctcactctggagccttaataaactgcaatttgtatccagtctccagctttgttctatagggatgactggaagacacctggcagagtattgtggatacctcaggaggcacagaggggtggtggggtggggatggcactgggagctcaggagcctagcctgaggctgatgatcacatctctctgcagctattcttttccctctaatatgggcaaagaggccagcagggcc

SEQ ID NO: 736331 - DNA, 8629 bp, Homo sapiens
  misc_feature (106)..(106): n is a, c, g, or t
  misc_feature (147)..(147): n is a, c, g, or t
  misc_feature (174)..(174): n is a, c, g, or t
  misc_feature (179)..(181): n is a, c, g, or t
  misc_feature (186)..(186): n is a, c, g, or t
  misc_feature (200)..(201): n is a, c, g, or t
gcggggggaggggaggggaggggagggggcgcggggccgcggcagcggagctcgcatcctcggcggggcggctgtgcaggaggcggcgcccgggctcagcgacgancgatcgacgccaaggcgcgcgaccgacgcggctgccggagngatcgcggcctcgagacacgactgcgnacgannngcgcncaggcccgcgcganngcgctccgggggctgaccgcggccggacggcgccccagcaccgggcgagggagcccgcgtcgcgcggaggtcagggagcctgagctggagccagggccccagtgggacctgacccaaagtctgaggtcaagctgggcccagagcctggcctggagctggagcccaaggcacagctggactacccttgtcatgcagaaggagctgggcattgtgccttcctgccctggcatgaagagccccaggccccacctcctgctaccattgctgctgctgctgctgctgctgctgggggctggggtgccaggtgcctggggtcaggctgggagcctggacttgcagattgatgaggagcagccagcgggtacactgattggcgacatcagtgcggggcttccggcaggcacggcagctcctctcatgtacttcatctctgcccaagagggcagcggcgtgggcacagacctggccattgacgaacacagtggggtcgtccgtacagcccgtgtcttggaccgtgagcagcgggaccgctaccgcttcactgcagtcactcctgatggtgccaccgtagaagttacagtgcgagtggctgacatcaacgaccatgctccagccttcccacaggctcgggctgccctgcaggtacctgagcatacagcttttggcacccgctacccactggagcctgctcgtgatgcagatgctgggcgtctgggaacccagggctatgcgctatctggtgatggggctggagagaccttccggctggagacacgccccggtccagatgggactccagtacctgagctggtagttactggggaactggaccgagagaaccgctcacactatatgctacagctggaggcctatgatggtggttcacccccccggagggcccaggccctgctggacgtgacactgctggacatcaatgaccatgccccggctttcaatcagagccgctaccatgctgtggtgtctgagagcctggcccctggcagtcctgtcttgcaggtgttcgcatctgatgccgatgctggtgtcaatggggctgtgacttacgagatcaaccggaggcagagcgagggtgatggacccttctccatcgacgcacacacggggctgctgcagttagagcggccactggactttgagcagcggcgggtccatgaactggtggtgcaagcacgagatggtggggctcaccctgagctgggctcggcctttgtgactgtgcatgtgcgagatgccaatgacaatcagccctccatgactgtcatctttctcagtgcagatggctccccccaagtgtctgaggccgccccacctggacagctcgttgctcgcatctctgtgtcagacccagatgatggtgactttgcccatgtcaatgtgtccctggaaggtggagagggccactttgccctaagcacccaagacagcgtcatctatctggtgtgtgtggctcggcggctggatcgagaggagagggatgcctataacttgagggttacagccacagactcaggctcacctccactgcgggctgaggctgcctttgtgctgcacgtcactgatgtcaacgacaatgcacctgcctttgaccgccagctctaccgacctgagcccctgcctgaggttgcgctgcctggcagctttgtagtgcgggtgactgctcgggatcctgaccaaggcaccaatggtcaggtcacttatagcctagcccctggcgcccacacccactggttctccattgaccccacctcaggcattatcactacggctgcctcactggactatgagttggaacctcagccacagctgattgtggtggccacagatggtggcctgccccctctagcctcctctgccacagttagcgtggccctgcaagatgtgaatgataatgagccccaattccagaggactttctacaatgcctcactgcctgagggcacccagcctggaacttgcttcctgcaggtgacagccacagacgcggatagtggcccatttggcctcctctcctattccttgggtgctggacttgggtcctccggatctcccccattccgcattgatgcccatagcggtgatgtgtgcacaacccggaccctggaccgtgaccaggggccctcaagctttgacttcacagtgacagctgtggatgggggaggcctcaagtccatggtatatgtgaaggtgtttctgtcagacgagaatgacaaccctcctcagttttatccacgggagtatgctgccagtataagtgcccagagtccaccaggcacagctgtgctgaggttgcgtgcccatgaccctgaccagggatcccatgggcgactctcctaccatatcctggctggcaacagccccccactttttaccttggatgagcaatcagggctgttgacagtagcctggcccttggccagacgggccaattctgtggtgcagctggagatcggggctgaggacggaggtggcctacaggcagaacccagtgcccgagtggacatcagcattgtgcctggaacccccacaccacccatatttgagcaactacagtatgttttttctgtgccagaggatgtggcaccaggcaccagtgtgggcatagtccaggcacacaacccaccaggtcgcttggcacctgtgaccctttccctatcaggtggggatccccgaggactcttctccctagatgcggtatcaggactgttgcaaacacttcgccctctggaccgggagctactgggaccagtgttggagctggaggtgcgagcaggcagtggagtgcccccagctttcgctgtagctcgggtgcgtgtgctgctggatgatgtgaatgacaactcccctgcctttcctgcacctgaagacacggtattgctaccaccaaacactgccccagggactcccatctatacactgcgggctcttgaccccgactcaggtgttaacagtcgagtcacctttaccctgcttgctgggggtggtggagccttcaccgtggaccccaccacaggccatgtacggcttatgaggccttggctccccgattcaacagccctacctaccgtgtggacctgccctcaggcaccactgctggaactcaggtcctgcaagtgcaggcccaagcaccagatgggggccctatcacctatcaccttgcagcagagggagcaagtagcccctttggcctggagccacagagtgggtggctatgggtgcgggcagcactagaccgtgaggcccaggaattgtacatactgaaggtaatggcagtgtctgggtccaaagctgagttggggcagcagacaggcacagccaccgtgagggtcagcatcctcaaccagaatgaacacagtccccgcttgtctgaggatcccaccttcctggctgtggctgagaaccagcccccagggaccagcgtgggccgagtctttgccactgaccgagactcaggacccaatggacgtctgacctacagcctgcaacagctgtctgaagacagcaaggccttccgcatccacccccagactggagaagtgaccacactccaaaccctggaccgtgagcagcagagcagctatcagctcctggtgcaggtgcaggatggagggagcccaccccgcagcaccacaggcactgtgcatgttgcagtgcttgacctcaacgacaacagccccacgttcctgcaggcttcaggagctgctggtgggggcctccctatacaggtaccagaccgcgtgcctccaggaacactggtgacgactctgcaggcgaaggatccagatgagggggagaatgggaccatcttgtacacgctaactggtcctggctcagagcttttctctctgcaccctcactcaggggagctgctcactgcagctcccctgatccgagcagagcggccccactatgtgctgacactgagtgctcatgaccaaggcagccctcctcgaagtgccagcctccagctgctggtgcaggtgcttccctcagctcgcttggccgagccgcccccagatctcgcagagcgggacccagcggcaccagtgcctgtcgtgctgacggtgacagcagctgagggactgcggcccggctctctgttgggctcggtggcagcgccagagcccgcgggtgtgggtgcactcacctacacactggtgggcggtgccgatcccgagggcaccttcgcgctggatgcggcctcagggcgcttgtacctggcgcggcccctggacttcgaagctggcccgccgtggcgcgcgctcacggtacgcgctgaggggccgggaggcgcgggcgcgcggctgctgcgagtgcaggtgcaagtgcaggacgagaatgagcatgcgcccgcctttgcgcgcgacccgctggcgctggcgctgccagagaacccggagcccggcgcagcgctgtacactttccgcgcgtcggacgccgacggccccggccccaatagcgacgtgcgctaccgcctgctgcgccaggagccgcccgtgccggcgcttcgcctggacgcgcgcaccggggcgctcagcgctccgcgcggcctggaccgagagaccactcccgcgctgctgctgctggtggaagccaccgaccggcccgccaacgccagccgccgtcgtgcagcgcgcgtttcagcgcgcgtcttcgtcacggatgagaatgacaacgcgcctgtcttcgcctcgccgtcacgcgtgcgcctcccagaggaccagccgcctgggcccgcggccctgcacgtggtagcccgggacccggatctgggcgaggctgcacgcgtgtcctatcggctggcatctggcggggacggccacttccggctgcactcaagcactggagcgctgtccgtggtgcggccgttggaccgcgaacaacgagctgagcacgtactgacagtggtggcctcagaccacggctccccgccgcgctcggccacgcaggtcctgaccgtcagtgtcgctgacgtcaacgacgaggcgcctactttccagcagcaggagtacagcgtcctcttgcgtgagaacaaccctcctggcacatctctgctcaccctgcgagcaaccgaccccgacgtgggggccaacgggcaagtgacttatggaggcgtctctagcgaaagcttttctctggatcctgacactggtgttctcacgactcttcgggccctggatcgagaggaacaggaggagatcaacctgacagtgtatgcccaggacaggggctcacctcctcagttaacgcatgtcactgttcgagtggctgtggaggatgagaatgaccatgcaccaacctttgggagtgcccatctctctctggaggtgcctgagggccaggacccccagacccttaccatgcttcgggcctctgatccagatgtgggagccaatgggcagttgcagtaccgcatcctagatggggacccatcaggagcctttgtcctagaccttgcttctggagagtttggcaccatgcggccactagacagagaagtggagccagctttccagctgaggatagaggcccgggatggaggccagccagctctcagtgccacgctgcttttgacagtgacagtgctggatgccaatgaccatgctccagcctttcctgtgcctgcctactcggtggaggtgccggaggatgtgcctgcagggaccctgctgctgcagctacaggctcatgaccctgatgctggagctaatggccatgtgacctactacctgggcgccggtacagcaggagccttcctgctggagcccagctctggagaactgcgcacagctgcagccttggacagagaacagtgtcccagctacaccttttctgtgagtgcagtggatggtgcagctgctgggcccctaagcaccacagtgtctgtcaccatcacggtgcgcgatgtcaatgaccatgcacccaccttccccaccagtcctctgcgcctacgtctgccccgcccaggccccagcttcagtaccccaaccctggctctggccacactgagagctgaagatcgtgatgctggtgccaatgcttccattctgtaccggctggcaggcacaccacctcctggcactactgtggactcttacactggtgaaatccgcgtggcccgctctcctgtagctctaggcccccgagatcgtgtcctcttcattgtggccactgatcttggccgtccagctcgctctgccactggtgtgatcattgttggactgcagggggaagctgagcgtggaccccgctttccccgggctagcagtgaggctacgattcgtgagaatgcgcccccagggactcctattgtctcccccagggccgtccatgcaggaggcacaaatggacccatcacctacagcattctcagtgggaatgagaaagggacattgctccatccagcctagtacaggtgccatcacagttcgctcagcagaggggctagacttcgaggtgagtccacggctgcgactggtgctgcaggcagagagtggaggagcctttgccttcactgtgctgaccctgaccctgcaagatgccaacgacaatgctccccgtttcctgcggccccattatgtggccttccttcctgagtcccggcccttggaggggcccctgctgcaggtggaggcggatgacctggatcaaggctctggaggacagatttcctacagtctggctgcatcccagccggcacgtggattgttccacgtagacccaaccacaggcactatcactaccacagccatcctggaccgtgagatctgggctgaaacacggttggtgctgatggccacagacagagggagcccagccctggtgggctcagctaccttgacggtgatggtcatcgacaccaatgacaatcgccccaccatcccccaaccctgggagctccgagtgtcagaagatgcgttattgggctcagagattgcacaggtaacagggaatgatgtggactcaggacccgtgctgtggtatgtgctaagcccatctgggccccaggatcccttcagtgttggccgctatggaggccgtgtctccctcacggggcccctggactttgagcagtgtgaccgctaccagctgcagctgctggcacatgatgggcctcatgagggccgtgccaacctcacagtgcttgtggaggatgtcaatgacaatgcacctgccttctcacagagcctctaccaggtaatgctgcttgagcacacacccccaggcagtgccattctctccgtctctgccactgatcgggactcaggtgccaacggtcacatttcctaccacctggcttcccctgccgatggcttcagtgttgaccccaacaatgggaccctgttcacaatagtgggaacagtggccttgggccatgacgggtcaggagcagtggatgtggtgctggaagcacgagaccacggggctccaggccgggcagcacgagccacagtgcacgtgcagctgcaggaccagaacgaccacgccccgagcttcacattgtcacactaccgtgtggctgtgactgaagacctgccccctggctccactctgctcaccctggaggctacagatgctgatggaagccgcagccatgccgctgtggactacagcatcatcagtggcaactggggccgagtcttccagctggaacccaggctggctgaggctggggagagtgctggaccaggcccccgggcactgggctgcctggtgttgcttgaacctctagactttgaaagcctgacacagtacaatctaacagtggctgcagctgaccgtgggcagccaccccaaagctcagtcgtgccagtcactgtcactgtactagatgtcaatgacaacccacctgtctttacccgagcatcctaccgtgtgacagtacctgaggacacacctgttggagctgagctgctgcatgtagaggcctctgacgctgaccctggccctcatggcctcgtgcgtttcactgtcagctcaggcgacccatcagggctctttgagctggatgagagctcaggcaccttgcgactggcccatgccctggactgtgagacccaggctcgacatcagcttgtagtacaggctgctgaccctgctggtgcacactttgctttggcaccagtgacaattgaggtccaggatgtgaatgatcatggcccagccttcccactgaacttactcagcaccagcgtggccgagaatcagcctccaggcactctcgtgaccactctgcatgcaatcgacggggatgctggggcttttgggaggctccgttacagcctgttggaggctgggccaggacctgagggccgtgaggcatttgcactgaacagctcaacaggggagttgcgtgcgcgagtgccctttgactatgagcacacattatggagggatcctcaatcaccca

SEQ ID NO: 736332 - DNA, 8806 bp, Homo sapiens
  misc_feature (106)..(106): n is a, c, g, or t
  misc_feature (147)..(147): n is a, c, g, or t
  misc_feature (174)..(174): n is a, c, g, or t
  misc_feature (179)..(181): n is a, c, g, or t
  misc_feature (186)..(186): n is a, c, g, or t
  misc_feature (200)..(201): n is a, c, g, or t
gcggggggaggggaggggaggggagggggcgcggggccgcggcagcggagctcgcatcctcggcggggcggctgtgcaggaggcggcgcccgggctcagcgacgancgatcgacgccaaggcgcgcgaccgacgcggctgccggagngatcgcggcctcgagacacgactgcgnacgannngcgcncaggcccgcgcganngcgctccgggggctgaccgcggccggacggcgccccagcaccgggcgagggagcccgcgtcgcgcggaggtcagggagcctgagctggagccagggccccagtgggacctgacccaaagtctgaggtcaagctgggcccagagcctggcctggagctggagcccaaggcacagctggactacccttgtcatgcagaaggagctgggcattgtgccttcctgccctggcatgaagagccccaggccccacctcctgctaccattgctgctgctgctgctgctgctgctgggggctggggtgccaggtgcctggggtcaggctgggagcctggacttgcagattgatgaggagcagccagcgggtacactgattggcgacatcagtgcggggcttccggcaggcacggcagctcctctcatgtacttcatctctgcccaagagggcagcggcgtgggcacagacctggccattgacgaacacagtggggtcgtccgtacagcccgtgtcttggaccgtgagcagcgggaccgctaccgcttcactgcagtcactcctgatggtgccaccgtagaagttacagtgcgagtggctgacatcaacgaccatgctccagccttcccacaggctcgggctgccctgcaggtacctgagcatacagcttttggcacccgctacccactggagcctgctcgtgatgcagatgctgggcgtctgggaacccagggctatgcgctatctggtgatggggctggagagaccttccggctggagacacgccccggtccagatgggactccagtacctgagctggtagttactggggaactggaccgagagaaccgctcacactatatgctacagctggaggcctatgatggtggttcacccccccggagggcccaggccctgctggacgtgacactgctggacatcaatgaccatgccccggctttcaatcagagccgctaccatgctgtggtgtctgagagcctggcccctggcagtcctgtcttgcaggtgttcgcatctgatgccgatgctggtgtcaatggggctgtgacttacgagatcaaccggaggcagagcgagggtgatggacccttctccatcgacgcacacacggggctgctgcagttagagcggccactggactttgagcagcggcgggtccatgaactggtggtgcaagcacgagatggtggggctcaccctgagctgggctcggcctttgtgactgtgcatgtgcgagatgccaatgacaatcagccctccatgactgtcatctttctcagtgcagatggctccccccaagtgtctgaggccgccccacctggacagctcgttgctcgcatctctgtgtcagacccagatgatggtgactttgcccatgtcaatgtgtccctggaaggtggagagggccactttgccctaagcacccaagacagcgtcatctatctggtgtgtgtggctcggcggctggatcgagaggagagggatgcctataacttgagggttacagccacagactcaggctcacctccactgcgggctgaggctgcctttgtgctgcacgtcactgatgtcaacgacaatgcacctgcctttgaccgccagctctaccgacctgagcccctgcctgaggttgcgctgcctggcagctttgtagtgcgggtgactgctcgggatcctgaccaaggcaccaatggtcaggtcacttatagcctagcccctggcgcccacacccactggttctccattgaccccacctcaggcattatcactacggctgcctcactggactatgagttggaacctcagccacagctgattgtggtggccacagatggtggcctgccccctctagcctcctctgccacagttagcgtggccctgcaagatgtgaatgataatgagccccaattccagaggactttctacaatgcctcactgcctgagggcacccagcctggaacttgcttcctgcaggtgacagccacagacgcggatagtggcccatttggcctcctctcctattccttgggtgctggacttgggtcctccggatctcccccattccgcattgatgcccatagcggtgatgtgtgcacaacccggaccctggaccgtgaccaggggccctcaagctttgacttcacagtgacagctgtggatgggggaggcctcaagtccatggtatatgtgaaggtgtttctgtcagacgagaatgacaaccctcctcagttttatccacgggagtatgctgccagtataagtgcccagagtccaccaggcacagctgtgctgaggttgcgtgcccatgaccctgaccagggatcccatgggcgactctcctaccatatcctggctggcaacagccccccactttttaccttggatgagcaatcagggctgttgacagtagcctggcccttggccagacgggccaattctgtggtgcagctggagatcggggctgaggacggaggtggcctacaggcagaacccagtgcccgagtggacatcagcattgtgcctggaacccccacaccacccatatttgagcaactacagtatgttttttctgtgccagaggatgtggcaccaggcaccagtgtgggcatagtccaggcacacaacccaccaggtcgcttggcacctgtgaccctttccctatcaggtggggatccccgaggactcttctccctagatgcggtatcaggactgttgcaaacacttcgccctctggaccgggagctactgggaccagtgttggagctggaggtgcgagcaggcagtggagtgcccccagctttcgctgtagctcgggtgcgtgtgctgctggatgatgtgaatgacaactcccctgcctttcctgcacctgaagacacggtattgctaccaccaaacactgccccagggactcccatctatacactgcgggctcttgaccccgactcaggtgttaacagtcgagtcacctttaccctgcttgctgggggtggtggagccttcaccgtggaccccaccacaggccatgtacggcttatgaggccttggctccccgattcaacagccctacctaccgtgtggacctgccctcaggcaccactgctggaactcaggtcctgcaagtgcaggcccaagcaccagatgggggccctatcacctatcaccttgcagcagagggagcaagtagcccctttggcctggagccacagagtgggtggctatgggtgcgggcagcactagaccgtgaggcccaggaattgtacatactgaaggtaatggcagtgtctgggtccaaagctgagttggggcagcagacaggcacagccaccgtgagggtcagcatcctcaaccagaatgaacacagtccccgcttgtctgaggatcccaccttcctggctgtggctgagaaccagcccccagggaccagcgtgggccgagtctttgccactgaccgagactcaggacccaatggacgtctgacctacagcctgcaacagctgtctgaagacagcaaggccttccgcatccacccccagactggagaagtgaccacactccaaaccctggaccgtgagcagcagagcagctatcagctcctggtgcaggtgcaggatggagggagcccaccccgcagcaccacaggcactgtgcatgttgcagtgcttgacctcaacgacaacagccccacgttcctgcaggcttcaggagctgctggtgggggcctccctatacaggtaccagaccgcgtgcctccaggaacactggtgacgactctgcaggcgaaggatccagatgagggggagaatgggaccatcttgtacacgctaactggtcctggctcagagcttttctctctgcaccctcactcaggggagctgctcactgcagctcccctgatccgagcagagcggccccactatgtgctgacactgagtgctcatgaccaaggcagccctcctcgaagtgccagcctccagctgctggtgcaggtgcttccctcagctcgcttggccgagccgcccccagatctcgcagagcgggacccagcggcaccagtgcctgtcgtgctgacggtgacagcagctgagggactgcggcccggctctctgttgggctcggtggcagcgccagagcccgcgggtgtgggtgcactcacctacacactggtgggcggtgccgatcccgagggcaccttcgcgctggatgcggcctcagggcgcttgtacctggcgcggcccctggacttcgaagctggcccgccgtggcgcgcgctcacggtacgcgctgaggggccgggaggcgcgggcgcgcggctgctgcgagtgcaggtgcaagtgcaggacgagaatgagcatgcgcccgcctttgcgcgcgacccgctggcgctggcgctgccagagaacccggagcccggcgcagcgctgtacactttccgcgcgtcggacgccgacggccccggccccaatagcgacgtgcgctaccgcctgctgcgccaggagccgcccgtgccggcgcttcgcctggacgcgcgcaccggggcgctcagcgctccgcgcggcctggaccgagagaccactcccgcgctgctgctgctggtggaagccaccgaccggcccgccaacgccagccgccgtcgtgcagcgcgcgtttcagcgcgcgtcttcgtcacggatgagaatgacaacgcgcctgtcttcgcctcgccgtcacgcgtgcgcctcccagaggaccagccgcctgggcccgcggccctgcacgtggtagcccgggacccggatctgggcgaggctgcacgcgtgtcctatcggctggcatctggcggggacggccacttccggctgcactcaagcactggagcgctgtccgtggtgcggccgttggaccgcgaacaacgagctgagcacgtactgacagtggtggcctcagaccacggctccccgccgcgctcggccacgcaggtcctgaccgtcagtgtcgctgacgtcaacgacgaggcgcctactttccagcagcaggagtacagcgtcctcttgcgtgagaacaaccctcctggcacatctctgctcaccctgcgagcaaccgaccccgacgtgggggccaacgggcaagtgacttatggaggcgtctctagcgaaagcttttctctggatcctgacactggtgttctcacgactcttcgggccctggatcgagaggaacaggaggagatcaacctgacagtgtatgcccaggacaggggctcacctcctcagttaacgcatgtcactgttcgagtggctgtggaggatgagaatgaccatgcaccaacctttgggagtgcccatctctctctggaggtgcctgagggccaggacccccagacccttaccatgcttcgggcctctgatccagatgtgggagccaatgggcagttgcagtaccgcatcctagatggggacccatcaggagcctttgtcctagaccttgcttctggagagtttggcaccatgcggccactagacagagaagtggagccagctttccagctgaggatagaggcccgggatggaggccagccagctctcagtgccacgctgcttttgacagtgacagtgctggatgccaatgaccatgctccagcctttcctgtgcctgcctactcggtggaggtgccggaggatgtgcctgcagggaccctgctgctgcagctacaggctcatgaccctgatgctggagctaatggccatgtgacctactacctgggcgccggtacagcaggagccttcctgctggagcccagctctggagaactgcgcacagctgcagccttggacagagaacagtgtcccagctacaccttttctgtgagtgcagtggatggtgcagctgctgggcccctaagcaccacagtgtctgtcaccatcacggtgcgcgatgtcaatgaccatgcacccaccttccccaccagtcctctgcgcctacgtctgccccgcccaggccccagcttcagtaccccaaccctggctctggccacactgagagctgaagatcgtgatgctggtgccaatgcttccattctgtaccggctggcaggcacaccacctcctggcactactgtggactcttacactggtgaaatccgcgtggcccgctctcctgtagctctaggcccccgagatcgtgtcctcttcattgtggccactgatcttggccgtccagctcgctctgccactggtgtgatcattgttggactgcagggggaagctgagcgtggaccccgctttccccgggctagcagtgaggctacgattcgtgagaatgcgcccccagggactcctattgtctcccccagggccgtccatgcaggaggcacaaatggacccatcacctacagcattctcagtgggaatgagaaagggacattgctccatccagcctagtacaggtgccatcacagttcgctcagcagaggggctagacttcgaggtgagtccacggctgcgactggtgctgcaggcagagagtggaggagcctttgccttcactgtgctgaccctgaccctgcaagatgctggggcttttgggaggctccgttacagcctgttggaggctgggccaggacctgagggccgtgaggcatttgcactgaacagctcaacaggggagttgcgtgcgcgagtgccctttgactatgagcacacagaaagcttccggctgctggtgggtgctgctgatgctgggaatctctcagcctctgtcactgtgtcggtgctagtgactggagaggatgagtatgaccctgtatttctggcaccagctttccacttccaagtgcccgaaggtgcccggcgtggccacagcttgggtcacgtgcaggccacagatgaggatgggggtgccgatggcctggttctgtattcccttgccacctcttccccctattttggtattaaccagactacaggagccctgtacctgcgggtggacagtcgggcaccaggcagcggaacagccacctctgggggtgggggccggacccggcgggaagcaccacgggagctgaggctggaggtgatagcacgggggcctctgcctggttcccggagtgccacagtgcctgtgaccgtggatatcacccacaccgcactgggcctggcacctgacctcaacctgctattagtaggggccgtggcagcctccttgggagttgtggtggtgcttgcactggcagccctggtcctaggacttgttcgggcccgtagccgcaaggctgaggcagcccctggcccaatgtcacaggcagcacccctagccagtgactcactgcagaaactgggccgggagccacctagtccaccaccctctgagcacctctatcaccagactcttcccagctatggtgggccaggagctggaggaccctacccccgtggtggctccttggacccttcacattcaagtggccgaggatcagcagaggctgcagaggatgatgagatccgcatgatcaatgagttcccccgtgtggccagtgtggcctcctctctggctgcccgtggccctgactcaggcatccagcaggatgcagatggtctgagtgacacatcctgcgaaccacctgcccctgacacctggtataagggccgaaaggcagggctgctgctgccaggtgcaggagccactctctacagagaggaggggcccccagccactgccacagccttcctggggggctgtggcctgagccctgcacccactggggactatggcttcccagcagatggcaagccatgtgtggcaggtgcgctgacagccattgtggccggcgaggaggagctccgtggcagctataactgggactacctgctgagctggtgccctcagttccaaccactggccagtgtcttcacagagatcgctcggctcaaggatgaagctcggccatgtcccccagctccccgtatcgacccaccacccctcatcactgccgtggcccacccaggagccaagtctgtgccccccaagccagcaaacacagctgcagcccgggccatcttcccaccagcttctcaccgctcccccatcagccatgaaggctccctgtcctcagctgccatgtcccccagcttctcaccctctctgtctcctctggctgctcgctcacccgttgtctcaccatttggggtggcccagggtccctcagcctcagcactcagcgcagagtctggcctggagccacctgatgacacggagctgcacatctagctgtggcccaggctgggccccgacctgggatgcgcacagtgtccccaacgcaggccccactctgagcctgccctgggcagcctcggactatgactggctacggggaggccaccaccaggccccagctctccaccctgaactccccagccccctcagagtactaggaccacagaagccctgttgctcactgacctgtgaccaggtccaatgtggggagaaatatgaaggaggtagcagccctgggttctcctcagtgagggatccctgccctgcaccagcaccctgagatggagctgagactttatttattgggtccaaacatgttggagggaccgtcgacgcggccgcgaat

SEQ ID NO: 736333 - DNA, 8832 bp, Homo sapiens
  misc_feature (106)..(106): n is a, c, g, or t
  misc_feature (147)..(147): n is a, c, g, or t
  misc_feature (174)..(174): n is a, c, g, or t
  misc_feature (179)..(181): n is a, c, g, or t
  misc_feature (186)..(186): n is a, c, g, or t
  misc_feature (200)..(201): n is a, c, g, or t
gcggggggaggggaggggaggggagggggcgcggggccgcggcagcggagctcgcatcctcggcggggcggctgtgcaggaggcggcgcccgggctcagcgacgancgatcgacgccaaggcgcgcgaccgacgcggctgccggagngatcgcggcctcgagacacgactgcgnacgannngcgcncaggcccgcgcganngcgctccgggggctgaccgcggccggacggcgccccagcaccgggcgagggagcccgcgtcgcgcggaggtcagggagcctgagctggagccagggccccagtgggacctgacccaaagtctgaggtcaagctgggcccagagcctggcctggagctggagcccaaggcacagctggactacccttgtcatgcagaaggagctgggcattgtgccttcctgccctggcatgaagagccccaggccccacctcctgctaccattgctgctgctgctgctgctgctgctgggggctggggtgccaggtgcctggggtcaggctgggagcctggacttgcagattgatgaggagcagccagcgggtacactgattggcgacatcagtgcggggcttccggcaggcacggcagctcctctcatgtacttcatctctgcccaagagggcagcggcgtgggcacagacctggccattgacgaacacagtggggtcgtccgtacagcccgtgtcttggaccgtgagcagcgggaccgctaccgcttcactgcagtcactcctgatggtgccaccgtagaagttacagtgcgagtggctgacatcaacgaccatgctccagccttcccacaggctcgggctgccctgcaggtacctgagcatacagcttttggcacccgctacccactggagcctgctcgtgatgcagatgctgggcgtctgggaacccagggctatgcgctatctggtgatggggctggagagaccttccggctggagacacgccccggtccagatgggactccagtacctgagctggtagttactggggaactggaccgagagaaccgctcacactatatgctacagctggaggcctatgatggtggttcacccccccggagggcccaggccctgctggacgtgacactgctggacatcaatgaccatgccccggctttcaatcagagccgctaccatgctgtggtgtctgagagcctggcccctggcagtcctgtcttgcaggtgttcgcatctgatgccgatgctggtgtcaatggggctgtgacttacgagatcaaccggaggcagagcgagggtgatggacccttctccatcgacgcacacacggggctgctgcagttagagcggccactggactttgagcagcggcgggtccatgaactggtggtgcaagcacgagatggtggggctcaccctgagctgggctcggcctttgtgactgtgcatgtgcgagatgccaatgacaatcagccctccatgactgtcatctttctcagtgcagatggctccccccaagtgtctgaggccgccccacctggacagctcgttgctcgcatctctgtgtcagacccagatgatggtgactttgcccatgtcaatgtgtccctggaaggtggagagggccactttgccctaagcacccaagacagcgtcatctatctggtgtgtgtggctcggcggctggatcgagaggagagggatgcctataacttgagggttacagccacagactcaggctcacctccactgcgggctgaggctgcctttgtgctgcacgtcactgatgtcaacgacaatgcacctgcctttgaccgccagctctaccgacctgagcccctgcctgaggttgcgctgcctggcagctttgtagtgcgggtgactgctcgggatcctgaccaaggcaccaatggtcaggtcacttatagcctagcccctggcgcccacacccactggttctccattgaccccacctcaggcattatcactacggctgcctcactggactatgagttggaacctcagccacagctgattgtggtggccacagatggtggcctgccccctctagcctcctctgccacagttagcgtggccctgcaagatgtgaatgataatgagccccaattccagaggactttctacaatgcctcactgcctgagggcacccagcctggaacttgcttcctgcaggtgacagccacagacgcggatagtggcccatttggcctcctctcctattccttgggtgctggacttgggtcctccggatctcccccattccgcattgatgcccatagcggtgatgtgtgcacaacccggaccctggaccgtgaccaggggccctcaagctttgacttcacagtgacagctgtggatgggggaggcctcaagtccatggtatatgtgaaggtgtttctgtcagacgagaatgacaaccctcctcagttttatccacgggagtatgctgccagtataagtgcccagagtccaccaggcacagctgtgctgaggttgcgtgcccatgaccctgaccagggatcccatgggcgactctcctaccatatcctggctggcaacagccccccactttttaccttggatgagcaatcagggctgttgacagtagcctggcccttggccagacgggccaattctgtggtgcagctggagatcggggctgaggacggaggtggcctacaggcagaacccagtgcccgagtggacatcagcattgtgcctggaacccccacaccacccatatttgagcaactacagtatgttttttctgtgccagaggatgtggcaccaggcaccagtgtgggcatagtccaggcacacaacccaccaggtcgcttggcacctgtgaccctttccctatcaggtggggatccccgaggactcttctccctagatgcggtatcaggactgttgcaaacacttcgccctctggaccgggagctactgggaccagtgttggagctggaggtgcgagcaggcagtggagtgcccccagctttcgctgtagctcgggtgcgtgtgctgctggatgatgtgaatgacaactcccctgcctttcctgcacctgaagacacggtattgctaccaccaaacactgccccagggactcccatctatacactgcgggctcttgaccccgactcaggtgttaacagtcgagtcacctttaccctgcttgctgggggtggtggagccttcaccgtggaccccaccacaggccatgtacggcttatgaggccttggctccccgattcaacagccctacctaccgtgtggacctgccctcaggcaccactgctggaactcaggtcctgcaagtgcaggcccaagcaccagatgggggccctatcacctatcaccttgcagcagagggagcaagtagcccctttggcctggagccacagagtgggtggctatgggtgcgggcagcactagaccgtgaggcccaggaattgtacatactgaaggtaatggcagtgtctgggtccaaagctgagttggggcagcagacaggcacagccaccgtgagggtcagcatcctcaaccagaatgaacacagtccccgcttgtctgaggatcccaccttcctggctgtggctgagaaccagcccccagggaccagcgtgggccgagtctttgccactgaccgagactcaggacccaatggacgtctgacctacagcctgcaacagctgtctgaagacagcaaggccttccgcatccacccccagactggagaagtgaccacactccaaaccctggaccgtgagcagcagagcagctatcagctcctggtgcaggtgcaggatggagggagcccaccccgcagcaccacaggcactgtgcatgttgcagtgcttgacctcaacgacaacagccccacgttcctgcaggcttcaggagctgctggtgggggcctccctatacaggtaccagaccgcgtgcctccaggaacactggtgacgactctgcaggcgaaggatccagatgagggggagaatgggaccatcttgtacacgctaactggtcctggctcagagcttttctctctgcaccctcactcaggggagctgctcactgcagctcccctgatccgagcagagcggccccactatgtgctgacactgagtgctcatgaccaaggcagccctcctcgaagtgccagcctccagctgctggtgcaggtgcttccctcagctcgcttggccgagccgcccccagatctcgcagagcgggacccagcggcaccagtgcctgtcgtgctgacggtgacagcagctgagggactgcggcccggctctctgttgggctcggtggcagcgccagagcccgcgggtgtgggtgcactcacctacacactggtgggcggtgccgatcccgagggcaccttcgcgctggatgcggcctcagggcgcttgtacctggcgcggcccctggacttcgaagctggcccgccgtggcgcgcgctcacggtacgcgctgaggggccgggaggcgcgggcgcgcggctgctgcgagtgcaggtgcaagtgcaggacgagaatgagcatgcgcccgcctttgcgcgcgacccgctggcgctggcgctgccagagaacccggagcccggcgcagcgctgtacactttccgcgcgtcggacgccgacggccccggccccaatagcgacgtgcgctaccgcctgctgcgccaggagccgcccgtgccggcgcttcgcctggacgcgcgcaccggggcgctcagcgctccgcgcggcctggaccgagagaccactcccgcgctgctgctgctggtggaagccaccgaccggcccgccaacgccagccgccgtcgtgcagcgcgcgtttcagcgcgcgtcttcgtcacggatgagaatgacaacgcgcctgtcttcgcctcgccgtcacgcgtgcgcctcccagaggaccagccgcctgggcccgcggccctgcacgtggtagcccgggacccggatctgggcgaggctgcacgcgtgtcctatcggctggcatctggcggggacggccacttccggctgcactcaagcactggagcgctgtccgtggtgcggccgttggaccgcgaacaacgagctgagcacgtactgacagtggtggcctcagaccacggctccccgccgcgctcggccacgcaggtcctgaccgtcagtgtcgctgacgtcaacgacgaggcgcctactttccagcagcaggagtacagcgtcctcttgcgtgagaacaaccctcctggcacatctctgctcaccctgcgagcaaccgaccccgacgtgggggccaacgggcaagtgacttatggaggcgtctctagcgaaagcttttctctggatcctgacactggtgttctcacgactcttcgggccctggatcgagaggaacaggaggagatcaacctgacagtgtatgcccaggacaggggctcacctcctcagttaacgcatgtcactgttcgagtggctgtggaggatgagaatgaccatgcaccaacctttgggagtgcccatctctctctggaggtgcctgagggccaggacccccagacccttaccatgcttcgggcctctgatccagatgtgggagccaatgggcagttgcagtaccgcatcctagatggggacccatcaggagcctttgtcctagaccttgcttctggagagtttggcaccatgcggccactagacagagaagtggagccagctttccagctgaggatagaggcccgggatggaggccagccagctctcagtgccacgctgcttttgacagtgacagtgctggatgccaatgaccatgctccagcctttcctgtgcctgcctactcggtggaggtgccggaggatgtgcctgcagggaccctgctgctgcagctacaggctcatgaccctgatgctggagctaatggccatgtgacctactacctgggcgccggtacagcaggagccttcctgctggagcccagctctggagaactgcgcacagctgcagccttggacagagaacagtgtcccagctacaccttttctgtgagtgcagtggatggtgcagctgctgggcccctaagcaccacagtgtctgtcaccatcacggtgcgcgatgtcaatgaccatgcacccaccttccccaccagtcctctgcgcctacgtctgccccgcccaggccccagcttcagtaccccaaccctggctctggccacactgagagctgaagatcgtgatgctggtgccaatgcttccattctgtaccggctggcaggcacaccacctcctggcactactgtggactcttacactggtgaaatccgcgtggcccgctctcctgtagctctaggcccccgagatcgtgtcctcttcattgtggccactgatcttggccgtccagctcgctctgccactggtgtgatcattgttggactgcagggggaagctgagcgtggaccccgctttccccgggctagcagtgaggctacgattcgtgagaatgcgcccccagggactcctattgtctcccccagggccgtccatgcaggaggcacaaatggacccatcacctacagcattctcagtgggaatgagaaagggacattgctccatccagcctagtacaggtgccatcacagttcgctcagcagaggggctagacttcgaggtgagtccacggctgcgactggtgctgcaggcagagagtggaggagcctttgccttcactgtgctgaccctgaccctgcaagatgctggggcttttgggaggctccgttacagcctgttggaggctgggccaggacctgagggccgtgaggcatttgcactgaacagctcaacaggggagttgcgtgcgcgagtgccctttgactatgagcacacagaaagcttccggctgctggtgggtgctgctgatgctgggaatctctcagcctctgtcactgtgtcggtgctagtgactggagaggatgagtatgaccctgtatttctggcaccagctttccacttccaagtgcccgaaggtgcccggcgtggccacagcttgggtcacgtgcaggccacagatgaggatgggggtgccgatggcctggttctgtattcccttgccacctcttccccctattttggtattaaccagactacaggagccctgtacctgcgggtggacagtcgggcaccaggcagcggaacagccacctctgggggtgggggccggacccggcgggaagcaccacgggagctgaggctggaggtgatagcacgggggcctctgcctggttcccggagtgccacagtgcctgtgaccgtggatatcacccacaccgcactgggcctggcacctgacctcaacctgctattagtaggggccgtggcagcctccttgggagttgtggtggtgcttgcactggcagccctggtcctaggacttgttcgggcccgtagccgcaaggctgaggcagcccctggcccaatgtcacaggcagcacccctagccagtgactcactgcagaaactgggccgggagccacctagtccaccaccctctgagcacctctatcaccagactcttcccagctatggtgggccaggagctggaggaccctacccccgtggtggctccttggacccttcacattcaagtggccgaggatcagcagaggctgcagaggatgatgagatccgcatgatcaatgagttcccccgtgtggccagtgtggcctcctctctggctgcccgtggccctgactcaggcatccagcaggatgcagatggtctgagtgacacatcctgcgaaccacctgcccctgacacctggtataagggccgaaaggcagggctgctgctgccaggtgcaggagccactctctacagagaggaggggcccccagccactgccacagccttcctggggggctgtggcctgagccctgcacccactggggactatggcttcccagcagatggcaagccatgtgtggcaggtgcgctgacagccattgtggccggcgaggaggagctccgtggcagctataactgggactacctgctgagctggtgccctcagttccaaccactggccagtgtcttcacagagatcgctcggctcaaggatgaagctcggccatgtcccccagctccccgtatcgacccaccacccctcatcactgccgtggcccacccaggagccaagtctgtgccccccaagccagcaaacacagctgcagcccgggccatcttcccaccagcttctcaccgctcccccatcagccatgaaggctccctgtcctcagctgccatgtcccccactctccaccctgaactccccagccccctcagagtactaggaccacagaagccctgttgctcactgacctgtgaccaggtccaatgtggggagaaatatgaaggaggtagcagccctgggttctcctcagtgagggatccctgccctgcaccagcaccctgagatggagctgagactttatttattgggggtagggggatggaggaggtccctccaacatgtttggacccagctcctttgggttccactgacacccctgcccctgcccctgcccagaaccaagtgccatttctcactctggagccttaataaactgcaatttgtatccagtctccagctttgttctatagggatgactggaagacacctggcagagtattgtggatacctcaggaggcacagaggggtggtggggtggggatggcactgggagctcaggagcctagcctgaggctgatgatcacatctctctgcagctattcttttccctctaatatgggcaaagaggccagcagggcc

SEQ ID NO: 736334 - DNA, 9045 bp, Homo sapiens
  misc_feature (106)..(106): n is a, c, g, or t
  misc_feature (147)..(147): n is a, c, g, or t
  misc_feature (174)..(174): n is a, c, g, or t
  misc_feature (179)..(181): n is a, c, g, or t
  misc_feature (186)..(186): n is a, c, g, or t
  misc_feature (200)..(201): n is a, c, g, or t
gcggggggaggggaggggaggggagggggcgcggggccgcggcagcggagctcgcatcctcggcggggcggctgtgcaggaggcggcgcccgggctcagcgacgancgatcgacgccaaggcgcgcgaccgacgcggctgccggagngatcgcggcctcgagacacgactgcgnacgannngcgcncaggcccgcgcganngcgctccgggggctgaccgcggccggacggcgccccagcaccgggcgagggagcccgcgtcgcgcggaggtcagggagcctgagctggagccagggccccagtgggacctgacccaaagtctgaggtcaagctgggcccagagcctggcctggagctggagcccaaggcacagctggactacccttgtcatgcagaaggagctgggcattgtgccttcctgccctggcatgaagagccccaggccccacctcctgctaccattgctgctgctgctgctgctgctgctgggggctggggtgccaggtgcctggggtcaggctgggagcctggacttgcagattgatgaggagcagccagcgggtacactgattggcgacatcagtgcggggcttccggcaggcacggcagctcctctcatgtacttcatctctgcccaagagggcagcggcgtgggcacagacctggccattgacgaacacagtggggtcgtccgtacagcccgtgtcttggaccgtgagcagcgggaccgctaccgcttcactgcagtcactcctgatggtgccaccgtagaagttacagtgcgagtggctgacatcaacgaccatgctccagccttcccacaggctcgggctgccctgcaggtacctgagcatacagcttttggcacccgctacccactggagcctgctcgtgatgcagatgctgggcgtctgggaacccagggctatgcgctatctggtgatggggctggagagaccttccggctggagacacgccccggtccagatgggactccagtacctgagctggtagttactggggaactggaccgagagaaccgctcacactatatgctacagctggaggcctatgatggtggttcacccccccggagggcccaggccctgctggacgtgacactgctggacatcaatgaccatgccccggctttcaatcagagccgctaccatgctgtggtgtctgagagcctggcccctggcagtcctgtcttgcaggtgttcgcatctgatgccgatgctggtgtcaatggggctgtgacttacgagatcaaccggaggcagagcgagggtgatggacccttctccatcgacgcacacacggggctgctgcagttagagcggccactggactttgagcagcggcgggtccatgaactggtggtgcaagcacgagatggtggggctcaccctgagctgggctcggcctttgtgactgtgcatgtgcgagatgccaatgacaatcagccctccatgactgtcatctttctcagtgcagatggctccccccaagtgtctgaggccgccccacctggacagctcgttgctcgcatctctgtgtcagacccagatgatggtgactttgcccatgtcaatgtgtccctggaaggtggagagggccactttgccctaagcacccaagacagcgtcatctatctggtgtgtgtggctcggcggctggatcgagaggagagggatgcctataacttgagggttacagccacagactcaggctcacctccactgcgggctgaggctgcctttgtgctgcacgtcactgatgtcaacgacaatgcacctgcctttgaccgccagctctaccgacctgagcccctgcctgaggttgcgctgcctggcagctttgtagtgcgggtgactgctcgggatcctgaccaaggcaccaatggtcaggtcacttatagcctagcccctggcgcccacacccactggttctccattgaccccacctcaggcattatcactacggctgcctcactggactatgagttggaacctcagccacagctgattgtggtggccacagatggtggcctgccccctctagcctcctctgccacagttagcgtggccctgcaagatgtgaatgataatgagccccaattccagaggactttctacaatgcctcactgcctgagggcacccagcctggaacttgcttcctgcaggtgacagccacagacgcggatagtggcccatttggcctcctctcctattccttgggtgctggacttgggtcctccggatctcccccattccgcattgatgcccatagcggtgatgtgtgcacaacccggaccctggaccgtgaccaggggccctcaagctttgacttcacagtgacagctgtggatgggggaggcctcaagtccatggtatatgtgaaggtgtttctgtcagacgagaatgacaaccctcctcagttttatccacgggagtatgctgccagtataagtgcccagagtccaccaggcacagctgtgctgaggttgcgtgcccatgaccctgaccagggatcccatgggcgactctcctaccatatcctggctggcaacagccccccactttttaccttggatgagcaatcagggctgttgacagtagcctggcccttggccagacgggccaattctgtggtgcagctggagatcggggctgaggacggaggtggcctacaggcagaacccagtgcccgagtggacatcagcattgtgcctggaacccccacaccacccatatttgagcaactacagtatgttttttctgtgccagaggatgtggcaccaggcaccagtgtgggcatagtccaggcacacaacccaccaggtcgcttggcacctgtgaccctttccctatcaggtggggatccccgaggactcttctccctagatgcggtatcaggactgttgcaaacacttcgccctctggaccgggagctactgggaccagtgttggagctggaggtgcgagcaggcagtggagtgcccccagctttcgctgtagctcgggtgcgtgtgctgctggatgatgtgaatgacaactcccctgcctttcctgcacctgaagacacggtattgctaccaccaaacactgccccagggactcccatctatacactgcgggctcttgaccccgactcaggtgttaacagtcgagtcacctttaccctgcttgctgggggtggtggagccttcaccgtggaccccaccacaggccatgtacggcttatgaggccttggctccccgattcaacagccctacctaccgtgtggacctgccctcaggcaccactgctggaactcaggtcctgcaagtgcaggcccaagcaccagatgggggccctatcacctatcaccttgcagcagagggagcaagtagcccctttggcctggagccacagagtgggtggctatgggtgcgggcagcactagaccgtgaggcccaggaattgtacatactgaaggtaatggcagtgtctgggtccaaagctgagttggggcagcagacaggcacagccaccgtgagggtcagcatcctcaaccagaatgaacacagtccccgcttgtctgaggatcccaccttcctggctgtggctgagaaccagcccccagggaccagcgtgggccgagtctttgccactgaccgagactcaggacccaatggacgtctgacctacagcctgcaacagctgtctgaagacagcaaggccttccgcatccacccccagactggagaagtgaccacactccaaaccctggaccgtgagcagcagagcagctatcagctcctggtgcaggtgcaggatggagggagcccaccccgcagcaccacaggcactgtgcatgttgcagtgcttgacctcaacgacaacagccccacgttcctgcaggcttcaggagctgctggtgggggcctccctatacaggtaccagaccgcgtgcctccaggaacactggtgacgactctgcaggcgaaggatccagatgagggggagaatgggaccatcttgtacacgctaactggtcctggctcagagcttttctctctgcaccctcactcaggggagctgctcactgcagctcccctgatccgagcagagcggccccactatgtgctgacactgagtgctcatgaccaaggcagccctcctcgaagtgccagcctccagctgctggtgcaggtgcttccctcagctcgcttggccgagccgcccccagatctcgcagagcgggacccagcggcaccagtgcctgtcgtgctgacggtgacagcagctgagggactgcggcccggctctctgttgggctcggtggcagcgccagagcccgcgggtgtgggtgcactcacctacacactggtgggcggtgccgatcccgagggcaccttcgcgctggatgcggcctcagggcgcttgtacctggcgcggcccctggacttcgaagctggcccgccgtggcgcgcgctcacggtacgcgctgaggggccgggaggcgcgggcgcgcggctgctgcgagtgcaggtgcaagtgcaggacgagaatgagcatgcgcccgcctttgcgcgcgacccgctggcgctggcgctgccagagaacccggagcccggcgcagcgctgtacactttccgcgcgtcggacgccgacggccccggccccaatagcgacgtgcgctaccgcctgctgcgccaggagccgcccgtgccggcgcttcgcctggacgcgcgcaccggggcgctcagcgctccgcgcggcctggaccgagagaccactcccgcgctgctgctgctggtggaagccaccgaccggcccgccaacgccagccgccgtcgtgcagcgcgcgtttcagcgcgcgtcttcgtcacggatgagaatgacaacgcgcctgtcttcgcctcgccgtcacgcgtgcgcctcccagaggaccagccgcctgggcccgcggccctgcacgtggtagcccgggacccggatctgggcgaggctgcacgcgtgtcctatcggctggcatctggcggggacggccacttccggctgcactcaagcactggagcgctgtccgtggtgcggccgttggaccgcgaacaacgagctgagcacgtactgacagtggtggcctcagaccacggctccccgccgcgctcggccacgcaggtcctgaccgtcagtgtcgctgacgtcaacgacgaggcgcctactttccagcagcaggagtacagcgtcctcttgcgtgagaacaaccctcctggcacatctctgctcaccctgcgagcaaccgaccccgacgtgggggccaacgggcaagtgacttatggaggcgtctctagcgaaagcttttctctggatcctgacactggtgttctcacgactcttcgggccctggatcgagaggaacaggaggagatcaacctgacagtgtatgcccaggacaggggctcacctcctcagttaacgcatgtcactgttcgagtggctgtggaggatgagaatgaccatgcaccaacctttgggagtgcccatctctctctggaggtgcctgagggccaggacccccagacccttaccatgcttcgggcctctgatccagatgtgggagccaatgggcagttgcagtaccgcatcctagatggggacccatcaggagcctttgtcctagaccttgcttctggagagtttggcaccatgcggccactagacagagaagtggagccagctttccagctgaggatagaggcccgggatggaggccagccagctctcagtgccacgctgcttttgacagtgacagtgctggatgccaatgaccatgctccagcctttcctgtgcctgcctactcggtggaggtgccggaggatgtgcctgcagggaccctgctgctgcagctacaggctcatgaccctgatgctggagctaatggccatgtgacctactacctgggcgccggtacagcaggagccttcctgctggagcccagctctggagaactgcgcacagctgcagccttggacagagaacagtgtcccagctacaccttttctgtgagtgcagtggatggtgcagctgctgggcccctaagcaccacagtgtctgtcaccatcacggtgcgcgatgtcaatgaccatgcacccaccttccccaccagtcctctgcgcctacgtctgccccgcccaggccccagcttcagtaccccaaccctggctctggccacactgagagctgaagatcgtgatgctggtgccaatgcttccattctgtaccggctggcaggcacaccacctcctggcactactgtggactcttacactggtgaaatccgcgtggcccgctctcctgtagctctaggcccccgagatcgtgtcctcttcattgtggccactgatcttggccgtccagctcgctctgccactggtgtgatcattgttggactgcagggggaagctgagcgtggaccccgctttccccgggctagcagtgaggctacgattcgtgagaatgcgcccccagggactcctattgtctcccccagggccgtccatgcaggaggcacaaatggacccatcacctacagcattctcagtgggaatgagaaagggacattgctccatccagcctagtacaggtgccatcacagttcgctcagcagaggggctagacttcgaggtgagtccacggctgcgactggtgctgcaggcagagagtggaggagcctttgccttcactgtgctgaccctgaccctgcaagatgctggggcttttgggaggctccgttacagcctgttggaggctgggccaggacctgagggccgtgaggcatttgcactgaacagctcaacaggggagttgcgtgcgcgagtgccctttgactatgagcacacagaaagcttccggctgctggtgggtgctgctgatgctgggaatctctcagcctctgtcactgtgtcggtgctagtgactggagaggatgagtatgaccctgtatttctggcaccagctttccacttccaagtgcccgaaggtgcccggcgtggccacagcttgggtcacgtgcaggccacagatgaggatgggggtgccgatggcctggttctgtattcccttgccacctcttccccctattttggtattaaccagactacaggagccctgtacctgcgggtggacagtcgggcaccaggcagcggaacagccacctctgggggtgggggccggacccggcgggaagcaccacgggagctgaggctggaggtgatagcacgggggcctctgcctggttcccggagtgccacagtgcctgtgaccgtggatatcacccacaccgcactgggcctggcacctgacctcaacctgctattagtaggggccgtggcagcctccttgggagttgtggtggtgcttgcactggcagccctggtcctaggacttgttcgggcccgtagccgcaaggctgaggcagcccctggcccaatgtcacaggcagcacccctagccagtgactcactgcagaaactgggccgggagccacctagtccaccaccctctgagcacctctatcaccagactcttcccagctatggtgggccaggagctggaggaccctacccccgtggtggctccttggacccttcacattcaagtggccgaggatcagcagaggctgcagaggatgatgagatccgcatgatcaatgagttcccccgtgtggccagtgtggcctcctctctggctgcccgtggccctgactcaggcatccagcaggatgcagatggtctgagtgacacatcctgcgaaccacctgcccctgacacctggtataagggccgaaaggcagggctgctgctgccaggtgcaggagccactctctacagagaggaggggcccccagccactgccacagccttcctggggggctgtggcctgagccctgcacccactggggactatggcttcccagcagatggcaagccatgtgtggcaggtgcgctgacagccattgtggccggcgaggaggagctccgtggcagctataactgggactacctgctgagctggtgccctcagttccaaccactggccagtgtcttcacagagatcgctcggctcaaggatgaagcgtggcccacccaggagccaagtctgtgccccccaagccagcaaacacagctgcagcccgggccatcttcccaccagcttctcaccgctcccccatcagccatgaaggctccctgtcctcagctgccatgtcccccagcttctcaccctctctgtctcctctggctgctcgctcacccgttgtctcaccatttggggtggcccagggtccctcagcctcagcactcagcgcagagtctggcctggagccacctgatgacacggagctgcacatctagctgtggcccaggctgggccccgacctgggatgcgcacagtgtccccaacgcaggccccactctgagcctgccctgggcagcctcggactatgactggctacggggaggccaccaccaggccccagctctccaccctgaactccccagccccctcagagtactaggaccacagaagccctgttgctcactgacctgtgaccaggtccaatgtggggagaaatatgaaggaggtagcagccctgggttctcctcagtgagggatccctgccctgcaccagcaccctgagatggagctgagactttatttattgggggtagggggatggaggaggtccctccaacatgtttggacccagctcctttgggttccactgacacccctgcccctgcccctgcccagaaccaagtgccatttctcactctggagccttaataaactgcaatttgtatccagtctccagctttgttctatagggatgactggaagacacctggcagagtattgtggatacctcaggaggcacagaggggtggtggggtggggatggcactgggagctcaggagcctagcctgaggctgatgatcacatctctctgcagctattcttttccctctaatatgggcaaagaggccagcagggcc

SEQ ID NO: 736335 - DNA, 3796 bp, Homo sapiens
  misc_feature (106)..(106): n is a, c, g, or t
  misc_feature (147)..(147): n is a, c, g, or t
  misc_feature (174)..(174): n is a, c, g, or t
  misc_feature (179)..(181): n is a, c, g, or t
  misc_feature (186)..(186): n is a, c, g, or t
  misc_feature (200)..(201): n is a, c, g, or t
gcggggggaggggaggggaggggagggggcgcggggccgcggcagcggagctcgcatcctcggcggggcggctgtgcaggaggcggcgcccgggctcagcgacgancgatcgacgccaaggcgcgcgaccgacgcggctgccggagngatcgcggcctcgagacacgactgcgnacgannngcgcncaggcccgcgcganngcgctccgggggctgaccgcggccggacggcgccccagcaccgggcgagggagcccgcgtcgcgcggaggtcagggagcctgagctggagccagggccccagtgggacctgacccaaagtctgaggtcaagctgggcccagagcctggcctggagctggagcccaaggcacagctggactacccttgtcatgcagaaggagctgggcattgtgccttcctgccctggcatgaagagccccaggccccacctcctgctaccattgctgctgctgctgctgctgctgctgggggctggggtgccaggtgcctggggtcaggctgggagcctggacttgcagattgatgaggagcagccagcgggtacactgattggcgacatcagtgcggggcttccggcaggcacggcagctcctctcatgtacttcatctctgcccaagagggcagcggcgtgggcacagacctggccattgacgaacacagtggggtcgtccgtacagcccgtgtcttggaccgtgagcagcgggaccgctaccgcttcactgcagtcactcctgatggtgccaccgtagaagttacagtgcgagtggctgacatcaacgaccatgctccagccttcccacaggctcgggctgccctgcaggtacctgagcatacagcttttggcacccgctacccactggagcctgctcgtgatgcagatgctgggcgtctgggaacccagggctatgcgctatctggtgatggggctggagagaccttccggctggagacacgccccggtccagatgggactccagtacctgagctggtagttactggggaactggaccgagagaaccgctcacactatatgctacagctggaggcctatgatggtggttcacccccccggagggcccaggccctgctggacgtgacactgctggacatcaatgaccatgccccggctttcaatcagagccgctaccatgctgtggtgtctgagagcctggcccctggcagtcctgtcttgcaggtgttcgcatctgatgccgatgctggtgtcaatggggctgtgacttacgagatcaaccggaggcagagcgagggtgatggacccttctccatcgacgcacacacggggctgctgcagttagagcggccactggactttgagcagcggcgggtccatgaactggtggtgcaagcacgagatggtggggctcaccctgagctgggctcggcctttgtgactgtgcatgtgcgagatgccaatgacaatcagccctccatgactgtcatctttctcagtgcagatggctccccccaagtgtctgaggccgccccacctggacagctcgttgctcgcatctctgtgtcagacccagatgatggtgactttgcccatgtcaatgtgtccctggaaggtggagagggccactttgccctaagcacccaagacagcgtcatctatctggtgtgtgtggctcggcggctggatcgagaggagagggatgcctataacttgagggttacagccacagactcaggctcacctccactgcgggctgaggctgcctttgtgctgcacgtcactgatgtcaacgacaatgcacctgcctttgaccgccagctctaccgacctgagcccctgcctgaggttgcgctgcctggcagctttgtagtgcgggtgactgctcgggatcctgaccaaggcaccaatggtcaggtcacttatagcctagcccctggcgcccacacccactggttctccattgaccccacctcaggcattatcactacggctgcctcactggactatgagttggaacctcagccacagctgattgtggtggccacagatggtggcctgccccctctagcctcctctgccacagttagcgtggccctgcaagatgtgaatgataatgagccccaattccagaggactttctacaatgcctcactgcctgagggcacccagcctggaacttgcttcctgcaggtgacagccacagacgcggatagtggcccatttggcctcctctcctattccttgggtgctggacttgggtcctccggatctcccccattccgcattgatgcccatagcggtgatgtgtgcacaacccggaccctggaccgtgaccaggggccctcaagctttgacttcacagtgacagctgtggatgggggaggcctcaagtccatggtatatgtgaaggtgtttctgtcagacgagaatgacaaccctcctcagttttatccacgggagtatgctgccagtataagtgcccagagtccaccaggcacagctgtgctgaggttgcgtgcccatgaccctgaccagggatcccatgggcgactctcctaccatatcctggctggcaacagccccccactttttaccttggatgagcaatcagggctgttgacagtagcctggcccttggccagacgggccaattctgtggtgcagctggagatcggggctgaggacggaggtggcctacaggcagaacccagtgcccgagtggacatcagcattgtgcctggaacccccacaccacccatatttgagcaactacagtatgttttttctgtgccagaggatgtggcaccaggcaccagtgtgggcatagtccaggcacacaacccaccaggtcgcttggcacctgtgaccctttccctatcaggtggggatccccgaggactcttctccctagatgcggtatcaggactgttgcaaacacttcgccctctggaccgggagctactgggaccagtgttggagctggaggtgcgagcaggcagtggagtgcccccagctttcgctgtagctcgggtgcgtgtgctgctggatgatgtgaatgacaactcccctgcctttcctgcacctgaagacacggtattgctaccaccaaacactgccccagggactcccatctatacactgcgggctcttgaccccgactcaggtgttaacagtcgagtcacctttaccctgcttgctgggggtggtggagccttcaccgtggaccccaccacaggccatgtacggcttatgaggccttggctccccgattcaacagccctacctaccgtgtggacctgccctcaggcaccactgctggaactcaggtcctgcaagtgcaggcccaagcaccagatgggggccctatcacctatcaccttgcagcagagggagcaagtagcccctttggcctggagccacagagtgggtggctatgggtgcgggcagcactagaccgtgaggcccaggaattgtacatactgaaggtaatggcagtgtctgggtccaaagctgagttggggcagcagacaggcacagccaccgtgagggtcagcatcctcaaccagaatgaacacagtccccgcttgtctgaggatcccaccttcctggctgtggctgagaaccagcccccagggaccagcgtgggccgagtctttgccactgaccgagactcaggacccaatggacgtctgacctacagcctgcaacagctgtctgaagacagcaaggccttccgcatccacccccagactgtgggatcctcagacaagcgggactgtgttcattctggttgaggatg

SEQ ID NO: 736336 - DNA, 4288 bp, Homo sapiens
  misc_feature (106)..(106): n is a, c, g, or t
  misc_feature (147)..(147): n is a, c, g, or t
  misc_feature (174)..(174): n is a, c, g, or t
  misc_feature (179)..(181): n is a, c, g, or t
  misc_feature (186)..(186): n is a, c, g, or t
  misc_feature (200)..(201): n is a, c, g, or t
gcggggggaggggaggggaggggagggggcgcggggccgcggcagcggagctcgcatcctcggcggggcggctgtgcaggaggcggcgcccgggctcagcgacgancgatcgacgccaaggcgcgcgaccgacgcggctgccggagngatcgcggcctcgagacacgactgcgnacgannngcgcncaggcccgcgcganngcgctccgggggctgaccgcggccggacggcgccccagcaccgggcgagggagcccgcgtcgcgcggaggtcagggagcctgagctggagccagggccccagtgggacctgacccaaagtctgaggtcaagctgggcccagagcctggcctggagctggagcccaaggcacagctggactacccttgtcatgcagaaggagctgggcattgtgccttcctgccctggcatgaagagccccaggccccacctcctgctaccattgctgctgctgctgctgctgctgctgggggctggggtgccaggtgcctggggtcaggctgggagcctggacttgcagattgatgaggagcagccagcgggtacactgattggcgacatcagtgcggggcttccggcaggcacggcagctcctctcatgtacttcatctctgcccaagagggcagcggcgtgggcacagacctggccattgacgaacacagtggggtcgtccgtacagcccgtgtcttggaccgtgagcagcgggaccgctaccgcttcactgcagtcactcctgatggtgccaccgtagaagttacagtgcgagtggctgacatcaacgaccatgctccagccttcccacaggctcgggctgccctgcaggtacctgagcatacagcttttggcacccgctacccactggagcctgctcgtgatgcagatgctgggcgtctgggaacccagggctatgcgctatctggtgatggggctggagagaccttccggctggagacacgccccggtccagatgggactccagtacctgagctggtagttactggggaactggaccgagagaaccgctcacactatatgctacagctggaggcctatgatggtggttcacccccccggagggcccaggccctgctggacgtgacactgctggacatcaatgaccatgccccggctttcaatcagagccgctaccatgctgtggtgtctgagagcctggcccctggcagtcctgtcttgcaggtgttcgcatctgatgccgatgctggtgtcaatggggctgtgacttacgagatcaaccggaggcagagcgagggtgatggacccttctccatcgacgcacacacggggctgctgcagttagagcggccactggactttgagcagcggcgggtccatgaactggtggtgcaagcacgagatggtggggctcaccctgagctgggctcggcctttgtgactgtgcatgtgcgagatgccaatgacaatcagccctccatgactgtcatctttctcagtgcagatggctccccccaagtgtctgaggccgccccacctggacagctcgttgctcgcatctctgtgtcagacccagatgatggtgactttgcccatgtcaatgtgtccctggaaggtggagagggccactttgccctaagcacccaagacagcgtcatctatctggtgtgtgtggctcggcggctggatcgagaggagagggatgcctataacttgagggttacagccacagactcaggctcacctccactgcgggctgaggctgcctttgtgctgcacgtcactgatgtcaacgacaatgcacctgcctttgaccgccagctctaccgacctgagcccctgcctgaggttgcgctgcctggcagctttgtagtgcgggtgactgctcgggatcctgaccaaggcaccaatggtcaggtcacttatagcctagcccctggcgcccacacccactggttctccattgaccccacctcaggcattatcactacggctgcctcactggactatgagttggaacctcagccacagctgattgtggtggccacagatggtggcctgccccctctagcctcctctgccacagttagcgtggccctgcaagatgtgaatgataatgagccccaattccagaggactttctacaatgcctcactgcctgagggcacccagcctggaacttgcttcctgcaggtgacagccacagacgcggatagtggcccatttggcctcctctcctattccttgggtgctggacttgggtcctccggatctcccccattccgcattgatgcccatagcggtgatgtgtgcacaacccggaccctggaccgtgaccaggggccctcaagctttgacttcacagtgacagctgtggatgggggaggcctcaagtccatggtatatgtgaaggtgtttctgtcagacgagaatgacaaccctcctcagttttatccacgggagtatgctgccagtataagtgcccagagtccaccaggcacagctgtgctgaggttgcgtgcccatgaccctgaccagggatcccatgggcgactctcctaccatatcctggctggcaacagccccccactttttaccttggatgagcaatcagggctgttgacagtagcctggcccttggccagacgggccaattctgtggtgcagctggagatcggggctgaggacggaggtggcctacaggcagaacccagtgcccgagtggacatcagcattgtgcctggaacccccacaccacccatatttgagcaactacagtatgttttttctgtgccagaggatgtggcaccaggcaccagtgtgggcatagtccaggcacacaacccaccaggtcgcttggcacctgtgaccctttccctatcaggtggggatccccgaggactcttctccctagatgcggtatcaggactgttgcaaacacttcgccctctggaccgggagctactgggaccagtgttggagctggaggtgcgagcaggcagtggagtgcccccagctttcgctgtagctcgggtgcgtgtgctgctggatgatgtgaatgacaactcccctgcctttcctgcacctgaagacacggtattgctaccaccaaacactgccccagggactcccatctatacactgcgggctcttgaccccgactcaggtgttaacagtcgagtcacctttaccctgcttgctgggggtggtggagccttcaccgtggaccccaccacaggccatgtacggcttatgaggccttggctccccgattcaacagccctacctaccgtgtggacctgccctcaggcaccactgctggaactcaggtcctgcaagtgcaggcccaagcaccagatgggggccctatcacctatcaccttgcagcagagggagcaagtagcccctttggcctggagccacagagtgggtggctatgggtgcgggcagcactagaccgtgaggcccaggaattgtacatactgaaggtaatggcagtgtctgggtccaaagctgagttggggcagcagacaggcacagccaccgtgagggtcagcatcctcaaccagaatgaacacaggtccctcagcctcagcactcagcgcagagtctggcctggagccacctgatgacacggagctgcacatctagctgtggcccaggctgggccccgacctgggatgcgcacagtgtccccaacgcaggccccactctgagcctgccctgggcagcctcggactatgactggctacggggaggccaccaccaggccccagctctccaccctgaactccccagccccctcagagtactaggaccacagaagccctgttgctcactgacctgtgaccaggtccaatgtggggagaaatatgaaggaggtagcagccctgggttctcctcagtgagggatccctgccctgcaccagcaccctgagatggagctgagactttatttattgggggtagggggatggaggaggtccctccaacatgtttggacccagctcctttgggttccactgacacccctgcccctgcccctgcccagaaccaagtgccatttctcactctggagccttaataaactgcaatttgtatccagtctccagctttgttctatagggatgactggaagacacctggcagagtattgtggatacctcaggaggcacagaggggtggtggggtggggatggcactgggagctcaggagcctagcctgaggctgatgatcacatctctctgcagctattcttttccctctaatatgggcaaagaggccagcagggcc

SEQ ID NO: 736337 - DNA, 1396 bp, Homo sapiens
  misc_feature (1387)..(1388): n is a, c, g, or t
  misc_feature (1390)..(1390): n is a, c, g, or t
  misc_feature (1392)..(1395): n is a, c, g, or t
aaggcagtattgaccagacatttctatttcagagttggatttgtgcttagttttttttaggtgttgggacccttgtagttgctttttattttgcttagtcaacaaacactaaaatgataaaatttggtatgtataagtactggacgaaggatgttttgacactaaaaaggacataatttaggaaattaagaatttagacaccaagtttggcttaatagaaaaagtcactatctgaacttctttctttttcaccacaaatcaccgcagaccagtgtttgggagcaggtgtaggaaattgaattattggatctatgtttaggtaagaaaactaaaggtacttcagaatttaggctatgacataactgtctttctgaagtttaaagaaagaaagtgaactatagaaatctattcagctaattaaagtgaatgaaaaatattacagattccataactgcatggcgccttacctgctattaatactgccgccttactgtcagccagatgattttttcccaccacggccagtcttaaatttggcaataagaaaaagctaatcttccaagtgtaagtaggtatgtgttagaatcttggtgaaagataaacacaagacagtcttcttggcgcaggtcctaacagttggtgagataatacataagatggtttcaggattattgtagaattatttaggttgaaagagactgtaagagactaatgaagcatacccagagaggttgctacagtgactccagtcagttttaggacccaggactcctgaacttcaatttcagtattatttttctgtaccaaactcattcaataaatacttgagattagggataagtttgaagttagaagattccagagtacactcaaatagtatttggcacatagcttgttgatcaaaagtatttactaagtgagtgacaaaaggcactagcaactttaaggattttgcctattagtatcatatggcatgtagctatcaagccagtttcgtttagttattttgtgttgccaagcatatgatacgtggtgtcacactgagcctttgggatcctttccctggatacataaccctagtagataatgttactgcaagatgtaatgaccaaatccaacctactgcaaatgttactatggaaatctcaatgcaaaagtagcctttgtgattttttttttaaaccgtctccataacagaacacttagaattattagccatttgctgcaaagtatttgttttaaaatgtctggcatatacaccactaacatttaaatgcccaacattcggtctatacgtgaaaaaactagaagaaaagccctgttggagttttgatgtagagtgcaataatacatcaataaaggtattttaaaatgaaaaaaaaaatcnntngnnnng

SEQ ID NO: 736338 - DNA, 1137 bp, Homo sapiens; identical to SEQ ID NO: 27160

SEQ ID NO: 736339 - DNA, 4293 bp, Homo sapiens
cgcaccccggcaagcagcagcgggccgcgacgcccagcctgccagtgagctgcgacgggcacaccccggagcgtcggcgactgcggacaggttagagtgggggcaggggcgggcgcgggagcagcccagggccagagagggagcccgagccaggccatctccaaccatgtccgacgaggcctcggccatcacttcctacgagaagtttctaacccccgaggagcccttcccactcctgggacctcctcgcggggtgggcacctgcccgagcgaggagccgggctgcctggacatcagcgacttcggctgccagctgtcctcctgccatcgcaccgacccgctccaccgcttccacaccaacaggtggaacctaacttcttgtggaacaagtgttgccagctcagaaggcagtgaggagctgttttcatctgtgtctgttggagatcaagatgattgctattccctgttagatgatcaggacttcacttcttttgatttatttcctgaggggagtgtctgcagtgatgtctcttcttctattagcacttactgggattggtcagatagcgagtttgaatggcagttaccaggcagtgacattgccagtgggagtgatgtactttctgatgtcatacccagtattccaagttcaccttgcctgcttcctaaaaagaaaaacaagcaccggaatttagatgaactcccttggagtgcaatgacaaatgatgagcaggtggaatatattgagtatctgagtcggaaagtgagtactgagatgggtcttcgggagcaacttgatattattaagatcattgatccttctgctcaaatctcccctacagacagtgagtttattattgaacttaactgtctcacagatgaaaaactgaagcaggtcagaaactatatcaaggaacatagccctcgccaacggcctgcaagagaggcctggaagagaagcaactttagttgtgcaagcaccagtggagtgagcggtgccagtgccagcgccagcagcagcagtgccagcatggtcagttctgcaagcagcagtgggtccagtgttggaaactctgcttcaaactccagtgccaacatgagtcgagcacacagtgacagcaacctgtctgcaagtgcagcagagcggattcgggattcaaaaaagcgatccaagcagcggaagttacagcagaaggccttccgcaagaggcagctgaaggagcagaggcaggcccggaaggagaggctcagtgggctcttccttaacgaagaggtgctgtccttgaaagtgactgaggaagaccatgaagcagatgttgatgttttgatgtaataagggtgaatttatcaacgttctttgtgagcattaaaatactccatccttatgggtttacatgcatcttgaccaaaattttggttagggctgtgctgatgtaccattaataatttaagccagtggttcttggcaggtgatcccaagacctgcagcttcagcatcacttgagaagttgttaggaatgcatactagtgggccccgcccccagacatagtgaatcagaaaccaacagggaggcgcctagcattgtttttttaacaagtgctgggttattctgatgcacagtctagtttaagaaccactactttgggtaaacgttttgactgtttaaagtttatggcggtgaagtgggcgtcttcaaagactagtacttacacagtttagaagatttcaaggtactgctgacagtagtttattatgtcagtatacatacatgtgtagagatcataatttagttcccttcttaatgttacaatttcttagtttacttttcctaaagggccatagcataattcttgattcctggtggaaatcttttctgaggtgtgggggtgggcaaggtgtggattgctgtttacgatagtgccttcattagttttagttctgtctgttttcattcattattgactcaaaggtattagaacaggcccttatctttttcctattagatttatttttgttttttactttatgtaagttcagaatccttttttaagtgatgactactgatgaaataatgttactagtagctgaattttagacttgatgctatgttgattaatatttaaatggtgaaagtaattaggcaaaataagcaattctgcttttctgttgctttcagaatttttaggctgtaaaattgtctcaggcaggaagtcagtctatatctctctcaagttcttattgtaggtcatttttttttcagcacagctctaatttttaaatatttggtataacagcttctggcatgtgacctagttaatgttgaaaattaactgatgaaaacccttgtagatctgctaaacttctctataaattgctagaaatatacagagcaatgagatatagaaaacaccttagcttgttggttattaatagagctctaattttaactgtgaaatcatggagtttctttaaatgttttcctagagtgtttgttatcatgaacattagaaatagcattattccttttcttctaccacatgtcttgaacattcacatgggttaaagaagatggaaactgatactactgacaatcaagctgctttctgactttcataattttctttatattgtggatagcattttgaaggtgaccgtgattctgtaggaagagctgtaatcaatatttttcaaactctaagagtacagaggttagtaagatttcttttttttttactttttgttacgtcaagtagcttattaagaaaaagattcatgacttaaattcttaattctcagttgatacaaaggcttataatcatgtgttttaaaattttgatttcattttcgttccttgaaggttaaagaatggaaactggggataaaaattaatacactgcagctttgccaaggtctgtgatatggttgtaaccttttaaagactactaaagtcataatttgaaatttttactaaaataaaacatatgtgtctatggttttcaattggagtagtctttcttactttcccccttcccctctttggttctcctaaccagcttagaggacccaaagagagcttagggatagacaccagaatactctgtggaggtggaacaacttaacctcactgttttcccttccaagtataggaagagcaaatagagcatagtaactgtatctaaattctctacctgctcttagcaaaagcaaaatcccacagaatgattgcctgctgtctttacctattcttcaaggaaaacaggccacttttggagaccatagagcaccatttatctgtcaaatacttggaaactatttacttaacggtcatcagtaaaaaaccctaaacaaggtcatgatataatttaagaccaattcccctactctcccaataatcacatagtcttattactttcaatttaacttgagtcactattaagcaagtttaccaaagtgccacaaagttgatttttaacgtttgtaaaggtttgaatgtttatagaagtgcatcatgaaattttgtgtaaatccagatgaactgtcattatagtactataaattagagatagtccataaagttgggttgaaggagattgaaaatatttcctttgattaaaagaaaataattaactaacttgggcttgcttgtgattgaagagggagattagatagtcctctgtccccccaaaaaagaaactagcagagaaagacataaaaagctctttggtgtctgttcatgtgctgtacattttttccgttttaatgtcttgtgtagataattcaaagtttgaactatttctttcttggaataagtaataatttattcaatatggtgtatctctgagttcaatttaaaacaatccaactcagtaatatttatttttaaatacaaatcctaactaaccaattaattaataaaaaggcaagacttacttgctgtagtattggttctcatctgtagagaactgacattggagcaaattttaagtctcccctttgaaaataagccttgttaactgagggcgtaatacatttcccacagattttatccagaaacattttattagagatcttatagtagtatctcagttcctactacagctttctaaaggatgagacttgcatttaacaaaatgacatatataatatttttctatagttttgcaactgaattaaaggaaggtgatgtattataatgtgtagtgaggtataaagggctagttcattctctcccaacaagaacttagaataaaataacacttttttttcatgagacttacctcatttttgttagg

SEQ ID NO: 736340 - DNA, 4062 bp, Homo sapiens
  misc_feature (4058)..(4058): n is a, c, g, or t
cgcaccccggcaagcagcagcgggccgcgacgcccagcctgccagtgagctgcgacgggcacaccccggagcgtcggcgactgcggacaggttagagtgggggcaggggcgggcgcgggagcagcccagggccagagagggagcccgagccaggccatctccaaccatgtccgacgaggcctcggccatcacttcctacgagaagtttctaacccccgaggagcccttcccactcctgggacctcctcgcggggtgggcacctgcccgagcgaggagccgggctgcctggacatcagcgacttcggctgccagctgtcctcctgccatcgcaccgacccgctccaccgcttccacaccaacaggtggaacctaacttcttgtggaacaagtgttgccagctcagaaggcagtgaggagctgttttcatctgtgtctgttggagatcaagatgattgctattccctgttagatgatcaggacttcacttcttttgatttatttcctgaggggagtgtctgcagtgatgtctcttcttctattagcacttactgggattggtcagatagcgagtttgaatggcagttaccaggcagtgacattgccagtgggagtgatgtactttctgatgtcatacccagtattccaagttcaccttgcctgcttcctaaaaagaaaaacaagcaccggaatttagatgaactcccttggagtgcaatgacaaatgatgagcaggtggaatatattgagtatctgagtcggaaagtgagtactgagatgggtcttcgggagcaacttgatattattaagatcattgatccttctgctcaaatctcccctacagacagtgagtttattattgaacttaactgtctcacagatgaaaaactgaagcaggtcagaaactatatcaaggaacatagccctcgccaacggcctgcaagagaggcctggaagagaagcaactttagttgtgcaagcaccagtggagtgagcggtgccagtgccagcgccagcagcagcagtgccagcatggtcagttctgcaagcagcagtgggtccagtgttggaaactctgcttcaaactccagtgccaacatgagtcgagcacacagtgacagcaacctgtctgcaagtgcagcagagcggattcgggattcaaaaaagcgatccaagcagcggaagttacagcagaaggccttccgcaagaggcagctgaaggagcagaggcaggcccggaaggagaggctcagtgggctcttccttaacgaagaggtgctgtccttgaaagtgactgaggaagaccatgaagcagatgttgatgttttgatgtaataagggtgaatttatcaacgttctttgtgagcattaaaatactccatccttatgggtttacatgcatcttgaccaaaattttggttagggctgtgctgatgtaccattaataatttaagccagtggttcttggcaggtgatcccaagacctgcagcttcagcatcacttgagaagttgttaggaatgcatactagtgggccccgcccccagacatagtgaatcagaaaccaacagggaggcgcctagcattgtttttttaacaagtgctgggttattctgatgcacagtctagtttaagaaccactactttgggtaaacgttttgactgtttaaagtttatggcggtgaagtgggcgtcttcaaagactagtacttacacagtttagaagatttcaaggtactgctgacagtagtttattatgtcagtatacatacatgtgtagagatcataatttagttcccttcttaatgttacaatttcttagtttacttttcctaaagggccatagcataattcttgattcctggtggaaatcttttctgaggtgtgggggtgggcaaggtgtggattgctgtttacgatagtgccttcattagttttagttctgtctgttttcattcattattgactcaaaggtattagaacaggcccttatctttttcctattagatttatttttgttttttactttatgtaagttcagaatccttttttaagtgatgactactgatgaaataatgttactagtagctgaattttagacttgatgctatgttgattaatatttaaatggtgaaagtaattaggcaaaataagcaattctgcttttctgttgctttcagaatttttaggctgtaaaattgtctcaggcaggaagtcagtctatatctctctcaagttcttattgtaggtcatttttttttcagcacagctctaatttttaaatatttggtataacagcttctggcatgtgacctagttaatgttgaaaattaactgatgaaaacccttgtagatctgctaaacttctctataaattgctagaaatatacagagcaatgagatatagaaaacaccttagcttgttggttattaatagagctctaattttaactgtgaaatcatggagtttctttaaatgttttcctagagtgtttgttatcatgaacattagaaatagcattattccttttcttctaccacatgtcttgaacattcacatgggttaaagaagatggaaactgatactactgacaatcaagctgctttctgactttcataattttctttatattgtggatagcattttgaaggtgaccgtgattctgtaggaagagctgtaatcaatatttttcaaactctaagagtacagaggttagtaagatttcttttttttttactttttgttacgtcaagtagcttattaagaaaaagattcatgacttaaattcttaattctcagttgatacaaaggcttataatcatgtgttttaaaattttgatttcattttcgttccttgaaggttaaagaatggaaactggggataaaaattaatacactgcagctttgccaaggtctgtgatatggttgtaaccttttaaagactactaaagtcataatttgaaatttttactaaaataaaacatatgtgtctatggttttcaattggagtagtctttcttactttcccccttcccctctttggttctcctaaccagcttagaggacccaaagagagcttagggatagacaccagaatactctgtggaggtggaacaacttaacctcactgttttcccttccaagtataggaagagcaaatagagcatagtaactgtatctaaattctctacctgctcttagcaaaagcaaaatcccacagaatgattgcctgctgtctttacctattcttcaaggaaaacaggccacttttggagaccatagagcaccatttatctgtcaaatacttggaaactatttacttaacggtcatcagtaaaaaaccctaaacaaggtcatgatataatttaagaccaattcccctactctcccaataatcacatagtcttattactttcaatttaacttgagtcactattaagcaagtttaccaaagtgccacaaagttgatttttaacgtttgtaaaggtttgaatgtttatagaagtgcatcatgaaattttgtgtaaatccagatgaactgtcattatagtactataaattagagatagtccataaagttgggttgaaggagattgaaaatatttcctttgattaaaagaaaataattaactaacttgggcttgcttgtgattgaagagggagattagatagtcctctgtccccccaaaaaagaaactagcagagaaagacataaaaagctctttggtgtctgttcatgtgctgtacattttttccgttttaatgtcttgtgtagataattcaaagtttgaactatttctttcttggaataagtaataatttattcaatatggtgtatctctgagttcaatttaaaacaatccaactcagtaatatttatttttaaatacaaatcctaactaaccaattaattaataaaaaggcaagacttacttgctgtagtattggttctcatctgtagagaactgacattggagcaaattttaagtctcccctttgaaaataagccttgttaactgagggcgtaatacatttcccacttcagattggtaacacctcngtgc

SEQ ID NO: 736341 - DNA, 4164 bp, Homo sapiens
cgcaccccggcaagcagcagcgggccgcgacgcccagcctgccagtgagctgcgacgggcacaccccggagcgtcggcgactgcggacaggttagagtgggggcaggggcgggcgcgggagcagcccagggccagagagggagcccgagccaggccatctccaaccatgtccgacgaggcctcggccatcacttcctacgagaagtttctaacccccgaggagcccttcccactcctgggacctcctcgcggggtgggcacctgcccgagcgaggagccgggctgcctggacatcagcgacttcggctgccagctgtcctcctgccatcgcaccgacccgctccaccgcttccacaccaacaggtggaacctaacttcttgtggaacaagtgttgccagctcagaaggcagtgaggagctgttttcatctgtgtctgttggagatcaagatgattgctattccctgttagatgatcaggacttcacttcttttgatttatttcctgaggggagtgtctgcagtgatgtctcttcttctattagcacttactgggattggtcagatagcgagtttgaatggcagttaccaggcagtgacattgccagtgggagtgatgtactttctgatgtcatacccagtattccaagttcaccttgcctgcttcctaaaaagaaaaacaagcaccggaatttagatgaactcccttggagtgcaatgacaaatgatgagcaggtggaatatattgagtatctgagtcggaaagtgagtactgagatgggtcttcgggagcaacttgatattattaagatcattgatccttctgctcaaatctcccctacagacagtgagtttattattgaacttaactgtctcacagatgaaaaactgaagcaggtcagaaactatatcaaggaacatagccctcgccaacggcctgcaagagaggcctggaagagaagcaactttagttgtgcaagcaccagtggagtgagcggtgccagtgccagcgccagcagcagcagtgccagcatgaagcgatccaagcagcggaagttacagcagaaggccttccgcaagaggcagctgaaggagcagaggcaggcccggaaggagaggctcagtgggctcttccttaacgaagaggtgctgtccttgaaagtgactgaggaagaccatgaagcagatgttgatgttttgatgtaataagggtgaatttatcaacgttctttgtgagcattaaaatactccatccttatgggtttacatgcatcttgaccaaaattttggttagggctgtgctgatgtaccattaataatttaagccagtggttcttggcaggtgatcccaagacctgcagcttcagcatcacttgagaagttgttaggaatgcatactagtgggccccgcccccagacatagtgaatcagaaaccaacagggaggcgcctagcattgtttttttaacaagtgctgggttattctgatgcacagtctagtttaagaaccactactttgggtaaacgttttgactgtttaaagtttatggcggtgaagtgggcgtcttcaaagactagtacttacacagtttagaagatttcaaggtactgctgacagtagtttattatgtcagtatacatacatgtgtagagatcataatttagttcccttcttaatgttacaatttcttagtttacttttcctaaagggccatagcataattcttgattcctggtggaaatcttttctgaggtgtgggggtgggcaaggtgtggattgctgtttacgatagtgccttcattagttttagttctgtctgttttcattcattattgactcaaaggtattagaacaggcccttatctttttcctattagatttatttttgttttttactttatgtaagttcagaatccttttttaagtgatgactactgatgaaataatgttactagtagctgaattttagacttgatgctatgttgattaatatttaaatggtgaaagtaattaggcaaaataagcaattctgcttttctgttgctttcagaatttttaggctgtaaaattgtctcaggcaggaagtcagtctatatctctctcaagttcttattgtaggtcatttttttttcagcacagctctaatttttaaatatttggtataacagcttctggcatgtgacctagttaatgttgaaaattaactgatgaaaacccttgtagatctgctaaacttctctataaattgctagaaatatacagagcaatgagatatagaaaacaccttagcttgttggttattaatagagctctaattttaactgtgaaatcatggagtttctttaaatgttttcctagagtgtttgttatcatgaacattagaaatagcattattccttttcttctaccacatgtcttgaacattcacatgggttaaagaagatggaaactgatactactgacaatcaagctgctttctgactttcataattttctttatattgtggatagcattttgaaggtgaccgtgattctgtaggaagagctgtaatcaatatttttcaaactctaagagtacagaggttagtaagatttcttttttttttactttttgttacgtcaagtagcttattaagaaaaagattcatgacttaaattcttaattctcagttgatacaaaggcttataatcatgtgttttaaaattttgatttcattttcgttccttgaaggttaaagaatggaaactggggataaaaattaatacactgcagctttgccaaggtctgtgatatggttgtaaccttttaaagactactaaagtcataatttgaaatttttactaaaataaaacatatgtgtctatggttttcaattggagtagtctttcttactttcccccttcccctctttggttctcctaaccagcttagaggacccaaagagagcttagggatagacaccagaatactctgtggaggtggaacaacttaacctcactgttttcccttccaagtataggaagagcaaatagagcatagtaactgtatctaaattctctacctgctcttagcaaaagcaaaatcccacagaatgattgcctgctgtctttacctattcttcaaggaaaacaggccacttttggagaccatagagcaccatttatctgtcaaatacttggaaactatttacttaacggtcatcagtaaaaaaccctaaacaaggtcatgatataatttaagaccaattcccctactctcccaataatcacatagtcttattactttcaatttaacttgagtcactattaagcaagtttaccaaagtgccacaaagttgatttttaacgtttgtaaaggtttgaatgtttatagaagtgcatcatgaaattttgtgtaaatccagatgaactgtcattatagtactataaattagagatagtccataaagttgggttgaaggagattgaaaatatttcctttgattaaaagaaaataattaactaacttgggcttgcttgtgattgaagagggagattagatagtcctctgtccccccaaaaaagaaactagcagagaaagacataaaaagctctttggtgtctgttcatgtgctgtacattttttccgttttaatgtcttgtgtagataattcaaagtttgaactatttctttcttggaataagtaataatttattcaatatggtgtatctctgagttcaatttaaaacaatccaactcagtaatatttatttttaaatacaaatcctaactaaccaattaattaataaaaaggcaagacttacttgctgtagtattggttctcatctgtagagaactgacattggagcaaattttaagtctcccctttgaaaataagccttgttaactgagggcgtaatacatttcccacagattttatccagaaacattttattagagatcttatagtagtatctcagttcctactacagctttctaaaggatgagacttgcatttaacaaaatgacatatataatatttttctatagttttgcaactgaattaaaggaaggtgatgtattataatgtgtagtgaggtataaagggctagttcattctctcccaacaagaacttagaataaaataacacttttttttcatgagacttacctcatttttgttagg

SEQ ID NO: 736342 - DNA, 635 bp, Homo sapiens
gctttttttttttatttgcaatctttcttccccgcatttagtcacctttcacgtttaagtatttattcttttatttatgaacctcagaaagattgcaaataaatacatgggccaaagatgtttggtttgcccatggagttttaattaaaaaaattaataaggaaaacaaatacccaaaataaggaagactgacaaatgagtgagtggatgagagagtgaatggtgcttgacgtaggagcagtagtgctttagggaccagcatgaaggtggtgaccgggagccctgattcatgggattctgtccacctgactttataagaaccaagaatggctgggaatggtggctcacgcctgtaatcccagcactttgggaggccgaggtgggcggatcatgaggtcaggagtttgagaccagccagtttgagatcagcctggccaacatggtgaaattccatctctactaaaaaaatacaaaaattatgggcgtggtggcacctgtctgtaatcctagctactcgggaggctgagagaggagaattgcttgaacccgggaggtggaggttgtagtgagccaagattgcaccactgcactccagcctgggctacagagcaagacactatcttagatcaaaaaag

SEQ ID NO: 736343 - DNA, 412 bp, Homo sapiens; identical to SEQ ID NO: 366299

SEQ ID NO: 736344 - DNA, 452 bp, Homo sapiens
gattgctcctgaaagtgagcatggtaaaaagggggttggacagacatggctgggttctctcctgtaccacgcactggtttagccacagctggtgacagtggagggaaaattggtcctactttttcagatatctcaacttggaacaatttacttgggcttcagaaataaagactcattaatacatttgcctaaaacacacttactcaatgtctactatgtcctggcactgtgctaagcgccagggaaccaacaaagaacaagatacataaggcccctgcccacaacggggcttaatgacagaaagaaagagggagtggtggaaagaaacaataggatgggaaaaaatgaaaatagaaaaaaggaagtgaaagagataataaataattagatcaaataagttgatgaaaggggatgacacacgaaggggaactgacacgcgaagggggatgaca

SEQ ID NO: 736345 - DNA, 270 bp, Homo sapiens
aagggaatccgtgctggtgctaagggaattcgtgctggtgcttcgtgctggtgctaagggaattcgtgctggtgcttcgtgctggtgctaagggaattcgtgtgtgccttggttggtgactcagtgagaagaagcaggaatgccaaagatactgtgaatgttctgagttttgttgctgttgttgttgagaggttgtttcactggtatctattgcattgtataataaatgaccagatgaatgaatgagtgacaccagccaattcccggccg

SEQ ID NO: 736346 - DNA, 372 bp, Homo sapiens
  misc_feature (346)..(346): n is a, c, g, or t
ggctcgccgagcaataccttcaaggaccacctcctctccatgctgagctgctgccaaggggcctgctgcccatctacacctcacgagggcactaggagcacggtttcctggatcccaccaacatacaaagcagccactcactgacccccaggaccaggatggcaaaggatgaagaggaccggaactgaccagccagctgtccctcttacctaaagacttaaaccaatgccctagtgagggggcattgggcattaagccctgacctttgctatgctcatactttgactctatgagtactttcctataagtctttgcttgtgttcacctgctagcaaactggagagcngttgagccttcagtattgctcggcga

SEQ ID NO: 736347 - DNA, 348 bp, Homo sapiens
gattcgtttacccaagagggaacagttttgagaccccccggattcactgcggagtggccgcagaggccggggtcggcctttgcgccgtggcttcgggtgttgtggaggcgcacagagggtctctcctcagggatgacatcatccgtccacctccttgtcttcaaggaccacctcctctccatgctgagctgctgccaaggggcctgctgcccatctacacctcacggtacttcaaccctcctgctatcatttcataaccaacgtggcgggcagaatctcccaaccccaccaccatccttgcaccacccccagacccactagcaattaaaagacaattttaaattttaa

SEQ ID NO: 736348 - DNA, 8184 bp, Homo sapiens
gattcgtttacccaagagggaacagttttgagaccccccggattcactgcggagtggccgcagaggccggggtcggcctttgcgccgtggcttcgggtgttgtggaggcgcacagagggtctctcctcagggatgacatcatccgtccacctccttgtcttcaaggaccacctcctctccatgctgagctgctgccaaggggcctgctgcccatctacacctcacgagggcactaggagcacggtttcctggatcccaccaacatacaaagcagccactcactgacccccaggaccaggatggcaaaggatgaagaggaccggaactgaccagccagctgtccctcttacctaaagacttaaaccaatgccctagtgagggggcattgggcattaagccctgacctttgctatgctcatactttgactctatgagtactttcctataagtctttgcttgtgttcacctgctagcaaactggagtgtttccctccccaagggggtgtcagtctttgtcgactgactctgtcatcacccttatgatgtcctgaatggaaggatccctttgggaaattctcaggagggggacctgggccaagggcttggccagcatcctgctggcaactccaaggccctgggtgggcttctggaatgagcatgctactgaatcaccaaaggcacgccccacctctctgaagatcttcctatccttttctgggggaatggggtcgatgagagcaacctcctagggttgttgtgagaattaaatgagataaaagaggcctcaggcaggatctggcatagaggaggtgatcagcaaatgtttgttgaaaaggtttgacaggtcagtcccttcccacccctcttgcttgtcttacttgtcttatttattctccaacagcactccaggcagcccttgtccacgggctctccttgcatcaggtaggggctttgcagagaccatcgacgggctgacttgagtaagaacacgaattatgcatgtggccatttccagagcactttctatgtgatatgaacatgtgatttttatgtaatatgtgtatgtaaacgaggcagcctcatttccaggtgaggatgcatttggtagtgttgatttttgtaatttaaagaagctgaaagggagagaggacccgtgaggactgaactctctgtcccatggggtagggcttacatttacattaaagaaacagaaacttgctgggaggtgtaagtatttggtcacattgctggcaacagaaggggttggagttggacccagggtgccacgctagctgccctcaccccttcttcccctctggcccagagttatactaagagtccttttatttcaaaccaaatgtttgacaatgggacagtctgtttgaaatcccagctgcctggggtggtcttgggggtctgggtggccccagtgctggtaccatgtgctggcttcaccttttaataacagtgtgaccttaaacaagtcgcttaactactctaagtttcagtttctttcatggtctaaatggagattaaaacacacacacacacacacacacacacacacacacacacacaccctcgtgtatctaccccacagggcgcttttgaagaccaaatgctgtaactactatgaaagtgctttgtaaattgctgtggaaagtgtgagctactcaagcacccgaggctgtccctccttgctcacatgtccagcccaattctcccttagtgagaacagcactcagtaggtgctgtgtgtgtttgtgttcaattaagaaattccagaataaataaaaatgaattaattcaacaaacattttctggggcaccgacaatctgcccagtgcaccaggctaggtatctgatacaaagataatgaaaacagtctcttggaacctaattggggtcctcatttgaccaggaatttctttcgtcccgttttaagccaaccagttttgtccggacaagacaaaaacaacttgggctgctttagagaagcccagctcagtgtagacaatagctgcccagcctctgaaaggggctgattggattatgtggcaaatggaggtgcaaggatgacttggacggtgacaaatgaagtgggcggagacctgctttgagttaatccaggctattaggaggggaccttttgtcttccagagactggcaggagcttttaccagtggtttttacatccttaatgttcaggacgaataatttatggtcagtgaaaatccaggccccagtgagattcgagtgggctgtaaaatcgagagtcctgctcccagtgagtaatggtagtgaatgtttctgtcactttttgcaaccgtccattcatttgatcctcacaactccctgtcctgagccaggaccggccactgccactcccagggaaacagaggctgtcaagaggctccacagattgggccccactggatcattgaacccctgttccctgagttctagaggaagaattgtacctgtctcagtcccggccacctccagaaggcctccctctgcatttctgactttgctgtgccggcagcctggagcctcccaggtccctgctgtcatcttttctagccactacagtctctgtctttcctttcacagcccaagcttcttgaaaggcctgtctacacttgctgtcttccttcctcacctccaatttcctcttcaacccactgcttcctgactcgctctactccgtggaagcacgctcacaaaggtaaagacttttctgtggcttaatccttgtcatgttttcggctcatggacacaaggacacattttcatgccttctctcacagggctctgcgtctccggttcacttctgtgtctttacactcccttcacagagacacttgctcccccttctctcgttcttagcatcccctaggaacttgcacacccaggtctctcgacttctggacctgcttcttaccatgccgtcttaagcagtcaggagtcgctgcctgggttcgagtcctagttaaattacttagtgctgagaccttggggtaggtaaacttttccaagccaggtttatctcagtttcaaaatagggttaatcgtctttatctggcaggtcaggtgggatgtctcacaggtaagcaccagatgccatttgaaaggcttgaagcaaagtcaataaagcattcatgggaaaatacaactggaggcaccactagattttcgtatacattaggttcccacggggaggaccgaagagagaagaaagaagtggaaagggaggagcgtgcaggagagacaggagaagagaataactaaacaaagacattaaagacaaaaaaaaagtaggaaagggagacttagaaaatattaaaagccaccaaaaacacatccaaagacggtttccccttacgttagttgggctaaaagaaagcaaatgggaagaaggttttaaattgattatcccagtgacaaatcccaggaagctttcacatcaaatcaccctattctgggtttttaactccttccatcgagtttaacctctttacctcccacatcctggtaaaccctgccccctccctaccgccccctttgctggtgattaaatcctgaaggtacacgaagtatttcagtgaatgaatggctaacagaaaagggcctcccctcccccttaccctgggcggtgtttttcagttttattccactttccgcccttttcccttaatgaacacagggctaatctcgggccttgtcgaaggaagaggctgcagacgttaatgaggttagctgctggattccagtattcgtcgcataaggatccttctttgtctgcgaaggaaaaacacactgattatcataatgagatgaggtgaactggccaccgccgggccggggcgatgtggcttcttaagccacacttctaattttggtgatggagccgacatttctttggctcctcatttaagtctttgcctctgtcccagtgcgaagtccattcagcggggttgaaagttgcaggcagctttgggaaggggggcgtcggacagggttgcattgtagaaagtggctttgttcgatccttcgcacagatgcaaatggccagagcattcattccctttcttcaagagctgaggactgggggggccactggtgatcagttcccaactctagctctcctctgactcatctcaggacccattgaggacatccaaaactcactcaagatcaccaagtggtaggaaagtactaactcctgggcatagccctaggggagtgactacaatgtgaatactcatggaatgcctagccaggtgaagaagtgaatgcatgttggcatcccagagggaccccccttaagagggcatagtttggggttcagatttgactccagcatactgttgaaattgggcacagggggctagtgattagtcaggatcaatcagtggagaggagattaaaactcacatctgggagtccggaatcagaacttgtagttcttttttttgaaatggagtctcgctctgtcgcccaggctggagtgcagtggcgtgatctcggctcactgcaacctctgccttccgggttcaagcaattctcccacctcagcctcctgagtagctgggattacaggcgcccaccaccacagccggctactttttgtatttttaggagagacggggtttcaccatgttggtcaggctggtcttgaactcctgacctcatgatccacctgccttagcctcccaaagtgctgggattacaggcgtgagccaccatgcccagccctatagtagttcttcttttgccccttaatatcctcacccacatgtcctgtaccctgcctgaaccctcctcctctttttgttctgatctttgagctccctagagcccataattctttagagcaggtatgtcccgagtctgaaacatgcccttatttgtcccaagctctggacatttctcaccccaaggcggatcaatcatgattaaatcactccaattaaactttaggctccagtcagaccttcagccaaatggaaaaaaaaactaggggataagggaggtagttggagcaagaaaatgttattagttgaaaccttacgggaccttcctcccttagtgagtctgttggctaaaggttctctggcttcgtgaattagaatcggatactgtttccaagttagcaaaaccaactctaccccagcaccccacgaggaagaatgtggaaggatctcccattggccggttggggcaaaagcctgaggcaatctttcatccccttttgccaaggcgagactttcccagtgacggtgatgtagttggccactctgactatgggtggactcgggtgtagacctctgaagctgagatcacacgaaaacctggcctccccgccatgtagctgttggagagtagaaaaatagagcacgcctgatgtttctaaatgagaagactttcaatagtaatgaagaatccatggcactctcctcaccctcaaacacatggcagtcattcacatacaggccccaaagccactgttagtgctgcagtagctcctgtggacattggaaagcccggagagggcgtggaagaaatcagctggcccccggcaggttctctggggttttgtgcccaaggctcctggagccctaaaaactttcaaaagttaactccccacgtccccatcctgcttgggtttctggacttttctgaggcaccggcagaggggtctcgttgctcccttgagtgtaggggcagccctttaacctggctccttgagtccctgctttttctgcttctgttgccttcttcctcgtcttcctctctctcaatatctccctctctttgtccctccccagttcctgacctggccatcccggggtgcccttgaccagccccgtgtctcctcagggtgtcccagcaccagcctggcacagagtggggctcagttagagtatgtgggatgttggtttcgccaggtgagtgaatgaaaggactcgaccaccacagctgagccactagctgggccatgcgaagagttctaggtgcaaaggctggagggtggaattcatttttgagaggtgtgtgagcagcttccgacccctgccccatttgaacgggggccttgctggtcgcgtccctgcattcacccgcgcggccatcccgtcatccaacagttgatcctaactgagcacgcccacggccctggtctggcctgggcaccggccaccgtagcccatcccttgatggcctctgtgtccccaggagggcgggccggggggttgcccaggggctggagcagtggactgtggctccatagaggtaggccggagggtgtgagggcagattcaagctatccccagggctctgctctggtcggagccagccccttctccctctctgccttccccgccccattcctgatgctgaactgttctggacccctggccctgagtctctcaggaccaaagtgggcacgggaacagctgtagtgtgtgcccccccgggctttggccacaggtctccctctcgaggtgtggttgtgactgcgacccttcccttgccgtgatgccttcctcccccggggcttggtccagctccttcactctctagcagctgctggggcccacctcccatgccgaggaccagcaggggaaacctccagggagcatctgcaggctctgcttctgcccggctgctggcttgctctccctggtggctctccagcggccagcttcctcacccacccggcactctgctttgctctgtctcctgaggtgggcctgaccaacctccccttctctgcctcagtccctgggctccagggctcagctccacagccctctgcctagcaggctggttctccctgccaagcccatacctgtggtcacctggccctcctgtggtctgagtaccactcccctgccccaggagccactcccactccagctgcctgtttccagcaggttcccagtgcccccgacaagcccctgctggtgtctccatctcctgccaagcatcctccagtgcctcctcctgtgggcctggcctcagggctatggacagactcctgtcccatcccagagacccctcgtgatcgtgccctggcacgtgggccgtggcccggctgggtcggctgaagaactgcggatggaagctgcggaagaggccctgatggggcccaccatcccggacccaagtcttcttcctggcgggcctctcgtctccttcctggtttgggcggaagcccatcacctggatgcctacgtgggaagggacctcgaatgtgggaccccagcccctctccagctcgaaatccctccacagccacggggacaccctgcacctattcccacgggacaggctggacccagagactctggacccggggcctccccttgagtagagacccgccctctgactgatggacgccgctgacctggggtcagacccgtgggctggacccctgcccaccccgcaggaaccctgaggcctaggggagctgttgagccttcagtgtctgcatgtgggaagtgggctccttcacctacctcacagggctgttgtgaggggcgctgtgatgcggttccaaagcacagggcttggcgcaccccactgtgctctcaataaatgtgtttcctgtcttaacaaaaaaaaaaaaaaaaaaaaaaaaaaaaaaaaaaaaaaaaaaaaaaaaaaaaaaaaaaaaaaaaaaaaaaaaaaaaacaaaaaaaaatataacataaaagaaaaaaaaataataaacaaccaaaaatctaaaataaaaccgtggccctttttttaaaaaccatgctaaagggaaaacccttgccgtgccccaatttaaccgtttgggagaaatccccttttcgcggggggttattttcaaagggcccctcgcaaacccttgtcaaacagtccaaaccctgatggcaaaggcaattttacgctttattttttgtaaaatcccttaaattttggccaaaaacctgttttttacccaataggccaaatgcctaaatccctttaaattaaagaaattccccgaataggttggacttctccacatttgaaccaaagtcccttttaaaaaagggcttcaactgcaagggggctcgttttagggctgtgcgcctttggaaccatccccttataaatattgaggtcaggggcacaggattatattgcaccctgggacctcctttttctcct

SEQ ID NO: 736349 - DNA, 7999 bp, Homo sapiens
gattcgtttacccaagagggaacagttttgagaccccccggattcactgcggagtggccgcagaggccggggtcggcctttgcgccgtggcttcgggtgttgtggaggcgcacagagggtctctcctcagggatgacatcatccgtccacctccttgtcttcaaggaccacctcctctccatgctgagctgctgccaaggggcctgctgcccatctacacctcacgagggcactaggagcacggtttcctggatcccaccaacatacaaagcagccactcactgacccccaggaccaggatggcaaaggatgaagaggaccggaactgaccagccagctgtccctcttacctaaagacttaaaccaatgccctagtgagggggcattgggcattaagccctgacctttgctatgctcatactttgactctatgagtactttcctataagtctttgcttgtgttcacctgctagcaaactggagtgtttccctccccaagggggtgtcagtctttgtcgactgactctgtcatcacccttatgatgtcctgaatggaaggatccctttgggaaattctcaggagggggacctgggccaagggcttggccagcatcctgctggcaactccaaggccctgggtgggcttctggaatgagcatgctactgaatcaccaaaggcacgccccacctctctgaagatcttcctatccttttctgggggaatggggtcgatgagagcaacctcctagggttgttgtgagaattaaatgagataaaagaggcctcaggcaggatctggcatagaggaggtgatcagcaaatgtttgttgaaaaggtttgacaggtcagtcccttcccacccctcttgcttgtcttacttgtcttatttattctccaacagcactccaggcagcccttgtccacgggctctccttgcatcaggtaggggctttgcagagaccatcgacgggctgacttgagtaagaacacgaattatgcatgtggccatttccagagcactttctatgtgatatgaacatgtgatttttatgtaatatgtgtatgtaaacgaggcagcctcatttccaggtgaggatgcatttggtagtgttgatttttgtaatttaaagaagctgaaagggagagaggacccgtgaggactgaactctctgtcccatggggtagggcttacatttacattaaagaaacagaaacttgctgggaggtgtaagtatttggtcacattgctggcaacagaaggggttggagttggacccagggtgccacgctagctgccctcaccccttcttcccctctggcccagagttatactaagagtccttttatttcaaaccaaatgtttgacaatgggacagtctgtttgaaatcccagctgcctggggtggtcttgggggtctgggtggccccagtgctggtaccatgtgctggcttcaccttttaataacagtgtgaccttaaacaagtcgcttaactactctaagtttcagtttctttcatggtctaaatggagattaaaacacacacacacacacacacacacacacacacacacacacaccctcgtgtatctaccccacagggcgcttttgaagaccaaatgctgtaactactatgaaagtgctttgtaaattgctgtggaaagtgtgagctactcaagcacccgaggctgtccctccttgctcacatgtccagcccaattctcccttagtgagaacagcactcagtaggtgctgtgtgtgtttgtgttcaattaagaaattccagaataaataaaaatgaattaattcaacaaacattttctggggcaccgacaatctgcccagtgcaccaggctaggtatctgatacaaagataatgaaaacagtctcttggaacctaattggggtcctcatttgaccaggaatttctttcgtcccgttttaagccaaccagttttgtccggacaagacaaaaacaacttgggctgctttagagaagcccagctcagtgtagacaatagctgcccagcctctgaaaggggctgattggattatgtggcaaatggaggtgcaaggatgacttggacggtgacaaatgaagtgggcggagacctgctttgagttaatccaggctattaggaggggaccttttgtcttccagagactggcaggagcttttaccagtggtttttacatccttaatgttcaggacgaataatttatggtcagtgaaaatccaggccccagtgagattcgagtgggctgtaaaatcgagagtcctgctcccagtgagtaatggtagtgaatgtttctgtcactttttgcaaccgtccattcatttgatcctcacaactccctgtcctgagccaggaccggccactgccactcccagggaaacagaggctgtcaagaggctccacagattgggccccactggatcattgaacccctgttccctgagttctagaggaagaattgtacctgtctcagtcccggccacctccagaaggcctccctctgcatttctgactttgctgtgccggcagcctggagcctcccaggtccctgctgtcatcttttctagccactacagtctctgtctttcctttcacagcccaagcttcttgaaaggcctgtctacacttgctgtcttccttcctcacctccaatttcctcttcaacccactgcttcctgactcgctctactccgtggaagcacgctcacaaaggtaaagacttttctgtggcttaatccttgtcatgttttcggctcatggacacaaggacacattttcatgccttctctcacagggctctgcgtctccggttcacttctgtgtctttacactcccttcacagagacacttgctcccccttctctcgttcttagcatcccctaggaacttgcacacccaggtctctcgacttctggacctgcttcttaccatgccgtcttaagcagtcaggagtcgctgcctgggttcgagtcctagttaaattacttagtgctgagaccttggggtaggtaaacttttccaagccaggtttatctcagtttcaaaatagggttaatcgtctttatctggcaggtcaggtgggatgtctcacaggtaagcaccagatgccatttgaaaggcttgaagcaaagtcaataaagcattcatgggaaaatacaactggaggcaccactagattttcgtatacattaggttcccacggggaggaccgaagagagaagaaagaagtggaaagggaggagcgtgcaggagagacaggagaagagaataactaaacaaagacattaaagacaaaaaaaaagtaggaaagggagacttagaaaatattaaaagccaccaaaaacacatccaaagacggtttccccttacgttagttgggctaaaagaaagcaaatgggaagaaggttttaaattgattatcccagtgacaaatcccaggaagctttcacatcaaatcaccctattctgggtttttaactccttccatcgagtttaacctctttacctcccacatcctggtaaaccctgccccctccctaccgccccctttgctggtgattaaatcctgaaggtacacgaagtatttcagtgaatgaatggctaacagaaaagggcctcccctcccccttaccctgggcggtgtttttcagttttattccactttccgcccttttcccttaatgaacacagggctaatctcgggccttgtcgaaggaagaggctgcagacgttaatgaggttagctgctggattccagtattcgtcgcataaggatccttctttgtctgcgaaggaaaaacacactgattatcataatgagatgaggtgaactggccaccgccgggccggggcgatgtggcttcttaagccacacttctaattttggtgatggagccgacatttctttggctcctcatttaagtctttgcctctgtcccagtgcgaagtccattcagcggggttgaaagttgcaggcagctttgggaaggggggcgtcggacagggttgcattgtagaaagtggctttgttcgatccttcgcacagatgcaaatggccagagcattcattccctttcttcaagagctgaggactgggggggccactggtgatcagttcccaactctagctctcctctgactcatctcaggacccattgaggacatccaaaactcactcaagatcaccaagtggtaggaaagtactaactcctgggcatagccctaggggagtgactacaatgtgaatactcatggaatgcctagccaggtgaagaagtgaatgcatgttggcatcccagagggaccccccttaagagggcatagtttggggttcagatttgactccagcatactgttgaaattgggcacagggggctagtgattagtcaggatcaatcagtggagaggagattaaaactcacatctgggagtccggaatcagaacttgtagttcttttttttgaaatggagtctcgctctgtcgcccaggctggagtgcagtggcgtgatctcggctcactgcaacctctgccttccgggttcaagcaattctcccacctcagcctcctgagtagctgggattacaggcgcccaccaccacagccggctactttttgtatttttaggagagacggggtttcaccatgttggtcaggctggtcttgaactcctgacctcatgatccacctgccttagcctcccaaagtgctgggattacaggcgtgagccaccatgcccagccctatagtagttcttcttttgccccttaatatcctcacccacatgtcctgtaccctgcctgaaccctcctcctctttttgttctgatctttgagctccctagagcccataattctttagagcaggtatgtcccgagtctgaaacatgcccttatttgtcccaagctctggacatttctcaccccaaggcggatcaatcatgattaaatcactccaattaaactttaggctccagtcagaccttcagccaaatggaaaaaaaaactaggggataagggaggtagttggagcaagaaaatgttattagttgaaaccttacgggaccttcctcccttagtgagtctgttggctaaaggttctctggcttcgtgaattagaatcggatactgtttccaagttagcaaaaccaactctaccccagcaccccacgaggaagaatgtggaaggatctcccattggccggttggggcaaaagcctgaggcaatctttcatccccttttgccaaggcgagactttcccagtgacggtgatgtagttggccactctgactatgggtggactcgggtgtagacctctgaagctgagatcacacgaaaacctggcctccccgccatgtagctgttggagagtagaaaaatagagcacgcctgatgtttctaaatgagaagactttcaatagtaatgaagaatccatggcactctcctcaccctcaaacacatggcagtcattcacatacaggccccaaagccactgttagtgctgcagtagctcctgtggacattggaaagcccggagagggcgtggaagaaatcagctggcccccggcaggttctctggggttttgtgcccaaggctcctggagccctaaaaactttcaaaagttaactccccacgtccccatcctgcttgggtttctggacttttctgaggcaccggcagaggggtctcgttgctcccttgagtgtaggggcagccctttaacctggctccttgagtccctgctttttctgcttctgttgccttcttcctcgtcttcctctctctcaatatctccctctctttgtccctccccagttcctgacctggccatcccggggtgcccttgaccagccccgtgtctcctcagggtgtcccagcaccagcctggcacagagtggggctcagttagagtatgtgggatgttggtttcgccaggtgagtgaatgaaaggactcgaccaccacagctgagccactagctgggccatgcgaagagttctaggtgcaaaggctggagggtggaattcatttttgagaggtgtgtgagcagcttccgacccctgccccatttgaacgggggccttgctggtcgcgtccctgcattcacccgcgcggccatcccgtcatccaacagttgatcctaactgagcacgcccacggccctggtctggcctgggcaccggccaccgtagcccatcccttgatggcctctgtgtccccaggagggcgggccggggggttgcccaggggctggagcagtggactgtggctccatagaggtaggccggagggtgtgagggcagattcaagctatccccagggctctgctctggtcggagccagccccttctccctctctgccttccccgccccattcctgatgctgaactgttctggacccctggccctgagtctctcaggaccaaagtgggcacgggaacagctgtagtgtgtgcccccccgggctttggccacaggtctccctctcgaggtgtggttgtgactgcgacccttcccttgccgtgatgccttcctcccccggggcttggtccagctccttcactctctagcagctgctggggcccacctcccatgccgaggaccagcaggggaaacctccagggagcatctgcaggctctgcttctgcccggctgctggcttgctctccctggtggctctccagcggccagcttcctcacccacccggcactctgctttgctctgtctcctgaggtgggcctgaccaacctccccttctctgcctcagtccctgggctccagggctcagctccacagccctctgcctagcaggctggttctccctgccaagcccatacctgtggtcacctggccctcctgtggtctgagtaccactcccctgccccaggagccactcccactccagctgcctgtttccagcaggttcccagtgcccccgacaagcccctgctggtgtctccatctcctgccaagcatcctccagtgcctcctcctgtgggcctggcctcagggctatggacagactcctgtcccatcccagagacccctcgtgatcgtgccctggcacgtgggccgtggcccggctgggtcggctgaagaactgcggatggaagctgcggaagaggccctgatggggcccaccatcccggacccaagtcttcttcctggcgggcctctcgtctccttcctggtttgggcggaagcccatcacctggatgcctacgtgggaagggacctcgaatgtgggaccccagcccctctccagctcgaaatccctccacagccacggggacaccctgcacctattcccacgggacaggctggacccagagactctggacccggggcctccccttgagtagagacccgccctctgactgatggacgccgctgacctggggtcagacccgtgggctggacccctgcccaccccgcaggaaccctgaggcctaggggagctgttgagccttcagtgtctgcatgtgggaagtgggctccttcacctacctcacagggctgttgtgaggggcgctgtgatgcggttccaaagcacagggcttggcgcaccccactgtgctctcaataaatgtgtttcctgtcttaacaaaaaggacaaagacggccataaagacgaaagagacagacagtgcagaataaaattcgagaagcgttccgcgagcctgagtaagatggagatggctatattattgctgtagaacgtcgcaatgtgaaacccaggcggggggaccgggtaccgatgacgaaaacgtggagatgatcacggtaacgggtcgtgccttaaaaggtatgggcacgataaccaggtggtaccaccgatcaaagcactgtgaagaccatcgcctctatcgcgatgggcgggaatgatcaacagttgctcaccctgagcatttcttgttcttcttcggggagagaattcaggggctcgcatttacgggaaccgagaacctgttcctttatttccc

SEQ ID NO: 736350 - DNA, 7873 bp, Homo sapiens
gattcgtttacccaagagggaacagttttgagaccccccggattcactgcggagtggccgcagaggccggggtcggcctttgcgccgtggcttcgggtgttgtggaggcgcacagagggtctctcctcagggatgacatcatccgtccacctccttgtcttcaaggaccacctcctctccatgctgagctgctgccaaggggcctgctgcccatctacacctcacgagggcactaggagcacggtttcctggatcccaccaacatacaaagcagccactcactgacccccaggaccaggatggcaaaggatgaagaggaccggaactgaccagccagctgtccctcttacctaaagacttaaaccaatgccctagtgagggggcattgggcattaagccctgacctttgctatgctcatactttgactctatgagtactttcctataagtctttgcttgtgttcacctgctagcaaactggagtgtttccctccccaagggggtgtcagtctttgtcgactgactctgtcatcacccttatgatgtcctgaatggaaggatccctttgggaaattctcaggagggggacctgggccaagggcttggccagcatcctgctggcaactccaaggccctgggtgggcttctggaatgagcatgctactgaatcaccaaaggcacgccccacctctctgaagatcttcctatccttttctgggggaatggggtcgatgagagcaacctcctagggttgttgtgagaattaaatgagataaaagaggcctcaggcaggatctggcatagaggaggtgatcagcaaatgtttgttgaaaaggtttgacaggtcagtcccttcccacccctcttgcttgtcttacttgtcttatttattctccaacagcactccaggcagcccttgtccacgggctctccttgcatcaggtaggggctttgcagagaccatcgacgggctgacttgagtaagaacacgaattatgcatgtggccatttccagagcactttctatgtgatatgaacatgtgatttttatgtaatatgtgtatgtaaacgaggcagcctcatttccaggtgaggatgcatttggtagtgttgatttttgtaatttaaagaagctgaaagggagagaggacccgtgaggactgaactctctgtcccatggggtagggcttacatttacattaaagaaacagaaacttgctgggaggtgtaagtatttggtcacattgctggcaacagaaggggttggagttggacccagggtgccacgctagctgccctcaccccttcttcccctctggcccagagttatactaagagtccttttatttcaaaccaaatgtttgacaatgggacagtctgtttgaaatcccagctgcctggggtggtcttgggggtctgggtggccccagtgctggtaccatgtgctggcttcaccttttaataacagtgtgaccttaaacaagtcgcttaactactctaagtttcagtttctttcatggtctaaatggagattaaaacacacacacacacacacacacacacacacacacacacacaccctcgtgtatctaccccacagggcgcttttgaagaccaaatgctgtaactactatgaaagtgctttgtaaattgctgtggaaagtgtgagctactcaagcacccgaggctgtccctccttgctcacatgtccagcccaattctcccttagtgagaacagcactcagtaggtgctgtgtgtgtttgtgttcaattaagaaattccagaataaataaaaatgaattaattcaacaaacattttctggggcaccgacaatctgcccagtgcaccaggctaggtatctgatacaaagataatgaaaacagtctcttggaacctaattggggtcctcatttgaccaggaatttctttcgtcccgttttaagccaaccagttttgtccggacaagacaaaaacaacttgggctgctttagagaagcccagctcagtgtagacaatagctgcccagcctctgaaaggggctgattggattatgtggcaaatggaggtgcaaggatgacttggacggtgacaaatgaagtgggcggagacctgctttgagttaatccaggctattaggaggggaccttttgtcttccagagactggcaggagcttttaccagtggtttttacatccttaatgttcaggacgaataatttatggtcagtgaaaatccaggccccagtgagattcgagtgggctgtaaaatcgagagtcctgctcccagtgagtaatggtagtgaatgtttctgtcactttttgcaaccgtccattcatttgatcctcacaactccctgtcctgagccaggaccggccactgccactcccagggaaacagaggctgtcaagaggctccacagattgggccccactggatcattgaacccctgttccctgagttctagaggaagaattgtacctgtctcagtcccggccacctccagaaggcctccctctgcatttctgactttgctgtgccggcagcctggagcctcccaggtccctgctgtcatcttttctagccactacagtctctgtctttcctttcacagcccaagcttcttgaaaggcctgtctacacttgctgtcttccttcctcacctccaatttcctcttcaacccactgcttcctgactcgctctactccgtggaagcacgctcacaaaggtaaagacttttctgtggcttaatccttgtcatgttttcggctcatggacacaaggacacattttcatgccttctctcacagggctctgcgtctccggttcacttctgtgtctttacactcccttcacagagacacttgctcccccttctctcgttcttagcatcccctaggaacttgcacacccaggtctctcgacttctggacctgcttcttaccatgccgtcttaagcagtcaggagtcgctgcctgggttcgagtcctagttaaattacttagtgctgagaccttggggtaggtaaacttttccaagccaggtttatctcagtttcaaaatagggttaatcgtctttatctggcaggtcaggtgggatgtctcacaggtaagcaccagatgccatttgaaaggcttgaagcaaagtcaataaagcattcatgggaaaatacaactggaggcaccactagattttcgtatacattaggttcccacggggaggaccgaagagagaagaaagaagtggaaagggaggagcgtgcaggagagacaggagaagagaataactaaacaaagacattaaagacaaaaaaaaagtaggaaagggagacttagaaaatattaaaagccaccaaaaacacatccaaagacggtttccccttacgttagttgggctaaaagaaagcaaatgggaagaaggttttaaattgattatcccagtgacaaatcccaggaagctttcacatcaaatcaccctattctgggtttttaactccttccatcgagtttaacctctttacctcccacatcctggtaaaccctgccccctccctaccgccccctttgctggtgattaaatcctgaaggtacacgaagtatttcagtgaatgaatggctaacagaaaagggcctcccctcccccttaccctgggcggtgtttttcagttttattccactttccgcccttttcccttaatgaacacagggctaatctcgggccttgtcgaaggaagaggctgcagacgttaatgaggttagctgctggattccagtattcgtcgcataaggatccttctttgtctgcgaaggaaaaacacactgattatcataatgagatgaggtgaactggccaccgccgggccggggcgatgtggcttcttaagccacacttctaattttggtgatggagccgacatttctttggctcctcatttaagtctttgcctctgtcccagtgcgaagtccattcagcggggttgaaagttgcaggcagctttgggaaggggggcgtcggacagggttgcattgtagaaagtggctttgttcgatccttcgcacagatgcaaatggccagagcattcattccctttcttcaagagctgaggactgggggggccactggtgatcagttcccaactctagctctcctctgactcatctcaggacccattgaggacatccaaaactcactcaagatcaccaagtggtaggaaagtactaactcctgggcatagccctaggggagtgactacaatgtgaatactcatggaatgcctagccaggtgaagaagtgaatgcatgttggcatcccagagggaccccccttaagagggcatagtttggggttcagatttgactccagcatactgttgaaattgggcacagggggctagtgattagtcaggatcaatcagtggagaggagattaaaactcacatctgggagtccggaatcagaacttgtagttcttttttttgaaatggagtctcgctctgtcgcccaggctggagtgcagtggcgtgatctcggctcactgcaacctctgccttccgggttcaagcaattctcccacctcagcctcctgagtagctgggattacaggcgcccaccaccacagccggctactttttgtatttttaggagagacggggtttcaccatgttggtcaggctggtcttgaactcctgacctcatgatccacctgccttagcctcccaaagtgctgggattacaggcgtgagccaccatgcccagccctatagtagttcttcttttgccccttaatatcctcacccacatgtcctgtaccctgcctgaaccctcctcctctttttgttctgatctttgagctccctagagcccataattctttagagcaggtatgtcccgagtctgaaacatgcccttatttgtcccaagctctggacatttctcaccccaaggcggatcaatcatgattaaatcactccaattaaactttaggctccagtcagaccttcagccaaatggaaaaaaaaactaggggataagggaggtagttggagcaagaaaatgttattagttgaaaccttacgggaccttcctcccttagtgagtctgttggctaaaggttctctggcttcgtgaattagaatcggatactgtttccaagttagcaaaaccaactctaccccagcaccccacgaggaagaatgtggaaggatctcccattggccggttggggcaaaagcctgaggcaatctttcatccccttttgccaaggcgagactttcccagtgacggtgatgtagttggccactctgactatgggtggactcgggtgtagacctctgaagctgagatcacacgaaaacctggcctccccgccatgtagctgttggagagtagaaaaatagagcacgcctgatgtttctaaatgagaagactttcaatagtaatgaagaatccatggcactctcctcaccctcaaacacatggcagtcattcacatacaggccccaaagccactgttagtgctgcagtagctcctgtggacattggaaagcccggagagggcgtggaagaaatcagctggcccccggcaggttctctggggttttgtgcccaaggctcctggagccctaaaaactttcaaaagttaactccccacgtccccatcctgcttgggtttctggacttttctgaggcaccggcagaggggtctcgttgctcccttgagtgtaggggcagccctttaacctggctccttgagtccctgctttttctgcttctgttgccttcttcctcgtcttcctctctctcaatatctccctctctttgtccctccccagttcctgacctggccatcccggggtgcccttgaccagccccgtgtctcctcagggtgtcccagcaccagcctggcacagagtggggctcagttagagtatgtgggatgttggtttcgccaggtgagtgaatgaaaggactcgaccaccacagctgagccactagctgggccatgcgaagagttctaggtgcaaaggctggagggtggaattcatttttgagaggtgtgtgagcagcttccgacccctgccccatttgaacgggggccttgctggtcgcgtccctgcattcacccgcgcggccatcccgtcatccaacagttgatcctaactgagcacgcccacggccctggtctggcctgggcaccggccaccgtagcccatcccttgatggcctctgtgtccccaggagggcgggccggggggttgcccaggggctggagcagtggactgtggctccatagaggtaggccggagggtgtgagggcagattcaagctatccccagggctctgctctggtcggagccagccccttctccctctctgccttccccgccccattcctgatgctgaactgttctggacccctggccctgagtctctcaggaccaaagtgggcacgggaacagctgtagtgtgtgcccccccgggctttggccacaggtctccctctcgaggtgtggttgtgactgcgacccttcccttgccgtgatgccttcctcccccggggcttggtccagctccttcactctctagcagctgctggggcccacctcccatgccgaggaccagcaggggaaacctccagggagcatctgcaggctctgcttctgcccggctgctggcttgctctccctggtggctctccagcggccagcttcctcacccacccggcactctgctttgctctgtctcctgaggtgggcctgaccaacctccccttctctgcctcagtccctgggctccagggctcagctccacagccctctgcctagcaggctggttctccctgccaagcccatacctgtggtcacctggccctcctgtggtctgagtaccactcccctgccccaggagccactcccactccagctgcctgtttccagcaggttcccagtgcccccgacaagcccctgctggtgtctccatctcctgccaagcatcctccagtgcctcctcctgtgggcctggcctcagggctatggacagactcctgtcccatcccagagacccctcgtgatcgtgccctggcacgtgggccgtggcccggctgggtcggctgaagaactgcggatggaagctgcggaagaggccctgatggggcccaccatcccggacccaagtcttcttcctggcgggcctctcgtctccttcctggtttgggcggaagcccatcacctggatgcctacgtgggaagggacctcgaatgtgggaccccagcccctctccagctcgaaatccctccacagccacggggacaccctgcacctattcccacgggacaggctggacccagagactctggacccggggcctccccttgagtagagacccgccctctgactgatggacgccgctgacctggggtcagacccgtgggctggacccctgcccaccccgcaggaaccctgaggcctaggggagctgttgagccttcagtgtctgcatgtgggaagtgggctccttcacctacctcacagggctgttgtgaggggcgctgtgatgcggttccaaagcacagggcttggcgcaccccactgtgctctcaataaatgtgtttcctgtcttaacaaaaaaaaagcatataacaacaattagaaatgacgaatcgtcgctgcgtcactaaatgacagaggcgcaagagacatagatatacgaccgctcgcactactacacagggggaccagggagacgtactatcgacgctaccgcccgccgaccgcgcgagggagagacgcgaccgcacgacacagcatcagcctaagccttcgagacgcgaccgaagaagagagaagagaagaaacgcagacaggaagaggcgcc

SEQ ID NO: 736351 - DNA, 8041 bp, Homo sapiens
gattcgtttacccaagagggaacagttttgagaccccccggattcactgcggagtggccgcagaggccggggtcggcctttgcgccgtggcttcgggtgttgtggaggcgcacagagggtctctcctcagggatgacatcatccgtccacctccttgtcttcaaggaccacctcctctccatgctgagctgctgccaaggggcctgctgcccatctacacctcacgagggcactaggagcacggtttcctggatcccaccaacatacaaagcagccactcactgacccccaggaccaggatggcaaaggatgaagaggaccggaactgaccagccagctgtccctcttacctaaagacttaaaccaatgccctagtgagggggcattgggcattaagccctgacctttgctatgctcatactttgactctatgagtactttcctataagtctttgcttgtgttcacctgctagcaaactggagtgtttccctccccaagggggtgtcagtctttgtcgactgactctgtcatcacccttatgatgtcctgaatggaaggatccctttgggaaattctcaggagggggacctgggccaagggcttggccagcatcctgctggcaactccaaggccctgggtgggcttctggaatgagcatgctactgaatcaccaaaggcacgccccacctctctgaagatcttcctatccttttctgggggaatggggtcgatgagagcaacctcctagggttgttgtgagaattaaatgagataaaagaggcctcaggcaggatctggcatagaggaggtgatcagcaaatgtttgttgaaaaggtttgacaggtcagtcccttcccacccctcttgcttgtcttacttgtcttatttattctccaacagcactccaggcagcccttgtccacgggctctccttgcatcaggtaggggctttgcagagaccatcgacgggctgacttgagtaagaacacgaattatgcatgtggccatttccagagcactttctatgtgatatgaacatgtgatttttatgtaatatgtgtatgtaaacgaggcagcctcatttccaggtgaggatgcatttggtagtgttgatttttgtaatttaaagaagctgaaagggagagaggacccgtgaggactgaactctctgtcccatggggtagggcttacatttacattaaagaaacagaaacttgctgggaggtgtaagtatttggtcacattgctggcaacagaaggggttggagttggacccagggtgccacgctagctgccctcaccccttcttcccctctggcccagagttatactaagagtccttttatttcaaaccaaatgtttgacaatgggacagtctgtttgaaatcccagctgcctggggtggtcttgggggtctgggtggccccagtgctggtaccatgtgctggcttcaccttttaataacagtgtgaccttaaacaagtcgcttaactactctaagtttcagtttctttcatggtctaaatggagattaaaacacacacacacacacacacacacacacacacacacacacaccctcgtgtatctaccccacagggcgcttttgaagaccaaatgctgtaactactatgaaagtgctttgtaaattgctgtggaaagtgtgagctactcaagcacccgaggctgtccctccttgctcacatgtccagcccaattctcccttagtgagaacagcactcagtaggtgctgtgtgtgtttgtgttcaattaagaaattccagaataaataaaaatgaattaattcaacaaacattttctggggcaccgacaatctgcccagtgcaccaggctaggtatctgatacaaagataatgaaaacagtctcttggaacctaattggggtcctcatttgaccaggaatttctttcgtcccgttttaagccaaccagttttgtccggacaagacaaaaacaacttgggctgctttagagaagcccagctcagtgtagacaatagctgcccagcctctgaaaggggctgattggattatgtggcaaatggaggtgcaaggatgacttggacggtgacaaatgaagtgggcggagacctgctttgagttaatccaggctattaggaggggaccttttgtcttccagagactggcaggagcttttaccagtggtttttacatccttaatgttcaggacgaataatttatggtcagtgaaaatccaggccccagtgagattcgagtgggctgtaaaatcgagagtcctgctcccagtgagtaatggtagtgaatgtttctgtcactttttgcaaccgtccattcatttgatcctcacaactccctgtcctgagccaggaccggccactgccactcccagggaaacagaggctgtcaagaggctccacagattgggccccactggatcattgaacccctgttccctgagttctagaggaagaattgtacctgtctcagtcccggccacctccagaaggcctccctctgcatttctgactttgctgtgccggcagcctggagcctcccaggtccctgctgtcatcttttctagccactacagtctctgtctttcctttcacagcccaagcttcttgaaaggcctgtctacacttgctgtcttccttcctcacctccaatttcctcttcaacccactgcttcctgactcgctctactccgtggaagcacgctcacaaaggtaaagacttttctgtggcttaatccttgtcatgttttcggctcatggacacaaggacacattttcatgccttctctcacagggctctgcgtctccggttcacttctgtgtctttacactcccttcacagagacacttgctcccccttctctcgttcttagcatcccctaggaacttgcacacccaggtctctcgacttctggacctgcttcttaccatgccgtcttaagcagtcaggagtcgctgcctgggttcgagtcctagttaaattacttagtgctgagaccttggggtaggtaaacttttccaagccaggtttatctcagtttcaaaatagggttaatcgtctttatctggcaggtcaggtgggatgtctcacaggtaagcaccagatgccatttgaaaggcttgaagcaaagtcaataaagcattcatgggaaaatacaactggaggcaccactagattttcgtatacattaggttcccacggggaggaccgaagagagaagaaagaagtggaaagggaggagcgtgcaggagagacaggagaagagaataactaaacaaagacattaaagacaaaaaaaaagtaggaaagggagacttagaaaatattaaaagccaccaaaaacacatccaaagacggtttccccttacgttagttgggctaaaagaaagcaaatgggaagaaggttttaaattgattatcccagtgacaaatcccaggaagctttcacatcaaatcaccctattctgggtttttaactccttccatcgagtttaacctctttacctcccacatcctggtaaaccctgccccctccctaccgccccctttgctggtgattaaatcctgaaggtacacgaagtatttcagtgaatgaatggctaacagaaaagggcctcccctcccccttaccctgggcggtgtttttcagttttattccactttccgcccttttcccttaatgaacacagggctaatctcgggccttgtcgaaggaagaggctgcagacgttaatgaggttagctgctggattccagtattcgtcgcataaggatccttctttgtctgcgaaggaaaaacacactgattatcataatgagatgaggtgaactggccaccgccgggccggggcgatgtggcttcttaagccacacttctaattttggtgatggagccgacatttctttggctcctcatttaagtctttgcctctgtcccagtgcgaagtccattcagcggggttgaaagttgcaggcagctttgggaaggggggcgtcggacagggttgcattgtagaaagtggctttgttcgatccttcgcacagatgcaaatggccagagcattcattccctttcttcaagagctgaggactgggggggccactggtgatcagttcccaactctagctctcctctgactcatctcaggacccattgaggacatccaaaactcactcaagatcaccaagtggtaggaaagtactaactcctgggcatagccctaggggagtgactacaatgtgaatactcatggaatgcctagccaggtgaagaagtgaatgcatgttggcatcccagagggaccccccttaagagggcatagtttggggttcagatttgactccagcatactgttgaaattgggcacagggggctagtgattagtcaggatcaatcagtggagaggagattaaaactcacatctgggagtccggaatcagaacttgtagttcttttttttgaaatggagtctcgctctgtcgcccaggctggagtgcagtggcgtgatctcggctcactgcaacctctgccttccgggttcaagcaattctcccacctcagcctcctgagtagctgggattacaggcgcccaccaccacagccggctactttttgtatttttaggagagacggggtttcaccatgttggtcaggctggtcttgaactcctgacctcatgatccacctgccttagcctcccaaagtgctgggattacaggcgtgagccaccatgcccagccctatagtagttcttcttttgccccttaatatcctcacccacatgtcctgtaccctgcctgaaccctcctcctctttttgttctgatctttgagctccctagagcccataattctttagagcaggtatgtcccgagtctgaaacatgcccttatttgtcccaagctctggacatttctcaccccaaggcggatcaatcatgattaaatcactccaattaaactttaggctccagtcagaccttcagccaaatggaaaaaaaaactaggggataagggaggtagttggagcaagaaaatgttattagttgaaaccttacgggaccttcctcccttagtgagtctgttggctaaaggttctctggcttcgtgaattagaatcggatactgtttccaagttagcaaaaccaactctaccccagcaccccacgaggaagaatgtggaaggatctcccattggccggttggggcaaaagcctgaggcaatctttcatccccttttgccaaggcgagactttcccagtgacggtgatgtagttggccactctgactatgggtggactcgggtgtagacctctgaagctgagatcacacgaaaacctggcctccccgccatgtagctgttggagagtagaaaaatagagcacgcctgatgtttctaaatgagaagactttcaatagtaatgaagaatccatggcactctcctcaccctcaaacacatggcagtcattcacatacaggccccaaagccactgttagtgctgcagtagctcctgtggacattggaaagcccggagagggcgtggaagaaatcagctggcccccggcaggttctctggggttttgtgcccaaggctcctggagccctaaaaactttcaaaagttaactccccacgtccccatcctgcttgggtttctggacttttctgaggcaccggcagaggggtctcgttgctcccttgagtgtaggggcagccctttaacctggctccttgagtccctgctttttctgcttctgttgccttcttcctcgtcttcctctctctcaatatctccctctctttgtccctccccagttcctgacctggccatcccggggtgcccttgaccagccccgtgtctcctcagggtgtcccagcaccagcctggcacagagtggggctcagttagagtatgtgggatgttggtttcgccaggtgagtgaatgaaaggactcgaccaccacagctgagccactagctgggccatgcgaagagttctaggtgcaaaggctggagggtggaattcatttttgagaggtgtgtgagcagcttccgacccctgccccatttgaacgggggccttgctggtcgcgtccctgcattcacccgcgcggccatcccgtcatccaacagttgatcctaactgagcacgcccacggccctggtctggcctgggcaccggccaccgtagcccatcccttgatggcctctgtgtccccaggagggcgggccggggggttgcccaggggctggagcagtggactgtggctccatagaggtaggccggagggtgtgagggcagattcaagctatccccagggctctgctctggtcggagccagccccttctccctctctgccttccccgccccattcctgatgctgaactgttctggacccctggccctgagtctctcaggaccaaagtgggcacgggaacagctgtagtgtgtgcccccccgggctttggccacaggtctccctctcgaggtgtggttgtgactgcgacccttcccttgccgtgatgccttcctcccccggggcttggtccagctccttcactctctagcagctgctggggcccacctcccatgccgaggaccagcaggggaaacctccagggagcatctgcaggctctgcttctgcccggctgctggcttgctctccctggtggctctccagcggccagcttcctcacccacccggcactctgctttgctctgtctcctgaggtgggcctgaccaacctccccttctctgcctcagtccctgggctccagggctcagctccacagccctctgcctagcaggctggttctccctgccaagcccatacctgtggtcacctggccctcctgtggtctgagtaccactcccctgccccaggagccactcccactccagctgcctgtttccagcaggttcccagtgcccccgacaagcccctgctggtgtctccatctcctgccaagcatcctccagtgcctcctcctgtgggcctggcctcagggctatggacagactcctgtcccatcccagagacccctcgtgatcgtgccctggcacgtgggccgtggcccggctgggtcggctgaagaactgcggatggaagctgcggaagaggccctgatggggcccaccatcccggacccaagtcttcttcctggcgggcctctcgtctccttcctggtttgggcggaagcccatcacctggatgcctacgtgggaagggacctcgaatgtgggaccccagcccctctccagctcgaaatccctccacagccacggggacaccctgcacctattcccacgggacaggctggacccagagactctggacccggggcctccccttgagtagagacccgccctctgactgatggacgccgctgacctggggtcagacccgtgggctggacccctgcccaccccgcaggaaccctgaggcctaggggagctgttgagccttcagtgtctgcatgtgggaagtgggctccttcacctacctcacagggctgttgtgaggggcgctgtgatgcggttccaaagcacagggcttggcgcaccccactgtgctctcaataaatgtgtttcctgtcttaacaaaaaaaaaaaaaaaaaaaaaaaaaaaaaaaaaaaaaaaaaaaaaaaaaaactagagggggggcccgctccccaatgggccctatagagagtcagttcacaatcaattgagtcgccttcaacaaccgtgggactggaaaaaccctgcctgcacccaactaaattgcttggcagcaaatacacctttctgcagctggcttattaactagcaggccggcacggatcgaacttcctaacaatggcgtcacctgcatgggtgaacggcaggttggttggcgggaatacttatgttaaagccaaatcccctcataaattaatagaatgatccgacatagggtggactggtgttccattctggaccatcaatccattattaaggacggagctttcaaccacgaagggggaaacacctctgtttggg

SEQ ID NO: 736352 - DNA, 7945 bp, Homo sapiens
gattcgtttacccaagagggaacagttttgagaccccccggattcactgcggagtggccgcagaggccggggtcggcctttgcgccgtggcttcgggtgttgtggaggcgcacagagggtctctcctcagggatgacatcatccgtccacctccttgtcttcaaggaccacctcctctccatgctgagctgctgccaaggggcctgctgcccatctacacctcacgagggcactaggagcacggtttcctggatcccaccaacatacaaagcagccactcactgacccccaggaccaggatggcaaaggatgaagaggaccggaactgaccagccagctgtccctcttacctaaagacttaaaccaatgccctagtgagggggcattgggcattaagccctgacctttgctatgctcatactttgactctatgagtactttcctataagtctttgcttgtgttcacctgctagcaaactggagtgtttccctccccaagggggtgtcagtctttgtcgactgactctgtcatcacccttatgatgtcctgaatggaaggatccctttgggaaattctcaggagggggacctgggccaagggcttggccagcatcctgctggcaactccaaggccctgggtgggcttctggaatgagcatgctactgaatcaccaaaggcacgccccacctctctgaagatcttcctatccttttctgggggaatggggtcgatgagagcaacctcctagggttgttgtgagaattaaatgagataaaagaggcctcaggcaggatctggcatagaggaggtgatcagcaaatgtttgttgaaaaggtttgacaggtcagtcccttcccacccctcttgcttgtcttacttgtcttatttattctccaacagcactccaggcagcccttgtccacgggctctccttgcatcaggtaggggctttgcagagaccatcgacgggctgacttgagtaagaacacgaattatgcatgtggccatttccagagcactttctatgtgatatgaacatgtgatttttatgtaatatgtgtatgtaaacgaggcagcctcatttccaggtgaggatgcatttggtagtgttgatttttgtaatttaaagaagctgaaagggagagaggacccgtgaggactgaactctctgtcccatggggtagggcttacatttacattaaagaaacagaaacttgctgggaggtgtaagtatttggtcacattgctggcaacagaaggggttggagttggacccagggtgccacgctagctgccctcaccccttcttcccctctggcccagagttatactaagagtccttttatttcaaaccaaatgtttgacaatgggacagtctgtttgaaatcccagctgcctggggtggtcttgggggtctgggtggccccagtgctggtaccatgtgctggcttcaccttttaataacagtgtgaccttaaacaagtcgcttaactactctaagtttcagtttctttcatggtctaaatggagattaaaacacacacacacacacacacacacacacacacacacacacaccctcgtgtatctaccccacagggcgcttttgaagaccaaatgctgtaactactatgaaagtgctttgtaaattgctgtggaaagtgtgagctactcaagcacccgaggctgtccctccttgctcacatgtccagcccaattctcccttagtgagaacagcactcagtaggtgctgtgtgtgtttgtgttcaattaagaaattccagaataaataaaaatgaattaattcaacaaacattttctggggcaccgacaatctgcccagtgcaccaggctaggtatctgatacaaagataatgaaaacagtctcttggaacctaattggggtcctcatttgaccaggaatttctttcgtcccgttttaagccaaccagttttgtccggacaagacaaaaacaacttgggctgctttagagaagcccagctcagtgtagacaatagctgcccagcctctgaaaggggctgattggattatgtggcaaatggaggtgcaaggatgacttggacggtgacaaatgaagtgggcggagacctgctttgagttaatccaggctattaggaggggaccttttgtcttccagagactggcaggagcttttaccagtggtttttacatccttaatgttcaggacgaataatttatggtcagtgaaaatccaggccccagtgagattcgagtgggctgtaaaatcgagagtcctgctcccagtgagtaatggtagtgaatgtttctgtcactttttgcaaccgtccattcatttgatcctcacaactccctgtcctgagccaggaccggccactgccactcccagggaaacagaggctgtcaagaggctccacagattgggccccactggatcattgaacccctgttccctgagttctagaggaagaattgtacctgtctcagtcccggccacctccagaaggcctccctctgcatttctgactttgctgtgccggcagcctggagcctcccaggtccctgctgtcatcttttctagccactacagtctctgtctttcctttcacagcccaagcttcttgaaaggcctgtctacacttgctgtcttccttcctcacctccaatttcctcttcaacccactgcttcctgactcgctctactccgtggaagcacgctcacaaaggtaaagacttttctgtggcttaatccttgtcatgttttcggctcatggacacaaggacacattttcatgccttctctcacagggctctgcgtctccggttcacttctgtgtctttacactcccttcacagagacacttgctcccccttctctcgttcttagcatcccctaggaacttgcacacccaggtctctcgacttctggacctgcttcttaccatgccgtcttaagcagtcaggagtcgctgcctgggttcgagtcctagttaaattacttagtgctgagaccttggggtaggtaaacttttccaagccaggtttatctcagtttcaaaatagggttaatcgtctttatctggcaggtcaggtgggatgtctcacaggtaagcaccagatgccatttgaaaggcttgaagcaaagtcaataaagcattcatgggaaaatacaactggaggcaccactagattttcgtatacattaggttcccacggggaggaccgaagagagaagaaagaagtggaaagggaggagcgtgcaggagagacaggagaagagaataactaaacaaagacattaaagacaaaaaaaaagtaggaaagggagacttagaaaatattaaaagccaccaaaaacacatccaaagacggtttccccttacgttagttgggctaaaagaaagcaaatgggaagaaggttttaaattgattatcccagtgacaaatcccaggaagctttcacatcaaatcaccctattctgggtttttaactccttccatcgagtttaacctctttacctcccacatcctggtaaaccctgccccctccctaccgccccctttgctggtgattaaatcctgaaggtacacgaagtatttcagtgaatgaatggctaacagaaaagggcctcccctcccccttaccctgggcggtgtttttcagttttattccactttccgcccttttcccttaatgaacacagggctaatctcgggccttgtcgaaggaagaggctgcagacgttaatgaggttagctgctggattccagtattcgtcgcataaggatccttctttgtctgcgaaggaaaaacacactgattatcataatgagatgaggtgaactggccaccgccgggccggggcgatgtggcttcttaagccacacttctaattttggtgatggagccgacatttctttggctcctcatttaagtctttgcctctgtcccagtgcgaagtccattcagcggggttgaaagttgcaggcagctttgggaaggggggcgtcggacagggttgcattgtagaaagtggctttgttcgatccttcgcacagatgcaaatggccagagcattcattccctttcttcaagagctgaggactgggggggccactggtgatcagttcccaactctagctctcctctgactcatctcaggacccattgaggacatccaaaactcactcaagatcaccaagtggtaggaaagtactaactcctgggcatagccctaggggagtgactacaatgtgaatactcatggaatgcctagccaggtgaagaagtgaatgcatgttggcatcccagagggaccccccttaagagggcatagtttggggttcagatttgactccagcatactgttgaaattgggcacagggggctagtgattagtcaggatcaatcagtggagaggagattaaaactcacatctgggagtccggaatcagaacttgtagttcttttttttgaaatggagtctcgctctgtcgcccaggctggagtgcagtggcgtgatctcggctcactgcaacctctgccttccgggttcaagcaattctcccacctcagcctcctgagtagctgggattacaggcgcccaccaccacagccggctactttttgtatttttaggagagacggggtttcaccatgttggtcaggctggtcttgaactcctgacctcatgatccacctgccttagcctcccaaagtgctgggattacaggcgtgagccaccatgcccagccctatagtagttcttcttttgccccttaatatcctcacccacatgtcctgtaccctgcctgaaccctcctcctctttttgttctgatctttgagctccctagagcccataattctttagagcaggtatgtcccgagtctgaaacatgcccttatttgtcccaagctctggacatttctcaccccaaggcggatcaatcatgattaaatcactccaattaaactttaggctccagtcagaccttcagccaaatggaaaaaaaaactaggggataagggaggtagttggagcaagaaaatgttattagttgaaaccttacgggaccttcctcccttagtgagtctgttggctaaaggttctctggcttcgtgaattagaatcggatactgtttccaagttagcaaaaccaactctaccccagcaccccacgaggaagaatgtggaaggatctcccattggccggttggggcaaaagcctgaggcaatctttcatccccttttgccaaggcgagactttcccagtgacggtgatgtagttggccactctgactatgggtggactcgggtgtagacctctgaagctgagatcacacgaaaacctggcctccccgccatgtagctgttggagagtagaaaaatagagcacgcctgatgtttctaaatgagaagactttcaatagtaatgaagaatccatggcactctcctcaccctcaaacacatggcagtcattcacatacaggccccaaagccactgttagtgctgcagtagctcctgtggacattggaaagcccggagagggcgtggaagaaatcagctggcccccggcaggttctctggggttttgtgcccaaggctcctggagccctaaaaactttcaaaagttaactccccacgtccccatcctgcttgggtttctggacttttctgaggcaccggcagaggggtctcgttgctcccttgagtgtaggggcagccctttaacctggctccttgagtccctgctttttctgcttctgttgccttcttcctcgtcttcctctctctcaatatctccctctctttgtccctccccagttcctgacctggccatcccggggtgcccttgaccagccccgtgtctcctcagggtgtcccagcaccagcctggcacagagtggggctcagttagagtatgtgggatgttggtttcgccaggtgagtgaatgaaaggactcgaccaccacagctgagccactagctgggccatgcgaagagttctaggtgcaaaggctggagggtggaattcatttttgagaggtgtgtgagcagcttccgacccctgccccatttgaacgggggccttgctggtcgcgtccctgcattcacccgcgcggccatcccgtcatccaacagttgatcctaactgagcacgcccacggccctggtctggcctgggcaccggccaccgtagcccatcccttgatggcctctgtgtccccaggagggcgggccggggggttgcccaggggctggagcagtggactgtggctccatagaggtaggccggagggtgtgagggcagattcaagctatccccagggctctgctctggtcggagccagccccttctccctctctgccttccccgccccattcctgatgctgaactgttctggacccctggccctgagtctctcaggaccaaagtgggcacgggaacagctgtagtgtgtgcccccccgggctttggccacaggtctccctctcgaggtgtggttgtgactgcgacccttcccttgccgtgatgccttcctcccccggggcttggtccagctccttcactctctagcagctgctggggcccacctcccatgccgaggaccagcaggggaaacctccagggagcatctgcaggctctgcttctgcccggctgctggcttgctctccctggtggctctccagcggccagcttcctcacccacccggcactctgctttgctctgtctcctgaggtgggcctgaccaacctccccttctctgcctcagtccctgggctccagggctcagctccacagccctctgcctagcaggctggttctccctgccaagcccatacctgtggtcacctggccctcctgtggtctgagtaccactcccctgccccaggagccactcccactccagctgcctgtttccagcaggttcccagtgcccccgacaagcccctgctggtgtctccatctcctgccaagcatcctccagtgcctcctcctgtgggcctggcctcagggctatggacagactcctgtcccatcccagagacccctcgtgatcgtgccctggcacgtgggccgtggcccggctgggtcggctgaagaactgcggatggaagctgcggaagaggccctgatggggcccaccatcccggacccaagtcttcttcctggcgggcctctcgtctccttcctggtttgggcggaagcccatcacctggatgcctacgtgggaagggacctcgaatgtgggaccccagcccctctccagctcgaaatccctccacagccacggggacaccctgcacctattcccacgggacaggctggacccagagactctggacccggggcctccccttgagtagagacccgccctctgactgatggacgccgctgacctggggtcagacccgtgggctggacccctgcccaccccgcaggaaccctgaggcctaggggagctgttgagccttcagtgtctgcatgtgggaagtgggctccttcacctacctcacagggctgttgtgaggggcgctgtgatgcggttccaaagcacagggcttggcgcaccccactgtgctctcaataaatgtgtttcctgtcttaacaaaaaaaaaaattcactggccgtcgttttacaacgtcgtgactgggaaaaccctggggttacccaacttaatcgccttgcagcacatccccctttcgccagctggcgtaaagcgaagaaggcgcacgaatggcttcccagcgttgcgcgctgaatgggacggccactgtagcgtaaatttgtcaatcccgttcctttggtaacacgccttttaccatgcccacgggcatcctttattggccaacgggtgtttcccgggacagcccatggcccccacgggaccatagtccccataaccccaattggggcggcacccccttttggg

SEQ ID NO: 736353 - DNA, 7981 bp, Homo sapiens
gattcgtttacccaagagggaacagttttgagaccccccggattcactgcggagtggccgcagaggccggggtcggcctttgcgccgtggcttcgggtgttgtggaggcgcacagagggtctctcctcagggatgacatcatccgtccacctccttgtcttcaaggaccacctcctctccatgctgagctgctgccaaggggcctgctgcccatctacacctcacgagggcactaggagcacggtttcctggatcccaccaacatacaaagcagccactcactgacccccaggaccaggatggcaaaggatgaagaggaccggaactgaccagccagctgtccctcttacctaaagacttaaaccaatgccctagtgagggggcattgggcattaagccctgacctttgctatgctcatactttgactctatgagtactttcctataagtctttgcttgtgttcacctgctagcaaactggagtgtttccctccccaagggggtgtcagtctttgtcgactgactctgtcatcacccttatgatgtcctgaatggaaggatccctttgggaaattctcaggagggggacctgggccaagggcttggccagcatcctgctggcaactccaaggccctgggtgggcttctggaatgagcatgctactgaatcaccaaaggcacgccccacctctctgaagatcttcctatccttttctgggggaatggggtcgatgagagcaacctcctagggttgttgtgagaattaaatgagataaaagaggcctcaggcaggatctggcatagaggaggtgatcagcaaatgtttgttgaaaaggtttgacaggtcagtcccttcccacccctcttgcttgtcttacttgtcttatttattctccaacagcactccaggcagcccttgtccacgggctctccttgcatcaggtaggggctttgcagagaccatcgacgggctgacttgagtaagaacacgaattatgcatgtggccatttccagagcactttctatgtgatatgaacatgtgatttttatgtaatatgtgtatgtaaacgaggcagcctcatttccaggtgaggatgcatttggtagtgttgatttttgtaatttaaagaagctgaaagggagagaggacccgtgaggactgaactctctgtcccatggggtagggcttacatttacattaaagaaacagaaacttgctgggaggtgtaagtatttggtcacattgctggcaacagaaggggttggagttggacccagggtgccacgctagctgccctcaccccttcttcccctctggcccagagttatactaagagtccttttatttcaaaccaaatgtttgacaatgggacagtctgtttgaaatcccagctgcctggggtggtcttgggggtctgggtggccccagtgctggtaccatgtgctggcttcaccttttaataacagtgtgaccttaaacaagtcgcttaactactctaagtttcagtttctttcatggtctaaatggagattaaaacacacacacacacacacacacacacacacacacacacacaccctcgtgtatctaccccacagggcgcttttgaagaccaaatgctgtaactactatgaaagtgctttgtaaattgctgtggaaagtgtgagctactcaagcacccgaggctgtccctccttgctcacatgtccagcccaattctcccttagtgagaacagcactcagtaggtgctgtgtgtgtttgtgttcaattaagaaattccagaataaataaaaatgaattaattcaacaaacattttctggggcaccgacaatctgcccagtgcaccaggctaggtatctgatacaaagataatgaaaacagtctcttggaacctaattggggtcctcatttgaccaggaatttctttcgtcccgttttaagccaaccagttttgtccggacaagacaaaaacaacttgggctgctttagagaagcccagctcagtgtagacaatagctgcccagcctctgaaaggggctgattggattatgtggcaaatggaggtgcaaggatgacttggacggtgacaaatgaagtgggcggagacctgctttgagttaatccaggctattaggaggggaccttttgtcttccagagactggcaggagcttttaccagtggtttttacatccttaatgttcaggacgaataatttatggtcagtgaaaatccaggccccagtgagattcgagtgggctgtaaaatcgagagtcctgctcccagtgagtaatggtagtgaatgtttctgtcactttttgcaaccgtccattcatttgatcctcacaactccctgtcctgagccaggaccggccactgccactcccagggaaacagaggctgtcaagaggctccacagattgggccccactggatcattgaacccctgttccctgagttctagaggaagaattgtacctgtctcagtcccggccacctccagaaggcctccctctgcatttctgactttgctgtgccggcagcctggagcctcccaggtccctgctgtcatcttttctagccactacagtctctgtctttcctttcacagcccaagcttcttgaaaggcctgtctacacttgctgtcttccttcctcacctccaatttcctcttcaacccactgcttcctgactcgctctactccgtggaagcacgctcacaaaggtaaagacttttctgtggcttaatccttgtcatgttttcggctcatggacacaaggacacattttcatgccttctctcacagggctctgcgtctccggttcacttctgtgtctttacactcccttcacagagacacttgctcccccttctctcgttcttagcatcccctaggaacttgcacacccaggtctctcgacttctggacctgcttcttaccatgccgtcttaagcagtcaggagtcgctgcctgggttcgagtcctagttaaattacttagtgctgagaccttggggtaggtaaacttttccaagccaggtttatctcagtttcaaaatagggttaatcgtctttatctggcaggtcaggtgggatgtctcacaggtaagcaccagatgccatttgaaaggcttgaagcaaagtcaataaagcattcatgggaaaatacaactggaggcaccactagattttcgtatacattaggttcccacggggaggaccgaagagagaagaaagaagtggaaagggaggagcgtgcaggagagacaggagaagagaataactaaacaaagacattaaagacaaaaaaaaagtaggaaagggagacttagaaaatattaaaagccaccaaaaacacatccaaagacggtttccccttacgttagttgggctaaaagaaagcaaatgggaagaaggttttaaattgattatcccagtgacaaatcccaggaagctttcacatcaaatcaccctattctgggtttttaactccttccatcgagtttaacctctttacctcccacatcctggtaaaccctgccccctccctaccgccccctttgctggtgattaaatcctgaaggtacacgaagtatttcagtgaatgaatggctaacagaaaagggcctcccctcccccttaccctgggcggtgtttttcagttttattccactttccgcccttttcccttaatgaacacagggctaatctcgggccttgtcgaaggaagaggctgcagacgttaatgaggttagctgctggattccagtattcgtcgcataaggatccttctttgtctgcgaaggaaaaacacactgattatcataatgagatgaggtgaactggccaccgccgggccggggcgatgtggcttcttaagccacacttctaattttggtgatggagccgacatttctttggctcctcatttaagtctttgcctctgtcccagtgcgaagtccattcagcggggttgaaagttgcaggcagctttgggaaggggggcgtcggacagggttgcattgtagaaagtggctttgttcgatccttcgcacagatgcaaatggccagagcattcattccctttcttcaagagctgaggactgggggggccactggtgatcagttcccaactctagctctcctctgactcatctcaggacccattgaggacatccaaaactcactcaagatcaccaagtggtaggaaagtactaactcctgggcatagccctaggggagtgactacaatgtgaatactcatggaatgcctagccaggtgaagaagtgaatgcatgttggcatcccagagggaccccccttaagagggcatagtttggggttcagatttgactccagcatactgttgaaattgggcacagggggctagtgattagtcaggatcaatcagtggagaggagattaaaactcacatctgggagtccggaatcagaacttgtagttcttttttttgaaatggagtctcgctctgtcgcccaggctggagtgcagtggcgtgatctcggctcactgcaacctctgccttccgggttcaagcaattctcccacctcagcctcctgagtagctgggattacaggcgcccaccaccacagccggctactttttgtatttttaggagagacggggtttcaccatgttggtcaggctggtcttgaactcctgacctcatgatccacctgccttagcctcccaaagtgctgggattacaggcgtgagccaccatgcccagccctatagtagttcttcttttgccccttaatatcctcacccacatgtcctgtaccctgcctgaaccctcctcctctttttgttctgatctttgagctccctagagcccataattctttagagcaggtatgtcccgagtctgaaacatgcccttatttgtcccaagctctggacatttctcaccccaaggcggatcaatcatgattaaatcactccaattaaactttaggctccagtcagaccttcagccaaatggaaaaaaaaactaggggataagggaggtagttggagcaagaaaatgttattagttgaaaccttacgggaccttcctcccttagtgagtctgttggctaaaggttctctggcttcgtgaattagaatcggatactgtttccaagttagcaaaaccaactctaccccagcaccccacgaggaagaatgtggaaggatctcccattggccggttggggcaaaagcctgaggcaatctttcatccccttttgccaaggcgagactttcccagtgacggtgatgtagttggccactctgactatgggtggactcgggtgtagacctctgaagctgagatcacacgaaaacctggcctccccgccatgtagctgttggagagtagaaaaatagagcacgcctgatgtttctaaatgagaagactttcaatagtaatgaagaatccatggcactctcctcaccctcaaacacatggcagtcattcacatacaggccccaaagccactgttagtgctgcagtagctcctgtggacattggaaagcccggagagggcgtggaagaaatcagctggcccccggcaggttctctggggttttgtgcccaaggctcctggagccctaaaaactttcaaaagttaactccccacgtccccatcctgcttgggtttctggacttttctgaggcaccggcagaggggtctcgttgctcccttgagtgtaggggcagccctttaacctggctccttgagtccctgctttttctgcttctgttgccttcttcctcgtcttcctctctctcaatatctccctctctttgtccctccccagttcctgacctggccatcccggggtgcccttgaccagccccgtgtctcctcagggtgtcccagcaccagcctggcacagagtggggctcagttagagtatgtgggatgttggtttcgccaggtgagtgaatgaaaggactcgaccaccacagctgagccactagctgggccatgcgaagagttctaggtgcaaaggctggagggtggaattcatttttgagaggtgtgtgagcagcttccgacccctgccccatttgaacgggggccttgctggtcgcgtccctgcattcacccgcgcggccatcccgtcatccaacagttgatcctaactgagcacgcccacggccctggtctggcctgggcaccggccaccgtagcccatcccttgatggcctctgtgtccccaggagggcgggccggggggttgcccaggggctggagcagtggactgtggctccatagaggtaggccggagggtgtgagggcagattcaagctatccccagggctctgctctggtcggagccagccccttctccctctctgccttccccgccccattcctgatgctgaactgttctggacccctggccctgagtctctcaggaccaaagtgggcacgggaacagctgtagtgtgtgcccccccgggctttggccacaggtctccctctcgaggtgtggttgtgactgcgacccttcccttgccgtgatgccttcctcccccggggcttggtccagctccttcactctctagcagctgctggggcccacctcccatgccgaggaccagcaggggaaacctccagggagcatctgcaggctctgcttctgcccggctgctggcttgctctccctggtggctctccagcggccagcttcctcacccacccggcactctgctttgctctgtctcctgaggtgggcctgaccaacctccccttctctgcctcagtccctgggctccagggctcagctccacagccctctgcctagcaggctggttctccctgccaagcccatacctgtggtcacctggccctcctgtggtctgagtaccactcccctgccccaggagccactcccactccagctgcctgtttccagcaggttcccagtgcccccgacaagcccctgctggtgtctccatctcctgccaagcatcctccagtgcctcctcctgtgggcctggcctcagggctatggacagactcctgtcccatcccagagacccctcgtgatcgtgccctggcacgtgggccgtggcccggctgggtcggctgaagaactgcggatggaagctgcggaagaggccctgatggggcccaccatcccggacccaagtcttcttcctggcgggcctctcgtctccttcctggtttgggcggaagcccatcacctggatgcctacgtgggaagggacctcgaatgtgggaccccagcccctctccagctcgaaatccctccacagccacggggacaccctgcacctattcccacgggacaggctggacccagagactctggacccggggcctccccttgagtagagacccgccctctgactgatggacgccgctgacctggggtcagacccgtgggctggacccctgcccaccccgcaggaaccctgaggcctaggggagctgttgagccttcagtgtctgcatgtgggaagtgggctccttcacctacctcacagggctgttgtgaggggcgctgtgatgcggttccaaagcacagggcttggcgcaccccactgtgctctcaataaatgtgtttcctgtcttaacaaaaagtcatgagacttaataagatctctatcaagaaaaaaactgcaaggtggggcccgtgacccagttcgccctatagtgagtcgcattacaattaactgcccggcggttatacacgtcccgactgggaaatccgtggggggacccaacttactcttctcgcaaaaaagtgcccctttccccagctggggccctagtttatgaggccccgaccgggggaaatcctcagcgggcgcacattttgagcggctaatggcaaacgcgatgcgttaatggtgagcaaaaaatggggctcaatcttgggggcatttccaattgtttgacccaactaggcggaaatcgggcaaactgctttggtag

SEQ ID NO: 736354 - DNA, 12025 bp, Homo sapiens
gattcgtttacccaagagggaacagttttgagaccccccggattcactgcggagtggccgcagaggccggggtcggcctttgcgccgtggcttcgggtgttgtggaggcgcacagagggtctctcctcagggatgacatcatccgtccacctccttgtcttcaaggaccacctcctctccatgctgagctgctgccaaggggcctgctgcccatctacacctcacgagggcactaggagcacggtttcctggatcccaccaacatacaaagcagccactcactgacccccaggaccaggatggcaaaggatgaagaggaccggaactgaccagccagctgtccctcttacctaaagacttaaaccaatgccctagtgagggggcattgggcattaagccctgacctttgctatgctcatactttgactctatgagtactttcctataagtctttgcttgtgttcacctgctagcaaactggagtgtttccctccccaagggggtgtcagtctttgtcgactgactctgtcatcacccttatgatgtcctgaatggaaggatccctttgggaaattctcaggagggggacctgggccaagggcttggccagcatcctgctggcaactccaaggccctgggtgggcttctggaatgagcatgctactgaatcaccaaaggcacgccccacctctctgaagatcttcctatccttttctgggggaatggggtcgatgagagcaacctcctagggttgttgtgagaattaaatgagataaaagaggcctcaggcaggatctggcatagaggaggtgatcagcaaatgtttgttgaaaaggtttgacaggtcagtcccttcccacccctcttgcttgtcttacttgtcttatttattctccaacagcactccaggcagcccttgtccacgggctctccttgcatcaggtaggggctttgcagagaccatcgacgggctgacttgagtaagaacacgaattatgcatgtggccatttccagagcactttctatgtgatatgaacatgtgatttttatgtaatatgtgtatgtaaacgaggcagcctcatttccaggtgaggatgcatttggtagtgttgatttttgtaatttaaagaagctgaaagggagagaggacccgtgaggactgaactctctgtcccatggggtagggcttacatttacattaaagaaacagaaacttgctgggaggtgtaagtatttggtcacattgctggcaacagaaggggttggagttggacccagggtgccacgctagctgccctcaccccttcttcccctctggcccagagttatactaagagtccttttatttcaaaccaaatgtttgacaatgggacagtctgtttgaaatcccagctgcctggggtggtcttgggggtctgggtggccccagtgctggtaccatgtgctggcttcaccttttaataacagtgtgaccttaaacaagtcgcttaactactctaagtttcagtttctttcatggtctaaatggagattaaaacacacacacacacacacacacacacacacacacacacacaccctcgtgtatctaccccacagggcgcttttgaagaccaaatgctgtaactactatgaaagtgctttgtaaattgctgtggaaagtgtgagctactcaagcacccgaggctgtccctccttgctcacatgtccagcccaattctcccttagtgagaacagcactcagtaggtgctgtgtgtgtttgtgttcaattaagaaattccagaataaataaaaatgaattaattcaacaaacattttctggggcaccgacaatctgcccagtgcaccaggctaggtatctgatacaaagataatgaaaacagtctcttggaacctaattggggtcctcatttgaccaggaatttctttcgtcccgttttaagccaaccagttttgtccggacaagacaaaaacaacttgggctgctttagagaagcccagctcagtgtagacaatagctgcccagcctctgaaaggggctgattggattatgtggcaaatggaggtgcaaggatgacttggacggtgacaaatgaagtgggcggagacctgctttgagttaatccaggctattaggaggggaccttttgtcttccagagactggcaggagcttttaccagtggtttttacatccttaatgttcaggacgaataatttatggtcagtgaaaatccaggccccagtgagattcgagtgggctgtaaaatcgagagtcctgctcccagtgagtaatggtagtgaatgtttctgtcactttttgcaaccgtccattcatttgatcctcacaactccctgtcctgagccaggaccggccactgccactcccagggaaacagaggctgtcaagaggctccacagattgggccccactggatcattgaacccctgttccctgagttctagaggaagaattgtacctgtctcagtcccggccacctccagaaggcctccctctgcatttctgactttgctgtgccggcagcctggagcctcccaggtccctgctgtcatcttttctagccactacagtctctgtctttcctttcacagcccaagcttcttgaaaggcctgtctacacttgctgtcttccttcctcacctccaatttcctcttcaacccactgcttcctgactcgctctactccgtggaagcacgctcacaaaggtaaagacttttctgtggcttaatccttgtcatgttttcggctcatggacacaaggacacattttcatgccttctctcacagggctctgcgtctccggttcacttctgtgtctttacactcccttcacagagacacttgctcccccttctctcgttcttagcatcccctaggaacttgcacacccaggtctctcgacttctggacctgcttcttaccatgccgtcttaagcagtcaggagtcgctgcctgggttcgagtcctagttaaattacttagtgctgagaccttggggtaggtaaacttttccaagccaggtttatctcagtttcaaaatagggttaatcgtctttatctggcaggtcaggtgggatgtctcacaggtaagcaccagatgccatttgaaaggcttgaagcaaagtcaataaagcattcatgggaaaatacaactggaggcaccactagattttcgtatacattaggttcccacggggaggaccgaagagagaagaaagaagtggaaagggaggagcgtgcaggagagacaggagaagagaataactaaacaaagacattaaagacaaaaaaaaagtaggaaagggagacttagaaaatattaaaagccaccaaaaacacatccaaagacggtttccccttacgttagttgggctaaaagaaagcaaatgggaagaaggttttaaattgattatcccagtgacaaatcccaggaagctttcacatcaaatcaccctattctgggtttttaactccttccatcgagtttaacctctttacctcccacatcctggtaaaccctgccccctccctaccgccccctttgctggtgattaaatcctgaaggtacacgaagtatttcagtgaatgaatggctaacagaaaagggcctcccctcccccttaccctgggcggtgtttttcagttttattccactttccgcccttttcccttaatgaacacagggctaatctcgggccttgtcgaaggaagaggctgcagacgttaatgaggttagctgctggattccagtattcgtcgcataaggatccttctttgtctgcgaaggaaaaacacactgattatcataatgagatgaggtgaactggccaccgccgggccggggcgatgtggcttcttaagccacacttctaattttggtgatggagccgacatttctttggctcctcatttaagtctttgcctctgtcccagtgcgaagtccattcagcggggttgaaagttgcaggcagctttgggaaggggggcgtcggacagggttgcattgtagaaagtggctttgttcgatccttcgcacagatgcaaatggccagagcattcattccctttcttcaagagctgaggactgggggggccactggtgatcagttcccaactctagctctcctctgactcatctcaggacccattgaggacatccaaaactcactcaagatcaccaagtggtaggaaagtactaactcctgggcatagccctaggggagtgactacaatgtgaatactcatggaatgcctagccaggtgaagaagtgaatgcatgttggcatcccagagggaccccccttaagagggcatagtttggggttcagatttgactccagcatactgttgaaattgggcacagggggctagtgattagtcaggatcaatcagtggagaggagattaaaactcacatctgggagtccggaatcagaacttgtagttcttttttttgaaatggagtctcgctctgtcgcccaggctggagtgcagtggcgtgatctcggctcactgcaacctctgccttccgggttcaagcaattctcccacctcagcctcctgagtagctgggattacaggcgcccaccaccacagccggctactttttgtatttttaggagagacggggtttcaccatgttggtcaggctggtcttgaactcctgacctcatgatccacctgccttagcctcccaaagtgctgggattacaggcgtgagccaccatgcccagccctatagtagttcttcttttgccccttaatatcctcacccacatgtcctgtaccctgcctgaaccctcctcctctttttgttctgatctttgagctccctagagcccataattctttagagcaggtatgtcccgagtctgaaacatgcccttatttgtcccaagctctggacatttctcaccccaaggcggatcaatcatgattaaatcactccaattaaactttaggctccagtcagaccttcagccaaatggaaaaaaaaactaggggataagggaggtagttggagcaagaaaatgttattagttgaaaccttacgggaccttcctcccttagtgagtctgttggctaaaggttctctggcttcgtgaattagaatcggatactgtttccaagttagcaaaaccaactctaccccagcaccccacgaggaagaatgtggaaggatctcccattggccggttggggcaaaagcctgaggcaatctttcatccccttttgccaaggcgagactttcccagtgacggtgatgtagttggccactctgactatgggtggactcgggtgtagacctctgaagctgagatcacacgaaaacctggcctccccgccatgtagctgttggagagtagaaaaatagagcacgcctgatgtttctaaatgagaagactttcaatagtaatgaagaatccatggcactctcctcaccctcaaacacatggcagtcattcacatacaggccccaaagccactgttagtgctgcagtagctcctgtggacattggaaagcccggagagggcgtggaagaaatcagctggcccccggcaggttctctggggttttgtgcccaaggctcctggagccctaaaaactttcaaaagttaactccccacgtccccatcctgcttgggtttctggacttttctgaggcaccggcagaggggtctcgttgctcccttgagtgtaggggcagccctttaacctggctccttgagtccctgctttttctgcttctgttgccttcttcctcgtcttcctctctctcaatatctccctctctttgtccctccccagttcctgacctggccatcccggggtgcccttgaccagccccgtgtctcctcagggtgtcccagcaccagcctggcacagagtggggctcagttagagtatgtgggatgttggtttcgccaggtgagtgaatgaaaggactcgaccaccacagctgagccactagctgggccatgcgaagagttctaggtgcaaaggctggagggtggaattcatttttgagaggtgtgtgagcagcttccgacccctgccccatttgaacgggggccttgctggtcgcgtccctgcattcacccgcgcggccatcccgtcatccaacagttgatcctaactgagcacgcccacggccctggtctggcctgggcaccggccaccgtagcccatcccttgatggcctctgtgtccccaggagggcgggccggggggttgcccaggggctggagcagtggactgtggctccatagaggtaggccggagggtgtgagggcagattcaagctatccccagggctctgctctggtcggagccagccccttctccctctctgccttccccgccccattcctgatgctgaactgttctggacccctggccctgagtctctcaggaccaaagtgggcacgggaacagctgtagtgtgtgcccccccgggctttggccacaggtctccctctcgaggtgtggttgtgactgcgacccttcccttgccgtgatgccttcctcccccggggcttggtccagctccttcactctctagcagctgctggggcccacctcccatgccgaggaccagcaggggaaacctccagggagcatctgcaggctctgcttctgcccggctgctggcttgctctccctggtggctctccagcggccagcttcctcacccacccggcactctgctttgctctgtctcctgaggtgggcctgaccaacctccccttctctgcctcagtccctgggctccagggctcagctccacagccctctgcctagcaggctggttctccctgccaagcccatacctgtggtcacctggccctcctgtggtctgagtaccactcccctgccccaggagccactcccactccagctgcctgtttccagcaggttcccagtgcccccgacaagcccctgctggtgtctccatctcctgccaagcatcctccagtgcctcctcctgtgggcctggcctcagggctatggacagactcctgtcccatcccagagacccctcgtgatcgtgccctggcacgtgggccgtggcccggctgggtcggctgaagaactgcggatggaagctgcggaagaggccctgatggggcccaccatcccggacccaagtcttcttcctggcgggcctctcgtctccttcctggtttgggcggaagcccatcacctggatgcctacgtgggaagggacctcgaatgtgggaccccagcccctctccagctcgaaatcggcagactaggatggaagtgccctgtgagctggggggcccttcaaagggccaaggagaaaacgcaggccgagggaccagccttccaaatgggcttcaagctccaatgacctccgctcgccccctcgaaatgtctggaaaacataatgggcagattttctgtcttcaaagtttccggctaaacctcttcaagttctttattgtttgggactgagacactcagccatgttaatgggtagtttcttttgtatttgccttgaaaggccaaaatatttttatattgccacagacaaagccacctatttaaaaatgaactccatgtccgtcgtttcccaccaggagactatgtaccatgtgtgtgtctctatgtattctggggtcttgaaacaggtttctcatggggatggtcattcaccacggtccagaggggcagaacaggcggcgcttgccttgcccagggggcctggggaacgtgggccctcatctcagatctgcccccagtatgtttaggacgcgagccccagaaggatctgggagtaaacttaacattcactgtgtctctgctctgcatccgccatttgtgtgtgtttctggactgtgggctgtgtgtaccttggttggtgactcagtgagaagaagcaggaatgccaaagatactgtgaatgttctgagttttgttgctgttgttgttgagaggttgtttcactggtatctattgcattgtataataaatgaccagatgaatgaatgagtgaagcaagagagaatgaataaacaagtaaataggtaaagaagtaagcaagccaggatgagagtgtgtgtacacaagaccatggttcatccgctttgatggctaggcaatcaatatataaatagaaaaaacccagtgaatcactaagtaatagggcaacacacaaagcgatatcaggtgattatggactaaggggtatgtgtaactcaaatatatgcctctgacatttgacaatgaaaaagaacctaaatgaaagaaagaatggatgtatgagtagtgaagtgcagaatgagacatagattttgaggcccgtcaaaatgaaaagatgcaagttagggaacaagtgatcaaaagggagaagggaaaggttttttttaaaaaaccaaaacaacaaagaaaggttaaaaaaaaaaacagactagaggatgagtaatgagtaactctgtaaggaggaccatgtcagactattgtaagctaagcattaggactgatacaaataatatatgctcctggcatagaaaaataaaccacagagaacgagttcaaagaatagcaaagaaagaaagaggacccagtgggcgaaagatgagagtgtacttttaccaaaagttatctaagcctgagcacttgaagtctgcacataaataaataaatgacaaaagaaagaaaaaaaggccaaaaagtctacattgcgtgtgtggatggatgaatgagcagtgggagtgcagcgccaggtgacaagatgttgtgaggggttttgagtcatccagtcctgggcactgaggtctgttagatgaaaggatatgagaaaggtaatattggtaaataaagaaataggaaacaatgtaacaaatgttaagtacagaaatacattaatgggtggtaaataaagatgtaaaagaaggcaatgcgatcgatggtggcaaaagatcatcacagattaagggctatggctggtccacttctagaaaaccacaggctgtccattaaataatgaacatctaagtgaacaagtcagtgagtacctaaatagacaaggatgaggtgaatgagaagacatggccccatgggtcctcctgatgagggtgttggggtcccccctgggcaccccagctgcatgaaaatgaaggacaggaggtatggaaagctatgacagaagagagaaaggaacggtaaaaagaaataacaaccaaatggataaatgggtagatccacgagaagagttaggctaggacttgtcataagggcacctgactccactaatagaggaataaatgcctaataaaaagagagcaagcaggaaggaaggatgctatgaatgcaggaaggaagtaatgagtgagacgtggaaccgcacggccaaggatggacgtttgcgggtggctttttgatgcgtacagccaagccactccatggcaatgagctccgaagacaaagtgcaagagagaatgagtgagagagtgagagagagagaaacaataaaaaatgggaagaaatgtaaaaaggaagaaaggaagagaggtaatatattaaggaataaatacatgcatgcagatttaagacagagccatgctagaacaggaatgaaaggctgtgtgaaccaagcagaccgcttaattggcaccagtgctgctggtatggtcaatcacctactcaactaaggaacggctcaaagcatacacatgggagggaggagtggggccacagagagagggcccattagttgcagattacgatgtatccagttaggtgcacctgccttcgagaagtgtaaaaataagtatttacatagaaagaaagactgaatggatgcacggtgaatgcatgaatgattgaacgacagaaaagatttgcattgaccgatgaggagggcattgtagacagggatgagggtcattgatcctgggtgcagatctccaaaagaatgacagaaagaaagagggagtggtggaaagaaacaataggatgggaaaaaatgaaaatagaaaaaaggaagtgaaagagataataaataattagatcaaataagttgatgaaaggggactggtttagcacaagccatccacattaattcaaacctgtggctctgaagtttgttttttaaatgaccacaagtgtaagactgaatgaaagaataaatgcgtgcattccataggatgcaagaaaaggagtgaggaatgggaaaattggaagaacgagagagggagagatgtaagaaaagaaaggaaaagtgaagtaggcatatgaaagaaaaggcacttcttggacaagcactgaaatataatgagacagttttacccattaaatataataaacagtaaacgttgaggttcatcaataaaagcacagatacctgaatagaggagtgacctgaatagaattcgttcagccgaacgaatgagaatggatgattttcactatcctgtgcactcaaggcccaaaagagaaagcaagagaggagagaatatggaaacgtatgacaggatgtatataagcaatacaaacatattgaatgaataaataaagacataaatatgtgggagagtggaccacgcaaggacaaaaagaggagagaaggcagcaagaattatgactaattcaaaactgggttcctgagatagttaaataaatcctgcaccaaatccccagggggagaaattaacaaacaaaagacagccccacacggaccagtgtgcagaaggctccaggaaccgcagattatggttaatccaattctgtgcacctgaggtccataaataaaagaataagtattgaaatgaaagaatgacagaaagaatgaatggacacatgaacgactgaattagaaatggaaatgcctggcacagccaggaaggagctgcccatgggattgtcattcatctcactctgggcacctgaggtccataagcgtgaaaagaggcaggaagagaagtgtcagggagtcaaagatagagctaaggaaaggcaaaaatgaaactaaatgaaagcgaaagggaaaataaagaaaaaccaataaaaaagagaacgaatacgtgggtgtatctgtaagagtaggatctgttaggattagtcataagactgtcagtaatcctgaagatggatgagataatccaggcccaggttcccagggggagggaaaatggagaaaatataaaaagatgtgaaaaaggaaaaaggaaaggtaataaacaaacaaccaaagtgataaatggatagttaagggaggttgtctgaacagggattataattagtttacatacatactccttaaacagataaatacattacacctttcaaagaataaatgaaaaatagagagacatacctggctccaaaacaaggctgtatcttctgccactgtaataaaatagatgcaattgaggttcataaataaaagaataaatacttaaacgtgaaaggtgactaaatgcggggaagaaagattgcaaataaatacatgggccaaagatgtttggtttgcccatggagttttaattaaaaaaattaataaggaaaacaaatacccaaaataaggaagactgacaaatgagtgagtggatgagagagtgaatggtgcttgacgtaggagcagtagtgctttagggaccagcatgaaggtggtgaccgggagccctgattcatgggattctgtccacctgactttataagaaccaagaatggctgggaatggtggctcacgcctgtaatcccagcactttgggaggccgaggtgggcggatcatgaggtcaggagtttgagaccagccagtttgagatcagcctggccaacatggtgaaattccatctctactaaaaaaatacaaaaattatgggcgtggtggcacctgtctgtaatcctagctactcgggaggctgagagaggagaattgcttgaacccgggaggtggaggttgtagtgagccaagattgcaccactgcactccagcctgggctacagagcaagacactatcttagatcaaaaaag

SEQ ID NO: 736355 - DNA, 11501 bp, Homo sapiens
gattcgtttacccaagagggaacagttttgagaccccccggattcactgcggagtggccgcagaggccggggtcggcctttgcgccgtggcttcgggtgttgtggaggcgcacagagggtctctcctcagggatgacatcatccgtccacctccttgtcttcaaggaccacctcctctccatgctgagctgctgccaaggggcctgctgcccatctacacctcacgagggcactaggagcacggtttcctggatcccaccaacatacaaagcagccactcactgacccccaggaccaggatggcaaaggatgaagaggaccggaactgaccagccagctgtccctcttacctaaagacttaaaccaatgccctagtgagggggcattgggcattaagccctgacctttgctatgctcatactttgactctatgagtactttcctataagtctttgcttgtgttcacctgctagcaaactggagtgtttccctccccaagggggtgtcagtctttgtcgactgactctgtcatcacccttatgatgtcctgaatggaaggatccctttgggaaattctcaggagggggacctgggccaagggcttggccagcatcctgctggcaactccaaggccctgggtgggcttctggaatgagcatgctactgaatcaccaaaggcacgccccacctctctgaagatcttcctatccttttctgggggaatggggtcgatgagagcaacctcctagggttgttgtgagaattaaatgagataaaagaggcctcaggcaggatctggcatagaggaggtgatcagcaaatgtttgttgaaaaggtttgacaggtcagtcccttcccacccctcttgcttgtcttacttgtcttatttattctccaacagcactccaggcagcccttgtccacgggctctccttgcatcaggtaggggctttgcagagaccatcgacgggctgacttgagtaagaacacgaattatgcatgtggccatttccagagcactttctatgtgatatgaacatgtgatttttatgtaatatgtgtatgtaaacgaggcagcctcatttccaggtgaggatgcatttggtagtgttgatttttgtaatttaaagaagctgaaagggagagaggacccgtgaggactgaactctctgtcccatggggtagggcttacatttacattaaagaaacagaaacttgctgggaggtgtaagtatttggtcacattgctggcaacagaaggggttggagttggacccagggtgccacgctagctgccctcaccccttcttcccctctggcccagagttatactaagagtccttttatttcaaaccaaatgtttgacaatgggacagtctgtttgaaatcccagctgcctggggtggtcttgggggtctgggtggccccagtgctggtaccatgtgctggcttcaccttttaataacagtgtgaccttaaacaagtcgcttaactactctaagtttcagtttctttcatggtctaaatggagattaaaacacacacacacacacacacacacacacacacacacacacaccctcgtgtatctaccccacagggcgcttttgaagaccaaatgctgtaactactatgaaagtgctttgtaaattgctgtggaaagtgtgagctactcaagcacccgaggctgtccctccttgctcacatgtccagcccaattctcccttagtgagaacagcactcagtaggtgctgtgtgtgtttgtgttcaattaagaaattccagaataaataaaaatgaattaattcaacaaacattttctggggcaccgacaatctgcccagtgcaccaggctaggtatctgatacaaagataatgaaaacagtctcttggaacctaattggggtcctcatttgaccaggaatttctttcgtcccgttttaagccaaccagttttgtccggacaagacaaaaacaacttgggctgctttagagaagcccagctcagtgtagacaatagctgcccagcctctgaaaggggctgattggattatgtggcaaatggaggtgcaaggatgacttggacggtgacaaatgaagtgggcggagacctgctttgagttaatccaggctattaggaggggaccttttgtcttccagagactggcaggagcttttaccagtggtttttacatccttaatgttcaggacgaataatttatggtcagtgaaaatccaggccccagtgagattcgagtgggctgtaaaatcgagagtcctgctcccagtgagtaatggtagtgaatgtttctgtcactttttgcaaccgtccattcatttgatcctcacaactccctgtcctgagccaggaccggccactgccactcccagggaaacagaggctgtcaagaggctccacagattgggccccactggatcattgaacccctgttccctgagttctagaggaagaattgtacctgtctcagtcccggccacctccagaaggcctccctctgcatttctgactttgctgtgccggcagcctggagcctcccaggtccctgctgtcatcttttctagccactacagtctctgtctttcctttcacagcccaagcttcttgaaaggcctgtctacacttgctgtcttccttcctcacctccaatttcctcttcaacccactgcttcctgactcgctctactccgtggaagcacgctcacaaaggtaaagacttttctgtggcttaatccttgtcatgttttcggctcatggacacaaggacacattttcatgccttctctcacagggctctgcgtctccggttcacttctgtgtctttacactcccttcacagagacacttgctcccccttctctcgttcttagcatcccctaggaacttgcacacccaggtctctcgacttctggacctgcttcttaccatgccgtcttaagcagtcaggagtcgctgcctgggttcgagtcctagttaaattacttagtgctgagaccttggggtaggtaaacttttccaagccaggtttatctcagtttcaaaatagggttaatcgtctttatctggcaggtcaggtgggatgtctcacaggtaagcaccagatgccatttgaaaggcttgaagcaaagtcaataaagcattcatgggaaaatacaactggaggcaccactagattttcgtatacattaggttcccacggggaggaccgaagagagaagaaagaagtggaaagggaggagcgtgcaggagagacaggagaagagaataactaaacaaagacattaaagacaaaaaaaaagtaggaaagggagacttagaaaatattaaaagccaccaaaaacacatccaaagacggtttccccttacgttagttgggctaaaagaaagcaaatgggaagaaggttttaaattgattatcccagtgacaaatcccaggaagctttcacatcaaatcaccctattctgggtttttaactccttccatcgagtttaacctctttacctcccacatcctggtaaaccctgccccctccctaccgccccctttgctggtgattaaatcctgaaggtacacgaagtatttcagtgaatgaatggctaacagaaaagggcctcccctcccccttaccctgggcggtgtttttcagttttattccactttccgcccttttcccttaatgaacacagggctaatctcgggccttgtcgaaggaagaggctgcagacgttaatgaggttagctgctggattccagtattcgtcgcataaggatccttctttgtctgcgaaggaaaaacacactgattatcataatgagatgaggtgaactggccaccgccgggccggggcgatgtggcttcttaagccacacttctaattttggtgatggagccgacatttctttggctcctcatttaagtctttgcctctgtcccagtgcgaagtccattcagcggggttgaaagttgcaggcagctttgggaaggggggcgtcggacagggttgcattgtagaaagtggctttgttcgatccttcgcacagatgcaaatggccagagcattcattccctttcttcaagagctgaggactgggggggccactggtgatcagttcccaactctagctctcctctgactcatctcaggacccattgaggacatccaaaactcactcaagatcaccaagtggtaggaaagtactaactcctgggcatagccctaggggagtgactacaatgtgaatactcatggaatgcctagccaggtgaagaagtgaatgcatgttggcatcccagagggaccccccttaagagggcatagtttggggttcagatttgactccagcatactgttgaaattgggcacagggggctagtgattagtcaggatcaatcagtggagaggagattaaaactcacatctgggagtccggaatcagaacttgtagttcttttttttgaaatggagtctcgctctgtcgcccaggctggagtgcagtggcgtgatctcggctcactgcaacctctgccttccgggttcaagcaattctcccacctcagcctcctgagtagctgggattacaggcgcccaccaccacagccggctactttttgtatttttaggagagacggggtttcaccatgttggtcaggctggtcttgaactcctgacctcatgatccacctgccttagcctcccaaagtgctgggattacaggcgtgagccaccatgcccagccctatagtagttcttcttttgccccttaatatcctcacccacatgtcctgtaccctgcctgaaccctcctcctctttttgttctgatctttgagctccctagagcccataattctttagagcaggtatgtcccgagtctgaaacatgcccttatttgtcccaagctctggacatttctcaccccaaggcggatcaatcatgattaaatcactccaattaaactttaggctccagtcagaccttcagccaaatggaaaaaaaaactaggggataagggaggtagttggagcaagaaaatgttattagttgaaaccttacgggaccttcctcccttagtgagtctgttggctaaaggttctctggcttcgtgaattagaatcggatactgtttccaagttagcaaaaccaactctaccccagcaccccacgaggaagaatgtggaaggatctcccattggccggttggggcaaaagcctgaggcaatctttcatccccttttgccaaggcgagactttcccagtgacggtgatgtagttggccactctgactatgggtggactcgggtgtagacctctgaagctgagatcacacgaaaacctggcctccccgccatgtagctgttggagagtagaaaaatagagcacgcctgatgtttctaaatgagaagactttcaatagtaatgaagaatccatggcactctcctcaccctcaaacacatggcagtcattcacatacaggccccaaagccactgttagtgctgcagtagctcctgtggacattggaaagcccggagagggcgtggaagaaatcagctggcccccggcaggttctctggggttttgtgcccaaggctcctggagccctaaaaactttcaaaagttaactccccacgtccccatcctgcttgggtttctggacttttctgaggcaccggcagaggggtctcgttgctcccttgagtgtaggggcagccctttaacctggctccttgagtccctgctttttctgcttctgttgccttcttcctcgtcttcctctctctcaatatctccctctctttgtccctccccagttcctgacctggccatcccggggtgcccttgaccagccccgtgtctcctcagggtgtcccagcaccagcctggcacagagtggggctcagttagagtatgtgggatgttggtttcgccaggtgagtgaatgaaaggactcgaccaccacagctgagccactagctgggccatgcgaagagttctaggtgcaaaggctggagggtggaattcatttttgagaggtgtgtgagcagcttccgacccctgccccatttgaacgggggccttgctggtcgcgtccctgcattcacccgcgcggccatcccgtcatccaacagttgatcctaactgagcacgcccacggccctggtctggcctgggcaccggccaccgtagcccatcccttgatggcctctgtgtccccaggagggcgggccggggggttgcccaggggctggagcagtggactgtggctccatagaggtaggccggagggtgtgagggcagattcaagctatccccagggctctgctctggtcggagccagccccttctccctctctgccttccccgccccattcctgatgctgaactgttctggacccctggccctgagtctctcaggaccaaagtgggcacgggaacagctgtagtgtgtgcccccccgggctttggccacaggtctccctctcgaggtgtggttgtgactgcgacccttcccttgccgtgatgccttcctcccccggggcttggtccagctccttcactctctagcagctgctggggcccacctcccatgccgaggaccagcaggggaaacctccagggagcatctgcaggctctgcttctgcccggctgctggcttgctctccctggtggctctccagcggccagcttcctcacccacccggcactctgctttgctctgtctcctgaggtgggcctgaccaacctccccttctctgcctcagtccctgggctccagggctcagctccacagccctctgcctagcaggctggttctccctgccaagcccatacctgtggtcacctggccctcctgtggtctgagtaccactcccctgccccaggagccactcccactccagctgcctgtttccagcaggttcccagtgcccccgacaagcccctgctggtgtctccatctcctgccaagcatcctccagtgcctcctcctgtgggcctggcctcagggctatggacagactcctgtcccatcccagagacccctcgtgatcgtgccctggcacgtgggccgtggcccggctgggtcggctgaagaactgcggatggaagctgcggaagaggccctgatggggcccaccatcccggacccaagtcttcttcctggcgggcctctcgtctccttcctggtttgggcggaagcccatcacctggatgcctacgtgggaagggacctcgaatgtgggaccccagcccctctccagctcgaaatcggcagactaggatggaagtgccctgtgagctggggggcccttcaaagggccaaggagaaaacgcaggccgagggaccagccttccaaatgggcttcaagctccaatgacctccgctcgccccctcgaaatgtctggaaaacataatgggcagattttctgtcttcaaagtttccggctaaacctcttcaagttctttattgtttgggactgagacactcagccatgttaatgggtagtttcttttgtatttgccttgaaaggccaaaatatttttatattgccacagacaaagccacctatttaaaaatgaactccatgtccgtcgtttcccaccaggagactatgtaccatgtgtgtgtctctatgtattctggggtcttgaaacaggtttctcatggggatggtcattcaccacggtccagaggggcagaacaggcggcgcttgccttgcccagggggcctggggaacgtgggccctcatctcagatctgcccccagtatgtttaggacgcgagccccagaaggatctgggagtaaacttaacattcactgtgtctctgctctgcatccgccatttgtgtgtgtttctggactgtgggctgtgtgtaccttggttggtgactcagtgagaagaagcaggaatgccaaagatactgtgaatgttctgagttttgttgctgttgttgttgagaggttgtttcactggtatctattgcattgtataataaatgaccagatgaatgaatgagtgaagcaagagagaatgaataaacaagtaaataggtaaagaagtaagcaagccaggatgagagtgtgtgtacacaagaccatggttcatccgctttgatggctaggcaatcaatatataaatagaaaaaacccagtgaatcactaagtaatagggcaacacacaaagcgatatcaggtgattatggactaaggggtatgtgtaactcaaatatatgcctctgacatttgacaatgaaaaagaacctaaatgaaagaaagaatggatgtatgagtagtgaagtgcagaatgagacatagattttgaggcccgtcaaaatgaaaagatgcaagttagggaacaagtgatcaaaagggagaagggaaaggttttttttaaaaaaccaaaacaacaaagaaaggttaaaaaaaaaaacagactagaggatgagtaatgagtaactctgtaaggaggaccatgtcagactattgtaagctaagcattaggactgatacaaataatatatgctcctggcatagaaaaataaaccacagagaacgagttcaaagaatagcaaagaaagaaagaggacccagtgggcgaaagatgagagtgtacttttaccaaaagttatctaagcctgagcacttgaagtctgcacataaataaataaatgacaaaagaaagaaaaaaaggccaaaaagtctacattgcgtgtgtggatggatgaatgagcagtgggagtgcagcgccaggtgacaagatgttgtgaggggttttgagtcatccagtcctgggcactgaggtctgttagatgaaaggatatgagaaaggtaatattggtaaataaagaaataggaaacaatgtaacaaatgttaagtacagaaatacattaatgggtggtaaataaagatgtaaaagaaggcaatgcgatcgatggtggcaaaagatcatcacagattaagggctatggctggtccacttctagaaaaccacaggctgtccattaaataatgaacatctaagtgaacaagtcagtgagtacctaaatagacaaggatgaggtgaatgagaagacatggccccatgggtcctcctgatgagggtgttggggtcccccctgggcaccccagctgcatgaaaatgaaggacaggaggtatggaaagctatgacagaagagagaaaggaacggtaaaaagaaataacaaccaaatggataaatgggtagatccacgagaagagttaggctaggacttgtcataagggcacctgactccactaatagaggaataaatgcctaataaaaagagagcaagcaggaaggaaggatgctatgaatgcaggaaggaagtaatgagtgagacgtggaaccgcacggccaaggatggacgtttgcgggtggctttttgatgcgtacagccaagccactccatggcaatgagctccgaagacaaagtgcaagagagaatgagtgagagagtgagagagagagaaacaataaaaaatgggaagaaatgtaaaaaggaagaaaggaagagaggtaatatattaaggaataaatacatgcatgcagatttaagacagagccatgctagaacaggaatgaaaggctgtgtgaaccaagcagaccgcttaattggcaccagtgctgctggtatggtcaatcacctactcaactaaggaacggctcaaagcatacacatgggagggaggagtggggccacagagagagggcccattagttgcagattacgatgtatccagttaggtgcacctgccttcgagaagtgtaaaaataagtatttacatagaaagaaagactgaatggatgcacggtgaatgcatgaatgattgaacgacagaaaagatttgcattgaccgatgaggagggcattgtagacagggatgagggtcattgatcctgggtgcagatctccaaaagaatgacagaaagaaagagggagtggtggaaagaaacaataggatgggaaaaaatgaaaatagaaaaaaggaagtgaaagagataataaataattagatcaaataagttgatgaaaggggactggtttagcacaagccatccacattaattcaaacctgtggctctgaagtttgttttttaaatgaccacaagtgtaagactgaatgaaagaataaatgcgtgcattccataggatgcaagaaaaggagtgaggaatgggaaaattggaagaacgagagagggagagatgtaagaaaagaaaggaaaagtgaagtaggcatatgaaagaaaaggcacttcttggacaagcactgaaatataatgagacagttttacccattaaatataataaacagtaaacgttgaggttcatcaataaaagcacagatacctgaatagaggagtgacctgaatagaattcgttcagccgaacgaatgagaatggatgattttcactatcctgtgcactcaaggcccaaaagagaaagcaagagaggagagaatatggaaacgtatgacaggatgtatataagcaatacaaacatattgaatgaataaataaagacataaatatgtgggagagtggaccacgcaaggacaaaaagaggagagaaggcagcaagaattatgactaattcaaaactgggttcctgagatagttaaataaatcctgcaccaaatccccagggggagaaattaacaaacaaaagacagccccacacggaccagtgtgcagaaggctccaggaaccgcagattatggttaatccaattctgtgcacctgaggtccataaataaaagaataagtattgaaatgaaagaatgacagaaagaatgaatggacacatgaacgactgaattagaaatggaaatgcctggcacagccaggaaggagctgcccatgggattgtcattcatctcactctgggcacctgaggtccataagcgtgaaaagaggcaggaagagaagtgtcagggagtcaaagatagagctaaggaaaggcaaaaatgaaactaaatgaaagcgaaagggaaaataaagaaaaaccaataaaaaagagaacgaatacgtgggtgtatctgtaagagtaggatctgttaggattagtcataagactgtcagtaatcctgaagatggatgagataatccaggcccaggttcccagggggagggaaaatggagaaaatataaaaagatgtgaaaaaggaaaaaggaaaggtaataaacaaacaaccaaagtgataaatggatagttaagggaggttgtctgaacagggattataattagtttacatacatactccttaaacagataaatacattacacctttcaaagaataaatgaaaaatagagagacatacctggctccaaaacaaggctgtatcttctgccactgtaataaaatagatgcaattgaggttcataaataaaagaataaatacttaaacgtgaaaggtgactaaatgcggggaatgcataagggggtatcctctagagg

SEQ ID NO: 736356 - DNA, 9659 bp, Homo sapiens
gattcgtttacccaagagggaacagttttgagaccccccggattcactgcggagtggccgcagaggccggggtcggcctttgcgccgtggcttcgggtgttgtggaggcgcacagagggtctctcctcagggatgacatcatccgtccacctccttgtcttcaaggaccacctcctctccatgctgagctgctgccaaggggcctgctgcccatctacacctcacgagggcactaggagcacggtttcctggatcccaccaacatacaaagcagccactcactgacccccaggaccaggatggcaaaggatgaagaggaccggaactgaccagccagctgtccctcttacctaaagacttaaaccaatgccctagtgagggggcattgggcattaagccctgacctttgctatgctcatactttgactctatgagtactttcctataagtctttgcttgtgttcacctgctagcaaactggagtgtttccctccccaagggggtgtcagtctttgtcgactgactctgtcatcacccttatgatgtcctgaatggaaggatccctttgggaaattctcaggagggggacctgggccaagggcttggccagcatcctgctggcaactccaaggccctgggtgggcttctggaatgagcatgctactgaatcaccaaaggcacgccccacctctctgaagatcttcctatccttttctgggggaatggggtcgatgagagcaacctcctagggttgttgtgagaattaaatgagataaaagaggcctcaggcaggatctggcatagaggaggtgatcagcaaatgtttgttgaaaaggtttgacaggtcagtcccttcccacccctcttgcttgtcttacttgtcttatttattctccaacagcactccaggcagcccttgtccacgggctctccttgcatcaggtaggggctttgcagagaccatcgacgggctgacttgagtaagaacacgaattatgcatgtggccatttccagagcactttctatgtgatatgaacatgtgatttttatgtaatatgtgtatgtaaacgaggcagcctcatttccaggtgaggatgcatttggtagtgttgatttttgtaatttaaagaagctgaaagggagagaggacccgtgaggactgaactctctgtcccatggggtagggcttacatttacattaaagaaacagaaacttgctgggaggtgtaagtatttggtcacattgctggcaacagaaggggttggagttggacccagggtgccacgctagctgccctcaccccttcttcccctctggcccagagttatactaagagtccttttatttcaaaccaaatgtttgacaatgggacagtctgtttgaaatcccagctgcctggggtggtcttgggggtctgggtggccccagtgctggtaccatgtgctggcttcaccttttaataacagtgtgaccttaaacaagtcgcttaactactctaagtttcagtttctttcatggtctaaatggagattaaaacacacacacacacacacacacacacacacacacacacacaccctcgtgtatctaccccacagggcgcttttgaagaccaaatgctgtaactactatgaaagtgctttgtaaattgctgtggaaagtgtgagctactcaagcacccgaggctgtccctccttgctcacatgtccagcccaattctcccttagtgagaacagcactcagtaggtgctgtgtgtgtttgtgttcaattaagaaattccagaataaataaaaatgaattaattcaacaaacattttctggggcaccgacaatctgcccagtgcaccaggctaggtatctgatacaaagataatgaaaacagtctcttggaacctaattggggtcctcatttgaccaggaatttctttcgtcccgttttaagccaaccagttttgtccggacaagacaaaaacaacttgggctgctttagagaagcccagctcagtgtagacaatagctgcccagcctctgaaaggggctgattggattatgtggcaaatggaggtgcaaggatgacttggacggtgacaaatgaagtgggcggagacctgctttgagttaatccaggctattaggaggggaccttttgtcttccagagactggcaggagcttttaccagtggtttttacatccttaatgttcaggacgaataatttatggtcagtgaaaatccaggccccagtgagattcgagtgggctgtaaaatcgagagtcctgctcccagtgagtaatggtagtgaatgtttctgtcactttttgcaaccgtccattcatttgatcctcacaactccctgtcctgagccaggaccggccactgccactcccagggaaacagaggctgtcaagaggctccacagattgggccccactggatcattgaacccctgttccctgagttctagaggaagaattgtacctgtctcagtcccggccacctccagaaggcctccctctgcatttctgactttgctgtgccggcagcctggagcctcccaggtccctgctgtcatcttttctagccactacagtctctgtctttcctttcacagcccaagcttcttgaaaggcctgtctacacttgctgtcttccttcctcacctccaatttcctcttcaacccactgcttcctgactcgctctactccgtggaagcacgctcacaaaggtaaagacttttctgtggcttaatccttgtcatgttttcggctcatggacacaaggacacattttcatgccttctctcacagggctctgcgtctccggttcacttctgtgtctttacactcccttcacagagacacttgctcccccttctctcgttcttagcatcccctaggaacttgcacacccaggtctctcgacttctggacctgcttcttaccatgccgtcttaagcagtcaggagtcgctgcctgggttcgagtcctagttaaattacttagtgctgagaccttggggtaggtaaacttttccaagccaggtttatctcagtttcaaaatagggttaatcgtctttatctggcaggtcaggtgggatgtctcacaggtaagcaccagatgccatttgaaaggcttgaagcaaagtcaataaagcattcatgggaaaatacaactggaggcaccactagattttcgtatacattaggttcccacggggaggaccgaagagagaagaaagaagtggaaagggaggagcgtgcaggagagacaggagaagagaataactaaacaaagacattaaagacaaaaaaaaagtaggaaagggagacttagaaaatattaaaagccaccaaaaacacatccaaagacggtttccccttacgttagttgggctaaaagaaagcaaatgggaagaaggttttaaattgattatcccagtgacaaatcccaggaagctttcacatcaaatcaccctattctgggtttttaactccttccatcgagtttaacctctttacctcccacatcctggtaaaccctgccccctccctaccgccccctttgctggtgattaaatcctgaaggtacacgaagtatttcagtgaatgaatggctaacagaaaagggcctcccctcccccttaccctgggcggtgtttttcagttttattccactttccgcccttttcccttaatgaacacagggctaatctcgggccttgtcgaaggaagaggctgcagacgttaatgaggttagctgctggattccagtattcgtcgcataaggatccttctttgtctgcgaaggaaaaacacactgattatcataatgagatgaggtgaactggccaccgccgggccggggcgatgtggcttcttaagccacacttctaattttggtgatggagccgacatttctttggctcctcatttaagtctttgcctctgtcccagtgcgaagtccattcagcggggttgaaagttgcaggcagctttgggaaggggggcgtcggacagggttgcattgtagaaagtggctttgttcgatccttcgcacagatgcaaatggccagagcattcattccctttcttcaagagctgaggactgggggggccactggtgatcagttcccaactctagctctcctctgactcatctcaggacccattgaggacatccaaaactcactcaagatcaccaagtggtaggaaagtactaactcctgggcatagccctaggggagtgactacaatgtgaatactcatggaatgcctagccaggtgaagaagtgaatgcatgttggcatcccagagggaccccccttaagagggcatagtttggggttcagatttgactccagcatactgttgaaattgggcacagggggctagtgattagtcaggatcaatcagtggagaggagattaaaactcacatctgggagtccggaatcagaacttgtagttcttttttttgaaatggagtctcgctctgtcgcccaggctggagtgcagtggcgtgatctcggctcactgcaacctctgccttccgggttcaagcaattctcccacctcagcctcctgagtagctgggattacaggcgcccaccaccacagccggctactttttgtatttttaggagagacggggtttcaccatgttggtcaggctggtcttgaactcctgacctcatgatccacctgccttagcctcccaaagtgctgggattacaggcgtgagccaccatgcccagccctatagtagttcttcttttgccccttaatatcctcacccacatgtcctgtaccctgcctgaaccctcctcctctttttgttctgatctttgagctccctagagcccataattctttagagcaggtatgtcccgagtctgaaacatgcccttatttgtcccaagctctggacatttctcaccccaaggcggatcaatcatgattaaatcactccaattaaactttaggctccagtcagaccttcagccaaatggaaaaaaaaactaggggataagggaggtagttggagcaagaaaatgttattagttgaaaccttacgggaccttcctcccttagtgagtctgttggctaaaggttctctggcttcgtgaattagaatcggatactgtttccaagttagcaaaaccaactctaccccagcaccccacgaggaagaatgtggaaggatctcccattggccggttggggcaaaagcctgaggcaatctttcatccccttttgccaaggcgagactttcccagtgacggtgatgtagttggccactctgactatgggtggactcgggtgtagacctctgaagctgagatcacacgaaaacctggcctccccgccatgtagctgttggagagtagaaaaatagagcacgcctgatgtttctaaatgagaagactttcaatagtaatgaagaatccatggcactctcctcaccctcaaacacatggcagtcattcacatacaggccccaaagccactgttagtgctgcagtagctcctgtggacattggaaagcccggagagggcgtggaagaaatcagctggcccccggcaggttctctggggttttgtgcccaaggctcctggagccctaaaaactttcaaaagttaactccccacgtccccatcctgcttgggtttctggacttttctgaggcaccggcagaggggtctcgttgctcccttgagtgtaggggcagccctttaacctggctccttgagtccctgctttttctgcttctgttgccttcttcctcgtcttcctctctctcaatatctccctctctttgtccctccccagttcctgacctggccatcccggggtgcccttgaccagccccgtgtctcctcagggtgtcccagcaccagcctggcacagagtggggctcagttagagtatgtgggatgttggtttcgccaggtgagtgaatgaaaggactcgaccaccacagctgagccactagctgggccatgcgaagagttctaggtgcaaaggctggagggtggaattcatttttgagaggtgtgtgagcagcttccgacccctgccccatttgaacgggggccttgctggtcgcgtccctgcattcacccgcgcggccatcccgtcatccaacagttgatcctaactgagcacgcccacggccctggtctggcctgggcaccggccaccgtagcccatcccttgatggcctctgtgtccccaggagggcgggccggggggttgcccaggggctggagcagtggactgtggctccatagaggtaggccggagggtgtgagggcagattcaagctatccccagggctctgctctggtcggagccagccccttctccctctctgccttccccgccccattcctgatgctgaactgttctggacccctggccctgagtctctcaggaccaaagtgggcacgggaacagctgtagtgtgtgcccccccgggctttggccacaggtctccctctcgaggtgtggttgtgactgcgacccttcccttgccgtgatgccttcctcccccggggcttggtccagctccttcactctctagcagctgctggggcccacctcccatgccgaggaccagcaggggaaacctccagggagcatctgcaggctctgcttctgcccggctgctggcttgctctccctggtggctctccagcggccagcttcctcacccacccggcactctgctttgctctgtctcctgaggtgggcctgaccaacctccccttctctgcctcagtccctgggctccagggctcagctccacagccctctgcctagcaggctggttctccctgccaagcccatacctgtggtcacctggccctcctgtggtctgagtaccactcccctgccccaggagccactcccactccagctgcctgtttccagcaggttcccagtgcccccgacaagcccctgctggtgtctccatctcctgccaagcatcctccagtgcctcctcctgtgggcctggcctcagggctatggacagactcctgtcccatcccagagacccctcgtgatcgtgccctggcacgtgggccgtggcccggctgggtcggctgaagaactgcggatggaagctgcggaagaggccctgatggggcccaccatcccggacccaagtcttcttcctggcgggcctctcgtctccttcctggtttgggcggaagcccatcacctggatgcctacgtgggaagggacctcgaatgtgggaccccagcccctctccagctcgaaatcggcagactaggatggaagtgccctgtgagctggggggcccttcaaagggccaaggagaaaacgcaggccgagggaccagccttccaaatgggcttcaagctccaatgacctccgctcgccccctcgaaatgtctggaaaacataatgggcagattttctgtcttcaaagtttccggctaaacctcttcaagttctttattgtttgggactgagacactcagccatgttaatgggtagtttcttttgtatttgccttgaaaggccaaaatatttttatattgccacagacaaagccacctatttaaaaatgaactccatgtccgtcgtttcccaccaggagactatgtaccatgtgtgtgtctctatgtattctggggtcttgaaacaggtttctcatggggatggtcattcaccacggtccagaggggcagaacaggcggcgcttgccttgcccagggggcctggggaacgtgggccctcatctcagatctgcccccagtatgtttaggacgcgagccccagaaggatctgggagtaaacttaacattcactgtgtctctgctctgcatccgccatttgtgtgtgtttctggactgtgggctgtgtgtaccttggttggtgactcagtgagaagaagcaggaatgccaaagatactgtgaatgttctgagttttgttgctgttgttgttgagaggttgtttcactggtatctattgcattgtataataaatgaccagatgaatgaatgagtgaagcaagagagaatgaataaacaagtaaataggtaaagaagtaagcaagccaggatgagagtgtgtgtacacaagaccatggttcatccgctttgatggctaggcaatcaatatataaatagaaaaaacccagtgaatcactaagtaatagggcaacacacaaagcgatatcaggtgattatggactaaggggtatgtgtaactcaaatatatgcctctgacatttgacaatgaaaaagaacctaaatgaaagaaagaatggatgtatgagtagtgaagtgcagaatgagacatagattttgaggcccgtcaaaatgaaaagatgcaagttagggaacaagtgatcaaaagggagaagggaaaggttttttttaaaaaaccaaaacaacaaagaaaggttaaaaaaaaaaacagactagaggatgagtaatgagtaactctgtaaggaggaccatgtcagactattgtaagctaagcattaggactgatacaaataatatatgctcctggcatagaaaaataaaccacagagaacgagttcaaagaatagcaaagaaagaaagaggacccagtgggcgaaagatgagagtgtacttttaccaaaagttatctaagcctgagcacttgaagtctgcacataaataaataaatgacaaaagaaagaaaaaaaggccagcgaggccgggagcaggtggccttcatctgcaactgtgtctctctcagcctccacagccacggggacaccctgcacctattcccacgggacaggctggacccagagactctggacccggggcctccccttgagtagagacccgccctctgactgatggacgccgctgacctggggtcagacccgtgggctggacccctgcccaccccgcaggaaccctgaggcctaggggagctgttgagccttcagtgtctgcatgtgggaagtgggctccttcacctacctcacagggctgttgtgaggggcgctgtgatgcggttccaaagcacagggcttggcgcaccccactgtgctctcaataaatgtgtttcctgtcttaacaaaaaaaaaaaaaaaaaaaaaaaaaaaaaaaaaaaaaaaaaaaaaaaaaaaaaaaaaaaaaaaaaaaaaaaaaaaaacaaaaaaaaatataacataaaagaaaaaaaaataataaacaaccaaaaatctaaaataaaaccgtggccctttttttaaaaaccatgctaaagggaaaacccttgccgtgccccaatttaaccgtttgggagaaatccccttttcgcggggggttattttcaaagggcccctcgcaaacccttgtcaaacagtccaaaccctgatggcaaaggcaattttacgctttattttttgtaaaatcccttaaattttggccaaaaacctgttttttacccaataggccaaatgcctaaatccctttaaattaaagaaattccccgaataggttggacttctccacatttgaaccaaagtcccttttaaaaaagggcttcaactgcaagggggctcgttttagggctgtgcgcctttggaaccatccccttataaatattgaggtcaggggcacaggattatattgcaccctgggacctcctttttctcct

SEQ ID NO: 736357 - DNA, 8133 bp, Homo sapiens
gattcgtttacccaagagggaacagttttgagaccccccggattcactgcggagtggccgcagaggccggggtcggcctttgcgccgtggcttcgggtgttgtggaggcgcacagagggtctctcctcagggatgacatcatccgtccacctccttgtcttcaaggaccacctcctctccatgctgagctgctgccaaggggcctgctgcccatctacacctcacgagggcactaggagcacggtttcctggatcccaccaacatacaaagcagccactcactgacccccaggaccaggatggcaaaggatgaagaggaccggaactgaccagccagctgtccctcttacctaaagacttaaaccaatgccctagtgagggggcattgggcattaagccctgacctttgctatgctcatactttgactctatgagtactttcctataagtctttgcttgtgttcacctgctagcaaactggagtgtttccctccccaagggggtgtcagtctttgtcgactgactctgtcatcacccttatgatgtcctgaatggaaggatccctttgggaaattctcaggagggggacctgggccaagggcttggccagcatcctgctggcaactccaaggccctgggtgggcttctggaatgagcatgctactgaatcaccaaaggcacgccccacctctctgaagatcttcctatccttttctgggggaatggggtcgatgagagcaacctcctagggttgttgtgagaattaaatgagataaaagaggcctcaggcaggatctggcatagaggaggtgatcagcaaatgtttgttgaaaaggtttgacaggtcagtcccttcccacccctcttgcttgtcttacttgtcttatttattctccaacagcactccaggcagcccttgtccacgggctctccttgcatcaggtaggggctttgcagagaccatcgacgggctgacttgagtaagaacacgaattatgcatgtggccatttccagagcactttctatgtgatatgaacatgtgatttttatgtaatatgtgtatgtaaacgaggcagcctcatttccaggtgaggatgcatttggtagtgttgatttttgtaatttaaagaagctgaaagggagagaggacccgtgaggactgaactctctgtcccatggggtagggcttacatttacattaaagaaacagaaacttgctgggaggtgtaagtatttggtcacattgctggcaacagaaggggttggagttggacccagggtgccacgctagctgccctcaccccttcttcccctctggcccagagttatactaagagtccttttatttcaaaccaaatgtttgacaatgggacagtctgtttgaaatcccagctgcctggggtggtcttgggggtctgggtggccccagtgctggtaccatgtgctggcttcaccttttaataacagtgtgaccttaaacaagtcgcttaactactctaagtttcagtttctttcatggtctaaatggagattaaaacacacacacacacacacacacacacacacacacacacacaccctcgtgtatctaccccacagggcgcttttgaagaccaaatgctgtaactactatgaaagtgctttgtaaattgctgtggaaagtgtgagctactcaagcacccgaggctgtccctccttgctcacatgtccagcccaattctcccttagtgagaacagcactcagtaggtgctgtgtgtgtttgtgttcaattaagaaattccagaataaataaaaatgaattaattcaacaaacattttctggggcaccgacaatctgcccagtgcaccaggctaggtatctgatacaaagataatgaaaacagtctcttggaacctaattggggtcctcatttgaccaggaatttctttcgtcccgttttaagccaaccagttttgtccggacaagacaaaaacaacttgggctgctttagagaagcccagctcagtgtagacaatagctgcccagcctctgaaaggggctgattggattatgtggcaaatggaggtgcaaggatgacttggacggtgacaaatgaagtgggcggagacctgctttgagttaatccaggctattaggaggggaccttttgtcttccagagactggcaggagcttttaccagtggtttttacatccttaatgttcaggacgaataatttatggtcagtgaaaatccaggccccagtgagattcgagtgggctgtaaaatcgagagtcctgctcccagtgagtaatggtagtgaatgtttctgtcactttttgcaaccgtccattcatttgatcctcacaactccctgtcctgagccaggaccggccactgccactcccagggaaacagaggctgtcaagaggctccacagattgggccccactggatcattgaacccctgttccctgagttctagaggaagaattgtacctgtctcagtcccggccacctccagaaggcctccctctgcatttctgactttgctgtgccggcagcctggagcctcccaggtccctgctgtcatcttttctagccactacagtctctgtctttcctttcacagcccaagcttcttgaaaggcctgtctacacttgctgtcttccttcctcacctccaatttcctcttcaacccactgcttcctgactcgctctactccgtggaagcacgctcacaaaggtaaagacttttctgtggcttaatccttgtcatgttttcggctcatggacacaaggacacattttcatgccttctctcacagggctctgcgtctccggttcacttctgtgtctttacactcccttcacagagacacttgctcccccttctctcgttcttagcatcccctaggaacttgcacacccaggtctctcgacttctggacctgcttcttaccatgccgtcttaagcagtcaggagtcgctgcctgggttcgagtcctagttaaattacttagtgctgagaccttggggtaggtaaacttttccaagccaggtttatctcagtttcaaaatagggttaatcgtctttatctggcaggtcaggtgggatgtctcacaggtaagcaccagatgccatttgaaaggcttgaagcaaagtcaataaagcattcatgggaaaatacaactggaggcaccactagattttcgtatacattaggttcccacggggaggaccgaagagagaagaaagaagtggaaagggaggagcgtgcaggagagacaggagaagagaataactaaacaaagacattaaagacaaaaaaaaagtaggaaagggagacttagaaaatattaaaagccaccaaaaacacatccaaagacggtttccccttacgttagttgggctaaaagaaagcaaatgggaagaaggttttaaattgattatcccagtgacaaatcccaggaagctttcacatcaaatcaccctattctgggtttttaactccttccatcgagtttaacctctttacctcccacatcctggtaaaccctgccccctccctaccgccccctttgctggtgattaaatcctgaaggtacacgaagtatttcagtgaatgaatggctaacagaaaagggcctcccctcccccttaccctgggcggtgtttttcagttttattccactttccgcccttttcccttaatgaacacagggctaatctcgggccttgtcgaaggaagaggctgcagacgttaatgaggttagctgctggattccagtattcgtcgcataaggatccttctttgtctgcgaaggaaaaacacactgattatcataatgagatgaggtgaactggccaccgccgggccggggcgatgtggcttcttaagccacacttctaattttggtgatggagccgacatttctttggctcctcatttaagtctttgcctctgtcccagtgcgaagtccattcagcggggttgaaagttgcaggcagctttgggaaggggggcgtcggacagggttgcattgtagaaagtggctttgttcgatccttcgcacagatgcaaatggccagagcattcattccctttcttcaagagctgaggactgggggggccactggtgatcagttcccaactctagctctcctctgactcatctcaggacccattgaggacatccaaaactcactcaagatcaccaagtggtaggaaagtactaactcctgggcatagccctaggggagtgactacaatgtgaatactcatggaatgcctagccaggtgaagaagtgaatgcatgttggcatcccagagggaccccccttaagagggcatagtttggggttcagatttgactccagcatactgttgaaattgggcacagggggctagtgattagtcaggatcaatcagtggagaggagattaaaactcacatctgggagtccggaatcagaacttgtagttcttttttttgaaatggagtctcgctctgtcgcccaggctggagtgcagtggcgtgatctcggctcactgcaacctctgccttccgggttcaagcaattctcccacctcagcctcctgagtagctgggattacaggcgcccaccaccacagccggctactttttgtatttttaggagagacggggtttcaccatgttggtcaggctggtcttgaactcctgacctcatgatccacctgccttagcctcccaaagtgctgggattacaggcgtgagccaccatgcccagccctatagtagttcttcttttgccccttaatatcctcacccacatgtcctgtaccctgcctgaaccctcctcctctttttgttctgatctttgagctccctagagcccataattctttagagcaggtatgtcccgagtctgaaacatgcccttatttgtcccaagctctggacatttctcaccccaaggcggatcaatcatgattaaatcactccaattaaactttaggctccagtcagaccttcagccaaatggaaaaaaaaactaggggataagggaggtagttggagcaagaaaatgttattagttgaaaccttacgggaccttcctcccttagtgagtctgttggctaaaggttctctggcttcgtgaattagaatcggatactgtttccaagttagcaaaaccaactctaccccagcaccccacgaggaagaatgtggaaggatctcccattggccggttggggcaaaagcctgaggcaatctttcatccccttttgccaaggcgagactttcccagtgacggtgatgtagttggccactctgactatgggtggactcgggtgtagacctctgaagctgagatcacacgaaaacctggcctccccgccatgtagctgttggagagtagaaaaatagagcacgcctgatgtttctaaatgagaagactttcaatagtaatgaagaatccatggcactctcctcaccctcaaacacatggcagtcattcacatacaggccccaaagccactgttagtgctgcagtagctcctgtggacattggaaagcccggagagggcgtggaagaaatcagctggcccccggcaggttctctggggttttgtgcccaaggctcctggagccctaaaaactttcaaaagttaactccccacgtccccatcctgcttgggtttctggacttttctgaggcaccggcagaggggtctcgttgctcccttgagtgtaggggcagccctttaacctggctccttgagtccctgctttttctgcttctgttgccttcttcctcgtcttcctctctctcaatatctccctctctttgtccctccccagttcctgacctggccatcccggggtgcccttgaccagccccgtgtctcctcagggtgtcccagcaccagcctggcacagagtggggctcagttagagtatgtgggatgttggtttcgccaggtgagtgaatgaaaggactcgaccaccacagctgagccactagctgggccatgcgaagagttctaggtgcaaaggctggagggtggaattcatttttgagaggtgtgtgagcagcttccgacccctgccccatttgaacgggggccttgctggtcgcgtccctgcattcacccgcgcggccatcccgtcatccaacagttgatcctaactgagcacgcccacggccctggtctggcctgggcaccggccaccgtagcccatcccttgatggcctctgtgtccccaggagggcgggccggggggttgcccaggggctggagcagtggactgtggctccatagaggtaggccggagggtgtgagggcagattcaagctatccccagggctctgctctggtcggagccagccccttctccctctctgccttccccgccccattcctgatgctgaactgttctggacccctggccctgagtctctcaggaccaaagtgggcacgggaacagctgtagtgtgtgcccccccgggctttggccacaggtctccctctcgaggtgtggttgtgactgcgacccttcccttgccgtgatgccttcctcccccggggcttggtccagctccttcactctctagcagctgctggggcccacctcccatgccgaggaccagcaggggaaacctccagggagcatctgcaggctctgcttctgcccggctgctggcttgctctccctggtggctctccagcggccagcttcctcacccacccggcactctgctttgctctgtctcctgaggtgggcctgaccaacctccccttctctgcctcagtccctgggctccagggctcagctccacagccctctgcctagcaggctggttctccctgccaagcccatacctgtggtcacctggccctcctgtggtctgagtaccactcccctgccccaggagccactcccactccagctgcctgtttccagcaggttcccagtgcccccgacaagcccctgctggtgtctccatctcctgccaagcatcctccagtgcctcctcctgtgggcctggcctcagggctatggacagactcctgtcccatcccagagacccctcgtgatcgtgccctggcacgtgggccgtggcccggctgggtcggctgaagaactgcggatggaagctgcggaagaggccctgatggggcccaccatcccggacccaagtcttcttcctggcgggcctctcgtctccttcctggtttgggcggaagcccatcacctggatgcctacgtgggaagggacctcgaatgtgggaccccagcccctctccagctcgaaatcggcagactaggatggaagtgccctgtgagctggggggcccttcaaagggccaaggagaaaacgcaggccgagggaccagccttccaaatgggcttcaagctccaatgacctccgctcgccccctcgaaatgtctggaaaacataatgggcagattttctgtcttcaaagtttccggctaaacctcttcaagttctttattgtttgggactgagacactcagccatgttaatgggtagtttcttttgtatttgccttgaaaggccaaaatatttttatattgccacagacaaagccacctatttaaaaatgaactccatgtccgtcgtttcccaccaggagactatgtaccatgtgtgtgtctctatgtattctggggtcttgaaacaggtttctcatggggatggtcattcaccacggtccagaggggcagaacaggcggcgcttgccttgcccagggggcctggggaacgtgggccctcatctcagatctgcccccagtatgtttaggacgcgagccccagaaggatctgggagtaaacttaacattcactgtgtctctgctctgcatccgccatttgtgtgtgtttctggactgtgggctgtgtgtaccttggttggtgactcagtgagaagaagcaggaatgccaaagatactgtgaatgttctgagttttgttgctgttgttgttgagaggttgtttcactggtatctattgcattgtataataaatgaccagatgaatgaatgagtgaagcaagagagaatgaataaacaagtaaataggtaaagaagaaaaaaaaaaaacacccaacaaaaacaaacaaatccacaacaaaaacacg

SEQ ID NO: 736358 - DNA, 8184 bp, Homo sapiens
gattcgtttacccaagagggaacagttttgagaccccccggattcactgcggagtggccgcagaggccggggtcggcctttgcgccgtggcttcgggtgttgtggaggcgcacagagggtctctcctcagggatgacatcatccgtccacctccttgtcttcaaggaccacctcctctccatgctgagctgctgccaaggggcctgctgcccatctacacctcacgagggcactaggagcacggtttcctggatcccaccaacatacaaagcagccactcactgacccccaggaccaggatggcaaaggatgaagaggaccggaactgaccagccagctgtccctcttacctaaagacttaaaccaatgccctagtgagggggcattgggcattaagccctgacctttgctatgctcatactttgactctatgagtactttcctataagtctttgcttgtgttcacctgctagcaaactggagtgtttccctccccaagggggtgtcagtctttgtcgactgactctgtcatcacccttatgatgtcctgaatggaaggatccctttgggaaattctcaggagggggacctgggccaagggcttggccagcatcctgctggcaactccaaggccctgggtgggcttctggaatgagcatgctactgaatcaccaaaggcacgccccacctctctgaagatcttcctatccttttctgggggaatggggtcgatgagagcaacctcctagggttgttgtgagaattaaatgagataaaagaggcctcaggcaggatctggcatagaggaggtgatcagcaaatgtttgttgaaaaggtttgacaggtcagtcccttcccacccctcttgcttgtcttacttgtcttatttattctccaacagcactccaggcagcccttgtccacgggctctccttgcatcaggtaggggctttgcagagaccatcgacgggctgacttgagtaagaacacgaattatgcatgtggccatttccagagcactttctatgtgatatgaacatgtgatttttatgtaatatgtgtatgtaaacgaggcagcctcatttccaggtgaggatgcatttggtagtgttgatttttgtaatttaaagaagctgaaagggagagaggacccgtgaggactgaactctctgtcccatggggtagggcttacatttacattaaagaaacagaaacttgctgggaggtgtaagtatttggtcacattgctggcaacagaaggggttggagttggacccagggtgccacgctagctgccctcaccccttcttcccctctggcccagagttatactaagagtccttttatttcaaaccaaatgtttgacaatgggacagtctgtttgaaatcccagctgcctggggtggtcttgggggtctgggtggccccagtgctggtaccatgtgctggcttcaccttttaataacagtgtgaccttaaacaagtcgcttaactactctaagtttcagtttctttcatggtctaaatggagattaaaacacacacacacacacacacacacacacacacacacacacaccctcgtgtatctaccccacagggcgcttttgaagaccaaatgctgtaactactatgaaagtgctttgtaaattgctgtggaaagtgtgagctactcaagcacccgaggctgtccctccttgctcacatgtccagcccaattctcccttagtgagaacagcactcagtaggtgctgtgtgtgtttgtgttcaattaagaaattccagaataaataaaaatgaattaattcaacaaacattttctggggcaccgacaatctgcccagtgcaccaggctaggtatctgatacaaagataatgaaaacagtctcttggaacctaattggggtcctcatttgaccaggaatttctttcgtcccgttttaagccaaccagttttgtccggacaagacaaaaacaacttgggctgctttagagaagcccagctcagtgtagacaatagctgcccagcctctgaaaggggctgattggattatgtggcaaatggaggtgcaaggatgacttggacggtgacaaatgaagtgggcggagacctgctttgagttaatccaggctattaggaggggaccttttgtcttccagagactggcaggagcttttaccagtggtttttacatccttaatgttcaggacgaataatttatggtcagtgaaaatccaggccccagtgagattcgagtgggctgtaaaatcgagagtcctgctcccagtgagtaatggtagtgaatgtttctgtcactttttgcaaccgtccattcatttgatcctcacaactccctgtcctgagccaggaccggccactgccactcccagggaaacagaggctgtcaagaggctccacagattgggccccactggatcattgaacccctgttccctgagttctagaggaagaattgtacctgtctcagtcccggccacctccagaaggcctccctctgcatttctgactttgctgtgccggcagcctggagcctcccaggtccctgctgtcatcttttctagccactacagtctctgtctttcctttcacagcccaagcttcttgaaaggcctgtctacacttgctgtcttccttcctcacctccaatttcctcttcaacccactgcttcctgactcgctctactccgtggaagcacgctcacaaaggtaaagacttttctgtggcttaatccttgtcatgttttcggctcatggacacaaggacacattttcatgccttctctcacagggctctgcgtctccggttcacttctgtgtctttacactcccttcacagagacacttgctcccccttctctcgttcttagcatcccctaggaacttgcacacccaggtctctcgacttctggacctgcttcttaccatgccgtcttaagcagtcaggagtcgctgcctgggttcgagtcctagttaaattacttagtgctgagaccttggggtaggtaaacttttccaagccaggtttatctcagtttcaaaatagggttaatcgtctttatctggcaggtcaggtgggatgtctcacaggtaagcaccagatgccatttgaaaggcttgaagcaaagtcaataaagcattcatgggaaaatacaactggaggcaccactagattttcgtatacattaggttcccacggggaggaccgaagagagaagaaagaagtggaaagggaggagcgtgcaggagagacaggagaagagaataactaaacaaagacattaaagacaaaaaaaaagtaggaaagggagacttagaaaatattaaaagccaccaaaaacacatccaaagacggtttccccttacgttagttgggctaaaagaaagcaaatgggaagaaggttttaaattgattatcccagtgacaaatcccaggaagctttcacatcaaatcaccctattctgggtttttaactccttccatcgagtttaacctctttacctcccacatcctggtaaaccctgccccctccctaccgccccctttgctggtgattaaatcctgaaggtacacgaagtatttcagtgaatgaatggctaacagaaaagggcctcccctcccccttaccctgggcggtgtttttcagttttattccactttccgcccttttcccttaatgaacacagggctaatctcgggccttgtcgaaggaagaggctgcagacgttaatgaggttagctgctggattccagtattcgtcgcataaggatccttctttgtctgcgaaggaaaaacacactgattatcataatgagatgaggtgaactggccaccgccgggccggggcgatgtggcttcttaagccacacttctaattttggtgatggagccgacatttctttggctcctcatttaagtctttgcctctgtcccagtgcgaagtccattcagcggggttgaaagttgcaggcagctttgggaaggggggcgtcggacagggttgcattgtagaaagtggctttgttcgatccttcgcacagatgcaaatggccagagcattcattccctttcttcaagagctgaggactgggggggccactggtgatcagttcccaactctagctctcctctgactcatctcaggacccattgaggacatccaaaactcactcaagatcaccaagtggtaggaaagtactaactcctgggcatagccctaggggagtgactacaatgtgaatactcatggaatgcctagccaggtgaagaagtgaatgcatgttggcatcccagagggaccccccttaagagggcatagtttggggttcagatttgactccagcatactgttgaaattgggcacagggggctagtgattagtcaggatcaatcagtggagaggagattaaaactcacatctgggagtccggaatcagaacttgtagttcttttttttgaaatggagtctcgctctgtcgcccaggctggagtgcagtggcgtgatctcggctcactgcaacctctgccttccgggttcaagcaattctcccacctcagcctcctgagtagctgggattacaggcgcccaccaccacagccggctactttttgtatttttaggagagacggggtttcaccatgttggtcaggctggtcttgaactcctgacctcatgatccacctgccttagcctcccaaagtgctgggattacaggcgtgagccaccatgcccagccctatagtagttcttcttttgccccttaatatcctcacccacatgtcctgtaccctgcctgaaccctcctcctctttttgttctgatctttgagctccctagagcccataattctttagagcaggtatgtcccgagtctgaaacatgcccttatttgtcccaagctctggacatttctcaccccaaggcggatcaatcatgattaaatcactccaattaaactttaggctccagtcagaccttcagccaaatggaaaaaaaaactaggggataagggaggtagttggagcaagaaaatgttattagttgaaaccttacgggaccttcctcccttagtgagtctgttggctaaaggttctctggcttcgtgaattagaatcggatactgtttccaagttagcaaaaccaactctaccccagcaccccacgaggaagaatgtggaaggatctcccattggccggttggggcaaaagcctgaggcaatctttcatccccttttgccaaggcgagactttcccagtgacggtgatgtagttggccactctgactatgggtggactcgggtgtagacctctgaagctgagatcacacgaaaacctggcctccccgccatgtagctgttggagagtagaaaaatagagcacgcctgatgtttctaaatgagaagactttcaatagtaatgaagaatccatggcactctcctcaccctcaaacacatggcagtcattcacatacaggccccaaagccactgttagtgctgcagtagctcctgtggacattggaaagcccggagagggcgtggaagaaatcagctggcccccggcaggttctctggggttttgtgcccaaggctcctggagccctaaaaactttcaaaagttaactccccacgtccccatcctgcttgggtttctggacttttctgaggcaccggcagaggggtctcgttgctcccttgagtgtaggggcagccctttaacctggctccttgagtccctgctttttctgcttctgttgccttcttcctcgtcttcctctctctcaatatctccctctctttgtccctccccagttcctgacctggccatcccggggtgcccttgaccagccccgtgtctcctcagggtgtcccagcaccagcctggcacagagtggggctcagttagagtatgtgggatgttggtttcgccaggtgagtgaatgaaaggactcgaccaccacagctgagccactagctgggccatgcgaagagttctaggtgcaaaggctggagggtggaattcatttttgagaggtgtgtgagcagcttccgacccctgccccatttgaacgggggccttgctggtcgcgtccctgcattcacccgcgcggccatcccgtcatccaacagttgatcctaactgagcacgcccacggccctggtctggcctgggcaccggccaccgtagcccatcccttgatggcctctgtgtccccaggagggcgggccggggggttgcccaggggctggagcagtggactgtggctccatagaggtaggccggagggtgtgagggcagattcaagctatccccagggctctgctctggtcggagccagccccttctccctctctgccttccccgccccattcctgatgctgaactgttctggacccctggccctgagtctctcaggaccaaagtgggcacgggaacagctgtagtgtgtgcccccccgggctttggccacaggtctccctctcgaggtgtggttgtgactgcgacccttcccttgccgtgatgccttcctcccccggggcttggtccagctccttcactctctagcagctgctggggcccacctcccatgccgaggaccagcaggggaaacctccagggagcatctgcaggctctgcttctgcccggctgctggcttgctctccctggtggctctccagcggccagcttcctcacccacccggcactctgctttgctctgtctcctgaggtgggcctgaccaacctccccttctctgcctcagtccctgggctccagggctcagctccacagccctctgcctagcaggctggttctccctgccaagcccatacctgtggtcacctggccctcctgtggtctgagtaccactcccctgccccaggagccactcccactccagctgcctgtttccagcaggttcccagtgcccccgacaagcccctgctggtgtctccatctcctgccaagcatcctccagtgcctcctcctgtgggcctggcctcagggctatggacagactcctgtcccatcccagagacccctcgtgatcgtgccctggcacgtgggccgtggcccggctgggtcggctgaagaactgcggatggaagctgcggaagaggccctgatggggcccaccatcccggacccaagtcttcttcctggcgggcctctcgtctccttcctggtttgggcggaagcccatcacctggatgcctacgtgggaagggacctgggtgggggagggggggggggtgttcattcttaaattcctccacagccacggggacaccctgcacctattcccacgggacaggctggacccagagactctggacccggggcctccccttgagtagagacccgccctctgactgatggacgccgctgacctggggtcagacccgtgggctggacccctgcccaccccgcaggaaccctgaggcctaggggagctgttgagccttcagtgtctgcatgtgggaagtgggctccttcacctacctcacagggctgttgtgaggggcgctgtgatgcggttccaaagcacagggcttggcgcaccccactgtgctctcaataaatgtgtttcctgtcttaacaaaaaaaaaaaaaaaaaaaaaaaaaaaaaaaaaaaaaaaaaaaaaaaaaaaaaaaaaaaaaaaaaaaaaaaaaaaaacaaaaaaaaatataacataaaagaaaaaaaaataataaacaaccaaaaatctaaaataaaaccgtggccctttttttaaaaaccatgctaaagggaaaacccttgccgtgccccaatttaaccgtttgggagaaatccccttttcgcggggggttattttcaaagggcccctcgcaaacccttgtcaaacagtccaaaccctgatggcaaaggcaattttacgctttattttttgtaaaatcccttaaattttggccaaaaacctgttttttacccaataggccaaatgcctaaatccctttaaattaaagaaattccccgaataggttggacttctccacatttgaaccaaagtcccttttaaaaaagggcttcaactgcaagggggctcgttttagggctgtgcgcctttggaaccatccccttataaatattgaggtcaggggcacaggattatattgcaccctgggacctcctttttctcct

SEQ ID NO: 736359 - DNA, 7346 bp, Homo sapiens
gattcgtttacccaagagggaacagttttgagaccccccggattcactgcggagtggccgcagaggccggggtcggcctttgcgccgtggcttcgggtgttgtggaggcgcacagagggtctctcctcagggatgacatcatccgtccacctccttgtcttcaaggaccacctcctctccatgctgagctgctgccaaggggcctgctgcccatctacacctcacgagggcactaggagcacggtttcctggatcccaccaacatacaaagcagccactcactgacccccaggaccaggatggcaaaggatgaagaggaccggaactgaccagccagctgtccctcttacctaaagacttaaaccaatgccctagtgagggggcattgggcattaagccctgacctttgctatgctcatactttgactctatgagtactttcctataagtctttgcttgtgttcacctgctagcaaactggagtgtttccctccccaagggggtgtcagtctttgtcgactgactctgtcatcacccttatgatgtcctgaatggaaggatccctttgggaaattctcaggagggggacctgggccaagggcttggccagcatcctgctggcaactccaaggccctgggtgggcttctggaatgagcatgctactgaatcaccaaaggcacgccccacctctctgaagatcttcctatccttttctgggggaatggggtcgatgagagcaacctcctagggttgttgtgagaattaaatgagataaaagaggcctcaggcaggatctggcatagaggaggtgatcagcaaatgtttgttgaaaaggtttgacaggtcagtcccttcccacccctcttgcttgtcttacttgtcttatttattctccaacagcactccaggcagcccttgtccacgggctctccttgcatcaggtaggggctttgcagagaccatcgacgggctgacttgagtaagaacacgaattatgcatgtggccatttccagagcactttctatgtgatatgaacatgtgatttttatgtaatatgtgtatgtaaacgaggcagcctcatttccaggtgaggatgcatttggtagtgttgatttttgtaatttaaagaagctgaaagggagagaggacccgtgaggactgaactctctgtcccatggggtagggcttacatttacattaaagaaacagaaacttgctgggaggtgtaagtatttggtcacattgctggcaacagaaggggttggagttggacccagggtgccacgctagctgccctcaccccttcttcccctctggcccagagttatactaagagtccttttatttcaaaccaaatgtttgacaatgggacagtctgtttgaaatcccagctgcctggggtggtcttgggggtctgggtggccccagtgctggtaccatgtgctggcttcaccttttaataacagtgtgaccttaaacaagtcgcttaactactctaagtttcagtttctttcatggtctaaatggagattaaaacacacacacacacacacacacacacacacacacacacacaccctcgtgtatctaccccacagggcgcttttgaagaccaaatgctgtaactactatgaaagtgctttgtaaattgctgtggaaagtgtgagctactcaagcacccgaggctgtccctccttgctcacatgtccagcccaattctcccttagtgagaacagcactcagtaggtgctgtgtgtgtttgtgttcaattaagaaattccagaataaataaaaatgaattaattcaacaaacattttctggggcaccgacaatctgcccagtgcaccaggctaggtatctgatacaaagataatgaaaacagtctcttggaacctaattggggtcctcatttgaccaggaatttctttcgtcccgttttaagccaaccagttttgtccggacaagacaaaaacaacttgggctgctttagagaagcccagctcagtgtagacaatagctgcccagcctctgaaaggggctgattggattatgtggcaaatggaggtgcaaggatgacttggacggtgacaaatgaagtgggcggagacctgctttgagttaatccaggctattaggaggggaccttttgtcttccagagactggcaggagcttttaccagtggtttttacatccttaatgttcaggacgaataatttatggtcagtgaaaatccaggccccagtgagattcgagtgggctgtaaaatcgagagtcctgctcccagtgagtaatggtagtgaatgtttctgtcactttttgcaaccgtccattcatttgatcctcacaactccctgtcctgagccaggaccggccactgccactcccagggaaacagaggctgtcaagaggctccacagattgggccccactggatcattgaacccctgttccctgagttctagaggaagaattgtacctgtctcagtcccggccacctccagaaggcctccctctgcatttctgactttgctgtgccggcagcctggagcctcccaggtccctgctgtcatcttttctagccactacagtctctgtctttcctttcacagcccaagcttcttgaaaggcctgtctacacttgctgtcttccttcctcacctccaatttcctcttcaacccactgcttcctgactcgctctactccgtggaagcacgctcacaaaggtaaagacttttctgtggcttaatccttgtcatgttttcggctcatggacacaaggacacattttcatgccttctctcacagggctctgcgtctccggttcacttctgtgtctttacactcccttcacagagacacttgctcccccttctctcgttcttagcatcccctaggaacttgcacacccaggtctctcgacttctggacctgcttcttaccatgccgtcttaagcagtcaggagtcgctgcctgggttcgagtcctagttaaattacttagtgctgagaccttggggtaggtaaacttttccaagccaggtttatctcagtttcaaaatagggttaatcgtctttatctggcaggtcaggtgggatgtctcacaggtaagcaccagatgccatttgaaaggcttgaagcaaagtcaataaagcattcatgggaaaatacaactggaggcaccactagattttcgtatacattaggttcccacggggaggaccgaagagagaagaaagaagtggaaagggaggagcgtgcaggagagacaggagaagagaataactaaacaaagacattaaagacaaaaaaaaagtaggaaagggagacttagaaaatattaaaagccaccaaaaacacatccaaagacggtttccccttacgttagttgggctaaaagaaagcaaatgggaagaaggttttaaattgattatcccagtgacaaatcccaggaagctttcacatcaaatcaccctattctgggtttttaactccttccatcgagtttaacctctttacctcccacatcctggtaaaccctgccccctccctaccgccccctttgctggtgattaaatcctgaaggtacacgaagtatttcagtgaatgaatggctaacagaaaagggcctcccctcccccttaccctgggcggtgtttttcagttttattccactttccgcccttttcccttaatgaacacagggctaatctcgggccttgtcgaaggaagaggctgcagacgttaatgaggttagctgctggattccagtattcgtcgcataaggatccttctttgtctgcgaaggaaaaacacactgattatcataatgagatgaggtgaactggccaccgccgggccggggcgatgtggcttcttaagccacacttctaattttggtgatggagccgacatttctttggctcctcatttaagtctttgcctctgtcccagtgcgaagtccattcagcggggttgaaagttgcaggcagctttgggaaggggggcgtcggacagggttgcattgtagaaagtggctttgttcgatccttcgcacagatgcaaatggccagagcattcattccctttcttcaagagctgaggactgggggggccactggtgatcagttcccaactctagctctcctctgactcatctcaggacccattgaggacatccaaaactcactcaagatcaccaagtggtaggaaagtactaactcctgggcatagccctaggggagtgactacaatgtgaatactcatggaatgcctagccaggtgaagaagtgaatgcatgttggcatcccagagggaccccccttaagagggcatagtttggggttcagatttgactccagcatactgttgaaattgggcacagggggctagtgattagtcaggatcaatcagtggagaggagattaaaactcacatctgggagtccggaatcagaacttgtagttcttttttttgaaatggagtctcgctctgtcgcccaggctggagtgcagtggcgtgatctcggctcactgcaacctctgccttccgggttcaagcaattctcccacctcagcctcctgagtagctgggattacaggcgcccaccaccacagccggctactttttgtatttttaggagagacggggtttcaccatgttggtcaggctggtcttgaactcctgacctcatgatccacctgccttagcctcccaaagtgctgggattacaggcgtgagccaccatgcccagccctatagtagttcttcttttgccccttaatatcctcacccacatgtcctgtaccctgcctgaaccctcctcctctttttgttctgatctttgagctccctagagcccataattctttagagcaggtatgtcccgagtctgaaacatgcccttatttgtcccaagctctggacatttctcaccccaaggcggatcaatcatgattaaatcactccaattaaactttaggctccagtcagaccttcagccaaatggaaaaaaaaactaggggataagggaggtagttggagcaagaaaatgttattagttgaaaccttacgggaccttcctcccttagtgagtctgttggctaaaggttctctggcttcgtgaattagaatcggatactgtttccaagttagcaaaaccaactctaccccagcaccccacgaggaagaatgtggaaggatctcccattggccggttggggcaaaagcctgaggcaatctttcatccccttttgccaaggcgagactttcccagtgacggtgatgtagttggccactctgactatgggtggactcgggtgtagacctctgaagctgagatcacacgaaaacctggcctccccgccatgtagctgttggagagtagaaaaatagagcacgcctgatgtttctaaatgagaagactttcaatagtaatgaagaatccatggcactctcctcaccctcaaacacatggcagtcattcacatacaggccccaaagccactgttagtgctgcagtagctcctgtggacattggaaagcccggagagggcgtggaagaaatcagctggcccccggcaggttctctggggttttgtgcccaaggctcctggagccctaaaaactttcaaaagttaactccccacgtccccatcctgcttgggtttctggacttttctgaggcaccggcagaggggtctcgttgctcccttgagtgtaggggcagccctttaacctggctccttgagtccctgctttttctgcttctgttgccttcttcctcgtcttcctctctctcaatatctccctctctttgtccctccccagttcctgacctggccatcccggggtgcccttgaccagccccgtgtctcctcagggtgtcccagcaccagcctggcacagagtggggctcagttagagtatgtgggatgttggtttcgccaggtgagtgaatgaaaggactcgaccaccacagctgagccactagctgggccatgcgaagagttctaggtgcaaaggctggagggtggaattcatttttgagaggtgtgtgagcagcttccgacccctgccccatttgaacgggggccttgctggtcgcgtccctgcattcacccgcgcggccatcccgtcatccaacagttgatcctaactgagcacgcccacggccctggtctggcctgggcaccggccaccgtagcccatcccttgatggcctctgtgtccccaggagggcgggccggggggttgcccaggggctggagcagtggactgtggctccatagaggtaggccggagggtgtgagggcagattcaagctatccccagggctctgctctggtcggagccagccccttctccctctctgccttccccgccccattcctgatgctgaactgttctggacccctggccctgagtctctcaggaccaaagtgggcacgggaacagctgtagtgtgtgcccccccgggctttggccacaggtctccctctcgaggtgtggttgtgactgcgacccttcccttgccgtgatgccttcctcccccggggcttggtccagctccttcactctctagcagctgctggggcccacctcccatgccgaggaccagcaggggaaacctccagggagcatctgcaggctctgcttctgcccggctgctggcttgctctccctggtggctctccagcggccagcttcctcacccacccggcactctgctttgctctgtctcctgaggtgggcctgaccaacctccccttctctgcctcagtccctgggctccagggctcagctccacagccctctgcctagcaggctggttctccctgccaagcccatacctgtggtcacctggccctcctgtggtctgagtaccactcccctgccccaggagccactcccactccagctgcctgtttccagcaggttcccagtgcccccgacaagcccctgctggtgtctccatctcctgccaagcatcctccagtgcctcctcctgtgggcctggcctcagggctatggacagactcctgtcccatcccagagacccctcgtgatcgtgccctggcacgtgggccgtggcccggctgggtcggctgaagaactgcggatggaagctgcggaagaggccctgatggggcccaccatcccggacccaagtcttcttcctggcgggcctctcgtctccttcctggtttgggggtcctaagcctttgggtcccacagagcacgacttcgctccgtgaacagcaccaacccaagtctgttccatgtctccacacctgccccttccgctccataggcagctggtgggtgagtggagtcaggagagaa

SEQ ID NO: 736360 - DNA, 8015 bp, Homo sapiens
gattcgtttacccaagagggaacagttttgagaccccccggattcactgcggagtggccgcagaggccggggtcggcctttgcgccgtggcttcgggtgttgtggaggcgcacagagggtctctcctcagggatgacatcatccgtccacctccttgtcttcaaggaccacctcctctccatgctgagctgctgccaaggggcctgctgcccatctacacctcacgagggcactaggagcacggtttcctggatcccaccaacatacaaagcagccactcactgacccccaggaccaggatggcaaaggatgaagaggaccggaactgaccagccagctgtccctcttacctaaagacttaaaccaatgccctagtgagggggcattgggcattaagccctgacctttgctatgctcatactttgactctatgagtactttcctataagtctttgcttgtgttcacctgctagcaaactggagtgtttccctccccaagggggtgtcagtctttgtcgactgactctgtcatcacccttatgatgtcctgaatggaaggatccctttgggaaattctcaggagggggacctgggccaagggcttggccagcatcctgctggcaactccaaggccctgggtgggcttctggaatgagcatgctactgaatcaccaaaggcacgccccacctctctgaagatcttcctatccttttctgggggaatggggtcgatgagagcaacctcctagggttgttgtgagaattaaatgagataaaagaggcctcaggcaggatctggcatagaggaggtgatcagcaaatgtttgttgaaaaggtttgacaggtcagtcccttcccacccctcttgcttgtcttacttgtcttatttattctccaacagcactccaggcagcccttgtccacgggctctccttgcatcaggtaggggctttgcagagaccatcgacgggctgacttgagtaagaacacgaattatgcatgtggccatttccagagcactttctatgtgatatgaacatgtgatttttatgtaatatgtgtatgtaaacgaggcagcctcatttccaggtgaggatgcatttggtagtgttgatttttgtaatttaaagaagctgaaagggagagaggacccgtgaggactgaactctctgtcccatggggtagggcttacatttacattaaagaaacagaaacttgctgggaggtgtaagtatttggtcacattgctggcaacagaaggggttggagttggacccagggtgccacgctagctgccctcaccccttcttcccctctggcccagagttatactaagagtccttttatttcaaaccaaatgtttgacaatgggacagtctgtttgaaatcccagctgcctggggtggtcttgggggtctgggtggccccagtgctggtaccatgtgctggcttcaccttttaataacagtgtgaccttaaacaagtcgcttaactactctaagtttcagtttctttcatggtctaaatggagattaaaacacacacacacacacacacacacacacacacacacacacaccctcgtgtatctaccccacagggcgcttttgaagaccaaatgctgtaactactatgaaagtgctttgtaaattgctgtggaaagtgtgagctactcaagcacccgaggctgtccctccttgctcacatgtccagcccaattctcccttagtgagaacagcactcagtaggtgctgtgtgtgtttgtgttcaattaagaaattccagaataaataaaaatgaattaattcaacaaacattttctggggcaccgacaatctgcccagtgcaccaggctaggtatctgatacaaagataatgaaaacagtctcttggaacctaattggggtcctcatttgaccaggaatttctttcgtcccgttttaagccaaccagttttgtccggacaagacaaaaacaacttgggctgctttagagaagcccagctcagtgtagacaatagctgcccagcctctgaaaggggctgattggattatgtggcaaatggaggtgcaaggatgacttggacggtgacaaatgaagtgggcggagacctgctttgagttaatccaggctattaggaggggaccttttgtcttccagagactggcaggagcttttaccagtggtttttacatccttaatgttcaggacgaataatttatggtcagtgaaaatccaggccccagtgagattcgagtgggctgtaaaatcgagagtcctgctcccagtgagtaatggtagtgaatgtttctgtcactttttgcaaccgtccattcatttgatcctcacaactccctgtcctgagccaggaccggccactgccactcccagggaaacagaggctgtcaagaggctccacagattgggccccactggatcattgaacccctgttccctgagttctagaggaagaattgtacctgtctcagtcccggccacctccagaaggcctccctctgcatttctgactttgctgtgccggcagcctggagcctcccaggtccctgctgtcatcttttctagccactacagtctctgtctttcctttcacagcccaagcttcttgaaaggcctgtctacacttgctgtcttccttcctcacctccaatttcctcttcaacccactgcttcctgactcgctctactccgtggaagcacgctcacaaaggtaaagacttttctgtggcttaatccttgtcatgttttcggctcatggacacaaggacacattttcatgccttctctcacagggctctgcgtctccggttcacttctgtgtctttacactcccttcacagagacacttgctcccccttctctcgttcttagcatcccctaggaacttgcacacccaggtctctcgacttctggacctgcttcttaccatgccgtcttaagcagtcaggagtcgctgcctgggttcgagtcctagttaaattacttagtgctgagaccttggggtaggtaaacttttccaagccaggtttatctcagtttcaaaatagggttaatcgtctttatctggcaggtcaggtgggatgtctcacaggtaagcaccagatgccatttgaaaggcttgaagcaaagtcaataaagcattcatgggaaaatacaactggaggcaccactagattttcgtatacattaggttcccacggggaggaccgaagagagaagaaagaagtggaaagggaggagcgtgcaggagagacaggagaagagaataactaaacaaagacattaaagacaaaaaaaaagtaggaaagggagacttagaaaatattaaaagccaccaaaaacacatccaaagacggtttccccttacgttagttgggctaaaagaaagcaaatgggaagaaggttttaaattgattatcccagtgacaaatcccaggaagctttcacatcaaatcaccctattctgggtttttaactccttccatcgagtttaacctctttacctcccacatcctggtaaaccctgccccctccctaccgccccctttgctggtgattaaatcctgaaggtacacgaagtatttcagtgaatgaatggctaacagaaaagggcctcccctcccccttaccctgggcggtgtttttcagttttattccactttccgcccttttcccttaatgaacacagggctaatctcgggccttgtcgaaggaagaggctgcagacgttaatgaggttagctgctggattccagtattcgtcgcataaggatccttctttgtctgcgaaggaaaaacacactgattatcataatgagatgaggtgaactggccaccgccgggccggggcgatgtggcttcttaagccacacttctaattttggtgatggagccgacatttctttggctcctcatttaagtctttgcctctgtcccagtgcgaagtccattcagcggggttgaaagttgcaggcagctttgggaaggggggcgtcggacagggttgcattgtagaaagtggctttgttcgatccttcgcacagatgcaaatggccagagcattcattccctttcttcaagagctgaggactgggggggccactggtgatcagttcccaactctagctctcctctgactcatctcaggacccattgaggacatccaaaactcactcaagatcaccaagtggtaggaaagtactaactcctgggcatagccctaggggagtgactacaatgtgaatactcatggaatgcctagccaggtgaagaagtgaatgcatgttggcatcccagagggaccccccttaagagggcatagtttggggttcagatttgactccagcatactgttgaaattgggcacagggggctagtgattagtcaggatcaatcagtggagaggagattaaaactcacatctgggagtccggaatcagaacttgtagttcttttttttgaaatggagtctcgctctgtcgcccaggctggagtgcagtggcgtgatctcggctcactgcaacctctgccttccgggttcaagcaattctcccacctcagcctcctgagtagctgggattacaggcgcccaccaccacagccggctactttttgtatttttaggagagacggggtttcaccatgttggtcaggctggtcttgaactcctgacctcatgatccacctgccttagcctcccaaagtgctgggattacaggcgtgagccaccatgcccagccctatagtagttcttcttttgccccttaatatcctcacccacatgtcctgtaccctgcctgaaccctcctcctctttttgttctgatctttgagctccctagagcccataattctttagagcaggtatgtcccgagtctgaaacatgcccttatttgtcccaagctctggacatttctcaccccaaggcggatcaatcatgattaaatcactccaattaaactttaggctccagtcagaccttcagccaaatggaaaaaaaaactaggggataagggaggtagttggagcaagaaaatgttattagttgaaaccttacgggaccttcctcccttagtgagtctgttggctaaaggttctctggcttcgtgaattagaatcggatactgtttccaagttagcaaaaccaactctaccccagcaccccacgaggaagaatgtggaaggatctcccattggccggttggggcaaaagcctgaggcaatctttcatccccttttgccaaggcgagactttcccagtgacggtgatgtagttggccactctgactatgggtggactcgggtgtagacctctgaagctgagatcacacgaaaacctggcctccccgccatgtagctgttggagagtagaaaaatagagcacgcctgatgtttctaaatgagaagactttcaatagtaatgaagaatccatggcactctcctcaccctcaaacacatggcagtcattcacatacaggccccaaagccactgttagtgctgcagtagctcctgtggacattggaaagcccggagagggcgtggaagaaatcagctggcccccggcaggttctctggggttttgtgcccaaggctcctggagccctaaaaactttcaaaagttaactccccacgtccccatcctgcttgggtttctggacttttctgaggcaccggcagaggggtctcgttgctcccttgagtgtaggggcagccctttaacctggctccttgagtccctgctttttctgcttctgttgccttcttcctcgtcttcctctctctcaatatctccctctctttgtccctccccagttcctgacctggccatcccggggtgcccttgaccagccccgtgtctcctcagggtgtcccagcaccagcctggcacagagtggggctcagttagagtatgtgggatgttggtttcgccaggtgagtgaatgaaaggactcgaccaccacagctgagccactagctgggccatgcgaagagttctaggtgcaaaggctggagggtggaattcatttttgagaggtgtgtgagcagcttccgacccctgccccatttgaacgggggccttgctggtcgcgtccctgcattcacccgcgcggccatcccgtcatccaacagttgatcctaactgagcacgcccacggccctggtctggcctgggcaccggccaccgtagcccatcccttgatggcctctgtgtccccaggagggcgggccggggggttgcccaggggctggagcagtggactgtggctccatagaggtaggccggagggtgtgagggcagattcaagctatccccagggctctgctctggtcggagccagccccttctccctctctgccttccccgccccattcctgatgctgaactgttctggacccctggccctgagtctctcaggaccaaagtgggcacgggaacagctgtagtgtgtgcccccccgggctttggccacaggtctccctctcgaggtgtggttgtgactgcgacccttcccttgccgtgatgccttcctcccccggggcttggtccagctccttcactctctagcagctgctggggcccacctcccatgccgaggaccagcaggggaaacctccagggagcatctgcaggctctgcttctgcccggctgctggcttgctctccctggtggctctccagcggccagcttcctcacccacccggcactctgctttgctctgtctcctgaggtgggcctgaccaacctccccttctctgcctcagtccctgggctccagggctcagctccacagccctctgcctagcaggctggttctccctgccaagcccatacctgtggtcacctggccctcctgtggtctgagtaccactcccctgccccaggagccactcccactccagctgcctgtttccagcaggttcccagtgcccccgacaagcccctgctggtgtctccatctcctgccaagcatcctccagtgcctcctcctgtgggcctggcctcagggctatggacagactcctgtcccatcccagagacccctcgtgatcgtgccctggcacgtgggccgtggcccggctgggtcggctgaagaactgcggatggaagctgcggaagaggccctgatggggcccaccatcccggacccaagtcttcagactctggacccggggcctccccttgagtagagacccgccctctgactgatggacgccgctgacctggggtcagacccgtgggctggacccctgcccaccccgcaggaaccctgaggcctaggggagctgttgagccttcagtgtctgcatgtgggaagtgggctccttcacctacctcacagggctgttgtgaggggcgctgtgatgcggttccaaagcacagggcttggcgcaccccactgtgctctcaataaatgtgtttcctgtcttaacaaaaaaaaaaaaaaaaaaaaaaaaaaaaaaaaaaaaaaaaaaaaaaaaaaaaaaaaaaaaaaaaaaaaaaaaaaaaacaaaaaaaaatataacataaaagaaaaaaaaataataaacaaccaaaaatctaaaataaaaccgtggccctttttttaaaaaccatgctaaagggaaaacccttgccgtgccccaatttaaccgtttgggagaaatccccttttcgcggggggttattttcaaagggcccctcgcaaacccttgtcaaacagtccaaaccctgatggcaaaggcaattttacgctttattttttgtaaaatcccttaaattttggccaaaaacctgttttttacccaataggccaaatgcctaaatccctttaaattaaagaaattccccgaataggttggacttctccacatttgaaccaaagtcccttttaaaaaagggcttcaactgcaagggggctcgttttagggctgtgcgcctttggaaccatccccttataaatattgaggtcaggggcacaggattatattgcaccctgggacctcctttttctcct

SEQ ID NO: 736361 - DNA, 8148 bp, Homo sapiens
gattcgtttacccaagagggaacagttttgagaccccccggattcactgcggagtggccgcagaggccggggtcggcctttgcgccgtggcttcgggtgttgtggaggcgcacagagggtctctcctcagggatgacatcatccgtccacctccttgtcttcaaggaccacctcctctccatgctgagctgctgccaaggggcctgctgcccatctacacctcacgagggcactaggagcacggtttcctggatcccaccaacatacaaagcagccactcactgacccccaggaccaggatggcaaaggatgaagaggaccggaactgaccagccagctgtccctcttacctaaagacttaaaccaatgccctagtgagggggcattgggcattaagccctgacctttgctatgctcatactttgactctatgagtactttcctataagtctttgcttgtgttcacctgctagcaaactggagtgtttccctccccaagggggtgtcagtctttgtcgactgactctgtcatcacccttatgatgtcctgaatggaaggatccctttgggaaattctcaggagggggacctgggccaagggcttggccagcatcctgctggcaactccaaggccctgggtgggcttctggaatgagcatgctactgaatcaccaaaggcacgccccacctctctgaagatcttcctatccttttctgggggaatggggtcgatgagagcaacctcctagggttgttgtgagaattaaatgagataaaagaggcctcaggcaggatctggcatagaggaggtgatcagcaaatgtttgttgaaaaggtttgacaggtcagtcccttcccacccctcttgcttgtcttacttgtcttatttattctccaacagcactccaggcagcccttgtccacgggctctccttgcatcaggtaggggctttgcagagaccatcgacgggctgacttgagtaagaacacgaattatgcatgtggccatttccagagcactttctatgtgatatgaacatgtgatttttatgtaatatgtgtatgtaaacgaggcagcctcatttccaggtgaggatgcatttggtagtgttgatttttgtaatttaaagaagctgaaagggagagaggacccgtgaggactgaactctctgtcccatggggtagggcttacatttacattaaagaaacagaaacttgctgggaggtgtaagtatttggtcacattgctggcaacagaaggggttggagttggacccagggtgccacgctagctgccctcaccccttcttcccctctggcccagagttatactaagagtccttttatttcaaaccaaatgtttgacaatgggacagtctgtttgaaatcccagctgcctggggtggtcttgggggtctgggtggccccagtgctggtaccatgtgctggcttcaccttttaataacagtgtgaccttaaacaagtcgcttaactactctaagtttcagtttctttcatggtctaaatggagattaaaacacacacacacacacacacacacacacacacacacacacaccctcgtgtatctaccccacagggcgcttttgaagaccaaatgctgtaactactatgaaagtgctttgtaaattgctgtggaaagtgtgagctactcaagcacccgaggctgtccctccttgctcacatgtccagcccaattctcccttagtgagaacagcactcagtaggtgctgtgtgtgtttgtgttcaattaagaaattccagaataaataaaaatgaattaattcaacaaacattttctggggcaccgacaatctgcccagtgcaccaggctaggtatctgatacaaagataatgaaaacagtctcttggaacctaattggggtcctcatttgaccaggaatttctttcgtcccgttttaagccaaccagttttgtccggacaagacaaaaacaacttgggctgctttagagaagcccagctcagtgtagacaatagctgcccagcctctgaaaggggctgattggattatgtggcaaatggaggtgcaaggatgacttggacggtgacaaatgaagtgggcggagacctgctttgagttaatccaggctattaggaggggaccttttgtcttccagagactggcaggagcttttaccagtggtttttacatccttaatgttcaggacgaataatttatggtcagtgaaaatccaggccccagtgagattcgagtgggctgtaaaatcgagagtcctgctcccagtgagtaatggtagtgaatgtttctgtcactttttgcaaccgtccattcatttgatcctcacaactccctgtcctgagccaggaccggccactgccactcccagggaaacagaggctgtcaagaggctccacagattgggccccactggatcattgaacccctgttccctgagttctagaggaagaattgtacctgtctcagtcccggccacctccagaaggcctccctctgcatttctgactttgctgtgccggcagcctggagcctcccaggtccctgctgtcatcttttctagccactacagtctctgtctttcctttcacagcccaagcttcttgaaaggcctgtctacacttgctgtcttccttcctcacctccaatttcctcttcaacccactgcttcctgactcgctctactccgtggaagcacgctcacaaaggtaaagacttttctgtggcttaatccttgtcatgttttcggctcatggacacaaggacacattttcatgccttctctcacagggctctgcgtctccggttcacttctgtgtctttacactcccttcacagagacacttgctcccccttctctcgttcttagcatcccctaggaacttgcacacccaggtctctcgacttctggacctgcttcttaccatgccgtcttaagcagtcaggagtcgctgcctgggttcgagtcctagttaaattacttagtgctgagaccttggggtaggtaaacttttccaagccaggtttatctcagtttcaaaatagggttaatcgtctttatctggcaggtcaggtgggatgtctcacaggtaagcaccagatgccatttgaaaggcttgaagcaaagtcaataaagcattcatgggaaaatacaactggaggcaccactagattttcgtatacattaggttcccacggggaggaccgaagagagaagaaagaagtggaaagggaggagcgtgcaggagagacaggagaagagaataactaaacaaagacattaaagacaaaaaaaaagtaggaaagggagacttagaaaatattaaaagccaccaaaaacacatccaaagacggtttccccttacgttagttgggctaaaagaaagcaaatgggaagaaggttttaaattgattatcccagtgacaaatcccaggaagctttcacatcaaatcaccctattctgggtttttaactccttccatcgagtttaacctctttacctcccacatcctggtaaaccctgccccctccctaccgccccctttgctggtgattaaatcctgaaggtacacgaagtatttcagtgaatgaatggctaacagaaaagggcctcccctcccccttaccctgggcggtgtttttcagttttattccactttccgcccttttcccttaatgaacacagggctaatctcgggccttgtcgaaggaagaggctgcagacgttaatgaggttagctgctggattccagtattcgtcgcataaggatccttctttgtctgcgaaggaaaaacacactgattatcataatgagatgaggtgaactggccaccgccgggccggggcgatgtggcttcttaagccacacttctaattttggtgatggagccgacatttctttggctcctcatttaagtctttgcctctgtcccagtgcgaagtccattcagcggggttgaaagttgcaggcagctttgggaaggggggcgtcggacagggttgcattgtagaaagtggctttgttcgatccttcgcacagatgcaaatggccagagcattcattccctttcttcaagagctgaggactgggggggccactggtgatcagttcccaactctagctctcctctgactcatctcaggacccattgaggacatccaaaactcactcaagatcaccaagtggtaggaaagtactaactcctgggcatagccctaggggagtgactacaatgtgaatactcatggaatgcctagccaggtgaagaagtgaatgcatgttggcatcccagagggaccccccttaagagggcatagtttggggttcagatttgactccagcatactgttgaaattgggcacagggggctagtgattagtcaggatcaatcagtggagaggagattaaaactcacatctgggagtccggaatcagaacttgtagttcttttttttgaaatggagtctcgctctgtcgcccaggctggagtgcagtggcgtgatctcggctcactgcaacctctgccttccgggttcaagcaattctcccacctcagcctcctgagtagctgggattacaggcgcccaccaccacagccggctactttttgtatttttaggagagacggggtttcaccatgttggtcaggctggtcttgaactcctgacctcatgatccacctgccttagcctcccaaagtgctgggattacaggcgtgagccaccatgcccagccctatagtagttcttcttttgccccttaatatcctcacccacatgtcctgtaccctgcctgaaccctcctcctctttttgttctgatctttgagctccctagagcccataattctttagagcaggtatgtcccgagtctgaaacatgcccttatttgtcccaagctctggacatttctcaccccaaggcggatcaatcatgattaaatcactccaattaaactttaggctccagtcagaccttcagccaaatggaaaaaaaaactaggggataagggaggtagttggagcaagaaaatgttattagttgaaaccttacgggaccttcctcccttagtgagtctgttggctaaaggttctctggcttcgtgaattagaatcggatactgtttccaagttagcaaaaccaactctaccccagcaccccacgaggaagaatgtggaaggatctcccattggccggttggggcaaaagcctgaggcaatctttcatccccttttgccaaggcgagactttcccagtgacggtgatgtagttggccactctgactatgggtggactcgggtgtagacctctgaagctgagatcacacgaaaacctggcctccccgccatgtagctgttggagagtagaaaaatagagcacgcctgatgtttctaaatgagaagactttcaatagtaatgaagaatccatggcactctcctcaccctcaaacacatggcagtcattcacatacaggccccaaagccactgttagtgctgcagtagctcctgtggacattggaaagcccggagagggcgtggaagaaatcagctggcccccggcaggttctctggggttttgtgcccaaggctcctggagccctaaaaactttcaaaagttaactccccacgtccccatcctgcttgggtttctggacttttctgaggcaccggcagaggggtctcgttgctcccttgagtgtaggggcagccctttaacctggctccttgagtccctgctttttctgcttctgttgccttcttcctcgtcttcctctctctcaatatctccctctctttgtccctccccagttcctgacctggccatcccggggtgcccttgaccagccccgtgtctcctcagggtgtcccagcaccagcctggcacagagtggggctcagttagagtatgtgggatgttggtttcgccaggtgagtgaatgaaaggactcgaccaccacagctgagccactagctgggccatgcgaagagttctaggtgcaaaggctggagggtggaattcatttttgagaggtgtgtgagcagcttccgacccctgccccatttgaacgggggccttgctggtcgcgtccctgcattcacccgcgcggccatcccgtcatccaacagttgatcctaactgagcacgcccacggccctggtctggcctgggcaccggccaccgtagcccatcccttgatggcctctgtgtccccaggagggcgggccggggggttgcccaggggctggagcagtggactgtggctccatagaggtaggccggagggtgtgagggcagattcaagctatccccagggctctgctctggtcggagccagccccttctccctctctgccttccccgccccattcctgatgctgaactgttctggacccctggccctgagtctctcaggaccaaagtgggcacgggaacagctgtagtgtgtgcccccccgggctttggccacaggtctccctctcgaggtgtggttgtgactgcgacccttcccttgccgtgatgccttcctcccccggggcttggtccagctccttcactctctagcagctgctggggcccacctcccatgccgaggaccagcaggggaaacctccagggagcatctgcaggctctgcttctgcccggctgctggcttgctctccctggtggctctccagcggccagcttcctcacccacccggcactctgctttgctctgtctcctgaggtgggcctgaccaacctccccttctctgcctcagtccctgggctccagggctcagctccacagccctctgcctagcaggctggttctccctgccaagcccatacctgtggtcacctggccctcctgtggtctgagtaccactcccctgccccaggagccactcccactccagctgcctgtttccagcaggttcccagtgcccccgacaagcccctgctggtgtctccatctcctgccaagcatcctccagtgcctcctcctgtgggcctggcctcagggctatggacagactcctgtcccatcccagagacccctcgtgatcgtgccctggcacgtgggccgtggcccggctgggtcggctgaagaactgcggatggaagctgcggaagaggccctgatggggcccaccatcccggacccaagtcttccggaagcccatcacctggatgcctacgtgggaagggacctcgaatgtgggaccccagcccctctccagctcgaaatccctccacagccacggggacaccctgcacctattcccacgggacaggctggacccagagactctggacccggggcctccccttgagtagagacccgccctctgactgatggacgccgctgacctggggtcagacccgtgggctggacccctgcccaccccgcaggaaccctgaggcctaggggagctgttgagccttcagtgtctgcatgtgggaagtgggctccttcacctacctcacagggctgttgtgaggggcgctgtgatgcggttccaaagcacagggcttggcgcaccccactgtgctctcaataaatgtgtttcctgtcttaacaaaaaaaaaaaaaaaaaaaaaaaaaaaaaaaaaaaaaaaaaaaaaaaaaaaaaaaaaaaaaaaaaaaaaaaaaaaaacaaaaaaaaatataacataaaagaaaaaaaaataataaacaaccaaaaatctaaaataaaaccgtggccctttttttaaaaaccatgctaaagggaaaacccttgccgtgccccaatttaaccgtttgggagaaatccccttttcgcggggggttattttcaaagggcccctcgcaaacccttgtcaaacagtccaaaccctgatggcaaaggcaattttacgctttattttttgtaaaatcccttaaattttggccaaaaacctgttttttacccaataggccaaatgcctaaatccctttaaattaaagaaattccccgaataggttggacttctccacatttgaaccaaagtcccttttaaaaaagggcttcaactgcaagggggctcgttttagggctgtgcgcctttggaaccatccccttataaatattgaggtcaggggcacaggattatattgcaccctgggacctcctttttctcct

SEQ ID NO: 736362 - DNA, 7887 bp, Homo sapiens
gattcgtttacccaagagggaacagttttgagaccccccggattcactgcggagtggccgcagaggccggggtcggcctttgcgccgtggcttcgggtgttgtggaggcgcacagagggtctctcctcagggatgacatcatccgtccacctccttgtcttcaaggaccacctcctctccatgctgagctgctgccaaggggcctgctgcccatctacacctcacgagggcactaggagcacggtttcctggatcccaccaacatacaaagcagccactcactgacccccaggaccaggatggcaaaggatgaagaggaccggaactgaccagccagctgtccctcttacctaaagacttaaaccaatgccctagtgagggggcattgggcattaagccctgacctttgctatgctcatactttgactctatgagtactttcctataagtctttgcttgtgttcacctgctagcaaactggagtgtttccctccccaagggggtgtcagtctttgtcgactgactctgtcatcacccttatgatgtcctgaatggaaggatccctttgggaaattctcaggagggggacctgggccaagggcttggccagcatcctgctggcaactccaaggccctgggtgggcttctggaatgagcatgctactgaatcaccaaaggcacgccccacctctctgaagatcttcctatccttttctgggggaatggggtcgatgagagcaacctcctagggttgttgtgagaattaaatgagataaaagaggcctcaggcaggatctggcatagaggaggtgatcagcaaatgtttgttgaaaaggtttgacaggtcagtcccttcccacccctcttgcttgtcttacttgtcttatttattctccaacagcactccaggcagcccttgtccacgggctctccttgcatcaggtaggggctttgcagagaccatcgacgggctgacttgagtaagaacacgaattatgcatgtggccatttccagagcactttctatgtgatatgaacatgtgatttttatgtaatatgtgtatgtaaacgaggcagcctcatttccaggtgaggatgcatttggtagtgttgatttttgtaatttaaagaagctgaaagggagagaggacccgtgaggactgaactctctgtcccatggggtagggcttacatttacattaaagaaacagaaacttgctgggaggtgtaagtatttggtcacattgctggcaacagaaggggttggagttggacccagggtgccacgctagctgccctcaccccttcttcccctctggcccagagttatactaagagtccttttatttcaaaccaaatgtttgacaatgggacagtctgtttgaaatcccagctgcctggggtggtcttgggggtctgggtggccccagtgctggtaccatgtgctggcttcaccttttaataacagtgtgaccttaaacaagtcgcttaactactctaagtttcagtttctttcatggtctaaatggagattaaaacacacacacacacacacacacacacacacacacacacacaccctcgtgtatctaccccacagggcgcttttgaagaccaaatgctgtaactactatgaaagtgctttgtaaattgctgtggaaagtgtgagctactcaagcacccgaggctgtccctccttgctcacatgtccagcccaattctcccttagtgagaacagcactcagtaggtgctgtgtgtgtttgtgttcaattaagaaattccagaataaataaaaatgaattaattcaacaaacattttctggggcaccgacaatctgcccagtgcaccaggctaggtatctgatacaaagataatgaaaacagtctcttggaacctaattggggtcctcatttgaccaggaatttctttcgtcccgttttaagccaaccagttttgtccggacaagacaaaaacaacttgggctgctttagagaagcccagctcagtgtagacaatagctgcccagcctctgaaaggggctgattggattatgtggcaaatggaggtgcaaggatgacttggacggtgacaaatgaagtgggcggagacctgctttgagttaatccaggctattaggaggggaccttttgtcttccagagactggcaggagcttttaccagtggtttttacatccttaatgttcaggacgaataatttatggtcagtgaaaatccaggccccagtgagattcgagtgggctgtaaaatcgagagtcctgctcccagtgagtaatggtagtgaatgtttctgtcactttttgcaaccgtccattcatttgatcctcacaactccctgtcctgagccaggaccggccactgccactcccagggaaacagaggctgtcaagaggctccacagattgggccccactggatcattgaacccctgttccctgagttctagaggaagaattgtacctgtctcagtcccggccacctccagaaggcctccctctgcatttctgactttgctgtgccggcagcctggagcctcccaggtccctgctgtcatcttttctagccactacagtctctgtctttcctttcacagcccaagcttcttgaaaggcctgtctacacttgctgtcttccttcctcacctccaatttcctcttcaacccactgcttcctgactcgctctactccgtggaagcacgctcacaaaggtaaagacttttctgtggcttaatccttgtcatgttttcggctcatggacacaaggacacattttcatgccttctctcacagggctctgcgtctccggttcacttctgtgtctttacactcccttcacagagacacttgctcccccttctctcgttcttagcatcccctaggaacttgcacacccaggtctctcgacttctggacctgcttcttaccatgccgtcttaagcagtcaggagtcgctgcctgggttcgagtcctagttaaattacttagtgctgagaccttggggtaggtaaacttttccaagccaggtttatctcagtttcaaaatagggttaatcgtctttatctggcaggtcaggtgggatgtctcacaggtaagcaccagatgccatttgaaaggcttgaagcaaagtcaataaagcattcatgggaaaatacaactggaggcaccactagattttcgtatacattaggttcccacggggaggaccgaagagagaagaaagaagtggaaagggaggagcgtgcaggagagacaggagaagagaataactaaacaaagacattaaagacaaaaaaaaagtaggaaagggagacttagaaaatattaaaagccaccaaaaacacatccaaagacggtttccccttacgttagttgggctaaaagaaagcaaatgggaagaaggttttaaattgattatcccagtgacaaatcccaggaagctttcacatcaaatcaccctattctgggtttttaactccttccatcgagtttaacctctttacctcccacatcctggtaaaccctgccccctccctaccgccccctttgctggtgattaaatcctgaaggtacacgaagtatttcagtgaatgaatggctaacagaaaagggcctcccctcccccttaccctgggcggtgtttttcagttttattccactttccgcccttttcccttaatgaacacagggctaatctcgggccttgtcgaaggaagaggctgcagacgttaatgaggttagctgctggattccagtattcgtcgcataaggatccttctttgtctgcgaaggaaaaacacactgattatcataatgagatgaggtgaactggccaccgccgggccggggcgatgtggcttcttaagccacacttctaattttggtgatggagccgacatttctttggctcctcatttaagtctttgcctctgtcccagtgcgaagtccattcagcggggttgaaagttgcaggcagctttgggaaggggggcgtcggacagggttgcattgtagaaagtggctttgttcgatccttcgcacagatgcaaatggccagagcattcattccctttcttcaagagctgaggactgggggggccactggtgatcagttcccaactctagctctcctctgactcatctcaggacccattgaggacatccaaaactcactcaagatcaccaagtggtaggaaagtactaactcctgggcatagccctaggggagtgactacaatgtgaatactcatggaatgcctagccaggtgaagaagtgaatgcatgttggcatcccagagggaccccccttaagagggcatagtttggggttcagatttgactccagcatactgttgaaattgggcacagggggctagtgattagtcaggatcaatcagtggagaggagattaaaactcacatctgggagtccggaatcagaacttgtagttcttttttttgaaatggagtctcgctctgtcgcccaggctggagtgcagtggcgtgatctcggctcactgcaacctctgccttccgggttcaagcaattctcccacctcagcctcctgagtagctgggattacaggcgcccaccaccacagccggctactttttgtatttttaggagagacggggtttcaccatgttggtcaggctggtcttgaactcctgacctcatgatccacctgccttagcctcccaaagtgctgggattacaggcgtgagccaccatgcccagccctatagtagttcttcttttgccccttaatatcctcacccacatgtcctgtaccctgcctgaaccctcctcctctttttgttctgatctttgagctccctagagcccataattctttagagcaggtatgtcccgagtctgaaacatgcccttatttgtcccaagctctggacatttctcaccccaaggcggatcaatcatgattaaatcactccaattaaactttaggctccagtcagaccttcagccaaatggaaaaaaaaactaggggataagggaggtagttggagcaagaaaatgttattagttgaaaccttacgggaccttcctcccttagtgagtctgttggctaaaggttctctggcttcgtgaattagaatcggatactgtttccaagttagcaaaaccaactctaccccagcaccccacgaggaagaatgtggaaggatctcccattggccggttggggcaaaagcctgaggcaatctttcatccccttttgccaaggcgagactttcccagtgacggtgatgtagttggccactctgactatgggtggactcgggtgtagacctctgaagctgagatcacacgaaaacctggcctccccgccatgtagctgttggagagtagaaaaatagagcacgcctgatgtttctaaatgagaagactttcaatagtaatgaagaatccatggcactctcctcaccctcaaacacatggcagtcattcacatacaggccccaaagccactgttagtgctgcagtagctcctgtggacattggaaagcccggagagggcgtggaagaaatcagctggcccccggcaggttctctggggttttgtgcccaaggctcctggagccctaaaaactttcaaaagttaactccccacgtccccatcctgcttgggtttctggacttttctgaggcaccggcagaggggtctcgttgctcccttgagtgtaggggcagccctttaacctggctccttgagtccctgctttttctgcttctgttgccttcttcctcgtcttcctctctctcaatatctccctctctttgtccctccccagttcctgacctggccatcccggggtgcccttgaccagccccgtgtctcctcagggtgtcccagcaccagcctggcacagagtggggctcagttagagtatgtgggatgttggtttcgccaggtgagtgaatgaaaggactcgaccaccacagctgagccactagctgggccatgcgaagagttctaggtgcaaaggctggagggtggaattcatttttgagaggtgtgtgagcagcttccgacccctgccccatttgaacgggggccttgctggtcgcgtccctgcattcacccgcgcggccatcccgtcatccaacagttgatcctaactgagcacgcccacggccctggtctggcctgggcaccggccaccgtagcccatcccttgatggcctctgtgtccccaggagggcgggccggggggttgcccaggggctggagcagtggactgtggctccatagaggtaggccggagggtgtgagggcagattcaagctatccccagggctctgctctggtcggagccagccccttctccctctctgccttccccgccccattcctgatgctgaactgttctggacccctggccctgagtctctcaggaccaaagtgggcacgggaacagctgtagtgtgtgcccccccgggctttggccacaggtctccctctcgaggtgtggttgtgactgcgacccttcccttgccgtgatgccttcctcccccggggcttggtccagctccttcactctctagcagctgctggggcccacctcccatgccgaggaccagcaggggaaacctccagggagcatctgcaggctctgcttctgcccggctgctggcttgctctccctggtggctctccagcggccagcttcctcacccacccggcactctgctttgctctgtctcctgaggtgggcctgaccaacctccccttctctgcctcagtccctgggctccagggctcagctccacagccctctgcctagcaggctggttctccctgccaagcccatacctgtggtcacctggccctcctgtggtctgagtaccactcccctgccccaggagccactcccactccagctgcctgtttccagcaggttcccagtgcccccgacaagcccctgctggtgtctccatctcctgccaagcatcctccagtgcctcctcctgtgggcctggcctcagggctatggacagactcctgtcccatcccagagacccctcgtgatcgtgccctggcacgtgggccgtggcccggctgggtcggctggacctggggtcagacccgtgggctggacccctgcccaccccgcaggaaccctgaggcctaggggagctgttgagccttcagtgtctgcatgtgggaagtgggctccttcacctacctcacagggctgttgtgaggggcgctgtgatgcggttccaaagcacagggcttggcgcaccccactgtgctctcaataaatgtgtttcctgtcttaacaaaaaaaaaaaaaaaaaaaaaaaaaaaaaaaaaaaaaaaaaaaaaaaaaaaaaaaaaaaaaaaaaaaaaaaaaaaaacaaaaaaaaatataacataaaagaaaaaaaaataataaacaaccaaaaatctaaaataaaaccgtggccctttttttaaaaaccatgctaaagggaaaacccttgccgtgccccaatttaaccgtttgggagaaatccccttttcgcggggggttattttcaaagggcccctcgcaaacccttgtcaaacagtccaaaccctgatggcaaaggcaattttacgctttattttttgtaaaatcccttaaattttggccaaaaacctgttttttacccaataggccaaatgcctaaatccctttaaattaaagaaattccccgaataggttggacttctccacatttgaaccaaagtcccttttaaaaaagggcttcaactgcaagggggctcgttttagggctgtgcgcctttggaaccatccccttataaatattgaggtcaggggcacaggattatattgcaccctgggacctcctttttctcct

SEQ ID NO: 736363 - DNA, 8308 bp, Homo sapiens
gattcgtttacccaagagggaacagttttgagaccccccggattcactgcggagtggccgcagaggccggggtcggcctttgcgccgtggcttcgggtgttgtggaggcgcacagagggtctctcctcagggatgacatcatccgtccacctccttgtcttcaaggaccacctcctctccatgctgagctgctgccaaggggcctgctgcccatctacacctcacgagggcactaggagcacggtttcctggatcccaccaacatacaaagcagccactcactgacccccaggaccaggatggcaaaggatgaagaggaccggaactgaccagccagctgtccctcttacctaaagacttaaaccaatgccctagtgagggggcattgggcattaagccctgacctttgctatgctcatactttgactctatgagtactttcctataagtctttgcttgtgttcacctgctagcaaactggagtgtttccctccccaagggggtgtcagtctttgtcgactgactctgtcatcacccttatgatgtcctgaatggaaggatccctttgggaaattctcaggagggggacctgggccaagggcttggccagcatcctgctggcaactccaaggccctgggtgggcttctggaatgagcatgctactgaatcaccaaaggcacgccccacctctctgaagatcttcctatccttttctgggggaatggggtcgatgagagcaacctcctagggttgttgtgagaattaaatgagataaaagaggcctcaggcaggatctggcatagaggaggtgatcagcaaatgtttgttgaaaaggtttgacaggtcagtcccttcccacccctcttgcttgtcttacttgtcttatttattctccaacagcactccaggcagcccttgtccacgggctctccttgcatcaggtaggggctttgcagagaccatcgacgggctgacttgagtaagaacacgaattatgcatgtggccatttccagagcactttctatgtgatatgaacatgtgatttttatgtaatatgtgtatgtaaacgaggcagcctcatttccaggtgaggatgcatttggtagtgttgatttttgtaatttaaagaagctgaaagggagagaggacccgtgaggactgaactctctgtcccatggggtagggcttacatttacattaaagaaacagaaacttgctgggaggtgtaagtatttggtcacattgctggcaacagaaggggttggagttggacccagggtgccacgctagctgccctcaccccttcttcccctctggcccagagttatactaagagtccttttatttcaaaccaaatgtttgacaatgggacagtctgtttgaaatcccagctgcctggggtggtcttgggggtctgggtggccccagtgctggtaccatgtgctggcttcaccttttaataacagtgtgaccttaaacaagtcgcttaactactctaagtttcagtttctttcatggtctaaatggagattaaaacacacacacacacacacacacacacacacacacacacacaccctcgtgtatctaccccacagggcgcttttgaagaccaaatgctgtaactactatgaaagtgctttgtaaattgctgtggaaagtgtgagctactcaagcacccgaggctgtccctccttgctcacatgtccagcccaattctcccttagtgagaacagcactcagtaggtgctgtgtgtgtttgtgttcaattaagaaattccagaataaataaaaatgaattaattcaacaaacattttctggggcaccgacaatctgcccagtgcaccaggctaggtatctgatacaaagataatgaaaacagtctcttggaacctaattggggtcctcatttgaccaggaatttctttcgtcccgttttaagccaaccagttttgtccggacaagacaaaaacaacttgggctgctttagagaagcccagctcagtgtagacaatagctgcccagcctctgaaaggggctgattggattatgtggcaaatggaggtgcaaggatgacttggacggtgacaaatgaagtgggcggagacctgctttgagttaatccaggctattaggaggggaccttttgtcttccagagactggcaggagcttttaccagtggtttttacatccttaatgttcaggacgaataatttatggtcagtgaaaatccaggccccagtgagattcgagtgggctgtaaaatcgagagtcctgctcccagtgagtaatggtagtgaatgtttctgtcactttttgcaaccgtccattcatttgatcctcacaactccctgtcctgagccaggaccggccactgccactcccagggaaacagaggctgtcaagaggctccacagattgggccccactggatcattgaacccctgttccctgagttctagaggaagaattgtacctgtctcagtcccggccacctccagaaggcctccctctgcatttctgactttgctgtgccggcagcctggagcctcccaggtccctgctgtcatcttttctagccactacagtctctgtctttcctttcacagcccaagcttcttgaaaggcctgtctacacttgctgtcttccttcctcacctccaatttcctcttcaacccactgcttcctgactcgctctactccgtggaagcacgctcacaaaggtaaagacttttctgtggcttaatccttgtcatgttttcggctcatggacacaaggacacattttcatgccttctctcacagggctctgcgtctccggttcacttctgtgtctttacactcccttcacagagacacttgctcccccttctctcgttcttagcatcccctaggaacttgcacacccaggtctctcgacttctggacctgcttcttaccatgccgtcttaagcagtcaggagtcgctgcctgggttcgagtcctagttaaattacttagtgctgagaccttggggtaggtaaacttttccaagccaggtttatctcagtttcaaaatagggttaatcgtctttatctggcaggtcaggtgggatgtctcacaggtaagcaccagatgccatttgaaaggcttgaagcaaagtcaataaagcattcatgggaaaatacaactggaggcaccactagattttcgtatacattaggttcccacggggaggaccgaagagagaagaaagaagtggaaagggaggagcgtgcaggagagacaggagaagagaataactaaacaaagacattaaagacaaaaaaaaagtaggaaagggagacttagaaaatattaaaagccaccaaaaacacatccaaagacggtttccccttacgttagttgggctaaaagaaagcaaatgggaagaaggttttaaattgattatcccagtgacaaatcccaggaagctttcacatcaaatcaccctattctgggtttttaactccttccatcgagtttaacctctttacctcccacatcctggtaaaccctgccccctccctaccgccccctttgctggtgattaaatcctgaaggtacacgaagtatttcagtgaatgaatggctaacagaaaagggcctcccctcccccttaccctgggcggtgtttttcagttttattccactttccgcccttttcccttaatgaacacagggctaatctcgggccttgtcgaaggaagaggctgcagacgttaatgaggttagctgctggattccagtattcgtcgcataaggatccttctttgtctgcgaaggaaaaacacactgattatcataatgagatgaggtgaactggccaccgccgggccggggcgatgtggcttcttaagccacacttctaattttggtgatggagccgacatttctttggctcctcatttaagtctttgcctctgtcccagtgcgaagtccattcagcggggttgaaagttgcaggcagctttgggaaggggggcgtcggacagggttgcattgtagaaagtggctttgttcgatccttcgcacagatgcaaatggccagagcattcattccctttcttcaagagctgaggactgggggggccactggtgatcagttcccaactctagctctcctctgactcatctcaggacccattgaggacatccaaaactcactcaagatcaccaagtggtaggaaagtactaactcctgggcatagccctaggggagtgactacaatgtgaatactcatggaatgcctagccaggtgaagaagtgaatgcatgttggcatcccagagggaccccccttaagagggcatagtttggggttcagatttgactccagcatactgttgaaattgggcacagggggctagtgattagtcaggatcaatcagtggagaggagattaaaactcacatctgggagtccggaatcagaacttgtagttcttttttttgaaatggagtctcgctctgtcgcccaggctggagtgcagtggcgtgatctcggctcactgcaacctctgccttccgggttcaagcaattctcccacctcagcctcctgagtagctgggattacaggcgcccaccaccacagccggctactttttgtatttttaggagagacggggtttcaccatgttggtcaggctggtcttgaactcctgacctcatgatccacctgccttagcctcccaaagtgctgggattacaggcgtgagccaccatgcccagccctatagtagttcttcttttgccccttaatatcctcacccacatgtcctgtaccctgcctgaaccctcctcctctttttgttctgatctttgagctccctagagcccataattctttagagcaggtatgtcccgagtctgaaacatgcccttatttgtcccaagctctggacatttctcaccccaaggcggatcaatcatgattaaatcactccaattaaactttaggctccagtcagaccttcagccaaatggaaaaaaaaactaggggataagggaggtagttggagcaagaaaatgttattagttgaaaccttacgggaccttcctcccttagtgagtctgttggctaaaggttctctggcttcgtgaattagaatcggatactgtttccaagttagcaaaaccaactctaccccagcaccccacgaggaagaatgtggaaggatctcccattggccggttggggcaaaagcctgaggcaatctttcatccccttttgccaaggcgagactttcccagtgacggtgatgtagttggccactctgactatgggtggactcgggtgtagacctctgaagctgagatcacacgaaaacctggcctccccgccatgtagctgttggagagtagaaaaatagagcacgcctgatgtttctaaatgagaagactttcaatagtaatgaagaatccatggcactctcctcaccctcaaacacatggcagtcattcacatacaggccccaaagccactgttagtgctgcagtagctcctgtggacattggaaagcccggagagggcgtggaagaaatcagctggcccccggcaggttctctggggttttgtgcccaaggctcctggagccctaaaaactttcaaaagttaactccccacgtccccatcctgcttgggtttctggacttttctgaggcaccggcagaggggtctcgttgctcccttgagtgtaggggcagccctttaacctggctccttgagtccctgctttttctgcttctgttgccttcttcctcgtcttcctctctctcaatatctccctctctttgtccctccccagttcctgacctggccatcccggggtgcccttgaccagccccgtgtctcctcagggtgtcccagcaccagcctggcacagagtggggctcagttagagtatgtgggatgttggtttcgccaggtgagtgaatgaaaggactcgaccaccacagctgagccactagctgggccatgcgaagagttctaggtgcaaaggctggagggtggaattcatttttgagaggtgtgtgagcagcttccgacccctgccccatttgaacgggggccttgctggtcgcgtccctgcattcacccgcgcggccatcccgtcatccaacagttgatcctaactgagcacgcccacggccctggtctggcctgggcaccggccaccgtagcccatcccttgatggcctctgtgtccccaggagggcgggccggggggttgcccaggggctggagcagtggactgtggctccatagaggtaggccggagggtgtgagggcagattcaagctatccccagggctctgctctggtcggagccagccccttctccctctctgccttccccgccccattcctgatgctgaactgttctggacccctggccctgagtctctcaggaccaaagtgggcacgggaacagctgtagtgtgtgcccccccgggctttggccacaggtctccctctcgaggtgtggttgtgactgcgacccttcccttgccgtgatgccttcctcccccggggcttggtccagctccttcactctctagcagctgctggggcccacctcccatgccgaggaccagcaggggaaacctccagggagcatctgcaggctctgcttctgcccggctgctggcttgctctccctggtggctctccagcggccagcttcctcacccacccggcactctgctttgctctgtctcctgaggtgggcctgaccaacctccccttctctgcctcagtccctgggctccagggctcagctccacagccctctgcctagcaggctggttctccctgccaagcccatacctgtggtcacctggccctcctgtggtctgagtaccactcccctgccccaggagccactcccactccagctgcctgtttccagcaggttcccagtgcccccgacaagcccctgctggtgtctccatctcctgccaagcatcctccagtgcctcctcctgtgggcctggcctcagggctatggacagactcctgtcccatcccagagacccctcgtgatcgtgccctgtagtcaccccactccaccgaaaagtaaactgcaggtgaggccgtgcccgagtctttcttcggtgtgtttggcttttccggggcgcttgccttgccatgattctaactctctgcccttccccaaggcacgtgggccgtggcccggctgggtcggctgaagaactgcggatggaagctgcggaagaggccctgatggggcccaccatcccggacccaagtcttcttcctggcgggcctctcgtctccttcctggtttgggcggaagcccatcacctggatgcctacgtgggaagggacctcgaatgtgggaccccagcccctctccagctcgaaatccctccacagccacggggacaccctgcacctattcccacgggacaggctggacccagagactctggacccggggcctccccttgagtagagacccgccctctgactgatggacgccgctgacctggggtcagacccgtgggctggacccctgcccaccccgcaggaaccctgaggcctaggggagctgttgagccttcagtgtctgcatgtgggaagtgggctccttcacctacctcacagggctgttgtgaggggcgctgtgatgcggttccaaagcacagggcttggcgcaccccactgtgctctcaataaatgtgtttcctgtcttaacaaaaaaaaaaaaaaaaaaaaaaaaaaaaaaaaaaaaaaaaaaaaaaaaaaaaaaaaaaaaaaaaaaaaaaaaaaaaacaaaaaaaaatataacataaaagaaaaaaaaataataaacaaccaaaaatctaaaataaaaccgtggccctttttttaaaaaccatgctaaagggaaaacccttgccgtgccccaatttaaccgtttgggagaaatccccttttcgcggggggttattttcaaagggcccctcgcaaacccttgtcaaacagtccaaaccctgatggcaaaggcaattttacgctttattttttgtaaaatcccttaaattttggccaaaaacctgttttttacccaataggccaaatgcctaaatccctttaaattaaagaaattccccgaataggttggacttctccacatttgaaccaaagtcccttttaaaaaagggcttcaactgcaagggggctcgttttagggctgtgcgcctttggaaccatccccttataaatattgaggtcaggggcacaggattatattgcaccctgggacctcctttttctcct

SEQ ID NO: 736364 - DNA, 2037 bp, Homo sapiens; identical to SEQ ID NO: 4922

SEQ ID NO: 736365 - DNA, 2425 bp, Homo sapiens
  misc_feature (1)..(1): n is a, c, g, or t
  misc_feature (849)..(849): n is a, c, g, or t
ngggtgcgagctggagactccgcgggagcgcggccgggaggcttcgccccggagctggcccgacgcctcccgagctggcagggctctcggcggaggtcggagcgtgggcttcctcctcccgccagggaaaacagagaggatgaaggcctatctaaagagcgcagaaggcttttttgtcctaaataaaagtaccacaattggaaggcatgaaaattcagaccttgttttacagtctcctgacatcgacaaccaccatgcactcattgaatataacgaggcggagtgcagctttgttctccaggacttcaattcccgcaacggcacgtttgtcaacgagtgccacattcaaaacgtggctgtgaagctcatccctggagacatcctgagatttgggtctgcagggctgacctatgaactggtcattgaaaatccacctccggtctctttcccatggatgaggggcccagcaccatggccagggccacagccacctcgtgccacacagcagccaaaccaggcccccccaccatcacatatccccttccaccaaggtgtccagccagcaccgatgcaaaggagctggtcccaggcctttcccagacccaccgtggtcctgccggcctcccacaggcggcctgtgagcgccaacaaggagatgttctcgttcgtggtggacgacgcccgcaagccacccgtcatcaagcaaggcctcagggaaactcatgatgtcttttgtgctctctgctgatctcacgccttagtgtggaccaatgccatgaaactgtcagaaaaatcagtggccgaggggattcctggggcagttccccctgcggagatttatgtggaggnggacttggcccagcaggacaagatcagtgccctacagaaaggctacagcaaggtgctgtgccagaccctgtcagagcggaactcagaaatcacatccctgaagaatgagggcgagaacttaaagagagacaacgctatcacatcagggatggtgtcatctttgcaaaaagacatattagcaaaggatgagcaagttcaacaactaaaggaagaggtcagtcacctaaaaagtcagaacaaggacaaggaccaccagctggaagcccttggctctagatgctcggtgctaaaggaagagttaaaacaggaagatgctcacagggagctcagggaagcccaggagaaagagttaaaactctgcaaaacccaaatccaagacatggagaaagaaatgaagaagcttagggcagagctgaggaagagttgtactgaacaaagcgtgatctctaggactctgagagaaaaaagcaagctggagcacttcagaagtcaagtcatcaaggccacctatggacgggcgaagccgttccgggacaagcccgtcaccgaccaacagttaatagagaaaattacccaggtcactgaggacaacatcaattttcagcagaaaaagtggaccctccagaaagagacccagctgagcaactccaagcaggaggagaccaccgagaacatcgagaagctgaggacgtcgctggacagctgccaggcttgcatgaaaatatcctgttgcagccatgacctgaagaaggaggtcgaccttcttcagcacctccaggtgagcccacctgtctcggggctccagaaggtggtgctggacgtcctgaggcacgcgctgtcctggctggaggaggtggagcagctcctccgggacctcgggatcctgccctccagccccaacaaagggttctctttgtatctgatatatcttctggaacattataaaaaacttatgagccaggcccaggaacttcagatcaagttcaacagttctcaggaaactcagcagtctttactgcaggaaaagctgcgggagcatctggcagagaaggagaagctgaacgaggagaggctagagcaagaggagaagctcaaagccaaaatcaggcaactgacggaagagaaggcggctttggaggagtacattactcaagagagaaacagagcgaaagagactttagaggaagaacggaagagaatgcaagaactggagagcctcctggcccagcagaagaaggctttggcgaaaagcattacccagtggaaagtactagagaaacctcgtcccaccaggcctcatgtgatcctctaccagaagctggagcagccaccttggggatcagcagacaccagcagcaggccaaaggatagtggagtggagggacaagaaggcctgggtgagccttctctgagaatcactgagctctgaaccatgaatgaactgcctacctctgtacttcctgttgtataggacaaagaaatccctatctatttaaaccactgtagtcaggtctatgtatttgtgctgtggaacaaaccacccaaactgagtgacttaaaatgacaaatatttatt

SEQ ID NO: 736366 - DNA, 3105 bp, Homo sapiens
ggactgacagcctcaatatttatttcacagtctggtgccaacttagcaattacggaagagcgctcccggccccagacttcccattggataattggcagcaagaggctcttctgagggtttgagacatgtgtgtgcactgaccacaggcatcgttcgggttaggcaggcgtgcctaaaaagtaattaaagcctgctgttctcttttcttctgtgggtcccgccactccccgtgagcggtgaagattctgataacgcggaatggtcattcaggcgtgcaaaccctgctaagtggtgtttcccgcaccctgccatggaaacgctgcccccacttgccggcccctgctgaccccctgacactgttgccccctctctgctgcagctggagcacttcagaagtcaagtcatcaaggccacctatggacgggcgaagccgttccgggacaagcccgtcaccgaccaacaggttagtctgccgtccctgccacgtggctccttcactttcctcttcttcttcttcgtggatctggattccagaccctgggagcatatgtttctgtttttgttggtggcatatttttcacactgttgctacaccataaagatttgttttgattttatgggatttcctggcttttaaagtaaaagccagttaaaactcccttgaaatgtgtctgtgaaaatcaaattaaaccattcgggcttacttctggtctccagacatgcatgtttcgcctccattagcactgggagaaagggagccgcctccccacagccagtgcgttctggcgcgttccttcagaggagaaaagttgacagtggcagtgagggtggatgtctggctgtaatgattgccttgctgttcttccactacactttctagccccctgtgtcaaagcacagatgggaaaatgtgccgtgggctgctctcagtgggtgtgggagaacctgacctgctgcttatgagcccataatatcaggctcagtgttctgaatccctatacaacacagaagaatctggaacaaactcagggccacaagacaggcctttggatcataaaaataatctctgatcggcaaggagtggtggctcatgcctgtaatgccagcactttgagaggccgaggcgggtggatcacctcaggtcgggagttcgaaaccagcctgaccaacatggtaaaaccccatctctattaaaaatacaaaattagccgggcatggtggcgcgtgcctgtaatctcagctacttcagaggctgaggcaggagaatcgcttgaacccaggaggcggaggttgcggtgagccgagatcaaaccattgcactccagcctgggcaacaagagtgaaactccgtcgcaaaaaaaaaaaaaagaaaagaaaaaagaaaagagaatctctgattctgggactcattccctggtgacaggaccaacgtcccccttgacagccatcaccaagacatatcaggacctctgtcctcccgtgcttagacagggacttaagttgcatctctcccctctcccattccccttccctcagggccccccacccctgtatgttacatctttttttttttttcctttttctttttctcaccagttaatagagaaaattacccaggtcactgaggacaacatcaattttcagcagaaaaagtggaccctccagaaagagacccagctgagcaactccaagcaggaggagaccaccgagaacatcgagaagctgaggacgtcgctggacagctgccaggtggcccctccttacgctttccacaaatggtctctttgtctaatttttgtgcggcttatttgggaaattgcccagcttttttggagcaagttgggcagaaatgcttggcttttctatccactttttcctcttgttggagaaacttgttggagaagaaaaaacaaagggcctaaaaaaatgcctcccgggagaacttggcgtgtccaaaaaagatgcctgagcatcttcaattactgactttgagcggcccgcatccccagccaaaaagaaattgttttcatagcccctatgttatttccagagaaaccaaagaaacattcctgctttttatttgcattttcttgttttggcccagccacaaaaggcggtttccacaccgttgcttttgactctggaggagcagggacgggaggacttggccacagccctgcggcccccaccctgggacatggcttatcagagcaggcggtggcttctgctttctctggaaatcagcagctcctgtttggggagtttgtgcaaatgctggcttgtcagcactctttcaaatcaggaaaccacgctttccgaccagcttgtgtgttgatcttggcaggaattctgacgaatggaaaaaagaagtagccacatttgcttctcattgcagccaaactgttgatggtactttggctctggggtttcatagacctaaaagggggttcgctttgaccatcaaaagtccaaattagagtattaaaaaaaaacctgtcaaaacataaaaattttaaaaaagaaaaaaactgagtcctcccaaggcggccaatacgtggcgctgcctgcttcgtggcagagtcaagaacgctgttcctcgaaggtcacgtcaggggctatttctggccacagggcctgggctcctcatgatctcacctctttgcaggcttgcatgaaaatatcctgttgcagccatgacctgaagaaggaggtcgaccttcttcagcacctccaggtgagcccacctgtctcggggctccagaaggtggtgctggacgtcctgaggcacgcgctgtcctggctggaggaggtggagcagctcctccgggacctcgggatcctgccctccagccccaacaaaggttactgggactttttttctcacatggttgcatgactctaaaatgtcgcgttgaatctcagcatgatgggacatctgttgaggaagtcttcctgggtatctggccaagtctattcccttctccagaaccccctgcttctctgctagaaatcttcaaaatcttcgcagaactctccaccgacttccttttttcttctctgattaccttctccttttaacatcggcatcccaaatgccttattttt

SEQ ID NO: 736367 - DNA, 3515 bp, Homo sapiens
  misc_feature (746)..(746): n is a, c, g, or t
gttctcggtggtctcctcctgcttggagttgctcagctgggtctctttctggaggaaaagctgcgggagcatctggcagagaaggagaagctgaacgaggagaggctagagcaagaggagaagctcaaagccaaaatcaggcaactgacggaagagaaggcggctttggaggagtacattactcaagagagaaacagagcgaaagagactttagaggaagaacggaagagaatgcaagaactggagagcctcctggcccagcagaagaaggctttggcgaaaagcattacccaggagaagaacagagtgaaggaagcattagaggaagagcagacaagagtccaagagctggaggaacgcttggcccgccagaaggagatctcagagagcaacattgcgtacgagaaacgcaaagcaaaggaggccatggagaaggaaaagaaaaaggtgcaagacctggagaatcgcttaaccaagcagaaagaggaattagaattaaaagagcaaaaagaggacgttttaaataataaattaagtgacgcactggccatggttgaagagactcagaaaacaaaggcaactgaaagtctaaaagcagagagcctcgccttgaaattaaatgaaacattagccgaactggaaactaccaagacaaaaatgatcatggtggaagagcggctaatcctgcagcagaagatggtaaaggccctccaggatgagcaggaatcacagagacacgggtttgnagaagagatcatggaatataaggagcaaatcaaacagcacgcccagacaattgtgagcctcgaagagaaactccagaaagtcactcagcaccataaaaaaatagaaggcgagattgcaacattgaaggacaatgacccagccccaaaggaggaaaggccgcaagaccctctggtggctcccatgacagagagcagtgccaaagacatggcgtacgaacatctgatagatgacttattggctgctcagaaggaaattctgtctcagcaggaagtcatcatgaagttaaggaaagaccttaccgaagcccacagcagaatgtcggatttgagaggggagctaaacgagaagcagaagatggaactggagcagaacgtggtgctggtccagcagcagagcaaggagctgagtgtgctcaaggagaagatggcccagatgagcagcctggtagaaaagaaagatcgggagctgaaggcccttgaggaggcactcagggcttcccaagagaaacacagactccagctgaacacagagaaggaacagaagccccggaagaagacccagacgtgtgacacctctgtgcagatagaacccgtccacactgaggccttctccagcagccaagagcagcaatccttcagcgatctaggggtcaggtgcaaagggtcccggcacgaggaggtcattcagcgtcagaaaaaggccttatctgaacttcgagcgcgaattaaagaactcgagaaggcgcgctcaccagatcataaagaccaccagaatgaatcatttctagatttaaagaacctcagaatggaaaacaatgtccagaaaatactactggatgcaaaaccggatttgccaactctctcaagaatagagatcctagcgcctcagaatggcctttgcaacgcaaggttcggctcagccatggagaagtcagggaagatggatgtggctgaggctttagagctcagtgaaaagctgtacctggatatgagcaaaaccctcggaagtctcatgaacatcaagaatatgtcaggccacgtgtccatgaaatacctctcccgccaggagagggagaaggtcaaccagcttcgacaaagggacctcgacctggtgtttgataagatcacccaactcaagaaccagctggggaggaaagaggagctgttgagaggatatgaaaaggacgttgaacagctcaggcggagcaaagtgtccattgagatgtaccagtcgcaggtggcaaagctggaggatgatatctacaaagaggccgaagagaaggccctgctgaaggaggccctggagcgcatggagcaccagctgtgccaggagaagaggatcaacagggccatccggcagcagaagtagatgggagcttccagcccctgcctcgcagacagatggtgaggatgaaagaatgcaggcatccctcgctatctgctgtccactctcgctgtcgtcatacctcaggagccaagtgcttttggatggtgagggtgcttgtcccgtctctgaagcacctgcccagggcctggcaccagccggcggacactgccttccccatgctgcccatgacccatgctgcccgtgacccatgcaggtggtctcctgggtgagtcctgcctcagacccggtagggtctacacactggaaagtttccccaaagcaagtcacacatgagcagcacccgggcggcttccaaagctccctgaaagctggcagaggggctttcctgtctgctttgcagttgacatattcatcatccactcctgcagtccacaaggcactggaacagtgacctctaaatagagccagactctccctttccttcactcttgcctaaggtggagcagatcccaaggctggggttaggcaagtcagggaaagaaccacagtcactgtttcttcatgaccgtctccaggccagggactgggctcacctgagctttgcagccgtgatagggcttattaatgcctctaatagccctgcctggtacgatgatccctattttacagatgaggaaactgcgcctcagagagttaagaggcgcccaagtgcacacagcggctggtaaggacagctgggacctgaccccagatccctctgaccctggttctcctgctgtctgcagggttggccgtgagtcccctccttgtaactgtcagcttttatgtgtgtgtgcattctcgtgtgtgtgtacattctcatgtgtgtgtgtgtgtgcacatgtgtaccatgtgcatgagggtttggctgtgtgtgacactatgtgtgtgtgtttgtgtgtgttgcctgcctgagctcagagagagccaaacccccagagaagggtgccccctccaccaaccaggtgagctccttgcagaggcctggccttcatcccacaaaccttgcagaccacaggctccctggcttgcagcccccaaaaatgaaggcagcgctctgctctggacgtggcctttccagcactcaccactctgaattaaacatcacaggcccccatctgcacatgtcgtggggctgcctcgggcagaggaccgtttccttttacgctgtgccatgccagggagatctgggcagcagcagagtcctgagatgtcctttgatgtacccacaggagagttcgctccttcccgaggcagtgtcccccagggcttggcaggccaggcccacagcagagacaccaaaccacagaatgggacggcagagggccctaaaaagcccattgtcatgcactggctgaaaatgaaagaaaacctgcagattt

SEQ ID NO: 736368 - DNA, 424 bp, Homo sapiens; identical to SEQ ID NO: 302862

SEQ ID NO: 736369 - DNA, 964 bp, Homo sapiens
cagcccgctacgcagtacgtttaccacggtgagactgggacaggcccctaaagggagttcaaccatcatgggccccaccatccctgagccattgggataccgaggtgtgaaccaccgggcatctgcagccccttccacttgctctgggaggcgctgcctcgagctaaaacagacgtgtcctccgagaagagcattgttcctcacaggccctgggttgagcagcctccacctctgctggaatctagaacagagacccccaagagactcagcaagatggggcactgtggctcccaaaagctgtgcccccttctcgttgagaaaatggatttttctcaattttcagatgctacctgtttggaatgctgtccctgggaaggcccagcgttccaaatggttagcatctaaaagtggagaaaaatccatttttctttgatgcaaaaggcaaagaggaatctaagctagattttgttcttattctttctgtattgaagagacgagtatttgtagagatggtgaagaacaggatgcagaactcaaattcccaggttggaaccagaaaagcctccctaaagatggaccaagaaagagagatgctgaggaaagagacctccagcaagtccagccagagccttttgcattctaagcccagtggaaagtactagagaaacctcgtcccaccaggcctcatgtgatcctctaccagaagctggagcagccaccttggggatcagcagacaccagcagcaggccaaaggatagtggagtggagggacaagaaggcctgggtgagccttctctgagaatcactgagctctgaaccatgaatgaactgcctacctctgtacttcctgttgtataggacaaagaaatccctatctatttaaaccactgtagtcaggtctatgtatttgtgctgtggaacaaaccacccaaactgagtgacttaaaatgacaaatatttatt

SEQ ID NO: 736370 - DNA, 6470 bp, Homo sapiens
  misc_feature (917)..(917): n is a, c, g, or t
  misc_feature (4266)..(4266): n is a, c, g, or t
aaaattctctctcatccccttgggattcaaagctgagaagatgtaaggactggagctgcagcagtctttctgggaccattatacagagattctgtctgaggttggatccacgtggtcaaaagtattgctgaggagccagagagagactgaggtctgatgacatcacttgagccctgcagacttttcatttacgggaaaacagagaggatgaaggcctatctaaagagcgcagaaggcttttttgtcctaaataaaagtaccacaattggaaggcatgaaaattcagaccttgttttacagtctcctgacatcgacaaccaccatgcactcattgaatataacgaggcggagtgcagctttgttctccaggacttcaattcccgcaacggcacgtttgtcaacgagtgccacattcaaaacgtggctgtgaagctcatccctggagacatcctgagatttgggtctgcagggctgacctatgaactggtcattgaaaatccacctccggtctctttcccatggatgaggggcccagcaccatggccagggccacagccacctcgtgccacacagcagccaaaccaggcccccccaccatcacatatccccttccaccaaggtgtccagccagcaccgatgcaaaggagctggtcccaggcctttcccagacccaccgtggtcctgccggcctcccacaggcggcctgtgagcgccaacaaggagatgttctcgttcgtggtggacgacgcccgcaagccacccgtcatcaagcaaggcctcagggaaactcatgatgtcttttgtgctctctgctgatctcacgccttagtgtggaccaatgccatgaaactgtcagaaaaatcagtggccgaggggattcctggggcagttccccctgcggagatttatgtggaggnggacttggcccagcaggacaagatcagtgccctacagaaaggctacagcaaggtgctgtgccagaccctgtcagagcggaactcagaaatcacatccctgaagaatgagggcgagaacttaaagagagacaacgctatcacatcagggatggtgtcatctttgcaaaaagacatattagcaaaggatgagcaagttcaacaactaaaggaagaggtcagtcacctaaaaagtcagaacaaggacaaggaccaccagctggaagcccttggctctagactggagcacttcagaagtcaagtcatcaaggccacctatggacgggcgaagccgttccgggacaagcccgtcaccgaccaacaggttagtctgccgtccctgccacgtggctccttcactttcctcttcttcttcttcgtggatctggattccagaccctgggagcatatgtttctgtttttgttggtggcatatttttcacactgttgctacaccataaagatttgttttgattttatgggatttcctggcttttaaagtaaaagccagttaaaactcccttgaaatgtgtctgtgaaaatcaaattaaaccattcgggcttacttctggtctccagacatgcatgtttcgcctccattagcactgggagaaagggagccgcctccccacagccagtgcgttctggcgcgttccttcagaggagaaaagttgacagtggcagtgagggtggatgtctggctgtaatgattgccttgctgttcttccactacactttctagccccctgtgtcaaagcacagatgggaaaatgtgccgtgggctgctctcagtgggtgtgggagaacctgacctgctgcttatgagcccataatatcaggctcagtgttctgaatccctatacaacacagaagaatctggaacaaactcagggccacaagacaggcctttggatcataaaaataatctctgatcggcaaggagtggtggctcatgcctgtaatgccagcactttgagaggccgaggcgggtggatcacctcaggtcgggagttcgaaaccagcctgaccaacatggtaaaaccccatctctattaaaaatacaaaattagccgggcatggtggcgcgtgcctgtaatctcagctacttcagaggctgaggcaggagaatcgcttgaacccaggaggcggaggttgcggtgagccgagatcaaaccattgcactccagcctgggcaacaagagtgaaactccgtcgcaaaaaaaaaaaaaagaaaagaaaaaagaaaagagaatctctgattctgggactcattccctggtgacaggaccaacgtcccccttgacagccatcaccaagacatatcaggacctctgtcctcccgtgcttagacagggacttaagttgcatctctcccctctcccattccccttccctcagggccccccacccctgtatgttacatctttttttttttttcctttttctttttctcaccagttaatagagaaaattacccaggtcactgaggacaacatcaattttcagcagaaaaagtggaccctccagaaagagacccagctgagcaactccaagcaggaggagaccaccgagaacatcgagaagctgaggacgtcgctggacagctgccaggtggcccctccttacgctttccacaaatggtctctttgtctaatttttgtgcggcttatttgggaaattgcccagcttttttggagcaagttgggcagaaatgcttggcttttctatccactttttcctcttgttggagaaacttgttggagaagaaaaaacaaagggcctaaaaaaatgcctcccgggagaacttggcgtgtccaaaaaagatgcctgagcatcttcaattactgactttgagcggcccgcatccccagccaaaaagaaattgttttcatagcccctatgttatttccagagaaaccaaagaaacattcctgctttttatttgcattttcttgttttggcccagccacaaaaggcggtttccacaccgttgcttttgactctggaggagcagggacgggaggacttggccacagccctgcggcccccaccctgggacatggcttatcagagcaggcggtggcttctgctttctctggaaatcagcagctcctgtttggggagtttgtgcaaatgctggcttgtcagcactctttcaaatcaggaaaccacgctttccgaccagcttgtgtgttgatcttggcaggaattctgacgaatggaaaaaagaaggctgttcctcgaaggtcacgtcaggggctatttctggccacagggcctgggctcctcatgatctcacctctttgcaggcttgcatgaaaatatcctgttgcagccatgacctgaagaaggaggtcgaccttcttcagcacctccaggtgagcccacctgtctcggggctccagaaggtggtgctggacgtcctgaggcacgcgctgtcctggctggaggaggtggagcagctcctccgggacctcgggatcctgccctccagccccaacaaagggttctctttgtatctgatatatcttctggaacattataaaaaacttatgagccaggcccaggaacttcagatcaagttcaacagttctcaggaaactcagcagtctttactgcaggaaaagctgcgggagcatctggcagagaaggagaagctgaacgaggagaggctagagcaagaggagaagctcaaagccaaaatcaggcaactgacggaagagaaggcggctttggaggagtacattactcaagagagaaacagagcgaaagagactttagaggaagaacggaagagaatgcaagaactggagagcctcctggcccagcagaagaaggctttggcgaaaagcattacccaggagaagaacagagtgaaggaagcattagaggaagagcagacaagagtccaagagctggaggaacgcttggcccgccagaaggagatctcagagagcaacattgcgtacgagaaacgcaaagcaaaggaggccatggagaaggaaaagaaaaaggtgcaagacctggagaatcgcttaaccaagcagaaagaggaattagaattaaaagagcaaaaagaggacgttttaaataataaattaagtgacgcactggccatggttgaagagactcagaaaacaaaggcaactgaaagtctaaaagcagagagcctcgccttgaaattaaatgaaacattagccgaactggaaactaccaagacaaaaatgatcatggtggaagagcggctaatcctgcagcagaagatggtaaaggccctccaggatgagcaggaatcacagagacacgggtttgnagaagagatcatggaatataaggagcaaatcaaacagcacgcccagacaattgtgagcctcgaagagaaactccagaaagtcactcagcaccataaaaaaatagaaggcgagattgcaacattgaaggacaatgacccagccccaaaggaggaaaggccgcaagaccctctggtggctcccatgacagagagcagtgccaaagacatggcgtacgaacatctgatagatgacttattggctgctcagaaggaaattctgtctcagcaggaagtcatcatgaagttaaggaaagaccttaccgaagcccacagcagaatgtcggatttgagaggggagctaaacgagaagcagaagatggaactggagcagaacgtggtgctggtccagcagcagagcaaggagctgagtgtgctcaaggagaagatggcccagatgagcagcctggtagaaaagaaagatcgggagctgaaggcccttgaggaggcactcagggcttcccaagagaaacacagactccagctgaacacagagaaggaacagaagccccggaagaagacccagacgtgtgacacctctgtgcagatagaacccgtccacactgaggccttctccagcagccaagagcagcaatccttcagcgatctaggggtcaggtgcaaagggtcccggcacgaggaggtcattcagcgtcagaaaaaggccttatctgaacttcgagcgcgaattaaagaactcgagaaggcgcgctcaccagatcataaagaccaccagaatgaatcatttctagatttaaagaacctcagaatggaaaacaatgtccagaaaatactactggatgcaaaaccggatttgccaactctctcaagaatagagatcctagcgcctcagaatggcctttgcaacgcaaggttcggctcagccatggagaagtcagggaagatggatgtggctgaggctttagagctcagtgaaaagctgtacctggatatgagcaaaaccctcggaagtctcatgaacatcaagaatatgtcaggccacgtgtccatgaaatacctctcccgccaggagagggagaaggtcaaccagcttcgacaaagggacctcgacctggtgtttgataagatcacccaactcaagaaccagctggggaggaaagaggagctgttgagaggatatgaaaaggacgttgaacagctcaggcggagcaaagtgtccattgagatgtaccagtcgcaggtggcaaagctggaggatgatatctacaaagaggccgaagagaaggccctgctgaaggaggccctggagcgcatggagcaccagctgtgccaggagaagaggatcaacagggccatccggcagcagaaggaaagtgtagaggagcacgaactgagaaacgcaaaagaatcgacaccttgcaactgtgccttcaaagagaaagacaggcaggccctgccccacctgcctgcagtttgaacggatgacctaagagacaagcacgcgtccagccccgtctgtccattaagagtcttgctctattgcccaggctagagtgcagtggtgcaatttcggctcactgcaacctccacctcccaggttcaagcgattctcctgcctcagcctcccgagtagctgggactacaggttggaaccagaaaagcctccctaaagatggaccaagaaagagagatgctgaggaaagagacctccagcaagtccagccagagccttttgcattctaagcccagtggaaagtactagagaaacctcgtcccaccaggcctcatgtgatcctctctaggacgggccatgttggaccaatctggctaatgacatataaggaaaagctcctgtggagggcttcccttccagcttctctaggtgaaagcattcacccttggtacctttgtcttgtctcctttctcactcctggagctcagaccagaagctggagcagccaccttggggatcagcagacaccagcagcaggccaaaggatagtggagtggagggacaagaaggcctgggtgagccttctctgagaatcactgagctctgaaccatgaatgaactgcctacctctgtacttcctgttgtataggacaaagaaatccctatctatttaaaccactgtagtcaggtctatgtatttgtgctgtggaacaaaccacccaaactgagtgacttaaaatgacaaatatttatt

SEQ ID NO: 736371 - DNA, 3713 bp, Homo sapiens
  misc_feature (917)..(917): n is a, c, g, or t
aaaattctctctcatccccttgggattcaaagctgagaagatgtaaggactggagctgcagcagtctttctgggaccattatacagagattctgtctgaggttggatccacgtggtcaaaagtattgctgaggagccagagagagactgaggtctgatgacatcacttgagccctgcagacttttcatttacgggaaaacagagaggatgaaggcctatctaaagagcgcagaaggcttttttgtcctaaataaaagtaccacaattggaaggcatgaaaattcagaccttgttttacagtctcctgacatcgacaaccaccatgcactcattgaatataacgaggcggagtgcagctttgttctccaggacttcaattcccgcaacggcacgtttgtcaacgagtgccacattcaaaacgtggctgtgaagctcatccctggagacatcctgagatttgggtctgcagggctgacctatgaactggtcattgaaaatccacctccggtctctttcccatggatgaggggcccagcaccatggccagggccacagccacctcgtgccacacagcagccaaaccaggcccccccaccatcacatatccccttccaccaaggtgtccagccagcaccgatgcaaaggagctggtcccaggcctttcccagacccaccgtggtcctgccggcctcccacaggcggcctgtgagcgccaacaaggagatgttctcgttcgtggtggacgacgcccgcaagccacccgtcatcaagcaaggcctcagggaaactcatgatgtcttttgtgctctctgctgatctcacgccttagtgtggaccaatgccatgaaactgtcagaaaaatcagtggccgaggggattcctggggcagttccccctgcggagatttatgtggaggnggacttggcccagcaggacaagatcagtgccctacagaaaggctacagcaaggtgctgtgccagaccctgtcagagcggaactcagaaatcacatccctgaagaatgagggcgagaacttaaagagagacaacgctatcacatcagggatggtgtcatctttgcaaaaagacatattagcaaaggatgagcaagttcaacaactaaaggaagaggtcagtcacctaaaaagtcagaacaaggacaaggaccaccagctggaagcccttggctctagactggagcacttcagaagtcaagtcatcaaggccacctatggacgggcgaagccgttccgggacaagcccgtcaccgaccaacaggttagtctgccgtccctgccacgtggctccttcactttcctcttcttcttcttcgtggatctggattccagaccctgggagcatatgtttctgtttttgttggtggcatatttttcacactgttgctacaccataaagatttgttttgattttatgggatttcctggcttttaaagtaaaagccagttaaaactcccttgaaatgtgtctgtgaaaatcaaattaaaccattcgggcttacttctggtctccagacatgcatgtttcgcctccattagcactgggagaaagggagccgcctccccacagccagtgcgttctggcgcgttccttcagaggagaaaagttgacagtggcagtgagggtggatgtctggctgtaatgattgccttgctgttcttccactacactttctagccccctgtgtcaaagcacagatgggaaaatgtgccgtgggctgctctcagtgggtgtgggagaacctgacctgctgcttatgagcccataatatcaggctcagtgttctgaatccctatacaacacagaagaatctggaacaaactcagggccacaagacaggcctttggatcataaaaataatctctgatcggcaaggagtggtggctcatgcctgtaatgccagcactttgagaggccgaggcgggtggatcacctcaggtcgggagttcgaaaccagcctgaccaacatggtaaaaccccatctctattaaaaatacaaaattagccgggcatggtggcgcgtgcctgtaatctcagctacttcagaggctgaggcaggagaatcgcttgaacccaggaggcggaggttgcggtgagccgagatcaaaccattgcactccagcctgggcaacaagagtgaaactccgtcgcaaaaaaaaaaaaaagaaaagaaaaaagaaaagagaatctctgattctgggactcattccctggtgacaggaccaacgtcccccttgacagccatcaccaagacatatcaggacctctgtcctcccgtgcttagacagggacttaagttgcatctctcccctctcccattccccttccctcagggccccccacccctgtatgttacatctttttttttttttcctttttctttttctcaccagttaatagagaaaattacccaggtcactgaggacaacatcaattttcagcagaaaaagtggaccctccagaaagagacccagctgagcaactccaagcaggaggagaccaccgagaacatcgagaagctgaggacgtcgctggacagctgccaggcttgcatgaaaatatcctgttgcagccatgacctgaagaaggaggtcgaccttcttcagcacctccaggtgagcccacctgtctcggggctccagaaggtggtgctggacgtcctgaggcacgcgctgtcctggctggaggaggtggagcagctcctccgggacctcgggatcctgccctccagccccaacaaaggttactgggactttttttctcacatggttgcatgactctaaaatgtcgcgttgaatctcagcatgatgggacatctgttgaggaagtcttcctgggtatctggccaagtctattcccttctccagaaccccctgcttctctgcttgaggcgtaattttccattaaaaaaaaaaacacacacatacaagtgagacacgataactgaagaaaaatgaaacaaaacagaggcaaaaggaaaattaaatcgaaattatgcaaagtctaattacgctgtttaacctccaaggcattttcccatggaaataaccgcgtgattccaggcaagtgacttaccctgtctatgcctcagtttccctatctgtaaaatgaggctaatagggagtacccaccctttagggctgttgtgatcattaaaatgcatgaatatatggaaagtacttggaatagtacctggcacacaataggcattactgaatgtttattgacttttaatttgacaaaaaaatagtgtcacgttaccctcgattttctttggtttattcctaatggtacgtcatccatgtcagtagacacagacctacatcatcgctgttaccgacggcagttactgattccattgtgtaggatgtgccattgttttagacaatcccctatcatgggcacttaggtgatttccagtttttcacactcataaatcatgctgggatgaacattgttgcacacatacctgctcatattatctttattctcctagaggtggagaggtatgaatcactttctttcaacaaatagtgattgcatgcatgcttaccagaggccacatgttgtgcagggcagagacgtaacggggtcaggaacaggtagaatcaggtcatgggtatatggttcactgtaaaattcttccaatatgtccatacatttgaaattttttataataaaatactggggaaaaa

SEQ ID NO: 736372 - DNA, 5524 bp, Homo sapiens
  misc_feature (917)..(917): n is a, c, g, or t
  misc_feature (3568)..(3568): n is a, c, g, or t
aaaattctctctcatccccttgggattcaaagctgagaagatgtaaggactggagctgcagcagtctttctgggaccattatacagagattctgtctgaggttggatccacgtggtcaaaagtattgctgaggagccagagagagactgaggtctgatgacatcacttgagccctgcagacttttcatttacgggaaaacagagaggatgaaggcctatctaaagagcgcagaaggcttttttgtcctaaataaaagtaccacaattggaaggcatgaaaattcagaccttgttttacagtctcctgacatcgacaaccaccatgcactcattgaatataacgaggcggagtgcagctttgttctccaggacttcaattcccgcaacggcacgtttgtcaacgagtgccacattcaaaacgtggctgtgaagctcatccctggagacatcctgagatttgggtctgcagggctgacctatgaactggtcattgaaaatccacctccggtctctttcccatggatgaggggcccagcaccatggccagggccacagccacctcgtgccacacagcagccaaaccaggcccccccaccatcacatatccccttccaccaaggtgtccagccagcaccgatgcaaaggagctggtcccaggcctttcccagacccaccgtggtcctgccggcctcccacaggcggcctgtgagcgccaacaaggagatgttctcgttcgtggtggacgacgcccgcaagccacccgtcatcaagcaaggcctcagggaaactcatgatgtcttttgtgctctctgctgatctcacgccttagtgtggaccaatgccatgaaactgtcagaaaaatcagtggccgaggggattcctggggcagttccccctgcggagatttatgtggaggnggacttggcccagcaggacaagatcagtgccctacagaaaggctacagcaaggtgctgtgccagaccctgtcagagcggaactcagaaatcacatccctgaagaatgagggcgagaacttaaagagagacaacgctatcacatcagggatggtgtcatctttgcaaaaagacatattagcaaaggatgagcaagttcaacaactaaaggaagaggtcagtcacctaaaaagtcagaacaaggacaaggaccaccagctggaagcccttggctctagactggagcacttcagaagtcaagtcatcaaggccacctatggacgggcgaagccgttccgggacaagcccgtcaccgaccaacaggttagtctgccgtccctgccacgtggctccttcactttcctcttcttcttcttcgtggatctggattccagaccctgggagcatatgtttctgtttttgttggtggcatatttttcacactgttgctacaccataaagatttgttttgattttatgggatttcctggcttttaaagtaaaagccagttaaaactcccttgaaatgtgtctgtgaaaatcaaattaaaccattcgggcttacttctggtctccagacatgcatgtttcgcctccattagcactgggagaaagggagccgcctccccacagccagtgcgttctggcgcgttccttcagaggagaaaagttgacagtggcagtgagggtggatgtctggctgtaatgattgccttgctgttcttccactacactttctagccccctgtgtcaaagcacagatgggaaaatgtgccgtgggctgctctcagtgggtgtgggagaacctgacctgctgcttatgagcccataatatcaggctcagtgttctgaatccctatacaacacagaagaatctggaacaaactcagggccacaagacaggcctttggatcataaaaataatctctgatcggcaaggagtggtggctcatgcctgtaatgccagcactttgagaggccgaggcgggtggatcacctcaggtcgggagttcgaaaccagcctgaccaacatggtaaaaccccatctctattaaaaatacaaaattagccgggcatggtggcgcgtgcctgtaatctcagctacttcagaggctgaggcaggagaatcgcttgaacccaggaggcggaggttgcggtgagccgagatcaaaccattgcactccagcctgggcaacaagagtgaaactccgtcgcaaaaaaaaaaaaaagaaaagaaaaaagaaaagagaatctctgattctgggactcattccctggtgacaggaccaacgtcccccttgacagccatcaccaagacatatcaggacctctgtcctcccgtgcttagacagggacttaagttgcatctctcccctctcccattccccttccctcagggccccccacccctgtatgttacatctttttttttttttcctttttctttttctcaccagttaatagagaaaattacccaggtcactgaggacaacatcaattttcagcagaaaaagtggaccctccagaaagagacccagctgagcaactccaagcaggaggagaccaccgagaacatcgagaagctgaggacgtcgctggacagctgccaggcttgcatgaaaatatcctgttgcagccatgacctgaagaaggaggtcgaccttcttcagcacctccaggtgagcccacctgtctcggggctccagaaggtggtgctggacgtcctgaggcacgcgctgtcctggctggaggaggtggagcagctcctccgggacctcgggatcctgccctccagccccaacaaagggttctctttgtatctgatatatcttctggaacattataaaaaacttatgagccaggcccaggaacttcagatcaagttcaacagttctcaggaaactcagcagtctttactgcaggaaaagctgcgggagcatctggcagagaaggagaagctgaacgaggagaggctagagcaagaggagaagctcaaagccaaaatcaggcaactgacggaagagaaggcggctttggaggagtacattactcaagagagaaacagagcgaaagagactttagaggaagaacggaagagaatgcaagaactggagagcctcctggcccagcagaagaaggctttggcgaaaagcattacccaggagaagaacagagtgaaggaagcattagaggaagagcagacaagagtccaagagctggaggaacgcttggcccgccagaaggagatctcagagagcaacattgcgtacgagaaacgcaaagcaaaggaggccatggagaaggaaaagaaaaaggtgcaagacctggagaatcgcttaaccaagcagaaagaggaattagaattaaaagagcaaaaagaggacgttttaaataataaattaagtgacgcactggccatggttgaagagactcagaaaacaaaggcaactgaaagtctaaaagcagagagcctcgccttgaaattaaatgaaacattagccgaactggaaactaccaagacaaaaatgatcatggtggaagagcggctaatcctgcagcagaagatggtaaaggccctccaggatgagcaggaatcacagagacacgggtttgnagaagagatcatggaatataaggagcaaatcaaacagcacgcccagacaattgtgagcctcgaagagaaactccagaaagtcactcagcaccataaaaaaatagaaggcgagattgcaacattgaaggacaatgacccagccccaaaggaggaaaggccgcaagaccctctggtggctcccatgacagagagcagtgccaaagacatggcgtacgaacatctgatagatgacttattggctgctcagaaggaaattctgtctcagcaggaagtcatcatgaagttaaggaaagaccttaccgaagcccacagcagaatgtcggatttgagaggggagctaaacgagaagcagaagatggaactggagcagaacgtggtgctggtccagcagcagagcaaggagctgagtgtgctcaaggagaagatggcccagatgagcagcctggtagaaaagaaagatcgggagctgaaggcccttgaggaggcactcagggcttcccaagagaaacacagactccagctgaacacagagaaggaacagaagccccggaagaagacccagacgtgtgacacctctgtgcagatagaacccgtccacactgaggccttctccagcagccaagagcagcaatccttcagcgatctaggggtcaggtgcaaagggtcccggcacgaggaggtcattcagcgtcagaaaaaggccttatctgaacttcgagcgcgaattaaagaactcgagaaggcgcgctcaccagatcataaagaccaccagaatgaatcatttctagatttaaagaacctcagaatggaaaacaatgtccagaaaatactactggatgcaaaaccggatttgccaactctctcaagaatagagatcctagcgcctcagaatggcctttgcaacgcaaggttcggctcagccatggagaagtcagggaagatggatgtggctgaggctttagagctcagtgaaaagctgtacctggatatgagcaaaaccctcggaagtctcatgaacatcaagaatatgtcaggccacgtgtccatgaaatacctctcccgccaggagagggagaaggtcaaccagcttcgacaaagggacctcgacctggtgtttgataagatcacccaactcaagaaccagctggggaggaaagaggagctgttgagaggatatgaaaaggacgttgaacagctcaggcggagcaaagtgtccattgagatgtaccagtcgcaggtggcaaagctggaggatgatatctacaaagaggccgaagagaaggccctgctgaaggaggccctggagcgcatggagcaccagctgtgccaggagaagaggatcaacagggccatccggcagcagaagtagatgggagcttccagcccctgcctcgcagacagatggtgaggatgaaagaatgcaggcatccctcgctatctgctgtccactctcgctgtcgtcatacctcaggagccaagtgcttttggatggtgagggtgcttgtcccgtctctgaagcacctgcccagggcctggcaccagccggcggacactgccttccccatgctgcccatgacccatgctgcccgtgacccatgcaggtggtctcctggatgaggaaactgcgcctcagagagttaagaggcgcccaagtgcacacagcggctgagacgagtatttgtagagatggtgaagaacaggatgcagaactcaaattcccaggttggaaccagaaaagcctccctaaagatggaccaagaaagagagatgctgaggaaagagacctccagcaagtccagccagagccttttgcattctaagcccagtggaaagtactagagaaacctcgtcccaccaggcctcatgtgatcctctgtgagttcatgtgactcttctgtgtcatctgtgtcaaaatactgagttgcttttgtaagtctttaaagattgttaccctag

SEQ ID NO: 736373 - DNA, 5772 bp, Homo sapiens
  misc_feature (917)..(917): n is a, c, g, or t
  misc_feature (3568)..(3568): n is a, c, g, or t
aaaattctctctcatccccttgggattcaaagctgagaagatgtaaggactggagctgcagcagtctttctgggaccattatacagagattctgtctgaggttggatccacgtggtcaaaagtattgctgaggagccagagagagactgaggtctgatgacatcacttgagccctgcagacttttcatttacgggaaaacagagaggatgaaggcctatctaaagagcgcagaaggcttttttgtcctaaataaaagtaccacaattggaaggcatgaaaattcagaccttgttttacagtctcctgacatcgacaaccaccatgcactcattgaatataacgaggcggagtgcagctttgttctccaggacttcaattcccgcaacggcacgtttgtcaacgagtgccacattcaaaacgtggctgtgaagctcatccctggagacatcctgagatttgggtctgcagggctgacctatgaactggtcattgaaaatccacctccggtctctttcccatggatgaggggcccagcaccatggccagggccacagccacctcgtgccacacagcagccaaaccaggcccccccaccatcacatatccccttccaccaaggtgtccagccagcaccgatgcaaaggagctggtcccaggcctttcccagacccaccgtggtcctgccggcctcccacaggcggcctgtgagcgccaacaaggagatgttctcgttcgtggtggacgacgcccgcaagccacccgtcatcaagcaaggcctcagggaaactcatgatgtcttttgtgctctctgctgatctcacgccttagtgtggaccaatgccatgaaactgtcagaaaaatcagtggccgaggggattcctggggcagttccccctgcggagatttatgtggaggnggacttggcccagcaggacaagatcagtgccctacagaaaggctacagcaaggtgctgtgccagaccctgtcagagcggaactcagaaatcacatccctgaagaatgagggcgagaacttaaagagagacaacgctatcacatcagggatggtgtcatctttgcaaaaagacatattagcaaaggatgagcaagttcaacaactaaaggaagaggtcagtcacctaaaaagtcagaacaaggacaaggaccaccagctggaagcccttggctctagactggagcacttcagaagtcaagtcatcaaggccacctatggacgggcgaagccgttccgggacaagcccgtcaccgaccaacaggttagtctgccgtccctgccacgtggctccttcactttcctcttcttcttcttcgtggatctggattccagaccctgggagcatatgtttctgtttttgttggtggcatatttttcacactgttgctacaccataaagatttgttttgattttatgggatttcctggcttttaaagtaaaagccagttaaaactcccttgaaatgtgtctgtgaaaatcaaattaaaccattcgggcttacttctggtctccagacatgcatgtttcgcctccattagcactgggagaaagggagccgcctccccacagccagtgcgttctggcgcgttccttcagaggagaaaagttgacagtggcagtgagggtggatgtctggctgtaatgattgccttgctgttcttccactacactttctagccccctgtgtcaaagcacagatgggaaaatgtgccgtgggctgctctcagtgggtgtgggagaacctgacctgctgcttatgagcccataatatcaggctcagtgttctgaatccctatacaacacagaagaatctggaacaaactcagggccacaagacaggcctttggatcataaaaataatctctgatcggcaaggagtggtggctcatgcctgtaatgccagcactttgagaggccgaggcgggtggatcacctcaggtcgggagttcgaaaccagcctgaccaacatggtaaaaccccatctctattaaaaatacaaaattagccgggcatggtggcgcgtgcctgtaatctcagctacttcagaggctgaggcaggagaatcgcttgaacccaggaggcggaggttgcggtgagccgagatcaaaccattgcactccagcctgggcaacaagagtgaaactccgtcgcaaaaaaaaaaaaaagaaaagaaaaaagaaaagagaatctctgattctgggactcattccctggtgacaggaccaacgtcccccttgacagccatcaccaagacatatcaggacctctgtcctcccgtgcttagacagggacttaagttgcatctctcccctctcccattccccttccctcagggccccccacccctgtatgttacatctttttttttttttcctttttctttttctcaccagttaatagagaaaattacccaggtcactgaggacaacatcaattttcagcagaaaaagtggaccctccagaaagagacccagctgagcaactccaagcaggaggagaccaccgagaacatcgagaagctgaggacgtcgctggacagctgccaggcttgcatgaaaatatcctgttgcagccatgacctgaagaaggaggtcgaccttcttcagcacctccaggtgagcccacctgtctcggggctccagaaggtggtgctggacgtcctgaggcacgcgctgtcctggctggaggaggtggagcagctcctccgggacctcgggatcctgccctccagccccaacaaagggttctctttgtatctgatatatcttctggaacattataaaaaacttatgagccaggcccaggaacttcagatcaagttcaacagttctcaggaaactcagcagtctttactgcaggaaaagctgcgggagcatctggcagagaaggagaagctgaacgaggagaggctagagcaagaggagaagctcaaagccaaaatcaggcaactgacggaagagaaggcggctttggaggagtacattactcaagagagaaacagagcgaaagagactttagaggaagaacggaagagaatgcaagaactggagagcctcctggcccagcagaagaaggctttggcgaaaagcattacccaggagaagaacagagtgaaggaagcattagaggaagagcagacaagagtccaagagctggaggaacgcttggcccgccagaaggagatctcagagagcaacattgcgtacgagaaacgcaaagcaaaggaggccatggagaaggaaaagaaaaaggtgcaagacctggagaatcgcttaaccaagcagaaagaggaattagaattaaaagagcaaaaagaggacgttttaaataataaattaagtgacgcactggccatggttgaagagactcagaaaacaaaggcaactgaaagtctaaaagcagagagcctcgccttgaaattaaatgaaacattagccgaactggaaactaccaagacaaaaatgatcatggtggaagagcggctaatcctgcagcagaagatggtaaaggccctccaggatgagcaggaatcacagagacacgggtttgnagaagagatcatggaatataaggagcaaatcaaacagcacgcccagacaattgtgagcctcgaagagaaactccagaaagtcactcagcaccataaaaaaatagaaggcgagattgcaacattgaaggacaatgacccagccccaaaggaggaaaggccgcaagaccctctggtggctcccatgacagagagcagtgccaaagacatggcgtacgaacatctgatagatgacttattggctgctcagaaggaaattctgtctcagcaggaagtcatcatgaagttaaggaaagaccttaccgaagcccacagcagaatgtcggatttgagaggggagctaaacgagaagcagaagatggaactggagcagaacgtggtgctggtccagcagcagagcaaggagctgagtgtgctcaaggagaagatggcccagatgagcagcctggtagaaaagaaagatcgggagctgaaggcccttgaggaggcactcagggcttcccaagagaaacacagactccagctgaacacagagaaggaacagaagccccggaagaagacccagacgtgtgacacctctgtgcagatagaacccgtccacactgaggccttctccagcagccaagagcagcaatccttcagcgatctaggggtcaggtgcaaagggtcccggcacgaggaggtcattcagcgtcagaaaaaggccttatctgaacttcgagcgcgaattaaagaactcgagaaggcgcgctcaccagatcataaagaccaccagaatgaatcatttctagatttaaagaacctcagaatggaaaacaatgtccagaaaatactactggatgcaaaaccggatttgccaactctctcaagaatagagatcctagcgcctcagaatggcctttgcaacgcaaggttcggctcagccatggagaagtcagggaagatggatgtggctgaggctttagagctcagtgaaaagctgtacctggatatgagcaaaaccctcggaagtctcatgaacatcaagaatatgtcaggccacgtgtccatgaaatacctctcccgccaggagagggagaaggtcaaccagcttcgacaaagggacctcgacctggtgtttgataagatcacccaactcaagaaccagctggggaggaaagaggagctgttgagaggatatgaaaaggacgttgaacagctcaggcggagcaaagtgtccattgagatgtaccagtcgcaggtggcaaagctggaggatgatatctacaaagaggccgaagagaaggccctgctgaaggaggccctggagcgcatggagcaccagctgtgccaggagaagaggatcaacagggccatccggcagcagaaggaaagtgtagaggagcacgaactgagaaacgcaaaagaatcgacaccttgcaactgtgccttcaaagagaaagacaggcaggccctgccccacctgcctgcagtttgaacggatgacctaagagacaagcacgcgtccagccccgtctgtccattaagagtcttgctctattgcccaggctagagtgcagtggtgcaatttcggctcactgcaacctccacctcccaggttcaagcgattctcctgcctcagcctcccgagtagctgggactacaggttggaaccagaaaagcctccctaaagatggaccaagaaagagagatgctgaggaaagagacctccagcaagtccagccagagccttttgcattctaagcccagtggaaagtactagagaaacctcgtcccaccaggcctcatgtgatcctctctaggacgggccatgttggaccaatctggctaatgacatataaggaaaagctcctgtggagggcttcccttccagcttctctaggtgaaagcattcacccttggtacctttgtcttgtctcctttctcactcctggagctcagaccagaagctggagcagccaccttggggatcagcagacaccagcagcaggccaaaggatagtggagtggagggacaagaaggcctgggtgagccttctctgagaatcactgagctctgaaccatgaatgaactgcctacctctgtacttcctgttgtataggacaaagaaatccctatctatttaaaccactgtagtcaggtctatgtatttgtgctgtggaacaaaccacccaaactgagtgacttaaaatgacaaatatttatt

SEQ ID NO: 736374 - DNA, 3240 bp, Homo sapiens
  misc_feature (917)..(917): n is a, c, g, or t
aaaattctctctcatccccttgggattcaaagctgagaagatgtaaggactggagctgcagcagtctttctgggaccattatacagagattctgtctgaggttggatccacgtggtcaaaagtattgctgaggagccagagagagactgaggtctgatgacatcacttgagccctgcagacttttcatttacgggaaaacagagaggatgaaggcctatctaaagagcgcagaaggcttttttgtcctaaataaaagtaccacaattggaaggcatgaaaattcagaccttgttttacagtctcctgacatcgacaaccaccatgcactcattgaatataacgaggcggagtgcagctttgttctccaggacttcaattcccgcaacggcacgtttgtcaacgagtgccacattcaaaacgtggctgtgaagctcatccctggagacatcctgagatttgggtctgcagggctgacctatgaactggtcattgaaaatccacctccggtctctttcccatggatgaggggcccagcaccatggccagggccacagccacctcgtgccacacagcagccaaaccaggcccccccaccatcacatatccccttccaccaaggtgtccagccagcaccgatgcaaaggagctggtcccaggcctttcccagacccaccgtggtcctgccggcctcccacaggcggcctgtgagcgccaacaaggagatgttctcgttcgtggtggacgacgcccgcaagccacccgtcatcaagcaaggcctcagggaaactcatgatgtcttttgtgctctctgctgatctcacgccttagtgtggaccaatgccatgaaactgtcagaaaaatcagtggccgaggggattcctggggcagttccccctgcggagatttatgtggaggnggacttggcccagcaggacaagatcagtgccctacagaaaggctacagcaaggtgctgtgccagaccctgtcagagcggaactcagaaatcacatccctgaagaatgagggcgagaacttaaagagagacaacgctatcacatcagggatggtgtcatctttgcaaaaagacatattagcaaaggatgagcaagttcaacaactaaaggaagaggtcagtcacctaaaaagtcagaacaaggacaaggaccaccagctggaagcccttggctctagactggagcacttcagaagtcaagtcatcaaggccacctatggacgggcgaagccgttccgggacaagcccgtcaccgaccaacaggttagtctgccgtccctgccacgtggctccttcactttcctcttcttcttcttcgtggatctggattccagaccctgggagcatatgtttctgtttttgttggtggcatatttttcacactgttgctacaccataaagatttgttttgattttatgggatttcctggcttttaaagtaaaagccagttaaaactcccttgaaatgtgtctgtgaaaatcaaattaaaccattcgggcttacttctggtctccagacatgcatgtttcgcctccattagcactgggagaaagggagccgcctccccacagccagtgcgttctggcgcgttccttcagaggagaaaagttgacagtggcagtgagggtggatgtctggctgtaatgattgccttgctgttcttccactacactttctagccccctgtgtcaaagcacagatgggaaaatgtgccgtgggctgctctcagtgggtgtgggagaacctgacctgctgcttatgagcccataatatcaggctcagtgttctgaatccctatacaacacagaagaatctggaacaaactcagggccacaagacaggcctttggatcataaaaataatctctgatcggcaaggagtggtggctcatgcctgtaatgccagcactttgagaggccgaggcgggtggatcacctcaggtcgggagttcgaaaccagcctgaccaacatggtaaaaccccatctctattaaaaatacaaaattagccgggcatggtggcgcgtgcctgtaatctcagctacttcagaggctgaggcaggagaatcgcttgaacccaggaggcggaggttgcggtgagccgagatcaaaccattgcactccagcctgggcaacaagagtgaaactccgtcgcaaaaaaaaaaaaaagaaaagaaaaaagaaaagagaatctctgattctgggactcattccctggtgacaggaccaacgtcccccttgacagccatcaccaagacatatcaggacctctgtcctcccgtgcttagacagggacttaagttgcatctctcccctctcccattccccttccctcagggccccccacccctgtatgttacatctttttttttttttcctttttctttttctcaccagttaatagagaaaattacccaggtcactgaggacaacatcaattttcagcagaaaaagtggaccctccagaaagagacccagctgagcaactccaagcaggaggagaccaccgagaacatcgagaagctgaggacgtcgctggacagctgccaggcttgcatgaaaatatcctgttgcagccatgacctgaagaaggaggtcgaccttcttcagcacctccaggtgagcccacctgtctcggggctccagaaggtggtgctggacgtcctgaggcacgcgctgtcctggctggaggaggtggagcagctcctccgggacctcgggatcctgccctccagccccaacaaagggttctctttgtatctgatatatcttctggaacattataaaaaacttatgagccaggcccaggaacttcagatcaagttcaacagttctcaggaaactcagcagtctttactgcaggaaaagctgcgggagcatctggcagagaaggagaagctgaacgaggagaggctagagcaagaggagaagctcaaagccaaaatcaggcaactgacggaagagaaggcggctttggaggagtacattactcaagagagaaacagagcgaaagagactttagaggaagaacggaagagaatgcaagaactggagagcctcctggcccagcagaagaaggctttggcgaaaagcattacccaggagaagaacagagtgaaggaagcattagaggaagagcagacaagagtccaagagctggaggaacgcttggcccgccagaaggaggttttggagagcagcatagcccatgaaaaaagaaaagcaa

SEQ ID NO: 736375 - DNA, 853 bp, Homo sapiens; identical to SEQ ID NO: 426682

SEQ ID NO: 736376 - DNA, 3239 bp, Homo sapiens
ggctggagctgccgccgccgccgccgccgcgccagcaggtcctaatgcctgtcacttcccaggacgctggcagcagcagcagcccggagcccccgagccctcggcaggtttgcgtgtccttccccgcgatctgattggataaagtgggggctcgacggtggccgacgtgggacagtctggctgtggcaggggtctcggaaaccatgggttattgcagtggcaggtgcacgcttatctttatctgtggcatgcaactggtttgtgtgctggagaggcaaatatttgacttccttggatatcagtgggcacctatcctggcaaattttgtacatattattatcgtcattcttggtttgtttggaactattcaatatagacctcgttacataacaggatatgctgtctggctagtcctctgggttacgtggaatgtgtttgttatctgcttctatttggaggctggggacctctcaaaggaaacagaccttatcctgacttttaatatatcaatgcaccgatcttggtggatggagaatggaccaggatgtacggtgacgtcagtgacacctgccccagactgggccccagaagaccatcgctacatcacggtctcagggtgtttgctggagtaccagtacatagaagtggctcatagttccctccagattgtcctcgcactggcaggtttcatctacgcctgttatgttgtgaaatgtataactgaagaagaggacagctttgatttcataggtggctttgactcttatggctatcaagggcctcagaagacatctcatttacaactacagcctatgtacatgtcaaaataatacagatgacttcagtatgtcagcccatggacctttcaaagaacttttttcgcagtggcctcctgcatttcatgaagagcaagaagcaactgagtttaaatacatacacgtattaacaaaacaaatgcaaagcctctacatacaacactgacacacacacacacacacacgtgagcacgcacacaccaattccacttgacctcctctttctaactgaaacagacaaatatgcaggacacgcccatcttggatttcctgaaagcaggcccctttctcccaggccttcggaaagttcagaaggagatgtgttgatgcccaacggttgccggccattgctaactcctctgcagcccagcgggttggcctctgtgagctgggaagtcatccaaggcacattagtttgagagctctgtcttctgcactccatacatcttgacagcaccacggctacttaggcaatgtaattgcaaaaacaaacgaaacatgccatgatgaccttgtacccgaagtccgaaatggcagattgtttgccctaaaggctgtaccgtacatacttgccttaacccacctacattgtgtgcccaagaatcccagtgcagacagccccaagccacttcctttaggctaacacactgctattaattctaaatgagttcaagcctgtgtgtttcatgtcaaggaacaagactgaatagctcagcagctccagtgtgtctgtataagaaaagtgccagctgtcagcaaagtgctttaccatagagcctccatggtggcccaaaagagacaagtaacaataacaatatctgtcatctttataattctaaaatatggtcttctgatggggttgggggtgggacagagtaaaacattaatctactaaactcactaatctactggaagcagaaagcagaaatggcttaactcgctgattttatttattgcactctaggtgcttttataagtatctacaattgtcttttactaacacagaaacagctgtggatttctatcaacagaggccaactgaatatgtattagctatgtttactcttttatatctaattcaaattgaagactctacgtaggtgaacttttttttctaacttcagtgtacaagattatttttgggtgggtggggggagcaatagttaccttggtgaaatatttgagatctttttgtggtatttgggggatctgttgtgtgttagagtgtatttcaaccctcctgtattattgtggcagaaaaactgtgctgttaacgtagttggcaacaagatgcctttggaaacttaatagtaggtcaatgtgtttatggaatattctgaactcctaggaaattttgttctatattttaaagcattatttggttttcattagtggaaaacataattagctcaggcttatcaggaactcagatgagtcatattttttcttggatacacctgagacattaaactcaattttttaaaactaacacaccattctttagtgcagtgaaattcaaaagttataaattggcatggagcaagttttttctttgatttctatgaagtttcagttattggattaaactactttagaccttagcccattcggatctacatacaccagttccattactgtgtttgcatggatgtctgtaatatacacacacatatacatttgaaaatgatagaggaacaaagagttatcattggaacataaactataaaaaaagattccagcactcatgcttgaatttcctcagtgggttgtatgtttgtccatacatacatgtataaaataaacaattgcaaacatgtcagtgaaacctcatatgacgcttttatagtgacatgcatgtttaatgtatgagaaaaatatttaccaatgtattgtcctttgagtcctaaaatataaatactatacatgccagaaactattctaatgtgacttttaatgtgactattaaaaatgaggtttcactgtacattcatgctgtgatgcgatttcaccttatagtacatgtatatgggtacagaaaataaaccctcatattcctgctttaagttacagccaagttttcaccaaatcacaactatcatcaccaccaaaattttaaaaaacagtagttgactactaaaaagtaatcagtggacaggtcatttatgggatcagtaagcacagtagtgtgattatatctgggaaaacatctacagttgtacagctgtatcctcctcaaaatccggtgaagaatgctatttttctaggctgagcttttgttataaacttaatattcagaaggcaagggttatgatcctgatgtgtcctttttttttgcatttgttaattctgaatgtatttttaacagaatgatttttttgacttactagtgtaatttgcattttaaaaataaatggaaaaatactt

SEQ ID NO: 736377 - DNA, 1249 bp, Homo sapiens
  misc_feature (834)..(834): n is a, c, g, or t
ggctggagctgccgccgccgccgccgccgcgccagcaggtcctaatgcctgtcacttcccaggacgctggcagcagcagcagcccggagcccccgagccctcggcaggtttgcgtgtccttccccgcgatctgattggataaagtgggggctcgacggtggccgacgtgggacagtctggctgtggcaggggtctcggaaaccatgggttattgcagtggcaggtgcacgcttatctttatctgtggcatgcaactggtttgtgtgctggagaggcaaatatttgacttccttggatatcagtgggcacctatcctggcaaattttgtacatattattatcgtcattcttggtttgtttggaactattcaatatagacctcgttacataacaggatatgctgtctggctagtcctctgggttacgtggaatgtgtttgttatctgcttctatttggaggctggggacctctcaaaggaaacagaccttatcctgacttttaatatatcaatgcaccgatcttggtggatggagaatggaccaggatgtacggtgacgtcagtgacacctgccccagactgggccccagaagaccatcgctacatcacggtctcagggtgtttgctggagtaccagtacatagaagtggctcatagttccctccagattgtcctcgcagtaagtgttggcagccaaccgctccttctagtgcctctggggttgttttatttctgtgcgaactcagtgcacacaaatggaatctgtgggtaaagtgtggcctttttgctttttcctcattaatgcgacttttaacaggaaatcctcaggttaaacnaaaccatcctctggacttagtgtgctgattttcttcgacaattagtaaataccctttgttatcatcagcattttacataggaaatccaatcagtcaagatgtgattacgtgacttttggtagacttttccaaggattctgaagggatgatcagagatttttttcataacgttctacagtactcaaaattataagatttccataagtgttttctcttttagtgcttcttttggctgtgctgctagccctgggatttctctttttcatttgccctatctccttcttccttcctagatttctcccaggcaccatccatcacctttaatctcccactttttttccagaaaaaatcacattttctatagattctaattctaagacattcatgcccccatttttcatagtactgtaacaat

SEQ ID NO: 736378 - DNA, 2922 bp, Homo sapiens
ggctggagctgccgccgccgccgccgccgcgccagcaggtcctaatgcctgtcacttcccaggacgctggcagcagcagcagcccggagcccccgagccctcggcaggtttgcgtgtccttccccgcgatctgattggataaagtgggggctcgacggtggccgacgtgggacagtctggctgtggcaggggtctcggaaaccatgggttattgcagtggcaggtgcacgcttatctttatctgtggcatgcaactggtttgtgtgctggagaggcaaatatttgacttccttggatatcagtgggcacctatcctggcaaattttgtacatattattatcgtcattcttggtttgtttggaactattcaatatagacctcgttacataacaggatatgctgtctggctagtcctctgggttacgtggaatgtgtttgttatctgcttctatttggaggctggggacctctcaaaggaaacagaccttatcctgacttttaatatatcaatgcaccgatcttggtggatggagaatggaccaggatgtacggtgacgtcagtgacacctgccccagactgggccccagaagaccatcgctacatcacggtctcagggtgtttgctggagtaccagtacatagaagtggctcatagttccctccagattgtcctcgcactggcaggtttcatctacgcctgttatgttgtgaaatgtataactgaagaagaggacagctttgatttcataggtggctttgactcttatggctatcaagggcctcagaagacatctcatttacaactacagcctatgtacatgtcaaaataatacagatgacttcagtatgtcagcccatggacctttcaaagaacttttttcgcagtggcctcctgcatttcatgaagagcaagaagcaactgagtttaaatacatacacgtattaacaaaacaaatgcaaagcctctacatacaacactgacacacacacacacacacacgtgagcacgcacacaccaattccacttgacctcctctttctaactgaaacagacaaatatgcaggacacgcccatcttggatttcctgaaagcaggcccctttctcccaggccttcggaaagttcagaaggagatgtgttgatgcccaacggttgccggccattgctaactcctctgcagcccagcgggttggcctctgtgagctgggaagtcatccaaggcacattagtttgagagctctgtcttctgcactccatacatcttgacagcaccacggctacttaggcaatgtaattgcaaaaacaaacgaaacatgccatgatgaccttgtacccgaagtccgaaatggcagattgtttgccctaaaggctgtaccgtacatacttgccttaacccacctacattgtgtgcccaagaatcccagtgcagacagccccaagccacttcctttaggctaacacactgctattaattctaaatgagttcaagcctgtgtgtttcatgtcaaggaacaagactgaatagctcagcagctccagtgtgtctgtataagaaaagtgccagctgtcagcaaagtgctttaccatagagcctccatggtggcccaaaagagacaagtaacaataacaatatctgtcatctttataattctaaaatatggtcttctgatggggttgggggtgggacagagtaaaacattaatctactaaactcactaatctactggaagcagaaagcagaaatggcttaactcgctgattttatttattgcactctaggtgcttttataagtatctacaattgtcttttactaacacagaaacagctgtggatttctatcaacagaggccaactgaatatgtattagctatgtttactcttttatatctaattcaaattgaagactctacgtaggtgaacttttttttctaacttcagtgtacaagattatttttgggtgggtggggggagcaatagttaccttggtgaaatatttgagatctttttgtggtatttgggggatctgttgtgtgttagagtgtatttcaaccctcctgtattattgtggcagaaaaactgtgctgttaacgtagttggcaacaagatgcctttggaaacttaatagtaggtcaatgtgtttatggaatattctgaactcctaggaaattttgttctatattttaaagcattatttggttttcattagtggaaaacataattagctcaggcttatcaggaactcagatgagtcatattttttcttggatacacctgagacattaaactcaattttttaaaactaacacaccattctttagtgcagtgaaattcaaaagttataaattggcatggagcaagttttttctttgatttctatgaagtttcagttattggattaaactactttagaccttagcccattcggatctacatacaccagttccattactgtgtttgcatggatgtctgtaatatacacacacatatacatttgaaaatgatagaggaacaaagagttatcattggaacataaactataaaaaaagattccagcactcatgcttgaatttcctcagtgggttgtatgtttgtccatacatacatgtataaaataaacaattgcaaacatgtcagtgaaacctcatatgacgcttttatagtgacatgcatgtttaatgtatgagaaaaatatttaccaatgtattgtcctttgagtcctaaaatataaatactatacatgccagaaactattctaatgtgacttttaatgtgactattaaaaatgaggtttcactgtacattcatgctgtgatgcgatttcaccttatagtacatgtatatgggtacagaaaataaaccctcatattcctgctttaagttacagcaggaatatgagggtttatttgctgtggggtcctcaa

SEQ ID NO: 736379 - DNA, 1865 bp, Homo sapiens
ggctggagctgccgccgccgccgccgccgcgccagcaggtcctaatgcctgtcacttcccaggacgctggcagcagcagcagcccggagcccccgagccctcggcaggtttgcgtgtccttccccgcgatctgattggataaagtgggggctcgacggtggccgacgtgggacagtctggctgtggcaggggtctcggaaaccatgggttattgcagtggcaggtgcacgcttatctttatctgtggcatgcaactggtttgtgtgctggagaggcaaatatttgacttccttggatatcagtgggcacctatcctggcaaattttgtacatattattatcgtcattcttggtttgtttggaactattcaatatagacctcgttacataacaggatatgctgtctggctagtcctctgggttacgtggaatgtgtttgttatctgcttctatttggaggctggggacctctcaaaggaaacagaccttatcctgacttttaatatatcaatgcaccgatcttggtggatggagaatggaccaggatgtacggtgacgtcagtgacacctgccccagactgggccccagaagaccatcgctacatcacggtctcagggtgtttgctggagtaccagtacatagaagtggctcatagttccctccagattgtcctcgcactggcaggtttcatctacgcctgttatgttgtgaaatgtataactgaagaagaggacagctttgatttcataggtggctttgactcttatggctatcaagggcctcagaagacatctcatttacaactacagcctatgtacatgtcaaaataatacagatgacttcagtatgtcagcccatggacctttcaaagaacttttttcgcagtggcctcctgcatttcatgaagagcaagaagcaactgagtttaaatacatacacgtattaacaaaacaaatgcaaagcctctacatacaacactgacacacacacacacacacacgtgagcacgcacacaccaattccacttgacctcctctttctaactgaaacagacaaatatgcaggacacgcccatcttggatttcctgaaagcaggcccctttctcccaggccttcggaaagttcagaaggagatgtgttgatgcccaacggttgccggccattgctaactcctctgcagcccagcgggttggcctctgtgagctgggaagtcatccaaggcacattagtttgagagctctgtcttctgcactccatacatcttgacagcaccacggctacttaggcaatgtaattgcaaaaacaaacgaaacatgccatgatgaccttgtacccgaagtccgaaatggcagattgtttgccctaaaggctgtaccgtacatacttgccttaacccacctacattgtgtgcccaagaatcccagtgcagacagccccaagccacttcctttaggctaacacactgctattaattctaaatgagttcaagcctgtgtgtttcatgtcaaggaacaagactgaatagctcagcagctccagtgtgtctgtataagaaaagtgccagctgtcagcaaagtgctttaccatagagcctccatggtggcccaaaagagacaagtaacaataacaatatctgtcatctttataattctaaaatatggtcttctgatggggttgggggtgggacagagtaaaacattaatctactaaactcactaatctactggaagcagaaagcagaaatggcttaactcgctgattttatttattgcactctaggtgcttttataagtatctacaattgtcttttactaacacagaaacagacaattgtagatacttataatcccagggaattccggacc

SEQ ID NO: 736380 - DNA, 582 bp, Homo sapiens
  misc_feature (519)..(519): n is a, c, g, or t
ggctggagctgccgccgccgccgccgccgcgccagcaggtcctaatgcctgtcacttcccaggacgctggcagcagcagcagcccggagcccccgagccctcggcaggtttgcgtgtccttccccgcgatctgattggataaagtgggggctcgacggtggccgacgtgggacagtctggctgtggcaggggtctcggaaaccatgggttattgcagtggcaggtgcacgcttatctttatctgtggcatgcaactgagatggtgaatacttttttaaaaagaaagaggataagcagaaaaggaagaaaatgacctacatattaatgaagtctgtacattcatcaggaagaattttcatgtcccaaataaagtctgtgattgattggtcatctttaaatcctaaaacatccgaagaactggaagatcctgaagagttatttagttctaaatataaagtgctttaaagacaaattgagaaagacataggcttttaacaaaagggaaaataaacactttgngatcggccggcaaaccatactctctcaaccacgttatccaccgcccccgagcgcgagcgccac

SEQ ID NO: 736381 - DNA, 574 bp, Homo sapiens
ggctggagctgccgccgccgccgccgccgcgccagcaggtcctaatgcctgtcacttcccaggacgctggcagcagcagcagcccggagcccccgagccctcggcaggtttgcgtgtccttccccgcgatctgattggataaagtgggggctcgacggtggccgacgtgggacagtctggctgtggcaggggtctcggaaaccatgggttattgcagtggcaggtgcacgcttatctttatctgtggcatgcaactgagatggtgaatacttttttaaaaagaaagaggataagcagaaaaggaagaaaatgacctacatattaatgaagtctgtacattcatcaggaagaattttcatgtcccaaataaagtctgtgattgattggtcatctttaaatcctaaaacatccgaagaactggaagatcctgaagagttatttagttctaaatataaagtgctttaaagacaaattgagaaagacataggcttttaacaaaagggaaaataaacactttggcagcggccagatggcaattagcacgtctgtgggaaaagaacgcgggtgggggaca

SEQ ID NO: 736382 - DNA, 3303 bp, Homo sapiens
ggctggagctgccgccgccgccgccgccgcgccagcaggtcctaatgcctgtcacttcccaggacgctggcagcagcagcagcccggagcccccgagccctcggcaggtttgcgtgtccttccccgcgatctgattggataaagtgggggctcgacggtggccgacgtgggacagtctggctgtggcaggggtctcggaaaccatgggttattgcagtggcaggtgcacgcttatctttatctgtggcatgcaactggtactgaagatggatggggatcattaggtttctcttattatattgtcccacaaatatcttaaccgtttgtgtgctggagaggcaaatatttgacttccttggatatcagtgggcacctatcctggcaaattttgtacatattattatcgtcattcttggtttgtttggaactattcaatatagacctcgttacataacaggatatgctgtctggctagtcctctgggttacgtggaatgtgtttgttatctgcttctatttggaggctggggacctctcaaaggaaacagaccttatcctgacttttaatatatcaatgcaccgatcttggtggatggagaatggaccaggatgtacggtgacgtcagtgacacctgccccagactgggccccagaagaccatcgctacatcacggtctcagggtgtttgctggagtaccagtacatagaagtggctcatagttccctccagattgtcctcgcactggcaggtttcatctacgcctgttatgttgtgaaatgtataactgaagaagaggacagctttgatttcataggtggctttgactcttatggctatcaagggcctcagaagacatctcatttacaactacagcctatgtacatgtcaaaataatacagatgacttcagtatgtcagcccatggacctttcaaagaacttttttcgcagtggcctcctgcatttcatgaagagcaagaagcaactgagtttaaatacatacacgtattaacaaaacaaatgcaaagcctctacatacaacactgacacacacacacacacacacgtgagcacgcacacaccaattccacttgacctcctctttctaactgaaacagacaaatatgcaggacacgcccatcttggatttcctgaaagcaggcccctttctcccaggccttcggaaagttcagaaggagatgtgttgatgcccaacggttgccggccattgctaactcctctgcagcccagcgggttggcctctgtgagctgggaagtcatccaaggcacattagtttgagagctctgtcttctgcactccatacatcttgacagcaccacggctacttaggcaatgtaattgcaaaaacaaacgaaacatgccatgatgaccttgtacccgaagtccgaaatggcagattgtttgccctaaaggctgtaccgtacatacttgccttaacccacctacattgtgtgcccaagaatcccagtgcagacagccccaagccacttcctttaggctaacacactgctattaattctaaatgagttcaagcctgtgtgtttcatgtcaaggaacaagactgaatagctcagcagctccagtgtgtctgtataagaaaagtgccagctgtcagcaaagtgctttaccatagagcctccatggtggcccaaaagagacaagtaacaataacaatatctgtcatctttataattctaaaatatggtcttctgatggggttgggggtgggacagagtaaaacattaatctactaaactcactaatctactggaagcagaaagcagaaatggcttaactcgctgattttatttattgcactctaggtgcttttataagtatctacaattgtcttttactaacacagaaacagctgtggatttctatcaacagaggccaactgaatatgtattagctatgtttactcttttatatctaattcaaattgaagactctacgtaggtgaacttttttttctaacttcagtgtacaagattatttttgggtgggtggggggagcaatagttaccttggtgaaatatttgagatctttttgtggtatttgggggatctgttgtgtgttagagtgtatttcaaccctcctgtattattgtggcagaaaaactgtgctgttaacgtagttggcaacaagatgcctttggaaacttaatagtaggtcaatgtgtttatggaatattctgaactcctaggaaattttgttctatattttaaagcattatttggttttcattagtggaaaacataattagctcaggcttatcaggaactcagatgagtcatattttttcttggatacacctgagacattaaactcaattttttaaaactaacacaccattctttagtgcagtgaaattcaaaagttataaattggcatggagcaagttttttctttgatttctatgaagtttcagttattggattaaactactttagaccttagcccattcggatctacatacaccagttccattactgtgtttgcatggatgtctgtaatatacacacacatatacatttgaaaatgatagaggaacaaagagttatcattggaacataaactataaaaaaagattccagcactcatgcttgaatttcctcagtgggttgtatgtttgtccatacatacatgtataaaataaacaattgcaaacatgtcagtgaaacctcatatgacgcttttatagtgacatgcatgtttaatgtatgagaaaaatatttaccaatgtattgtcctttgagtcctaaaatataaatactatacatgccagaaactattctaatgtgacttttaatgtgactattaaaaatgaggtttcactgtacattcatgctgtgatgcgatttcaccttatagtacatgtatatgggtacagaaaataaaccctcatattcctgctttaagttacagccaagttttcaccaaatcacaactatcatcaccaccaaaattttaaaaaacagtagttgactactaaaaagtaatcagtggacaggtcatttatgggatcagtaagcacagtagtgtgattatatctgggaaaacatctacagttgtacagctgtatcctcctcaaaatccggtgaagaatgctatttttctaggctgagcttttgttataaacttaatattcagaaggcaagggttatgatcctgatgtgtcctttttttttgcatttgttaattctgaatgtatttttaacagaatgatttttttgacttactagtgtaatttgcattttaaaaataaatggaaaaatactt

SEQ ID NO: 736383 - DNA, 359 bp, Homo sapiens
  misc_feature (296)..(296): n is a, c, g, or t
cggggaatttgaggccaaaacgctgtgtgattctagatggtgaatacttttttaaaaagaaagaggataagcagaaaaggaagaaaatgacctacatattaatgaagtctgtacattcatcaggaagaattttcatgtcccaaataaagtctgtgattgattggtcatctttaaatcctaaaacatccgaagaactggaagatcctgaagagttatttagttctaaatataaagtgctttaaagacaaattgagaaagacataggcttttaacaaaagggaaaataaacactttgngatcggccggcaaaccatactctctcaaccacgttatccaccgcccccgagcgcgagcgccac

SEQ ID NO: 736384 - DNA, 369 bp, Homo sapiens
  misc_feature (39)..(39): n is a, c, g, or t
  misc_feature (306)..(306): n is a, c, g, or t
tatccacccacaccatccctacacaccacaaaaacctcnaaactagatggtgaatacttttttaaaaagaaagaggataagcagaaaaggaagaaaatgacctacatattaatgaagtctgtacattcatcaggaagaattttcatgtcccaaataaagtctgtgattgattggtcatctttaaatcctaaaacatccgaagaactggaagatcctgaagagttatttagttctaaatataaagtgctttaaagacaaattgagaaagacataggcttttaacaaaagggaaaataaacactttgngatcggccggcaaaccatactctctcaaccacgttatccaccgcccccgagcgcgagcgccac

SEQ ID NO: 736385 - DNA, 376 bp, Homo sapiens
  misc_feature (39)..(39): n is a, c, g, or t
  misc_feature (313)..(313): n is a, c, g, or t
ccagtgttccgcgcggcgagcagcacggggacagggggngggggggtcaggagatggtgaatacttttttaaaaagaaagaggataagcagaaaaggaagaaaatgacctacatattaatgaagtctgtacattcatcaggaagaattttcatgtcccaaataaagtctgtgattgattggtcatctttaaatcctaaaacatccgaagaactggaagatcctgaagagttatttagttctaaatataaagtgctttaaagacaaattgagaaagacataggcttttaacaaaagggaaaataaacactttgngatcggccggcaaaccatactctctcaaccacgttatccaccgcccccgagcgcgagcgccac

SEQ ID NO: 736386 - DNA, 359 bp, Homo sapiens
  misc_feature (26)..(26): n is a, c, g, or t
  misc_feature (296)..(296): n is a, c, g, or t
atactcttacattagaattaaaacanacgttgacagatggtgaatacttttttaaaaagaaagaggataagcagaaaaggaagaaaatgacctacatattaatgaagtctgtacattcatcaggaagaattttcatgtcccaaataaagtctgtgattgattggtcatctttaaatcctaaaacatccgaagaactggaagatcctgaagagttatttagttctaaatataaagtgctttaaagacaaattgagaaagacataggcttttaacaaaagggaaaataaacactttgngatcggccggcaaaccatactctctcaaccacgttatccaccgcccccgagcgcgagcgccac

SEQ ID NO: 736387 - DNA, 372 bp, Homo sapiens
  misc_feature (309)..(309): n is a, c, g, or t
tcgatataaatgagtttagatcattaagcacgcgccaccccgcttacagatggtgaatacttttttaaaaagaaagaggataagcagaaaaggaagaaaatgacctacatattaatgaagtctgtacattcatcaggaagaattttcatgtcccaaataaagtctgtgattgattggtcatctttaaatcctaaaacatccgaagaactggaagatcctgaagagttatttagttctaaatataaagtgctttaaagacaaattgagaaagacataggcttttaacaaaagggaaaataaacactttgngatcggccggcaaaccatactctctcaaccacgttatccaccgcccccgagcgcgagcgccac

SEQ ID NO: 736388 - DNA, 716 bp, Homo sapiens
cggcacgagctcgtgccgaatcggcacgagggggggtggctcagggggcaagggcaaaggaggttgcccggctgtgcggctgaaagcacgttaccagacaatgagcatcttgcccatggagctatataaagagtttgcagagtatgtcaccaaccattatcggatgctgtgtgcagtcttggagcccgccctgaatgtcaaaggcaaggaggaggttgccagtgcactagttcacatcctgcagagtacaggcaaggccaaggacttcctttcagacatggccatgtctgaggtagaccggttcatggaacgggagcacctcatattccgcgagaacacgcttgccactaaagccatagaagagtatatgagactgattggtcagaaatacctcaaggatgccattggagaattcatccgtgctctgtatgaatctgaggaaaactgcgaggtagaccctatcaagtgcacagcatccagtttggcagagcaccaggccaacctgcgaatgtgctgtgagttggccctgtgcaaggtggtcaactcccactggtgagactgggaacgctgggctggggggccagggtcgggggaattatgtgttcatctgttcatctatctgtccatcctcaaagaggactgagcaccatttatgggcaaagcattgttctaggcgctatagagcaaacaggtgaaagaggcctggtccctgccct

SEQ ID NO: 736389 - DNA, 992 bp, Homo sapiens
ggtccggatttcgggaatcgtcgaccccgcgtccggcctggcagatgtggaaactcaaatttctcgtcccactccaggttttggctagccaaccctgcaggaaagtggtttataggccattcatacttaagttgatcacttgcccatggtggacatttttgtggtggtgatgtccattaaggaaaccagattttcaattatttagtgagagaagagttagagcaaaagacagtggtaaatgttttattccgtctccatgaggaattgaaggagttggtctccacctagagatacatttgatttacagcttaagtaattcagaggctaagctctaagcttttttctctcattgctggaatgatttaagcagaagtccttttgtgtacttttaaaattgtatctttccaggagcccctcagattgtaccttgctttctcaccaatagacaccttcccgacacttttttaatgttgtagctgagcactttaacaagttgagcattccatgtttcattcttagaaccttctttaatagagggtcttccctcaacagcctgtgcctctggtctacctttgaccaccactgataactaatatattggtcacaatgactggaatgtgactagtgatctcaggagatggcactgtcctaaagtgctgtcagggtggcaccactgctctctgaacaacttaccttggtcagagggactcaggtttgggacagcacaagctgaaggctggagagtaacttgcatagtaggaccatacctcttcctttcccatcccacccacatatgatagacagcccctctgttgagatatggaggggacagatactggaatcgggggtggggcctcgttctctcacaccccactccatcatctccacccctctaaccatataccaccactccctcttacccttcccagccccactctatctctcacccttcatcttctcacaaccattccacttctctatcctctcacccg

SEQ ID NO: 736390 - DNA, 9847 bp, Homo sapiens
  misc_feature (6073)..(6073): n is a, c, g, or t
aggcctgatgagcaggtctcgagcctccatccatcgggggagcatccccgcgatgtcctatgcccccttcagagatgtacggggaccctctatgcaccgaacccaatacgttcattccccgtatgatcgtcctggttggaaccctcggttctgcatcatctcggggaaccagctgctcatgctggatgaggatgagatacaccccctactgatccgggaccggaggagcgagtccagtcgcaacaaactgctgagacgcacagtctccgtgccggtggaggggcggccccacggcgagcatgaataccacttgggtcgctcgaggaggaagagtgtcccaggggggaagcagtacagcatggagggtgcccctgctgcgcccttccggccctcgcaaggcttcctgagccgacggctaaaaagctccatcaaacgaacgaagtcacaacccaaacttgaccggaccagcagctttcgccagatcctgcctcgcttccgaagtgctgaccatgaccgggcccggctgatgcaaagctttaaggagtcacactctcatgagtccttgctgagtcctagcagtgcagctgaggcattggagctcaacttggatgaagattccattatcaagccagtgcacagctccatcctgggccaggagttctgttttgaggtaacaacttcatcaggaacaaaatgctttgcctgtcggtctgcggccgaaagagacaaatggattgagaatctgcagcgggcagtaaagcccaacaaggacaacagccgccgggtagacaatgtgctaaagctgtggatcatagaggcccgggagctgccccccaagaagcggtactactgtgagctctgcctggatgacatgctgtatgcacgcaccacctccaagccccgctctgcctctggggacaccgtcttctggggcgagcacttcgagtttaacaacctgccggctgtccgtgccctgcggctgcatctgtaccgtgactcagacaaaaagcgcaagaaggacaaggcaggctatgtcggcctggtgactgtgccagtggccaccctggctgggcgccacttcacagagcagtggtaccctgtaaccctgccaacaggcagtgggggatctgggggcatgggttcgggagggggagggggctcggggggtggctcagggggcaagggcaaaggaggttgcccggctgtgcggctgaaagcacgttaccagacaatgagcatcttgcccatggagctatataaagagtttgcagagtatgtcaccaaccattatcggatgctgtgtgcagtcttggagcccgccctgaatgtcaaaggcaaggaggaggttgccagtgcactagttcacatcctgcagagtacaggcaaggccaaggacttcctttcagacatggccatgtctgaggtagaccggttcatggaacgggagcacctcatattccgcgagaacacgcttgccactaaagccatagaagagtatatgagactgattggtcagaaatacctcaaggatgccattggagaattcatccgtgctctgtatgaatctgaggaaaactgcgaggtagaccctatcaagtgcacagcatccagtttggcagagcaccaggccaacctgcgaatgtgctgtgagttggccctgtgcaaggtggtcaactcccactgcgtgttcccgagggagctgaaggaggtgtttgcttcgtggcggctgcgctgcgcagagcgaggccgggaggacatcgcagacaggcttatcagcgcctcactcttcctgcgcttcctctgcccagcgattatgtcgcccagtctctttgggcttatgcaggagtacccagatgagcagacctcacgaaccctcaccctcattgccaaggtcatccagaacctggccaacttttccaagtttacctcaaaggaggactttctgggcttcatgaatgagtttctggagctggaatggggttccatgcagcagtttttgtatgagatctccaatctggacacgctaaccaacagcagtagctttgagggttacatcgacttgggccgagagctctccacactgcatgccctactctgggaggtgctgccccagctcagcaaggtcagcagatcccctctttgccctatccccagatggctccagaggttcctggagcctgagaaactaccctttgaagattttttttctccccttgtttctcgaggtgtcaccactactatcccaactcaggccccctccacctgcaccctcagaggccctcttagagctgggcactgagcccccaggtaacagcctcacccttccaggaagccctcctgaagctgggtccactgccccggctcctcaacgacatcagcacagctctgaggaaccccaacatccaaaggcagccaagccgccagagtgagcggccccggcctcagcctgtggtactgcgggggccatcggctgagatgcagggctacatgatgcgggacctcaacagctctatggacatggctcgcctcccctccccaaccaaggaaaagccacccccaccaccgcctggtggtggtaaagacctgttctatgtaagccgtccacccctggcccgttcctcaccagcatactgcacgagcagctcggacatcacagagccagagcagaagatgctgagtgtcaacaagagtgtgtccatgctggacttacagggtgatgggcctggtggccgcctcaacagcagcagtgtttcgaacctggcggccgtaggggacctgctgcactcaagccaggcctcgctgacagcagccttggggctacggcctgcgcctgccggacgcctctcccaggggagtggctcatccatcacggcggctggcatgcgcctcagccagatgggtgtcaccacagacggtgtccctgcccagcaactgcgaatccccctctccttccagaaccctctcttccacatggctgctgatgggccaggtcccccaggcggccatggagggggcggtggccatggcccaccttcctcccatcaccaccaccaccaccatcaccaccaccgaggtggagagccccctggggacacctttgccccattccatggctatagcaagagtgaggacctctcttccggggtccccaagccccctgctgcctccatccttcatagccacagctacagtgatgagtttggaccctctggcactgacttcacccgtcggcagctttcactccaggacaacctgcagcacatgctgtcccctccccagatcaccattggtccccagaggccagccccctcagggcctggaggtgggagcggtgggggcagcggtgggggtggcgggggccagccgcctccattgcagaggggcaagtctcagcagttgacagtcagcgcagcccagaaaccccggccatccagcgggaatctattgcagtccccagagccaagttatggccccgcccgtccacggcaacagagcctcagcaaggagggcagcattgggggcagcgggggcagcggtggcggagggggtggggggctgaagccctccatcaccaagcagcattctcagacaccatccacattgaaccccacaatgccagcctctgagcggacagtggcctgggtctccaacatgcctcacctgtcggctgacatcgagagtgcccacatcgagcgggaagagtacaagctcaaggagtactcaaaatcgatggatgagagccggctggatagggtgaaggagtacgaggaggagattcactcactgaaagagcggctgcacatgtccaaccggaagctggaagagtatgagcggaggctgctgtcccaggaagaacaaaccagcaaaatcctgatgcagtatcaggcccgactggagcagagtgagaagaggctaaggcagcagcaggcagagaaggattcccagatcaagagcatcattggcaggctgatgctggtggaggaggagctgcgccgggaccaccccgccatggctgagccgctgccagaacccaagaagaggctgctcgacgctcaggagaggcagcttccccccttgggtccaacaaacccgcgtgtgacgctggccccaccgtggaatggcctggcccccccagccccaccacccccaccccggctgcagattacggagaacggcgagttccgaaacaccgcagaccactagcccacccagcatcagagaccttctcttcctttcctgtgcaccccaccctgtaacagcaccaaccaccaggattggacatcaccgaggaacagcgggattgcctccccgaatgcctccctgggaggcacactgattgcccacccccaccactgcaccatttccaggagggagagtggggaccctcagccgcccccttttccttcccattggggtgctgccctctctttgacccccagggacccttgccccaggacaccgcctaccccgtacagaccccttcactccggggtgctatccccatcctctgcctcatcgttcccctgagcactgggggacagaccctcacccccaccctgggggtgtggcacctccaaactttcaacttcagggtgatttttttagcagtaaccagagctgacaatctaactcccctccaccgccccattttggcctcccctgccccccttgttatggggaggggaccccgggtgagggggccctattaccccttgatttctcaggagcgtctgggggggctcagcacgcacaaactccttctccttctaccactcttaaatttactccctccccacccagaacccagatggggtggagggggccaccggggcagggagggggcggcaaggggggaatgggagttgtctccccttctccccacacctgatctgctctcggctggtcccagagcggggtgagggggcttatgcccccccctcccccagtgtgttgggtggggtggaattgaggttagggtgaggggtcagggtttaggagggtgtgtatgttgggaggacaggctagttgatctgtcctactctgacacacagtcccctctgccccttccttctctcttcttggtctctactcccagggggaggggggaacttactctaggaaaagccatgtctctctcccccagggtggggggacctgtgttggaggaggggtgttggggggcccccttccatgactctgtcccctgggggaggtaggacagggctgggcttccctctcatcctccccctcccaatctccttccacctccctccctcccgccagctccacgatttttcggtgtttctctgtacatagttttctggcgggataggggaggtaggatggatggggtttggggtgggtaggccatgggaggggagaagcccctccttggcaccccctcttccctgactgctgtcccctacccagccttgcccccttcatccttttgcgtttggtattgagactctcctagactctactcctctttcttttgtatggacagttccccttcagtcccatccccctacacatacacccagccggggccaaatttatacttatataaaagttgtaaatatgtgaaattttatccctgtgccctttccccacctcaggccctacccctggaccctccccaaccttccttctctcttctttggctgttgtaattatctggggtttgtactgtacatatccggggtgtgtgtgtgtgggctgggggcaacccttctgtacagagcttcctggccccctccccccccgcccctctgcttccctccccacccaccacctcaagggtagggagttgctcttcctacctgttttattttgttttctcgttctccctccccaccccactcccagccttatctatcccccctcactgtccccttttctccactcccagccccatttcctttttttctggagtgtgtggtgaaacagaaaaaaacatgtttaataaacggagattgttcttttatcgctgtgccgactttcttaggcagggctctccagacctgtacggtggtaagatctgctttctgaaaggaagctgacagcctgagangaaaaccgtatatccccacctgatgccacactctcctcatagaatgtcactctcccctcccaatgagattttttatattttagagcaggagttttgcaccggccaaacttctccaatctaactctcccctcaccactgtgtcacttagtccgaggccaggaacagcggcgttatctgataaaagagttcatgtatatatccacatttatctcttttaaaaattacctagaaataaggtttctttaattgctggttaaaatgctcccgtgcagaaaacaggaaagaacctgcctggttccttagcaaatctgagttccagtcccaggtccactactattagctgagtgacgcttccagcccgtttcccccgcctggaaactgaggacggcaacccccaccctcgcagggccggtgggaagacacaaagtgatgtgggcaagtgccaggcccacatggtaagtacccaactaatctcgcccctctcaggacctaccgggggcgggtgctacacttaatcaccgggaaacgcagctttccggggcggctgacggcccaccccctccgaccgggctgttctctcccgggccctgcctctcggtcctctgcagcggggaggacttcagcagctccccgggacgcccgttgcgaggacaccctgggcctgtgccctcctactagcaccgccctcctcgtctgcagtagccaatcaacacgaggcttgtaggctgccgttcctcgattggctacggctctagctccgcccgccgcacttggcgacggtgtccggcggggaggcggcggcttccggtctgggacggagctgtagcggcactgtaactgcgagggcagcgccgcgtgtgtaacggcgggggcgtgtcggcgggaaggacaatcgggccgggactcgcggtgtccgggtgaccgcggcttcccgggagcagacctctgtgggcactgtgaggcggaacggagcggcggggcaggagctgttgtgggcaggtgaaggcaggctggtggctgaaggacctccttcttatcttccacaggggctggaagttaaaacccctgttggtgtttagtggtggtggttgttgttgtttgtttttgctttcttggtgtgcgggactgatttgcagaaaccgccactgacttaaaagtttccagttattgctcgtggggagggggttgtttgagaagatgtggctccctttatccagggcttctgtgacctccatctttttcctctgcagccttcatcccgcgtggagtctacccccaagcccttctcctcttcccaattcttgtcaccttcgaggaggccatggaaaccccaacacctttgccgcctgtacccgcctccccgacctgcaacccagccccacggacaatccagatcgagttcccacagcatagctcgtcgctgctggaatctctgaaccgccacaggctagagggaaagttctgtgatgtgtccctcctggtgcagggccgggaacttagggctcataaagcagtgttagctgctgcctctccttacttccatgacaagctgcttctgggggatgcgcctcgtctcactctaccgagtgtcattgaagccgatgccttcgaggggctgctccagctcatttattcagggcgtctccgcctgccactggatgctcttcctgctcatctccttgtggccagtggccttcaaatgtggcaggtagtagatcagtgctcagaaattcttagagaattagaaacttcaggtggtggaatttcagcccgtggaggaaactcctaccatgcccttctttccactacatcctctacaggaggctggtgcattcgctcttcgcctttccagaccccagtacagtcctctgcttctactgaaagccctgcttccactgagagccctgtgggaggggagggaagtgaactgggagaagtgctgcaaattcaggtggaagaagaagaggaggaggaggaagatgatgatgatgaggaccaggggtcagccacactctctcagactcctcagccccagagagtatcaggggtttttccccgtcctcatggaccccacccactgcccatgactgctactccccgaaagcttccagagggtgagagtgcaccacttgagcttcctgcccctcctgcactgccccccaaaatcttctacattaagcaggaacccttcgagcctaaggaggagatatcaggaagcggaactcagcctggaggagcaaaggaggaaaccaaagtgttttctggaggggacactgaagggaatggggagctagggttcttgttgccttcagggccagggccaacatctgggggagggggtccatcctggaaaccagtggatcttcatgggaatgaaatcctgtcagggggtggaggacctgggggagcaggccaggccgtgcatgggcctgtgaagctaggggggacaccccctgcagatggaaaacgctttggttgcctgtgtgggaagcggtttgcagtgaagccaaagcgtgaccggcacatcatgctgaccttcagccttcggccttttggctgtggcatctgcaacaagcgcttcaagctgaagcaccatctgacagagcacatgaagacccatgctggagccctgcatgcctgtccccactgtggccgtcggttccgagtccatgcctgttttctccgccaccgggacctatgcaagggccagggctgggccactgcccactggacttacaagtgactgctgaggctatacactagcttctagaacaagataaccactgctgctgatggatacttttccctcactgccatggcacaccagtcatggatcttgtaatcatgccaagagaatagatacattatggacctcttgttcttagatatgggcctctcagcctggcagatgtggaaactcaaatttctcgtcccactccaggttttggctagccaaccctgcaggaaagtggtttataggccattcatacttaagttgatcacttgcccatggtggacatttttgtggtggtgatgtccattaaggaaaccagattttcaattatttagtgagagaagagttagagcaaaagacagtggtaaatgttttattccgtctccatgaggaattgaaggagttggtctccacctagagatacatttgatttacagcttaagtaattcagaggctaagctctaagcttttttctctcattgctggaatgatttaagcagaagtccttttgtgtacttttaaaattgtatctttccaggagcccctcagattgtaccttgctttctcaccaatagacaccttcccgacacttttttaatgttgtagctgagcactttaacaagttgagcattccatgtttcattcttagaaccttctttaatagagggtcttccctcaacagcctgtgcctctggtctacctttgaccaccactgataactaatatattggtcacaatgactggaatgtgactagtgatctcaggagatggcactgtcctaaagtgctgtcagggtggcaccactgctctctgaacaacttaccttggtcagagggactcaggtttgggacagcacaagctgaaggctggagagtaacttgcatagtaggaccatacctcttcctttcccatcccacccacatatgatagacagcccctctgttgagatatggaggggacagatactggaatcgggggtgggacttgcagttacttaaaattttttaataaactgtgccctgaaacctaaaaaaacagtg

SEQ ID NO: 736391 - DNA, 4651 bp, Homo sapiens
aggcctgatgagcaggtctcgagcctccatccatcgggggagcatccccgcgatgtcctatgcccccttcagagatgtacggggaccctctatgcaccgaacccaatacgttcattccccgtatgatcgtcctggttggaaccctcggttctgcatcatctcggggaaccagctgctcatgctggatgaggatgagatacaccccctactgatccgggaccggaggagcgagtccagtcgcaacaaactgctgagacgcacagtctccgtgccggtggaggggcggccccacggcgagcatgaataccacttgggtcgctcgaggaggaagagtgtcccaggggggaagcagtacagcatggagggtgcccctgctgcgcccttccggccctcgcaaggcttcctgagccgacggctaaaaagctccatcaaacgaacgaagtcacaacccaaacttgaccggaccagcagctttcgccagatcctgcctcgcttccgaagtgctgaccatgaccgggcccggctgatgcaaagctttaaggagtcacactctcatgagtccttgctgagtcctagcagtgcagctgaggcattggagctcaacttggatgaagattccattatcaagccagtgcacagctccatcctgggccaggagttctgttttgaggtaacaacttcatcaggaacaaaatgctttgcctgtcggtctgcggccgaaagagacaaatggattgagaatctgcagcgggcagtaaagcccaacaaggacaacagccgccgggtagacaatgtgctaaagctgtggatcatagaggcccgggagctgccccccaagaagcggtactactgtgagctctgcctggatgacatgctgtatgcacgcaccacctccaagccccgctctgcctctggggacaccgtcttctggggcgagcacttcgagtttaacaacctgccggctgtccgtgccctgcggctgcatctgtaccgtgactcagacaaaaagcgcaagaaggacaaggcaggctatgtcggcctggtgactgtgccagtggccaccctggctgggcgccacttcacagagcagtggtaccctgtaaccctgccaacaggcagtgggggatctgggggcatgggttcgggagggggagggggctcggggggtggctcagggggcaagggcaaaggaggttgcccggctgtgcggctgaaagcacgttaccagacaatgagcatcttgcccatggagctatataaagagtttgcagagtatgtcaccaaccattatcggatgctgtgtgcagtcttggagcccgccctgaatgtcaaaggcaaggaggaggttgccagtgcactagttcacatcctgcagagtacaggcaaggccaaggacttcctttcagacatggccatgtctgaggtagaccggttcatggaacgggagcacctcatattccgcgagaacacgcttgccactaaagccatagaagagtatatgagactgattggtcagaaatacctcaaggatgccattggagaattcatccgtgctctgtatgaatctgaggaaaactgcgaggtagaccctatcaagtgcacagcatccagtttggcagagcaccaggccaacctgcgaatgtgctgtgagttggccctgtgcaaggtggtcaactcccactgcgtgttcccgagggagctgaaggaggtgtttgcttcgtggcggctgcgctgcgcagagcgaggccgggaggacatcgcagacaggcttatcagcgcctcactcttcctgcgcttcctctgcccagcgattatgtcgcccagtctctttgggcttatgcaggagtacccagatgagcagacctcacgaaccctcaccctcattgccaaggtcatccagaacctggccaacttttccaagtttacctcaaaggaggactttctgggcttcatgaatgagtttctggagctggaatggggttccatgcagcagtttttgtatgagatctccaatctggacacgctaaccaacagcagtagctttgagggttacatcgacttgggccgagagctctccacactgcatgccctactctgggaggtgctgccccagctcagcaaggaagccctcctgaagctgggtccactgccccggctcctcaacgacatcagcacagctctgaggaaccccaacatccaaaggcagccaagccgccagagtgagcggccccggcctcagcctgtggtactgcgggggccatcggctgagatgcagggctacatgatgcgggacctcaacagctccatcgaccttcagtccttcatggctcgaggcctcaacagctctatggacatggctcgcctcccctccccaaccaaggaaaagccacccccaccaccgcctggtggtggtaaagacctgttctatgtaagccgtccacccctggcccgttcctcaccagcatactgcacgagcagctcggacatcacagagccagagcagaagatgctgagtgtcaacaagagtgtgtccatgctggacttacagggtgatgggcctggtggccgcctcaacagcagcagtgtttcgaacctggcggccgtaggggacctgctgcactcaagccaggcctcgctgacagcagccttggggctacggcctgcgcctgccggacgcctctcccaggggagtggctcatccatcacggcggctggcatgcgcctcagccagatgggtgtcaccacagacggtgtccctgcccagcaactgcgaatccccctctccttccagaaccctctcttccacatggctgctgatgggccaggtcccccaggcggccatggagggggcggtggccatggcccaccttcctcccatcaccaccaccaccaccatcaccaccaccgaggtggagagccccctggggacacctttgccccattccatggctatagcaagagtgaggacctctcttccggggtccccaagccccctgctgcctccatccttcatagccacagctacagtgatgagtttggaccctctggcactgacttcacccgtcggcagctttcactccaggacaacctgcagcacatgctgtcccctccccagatcaccattggtccccagaggccagccccctcagggcctggaggtgggagcggtgggggcagcggtgggggtggcgggggccagccgcctccattgcagaggggcaagtctcagcagttgacagtcagcgcagcccagaaaccccggccatccagcgggaatctattgcagtccccagagccaagttatggccccgcccgtccacggcaacagagcctcagcaaggagggcagcattgggggcagcgggggcagcggtggcggagggggtggggggctgaagccctccatcaccaagcagcattctcagacaccatccacattgaaccccacaatgccagcctctgagcggacagtggcctgggtctccaacatgcctcacctgtcggctgacatcgagagtgcccacatcgagcgggaagagtacaagctcaaggagtactcaaaatcgatggatgagagccggctggatagggtgaaggagtacgaggaggagattcactcactgaaagagcggctgcacatgtccaaccggaagctggaagagtatgagcggaggctgctgtcccaggaagaacaaaccagcaaaatcctgatgcagtatcaggcccgactggagcagagtgagaagaggctaaggcagcagcaggcagagaaggattcccagatcaagagcatcattggcaggctgatgctggtggaggaggagctgcgccgggaccaccccgccatggctgagccgctgccagaacccaagaagaggctgctcgacgctcaggtggaaattacaatgtcatttatcttctccgtgtcccatccccatccatcccactgtctttcgtgcactcactacaccagccacctagccccatcaccatctgtctctcatagtctgctgtttgtccactggctgctcctggcagccccctagtgaccccatcttcatcccatcgtctgtgcctttgtcactcctggcagcgtcagcccaactcctgtgccttcccatccagtcttcccactcctctctgcatctcaggaccttctctaccagaaccttggtctttctgcccctagaccccacctagttccaagaacccctgccccttctttgctcactcctattcaagccacgttgttcagcttcctctgcgctcttgggccagagggctagaagctgccgttttctggaatagagcacagggcagtatgatctgtagtttctccaggccctggccggtaccctgaaaacttggggacccatcacctctgttctcttggctccctaattttcctgtctccttggcagctcctgcatagcttcctcttcctgactcttcagatcttgaaggccttccatcctgtaacctccctttgccctcagtatttaagtccagcctccctctggcctccctcccactctggccctcagaccttcccagctgcctgctgcccagcctctcttctcacaagccagcttctaggacctcccttctgcacccttaccccttgctttcccaaaattctgctcattttccta

SEQ ID NO: 736392 - DNA, 4653 bp, Homo sapiens
aggcctgatgagcaggtctcgagcctccatccatcgggggagcatccccgcgatgtcctatgcccccttcagagatgtacggggaccctctatgcaccgaacccaatacgttcattccccgtatgatcgtcctggttggaaccctcggttctgcatcatctcggggaaccagctgctcatgctggatgaggatgagatacaccccctactgatccgggaccggaggagcgagtccagtcgcaacaaactgctgagacgcacagtctccgtgccggtggaggggcggccccacggcgagcatgaataccacttgggtcgctcgaggaggaagagtgtcccaggggggaagcagtacagcatggagggtgcccctgctgcgcccttccggccctcgcaaggcttcctgagccgacggctaaaaagctccatcaaacgaacgaagtcacaacccaaacttgaccggaccagcagctttcgccagatcctgcctcgcttccgaagtgctgaccatgaccgggcccggctgatgcaaagctttaaggagtcacactctcatgagtccttgctgagtcctagcagtgcagctgaggcattggagctcaacttggatgaagattccattatcaagccagtgcacagctccatcctgggccaggagttctgttttgaggtaacaacttcatcaggaacaaaatgctttgcctgtcggtctgcggccgaaagagacaaatggattgagaatctgcagcgggcagtaaagcccaacaaggacaacagccgccgggtagacaatgtgctaaagctgtggatcatagaggcccgggagctgccccccaagaagcggtactactgtgagctctgcctggatgacatgctgtatgcacgcaccacctccaagccccgctctgcctctggggacaccgtcttctggggcgagcacttcgagtttaacaacctgccggctgtccgtgccctgcggctgcatctgtaccgtgactcagacaaaaagcgcaagaaggacaaggcaggctatgtcggcctggtgactgtgccagtggccaccctggctgggcgccacttcacagagcagtggtaccctgtaaccctgccaacaggcagtgggggatctgggggcatgggttcgggagggggagggggctcggggggtggctcagggggcaagggcaaaggaggttgcccggctgtgcggctgaaagcacgttaccagacaatgagcatcttgcccatggagctatataaagagtttgcagagtatgtcaccaaccattatcggatgctgtgtgcagtcttggagcccgccctgaatgtcaaaggcaaggaggaggttgccagtgcactagttcacatcctgcagagtacaggcaaggccaaggacttcctttcagacatggccatgtctgaggtagaccggttcatggaacgggagcacctcatattccgcgagaacacgcttgccactaaagccatagaagagtatatgagactgattggtcagaaatacctcaaggatgccattggagaattcatccgtgctctgtatgaatctgaggaaaactgcgaggtagaccctatcaagtgcacagcatccagtttggcagagcaccaggccaacctgcgaatgtgctgtgagttggccctgtgcaaggtggtcaactcccactgcgtgttcccgagggagctgaaggaggtgtttgcttcgtggcggctgcgctgcgcagagcgaggccgggaggacatcgcagacaggcttatcagcgcctcactcttcctgcgcttcctctgcccagcgattatgtcgcccagtctctttgggcttatgcaggagtacccagatgagcagacctcacgaaccctcaccctcattgccaaggtcatccagaacctggccaacttttccaagtttacctcaaaggaggactttctgggcttcatgaatgagtttctggagctggaatggggttccatgcagcagtttttgtatgagatctccaatctggacacgctaaccaacagcagtagctttgagggttacatcgacttgggccgagagctctccacactgcatgccctactctgggaggtgctgccccagctcagcaaggaagccctcctgaagctgggtccactgccccggctcctcaacgacatcagcacagctctgaggaaccccaacatccaaaggcagccaagccgccagagtgagcggccccggcctcagcctgtggtactgcgggggccatcggctgagatgcagggctacatgatgcgggacctcaacagctccatcgaccttcagtccttcatggctcgaggcctcaacagctctatggacatggctcgcctcccctccccaaccaaggaaaagccacccccaccaccgcctggtggtggtaaagacctgttctatgtaagccgtccacccctggcccgttcctcaccagcatactgcacgagcagctcggacatcacagagccagagcagaagatgctgagtgtcaacaagagtgtgtccatgctggacttacagggtgatgggcctggtggccgcctcaacagcagcagtgtttcgaacctggcggccgtaggggacctgctgcactcaagccaggcctcgctgacagcagccttggggctacggcctgcgcctgccggacgcctctcccaggggagtggctcatccatcacggcggctggcatgcgcctcagccagatgggtgtcaccacagacggtgtccctgcccagcaactgcgaatccccctctccttccagaaccctctcttccacatggctgctgatgggccaggtcccccaggcggccatggagggggcggtggccatggcccaccttcctcccatcaccaccaccaccaccatcaccaccaccgaggtggagagccccctggggacacctttgccccattccatggctatagcaagagtgaggacctctcttccggggtccccaagccccctgctgcctccatccttcatagccacagctacagtgatgagtttggaccctctggcactgacttcacccgtcggcagctttcactccaggacaacctgcagcacatgctgtcccctccccagatcaccattggtccccagaggccagccccctcagggcctggaggtgggagcggtgggggcagcggtgggggtggcgggggccagccgcctccattgcagaggggcaagtctcagcagttgacagtcagcgcagcccagaaaccccggccatccagcgggaatctattgcagtccccagagccaagttatggccccgcccgtccacggcaacagagcctcagcaaggagggcagcattgggggcagcgggggcagcggtggcggagggggtggggggctgaagccctccatcaccaagcagcattctcagacaccatccacattgaaccccacaatgccagcctctgagcggacagtggcctgggtctccaacatgcctcacctgtcggctgacatcgagagtgcccacatcgagcgggaagagtacaagctcaaggagtactcaaaatcgatggatgagagccggctggatagggtgaaggagtacgaggaggagattcactcactgaaagagcggctgcacatgtccaaccggaagctggaagagtatgagcggaggctgctgtcccaggaagaacaaaccagcaaaatcctgatgcagtatcaggcccgactggagcagagtgagaagaggctaaggcagcagcaggcagagaaggattcccagatcaagagcatcattggcaggctgatgctggtggaggaggagctgcgccgggaccaccccgccatggctgagccgctgccagaacccaagaagaggctgctcgacgctcaggtggaaattacaatgtcatttatcttctccgtgtcccatccccatccatcccactgtctttcgtgcactcactacaccagccacctagccccatcaccatctgtctctcatagtctgctgtttgtccactggctgctcctggcagccccctagtgaccccatcttcatcccatcgtctgtgcctttgtcactcctggcagcgtcagcccaactcctgtgccttcccatccagtcttcccactcctctctgcatctcaggaccttctctaccagaaccttggtctttctgcccctagaccccacctagttccaagaacccctgccccttctttgctcactcctattcaagccacgttgttcagcttcctctgcgctcttgggccagagggctagaagctgccgttttctggaatagagcacagggcagtatgatctgtagtttctccaggccctggccggtaccctgaaaacttggggacccatcacctctgttctcttggctccctaattttcctgtctccttggcagctcctgcatagcttcctcttcctgactcttcagatcttgaaggccttccatcctgtaacctccctttgccctcagtatttaagtccagcctccctctggcctccctcccactctggccctcagaccttcccagctgcctgctgcccagcagcaccagcacgaattcccttagcaccagcacgaattcccgtggcaccagcacgaattcccttagcaccagcacgaattccctg

SEQ ID NO: 736393 - DNA, 9683 bp, Homo sapiens
  misc_feature (5909)..(5909): n is a, c, g, or t
aggcctgatgagcaggtctcgagcctccatccatcgggggagcatccccgcgatgtcctatgcccccttcagagatgtacggggaccctctatgcaccgaacccaatacgttcattccccgtatgatcgtcctggttggaaccctcggttctgcatcatctcggggaaccagctgctcatgctggatgaggatgagatacaccccctactgatccgggaccggaggagcgagtccagtcgcaacaaactgctgagacgcacagtctccgtgccggtggaggggcggccccacggcgagcatgaataccacttgggtcgctcgaggaggaagagtgtcccaggggggaagcagtacagcatggagggtgcccctgctgcgcccttccggccctcgcaaggcttcctgagccgacggctaaaaagctccatcaaacgaacgaagtcacaacccaaacttgaccggaccagcagctttcgccagatcctgcctcgcttccgaagtgctgaccatgaccgggcccggctgatgcaaagctttaaggagtcacactctcatgagtccttgctgagtcctagcagtgcagctgaggcattggagctcaacttggatgaagattccattatcaagccagtgcacagctccatcctgggccaggagttctgttttgaggtaacaacttcatcaggaacaaaatgctttgcctgtcggtctgcggccgaaagagacaaatggattgagaatctgcagcgggcagtaaagcccaacaaggacaacagccgccgggtagacaatgtgctaaagctgtggatcatagaggcccgggagctgccccccaagaagcggtactactgtgagctctgcctggatgacatgctgtatgcacgcaccacctccaagccccgctctgcctctggggacaccgtcttctggggcgagcacttcgagtttaacaacctgccggctgtccgtgccctgcggctgcatctgtaccgtgactcagacaaaaagcgcaagaaggacaaggcaggctatgtcggcctggtgactgtgccagtggccaccctggctgggcgccacttcacagagcagtggtaccctgtaaccctgccaacaggcagtgggggatctgggggcatgggttcgggagggggagggggctcggggggtggctcagggggcaagggcaaaggaggttgcccggctgtgcggctgaaagcacgttaccagacaatgagcatcttgcccatggagctatataaagagtttgcagagtatgtcaccaaccattatcggatgctgtgtgcagtcttggagcccgccctgaatgtcaaaggcaaggaggaggttgccagtgcactagttcacatcctgcagagtacaggcaaggccaaggacttcctttcagacatggccatgtctgaggtagaccggttcatggaacgggagcacctcatattccgcgagaacacgcttgccactaaagccatagaagagtatatgagactgattggtcagaaatacctcaaggatgccattggagaattcatccgtgctctgtatgaatctgaggaaaactgcgaggtagaccctatcaagtgcacagcatccagtttggcagagcaccaggccaacctgcgaatgtgctgtgagttggccctgtgcaaggtggtcaactcccactgcgtgttcccgagggagctgaaggaggtgtttgcttcgtggcggctgcgctgcgcagagcgaggccgggaggacatcgcagacaggcttatcagcgcctcactcttcctgcgcttcctctgcccagcgattatgtcgcccagtctctttgggcttatgcaggagtacccagatgagcagacctcacgaaccctcaccctcattgccaaggtcatccagaacctggccaacttttccaagtttacctcaaaggaggactttctgggcttcatgaatgagtttctggagctggaatggggttccatgcagcagtttttgtatgagatctccaatctggacacgctaaccaacagcagtagctttgagggttacatcgacttgggccgagagctctccacactgcatgccctactctgggaggtgctgccccagctcagcaaggaagccctcctgaagctgggtccactgccccggctcctcaacgacatcagcacagctctgaggaaccccaacatccaaaggcagccaagccgccagagtgagcggccccggcctcagcctgtggtactgcgggggccatcggctgagatgcagggctacatgatgcgggacctcaacagctccatcgaccttcagtccttcatggctcgaggcctcaacagctctatggacatggctcgcctcccctccccaaccaaggaaaagccacccccaccaccgcctggtggtggtaaagacctgttctatgtaagccgtccacccctggcccgttcctcaccagcatactgcacgagcagctcggacatcacagagccagagcagaagatgctgagtgtcaacaagagtgtgtccatgctggacttacagggtgatgggcctggtggccgcctcaacagcagcagtgtttcgaacctggcggccgtaggggacctgctgcactcaagccaggcctcgctgacagcagccttggggctacggcctgcgcctgccggacgcctctcccaggggagtggctcatccatcacggcggctggcatgcgcctcagccagatgggtgtcaccacagacggtgtccctgcccagcaactgcgaatccccctctccttccagaaccctctcttccacatggctgctgatgggccaggtcccccaggcggccatggagggggcggtggccatggcccaccttcctcccatcaccaccaccaccaccatcaccaccaccgaggtggagagccccctggggacacctttgccccattccatggctatagcaagagtgaggacctctcttccggggtccccaagccccctgctgcctccatccttcatagccacagctacagtgatgagtttggaccctctggcactgacttcacccgtcggcagctttcactccaggacaacctgcagcacatgctgtcccctccccagatcaccattggtccccagaggccagccccctcagggcctggaggtgggagcggtgggggcagcggtgggggtggcgggggccagccgcctccattgcagaggggcaagtctcagcagttgacagtcagcgcagcccagaaaccccggccatccagcgggaatctattgcagtccccagagccaagttatggccccgcccgtccacggcaacagagcctcagcaaggagggcagcattgggggcagcgggggcagcggtggcggagggggtggggggctgaagccctccatcaccaagcagcattctcagacaccatccacattgaaccccacaatgccagcctctgagcggacagtggcctgggtctccaacatgcctcacctgtcggctgacatcgagagtgcccacatcgagcgggaagagtacaagctcaaggagtactcaaaatcgatggatgagagccggctggatagggtgaaggagtacgaggaggagattcactcactgaaagagcggctgcacatgtccaaccggaagctggaagagtatgagcggaggctgctgtcccaggaagaacaaaccagcaaaatcctgatgcagtatcaggcccgactggagcagagtgagaagaggctaaggcagcagcaggcagagaaggattcccagatcaagagcatcattggcaggctgatgctggtggaggaggagctgcgccgggaccaccccgccatggctgagccgctgccagaacccaagaagaggctgctcgacgctcaggagaggcagcttccccccttgggtccaacaaacccgcgtgtgacgctggccccaccgtggaatggcctggcccccccagccccaccacccccaccccggctgcagattacggagaacggcgagttccgaaacaccgcagaccactagcccacccagcatcagagaccttctcttcctttcctgtgcaccccaccctgtaacagcaccaaccaccaggattggacatcaccgaggaacagcgggattgcctccccgaatgcctccctgggaggcacactgattgcccacccccaccactgcaccatttccaggagggagagtggggaccctcagccgcccccttttccttcccattggggtgctgccctctctttgacccccagggacccttgccccaggacaccgcctaccccgtacagaccccttcactccggggtgctatccccatcctctgcctcatcgttcccctgagcactgggggacagaccctcacccccaccctgggggtgtggcacctccaaactttcaacttcagggtgatttttttagcagtaaccagagctgacaatctaactcccctccaccgccccattttggcctcccctgccccccttgttatggggaggggaccccgggtgagggggccctattaccccttgatttctcaggagcgtctgggggggctcagcacgcacaaactccttctccttctaccactcttaaatttactccctccccacccagaacccagatggggtggagggggccaccggggcagggagggggcggcaaggggggaatgggagttgtctccccttctccccacacctgatctgctctcggctggtcccagagcggggtgagggggcttatgcccccccctcccccagtgtgttgggtggggtggaattgaggttagggtgaggggtcagggtttaggagggtgtgtatgttgggaggacaggctagttgatctgtcctactctgacacacagtcccctctgccccttccttctctcttcttggtctctactcccagggggaggggggaacttactctaggaaaagccatgtctctctcccccagggtggggggacctgtgttggaggaggggtgttggggggcccccttccatgactctgtcccctgggggaggtaggacagggctgggcttccctctcatcctccccctcccaatctccttccacctccctccctcccgccagctccacgatttttcggtgtttctctgtacatagttttctggcgggataggggaggtaggatggatggggtttggggtgggtaggccatgggaggggagaagcccctccttggcaccccctcttccctgactgctgtcccctacccagccttgcccccttcatccttttgcgtttggtattgagactctcctagactctactcctctttcttttgtatggacagttccccttcagtcccatccccctacacatacacccagccggggccaaatttatacttatataaaagttgtaaatatgtgaaattttatccctgtgccctttccccacctcaggccctacccctggaccctccccaaccttccttctctcttctttggctgttgtaattatctggggtttgtactgtacatatccggggtgtgtgtgtgtgggctgggggcaacccttctgtacagagcttcctggccccctccccccccgcccctctgcttccctccccacccaccacctcaagggtagggagttgctcttcctacctgttttattttgttttctcgttctccctccccaccccactcccagccttatctatcccccctcactgtccccttttctccactcccagccccatttcctttttttctggagtgtgtggtgaaacagaaaaaaacatgtttaataaacggagattgttcttttatcgctgtgccgactttcttaggcagggctctccagacctgtacggtggtaagatctgctttctgaaaggaagctgacagcctgagangaaaaccgtatatccccacctgatgccacactctcctcatagaatgtcactctcccctcccaatgagattttttatattttagagcaggagttttgcaccggccaaacttctccaatctaactctcccctcaccactgtgtcacttagtccgaggccaggaacagcggcgttatctgataaaagagttcatgtatatatccacatttatctcttttaaaaattacctagaaataaggtttctttaattgctggttaaaatgctcccgtgcagaaaacaggaaagaacctgcctggttccttagcaaatctgagttccagtcccaggtccactactattagctgagtgacgcttccagcccgtttcccccgcctggaaactgaggacggcaacccccaccctcgcagggccggtgggaagacacaaagtgatgtgggcaagtgccaggcccacatggtaagtacccaactaatctcgcccctctcaggacctaccgggggcgggtgctacacttaatcaccgggaaacgcagctttccggggcggctgacggcccaccccctccgaccgggctgttctctcccgggccctgcctctcggtcctctgcagcggggaggacttcagcagctccccgggacgcccgttgcgaggacaccctgggcctgtgccctcctactagcaccgccctcctcgtctgcagtagccaatcaacacgaggcttgtaggctgccgttcctcgattggctacggctctagctccgcccgccgcacttggcgacggtgtccggcggggaggcggcggcttccggtctgggacggagctgtagcggcactgtaactgcgagggcagcgccgcgtgtgtaacggcgggggcgtgtcggcgggaaggacaatcgggccgggactcgcggtgtccgggtgaccgcggcttcccgggagcagacctctgtgggcactgtgaggcggaacggagcggcggggcaggagctgttgtgggcaggtgaaggcaggctggtggctgaaggacctccttcttatcttccacaggggctggaagttaaaacccctgttggtgtttagtggtggtggttgttgttgtttgtttttgctttcttggtgtgcgggactgatttgcagaaaccgccactgacttaaaagtttccagttattgctcgtggggagggggttgtttgagaagatgtggctccctttatccagggcttctgtgacctccatctttttcctctgcagccttcatcccgcgtggagtctacccccaagcccttctcctcttcccaattcttgtcaccttcgaggaggccatggaaaccccaacacctttgccgcctgtacccgcctccccgacctgcaacccagccccacggacaatccagatcgagttcccacagcatagctcgtcgctgctggaatctctgaaccgccacaggctagagggaaagttctgtgatgtgtccctcctggtgcagggccgggaacttagggctcataaagcagtgttagctgctgcctctccttacttccatgacaagctgcttctgggggatgcgcctcgtctcactctaccgagtgtcattgaagccgatgccttcgaggggctgctccagctcatttattcagggcgtctccgcctgccactggatgctcttcctgctcatctccttgtggccagtggccttcaaatgtggcaggtagtagatcagtgctcagaaattcttagagaattagaaacttcaggtggtggaatttcagcccgtggaggaaactcctaccatgcccttctttccactacatcctctacaggaggctggtgcattcgctcttcgcctttccagaccccagtacagtcctctgcttctactgaaagccctgcttccactgagagccctgtgggaggggagggaagtgaactgggagaagtgctgcaaattcaggtggaagaagaagaggaggaggaggaagatgatgatgatgaggaccaggggtcagccacactctctcagactcctcagccccagagagtatcaggggtttttccccgtcctcatggaccccacccactgcccatgactgctactccccgaaagcttccagagggtgagagtgcaccacttgagcttcctgcccctcctgcactgccccccaaaatcttctacattaagcaggaacccttcgagcctaaggaggagatatcaggaagcggaactcagcctggaggagcaaaggaggaaaccaaagtgttttctggaggggacactgaagggaatggggagctagggttcttgttgccttcagggccagggccaacatctgggggagggggtccatcctggaaaccagtggatcttcatgggaatgaaatcctgtcagggggtggaggacctgggggagcaggccaggccgtgcatgggcctgtgaagctaggggggacaccccctgcagatggaaaacgctttggttgcctgtgtgggaagcggtttgcagtgaagccaaagcgtgaccggcacatcatgctgaccttcagccttcggccttttggctgtggcatctgcaacaagcgcttcaagctgaagcaccatctgacagagcacatgaagacccatgctggagccctgcatgcctgtccccactgtggccgtcggttccgagtccatgcctgttttctccgccaccgggacctatgcaagggccagggctgggccactgcccactggacttacaagtgactgctgaggctatacactagcttctagaacaagataaccactgctgctgatggatacttttccctcactgccatggcacaccagtcatggatcttgtaatcatgccaagagaatagatacattatggacctcttgttcttagatatgggcctctcagcctggcagatgtggaaactcaaatttctcgtcccactccaggttttggctagccaaccctgcaggaaagtggtttataggccattcatacttaagttgatcacttgcccatggtggacatttttgtggtggtgatgtccattaaggaaaccagattttcaattatttagtgagagaagagttagagcaaaagacagtggtaaatgttttattccgtctccatgaggaattgaaggagttggtctccacctagagatacatttgatttacagcttaagtaattcagaggctaagctctaagcttttttctctcattgctggaatgatttaagcagaagtccttttgtgtacttttaaaattgtatctttccaggagcccctcagattgtaccttgctttctcaccaatagacaccttcccgacacttttttaatgttgtagctgagcactttaacaagttgagcattccatgtttcattcttagaaccttctttaatagagggtcttccctcaacagcctgtgcctctggtctacctttgaccaccactgataactaatatattggtcacaatgactggaatgtgactagtgatctcaggagatggcactgtcctaaagtgctgtcagggtggcaccactgctctctgaacaacttaccttggtcagagggactcaggtttgggacagcacaagctgaaggctggagagtaacttgcatagtaggaccatacctcttcctttcccatcccacccacatatgatagacagcccctctgttgagatatggaggggacagatactggaatcgggggtgggacttgcagttacttaaaattttttaataaactgtgccctgaaacctaaaaaaacagtg

SEQ ID NO: 736394 - DNA, 9432 bp, Homo sapiens
  misc_feature (5909)..(5909): n is a, c, g, or t
aggcctgatgagcaggtctcgagcctccatccatcgggggagcatccccgcgatgtcctatgcccccttcagagatgtacggggaccctctatgcaccgaacccaatacgttcattccccgtatgatcgtcctggttggaaccctcggttctgcatcatctcggggaaccagctgctcatgctggatgaggatgagatacaccccctactgatccgggaccggaggagcgagtccagtcgcaacaaactgctgagacgcacagtctccgtgccggtggaggggcggccccacggcgagcatgaataccacttgggtcgctcgaggaggaagagtgtcccaggggggaagcagtacagcatggagggtgcccctgctgcgcccttccggccctcgcaaggcttcctgagccgacggctaaaaagctccatcaaacgaacgaagtcacaacccaaacttgaccggaccagcagctttcgccagatcctgcctcgcttccgaagtgctgaccatgaccgggcccggctgatgcaaagctttaaggagtcacactctcatgagtccttgctgagtcctagcagtgcagctgaggcattggagctcaacttggatgaagattccattatcaagccagtgcacagctccatcctgggccaggagttctgttttgaggtaacaacttcatcaggaacaaaatgctttgcctgtcggtctgcggccgaaagagacaaatggattgagaatctgcagcgggcagtaaagcccaacaaggacaacagccgccgggtagacaatgtgctaaagctgtggatcatagaggcccgggagctgccccccaagaagcggtactactgtgagctctgcctggatgacatgctgtatgcacgcaccacctccaagccccgctctgcctctggggacaccgtcttctggggcgagcacttcgagtttaacaacctgccggctgtccgtgccctgcggctgcatctgtaccgtgactcagacaaaaagcgcaagaaggacaaggcaggctatgtcggcctggtgactgtgccagtggccaccctggctgggcgccacttcacagagcagtggtaccctgtaaccctgccaacaggcagtgggggatctgggggcatgggttcgggagggggagggggctcggggggtggctcagggggcaagggcaaaggaggttgcccggctgtgcggctgaaagcacgttaccagacaatgagcatcttgcccatggagctatataaagagtttgcagagtatgtcaccaaccattatcggatgctgtgtgcagtcttggagcccgccctgaatgtcaaaggcaaggaggaggttgccagtgcactagttcacatcctgcagagtacaggcaaggccaaggacttcctttcagacatggccatgtctgaggtagaccggttcatggaacgggagcacctcatattccgcgagaacacgcttgccactaaagccatagaagagtatatgagactgattggtcagaaatacctcaaggatgccattggagaattcatccgtgctctgtatgaatctgaggaaaactgcgaggtagaccctatcaagtgcacagcatccagtttggcagagcaccaggccaacctgcgaatgtgctgtgagttggccctgtgcaaggtggtcaactcccactgcgtgttcccgagggagctgaaggaggtgtttgcttcgtggcggctgcgctgcgcagagcgaggccgggaggacatcgcagacaggcttatcagcgcctcactcttcctgcgcttcctctgcccagcgattatgtcgcccagtctctttgggcttatgcaggagtacccagatgagcagacctcacgaaccctcaccctcattgccaaggtcatccagaacctggccaacttttccaagtttacctcaaaggaggactttctgggcttcatgaatgagtttctggagctggaatggggttccatgcagcagtttttgtatgagatctccaatctggacacgctaaccaacagcagtagctttgagggttacatcgacttgggccgagagctctccacactgcatgccctactctgggaggtgctgccccagctcagcaaggaagccctcctgaagctgggtccactgccccggctcctcaacgacatcagcacagctctgaggaaccccaacatccaaaggcagccaagccgccagagtgagcggccccggcctcagcctgtggtactgcgggggccatcggctgagatgcagggctacatgatgcgggacctcaacagctccatcgaccttcagtccttcatggctcgaggcctcaacagctctatggacatggctcgcctcccctccccaaccaaggaaaagccacccccaccaccgcctggtggtggtaaagacctgttctatgtaagccgtccacccctggcccgttcctcaccagcatactgcacgagcagctcggacatcacagagccagagcagaagatgctgagtgtcaacaagagtgtgtccatgctggacttacagggtgatgggcctggtggccgcctcaacagcagcagtgtttcgaacctggcggccgtaggggacctgctgcactcaagccaggcctcgctgacagcagccttggggctacggcctgcgcctgccggacgcctctcccaggggagtggctcatccatcacggcggctggcatgcgcctcagccagatgggtgtcaccacagacggtgtccctgcccagcaactgcgaatccccctctccttccagaaccctctcttccacatggctgctgatgggccaggtcccccaggcggccatggagggggcggtggccatggcccaccttcctcccatcaccaccaccaccaccatcaccaccaccgaggtggagagccccctggggacacctttgccccattccatggctatagcaagagtgaggacctctcttccggggtccccaagccccctgctgcctccatccttcatagccacagctacagtgatgagtttggaccctctggcactgacttcacccgtcggcagctttcactccaggacaacctgcagcacatgctgtcccctccccagatcaccattggtccccagaggccagccccctcagggcctggaggtgggagcggtgggggcagcggtgggggtggcgggggccagccgcctccattgcagaggggcaagtctcagcagttgacagtcagcgcagcccagaaaccccggccatccagcgggaatctattgcagtccccagagccaagttatggccccgcccgtccacggcaacagagcctcagcaaggagggcagcattgggggcagcgggggcagcggtggcggagggggtggggggctgaagccctccatcaccaagcagcattctcagacaccatccacattgaaccccacaatgccagcctctgagcggacagtggcctgggtctccaacatgcctcacctgtcggctgacatcgagagtgcccacatcgagcgggaagagtacaagctcaaggagtactcaaaatcgatggatgagagccggctggatagggtgaaggagtacgaggaggagattcactcactgaaagagcggctgcacatgtccaaccggaagctggaagagtatgagcggaggctgctgtcccaggaagaacaaaccagcaaaatcctgatgcagtatcaggcccgactggagcagagtgagaagaggctaaggcagcagcaggcagagaaggattcccagatcaagagcatcattggcaggctgatgctggtggaggaggagctgcgccgggaccaccccgccatggctgagccgctgccagaacccaagaagaggctgctcgacgctcaggagaggcagcttccccccttgggtccaacaaacccgcgtgtgacgctggccccaccgtggaatggcctggcccccccagccccaccacccccaccccggctgcagattacggagaacggcgagttccgaaacaccgcagaccactagcccacccagcatcagagaccttctcttcctttcctgtgcaccccaccctgtaacagcaccaaccaccaggattggacatcaccgaggaacagcgggattgcctccccgaatgcctccctgggaggcacactgattgcccacccccaccactgcaccatttccaggagggagagtggggaccctcagccgcccccttttccttcccattggggtgctgccctctctttgacccccagggacccttgccccaggacaccgcctaccccgtacagaccccttcactccggggtgctatccccatcctctgcctcatcgttcccctgagcactgggggacagaccctcacccccaccctgggggtgtggcacctccaaactttcaacttcagggtgatttttttagcagtaaccagagctgacaatctaactcccctccaccgccccattttggcctcccctgccccccttgttatggggaggggaccccgggtgagggggccctattaccccttgatttctcaggagcgtctgggggggctcagcacgcacaaactccttctccttctaccactcttaaatttactccctccccacccagaacccagatggggtggagggggccaccggggcagggagggggcggcaaggggggaatgggagttgtctccccttctccccacacctgatctgctctcggctggtcccagagcggggtgagggggcttatgcccccccctcccccagtgtgttgggtggggtggaattgaggttagggtgaggggtcagggtttaggagggtgtgtatgttgggaggacaggctagttgatctgtcctactctgacacacagtcccctctgccccttccttctctcttcttggtctctactcccagggggaggggggaacttactctaggaaaagccatgtctctctcccccagggtggggggacctgtgttggaggaggggtgttggggggcccccttccatgactctgtcccctgggggaggtaggacagggctgggcttccctctcatcctccccctcccaatctccttccacctccctccctcccgccagctccacgatttttcggtgtttctctgtacatagttttctggcgggataggggaggtaggatggatggggtttggggtgggtaggccatgggaggggagaagcccctccttggcaccccctcttccctgactgctgtcccctacccagccttgcccccttcatccttttgcgtttggtattgagactctcctagactctactcctctttcttttgtatggacagttccccttcagtcccatccccctacacatacacccagccggggccaaatttatacttatataaaagttgtaaatatgtgaaattttatccctgtgccctttccccacctcaggccctacccctggaccctccccaaccttccttctctcttctttggctgttgtaattatctggggtttgtactgtacatatccggggtgtgtgtgtgtgggctgggggcaacccttctgtacagagcttcctggccccctccccccccgcccctctgcttccctccccacccaccacctcaagggtagggagttgctcttcctacctgttttattttgttttctcgttctccctccccaccccactcccagccttatctatcccccctcactgtccccttttctccactcccagccccatttcctttttttctggagtgtgtggtgaaacagaaaaaaacatgtttaataaacggagattgttcttttatcgctgtgccgactttcttaggcagggctctccagacctgtacggtggtaagatctgctttctgaaaggaagctgacagcctgagangaaaaccgtatatccccacctgatgccacactctcctcatagaatgtcactctcccctcccaatgagattttttatattttagagcaggagttttgcaccggccaaacttctccaatctaactctcccctcaccactgtgtcacttagtccgaggccaggaacagcggcgttatctgataaaagagttcatgtatatatccacatttatctcttttaaaaattacctagaaataaggtttctttaattgctggttaaaatgctcccgtgcagaaaacaggaaagaacctgcctggttccttagcaaatctgagttccagtcccaggtccactactattagctgagtgacgcttccagcccgtttcccccgcctggaaactgaggacggcaacccccaccctcgcagggccggtgggaagacacaaagtgatgtgggcaagtgccaggcccacatggtaagtacccaactaatctcgcccctctcaggacctaccgggggcgggtgctacacttaatcaccgggaaacgcagctttccggggcggctgacggcccaccccctccgaccgggctgttctctcccgggccctgcctctcggtcctctgcagcggggaggacttcagcagctccccgggacgcccgttgcgaggacaccctgggcctgtgccctcctactagcaccgccctcctcgtctgcagtagccaatcaacacgaggcttgtaggctgccgttcctcgattggctacggctctagctccgcccgccgcacttggcgacggtgtccggcggggaggcggcggcttccggtctgggacggagctgtagcggcactgtaactgcgagggcagcgccgcgtgtgtaacggcgggggcgtgtcggcgggaaggacaatcgggccgggactcgcggtgtccgggtgaccgcggcttcccgggagcagacctctgtgggcactgtgaggcggaacggagcggcggggcaggagctgttgtgggcagccttcatcccgcgtggagtctacccccaagcccttctcctcttcccaattcttgtcaccttcgaggaggccatggaaaccccaacacctttgccgcctgtacccgcctccccgacctgcaacccagccccacggacaatccagatcgagttcccacagcatagctcgtcgctgctggaatctctgaaccgccacaggctagagggaaagttctgtgatgtgtccctcctggtgcagggccgggaacttagggctcataaagcagtgttagctgctgcctctccttacttccatgacaagctgcttctgggggatgcgcctcgtctcactctaccgagtgtcattgaagccgatgccttcgaggggctgctccagctcatttattcagggcgtctccgcctgccactggatgctcttcctgctcatctccttgtggccagtggccttcaaatgtggcaggtagtagatcagtgctcagaaattcttagagaattagaaacttcaggtggtggaatttcagcccgtggaggaaactcctaccatgcccttctttccactacatcctctacaggaggctggtgcattcgctcttcgcctttccagaccccagtacagtcctctgcttctactgaaagccctgcttccactgagagccctgtgggaggggagggaagtgaactgggagaagtgctgcaaattcaggtggaagaagaagaggaggaggaggaagatgatgatgatgaggaccaggggtcagccacactctctcagactcctcagccccagagagtatcaggggtttttccccgtcctcatggaccccacccactgcccatgactgctactccccgaaagcttccagagggtgagagtgcaccacttgagcttcctgcccctcctgcactgccccccaaaatcttctacattaagcaggaacccttcgagcctaaggaggagatatcaggaagcggaactcagcctggaggagcaaaggaggaaaccaaagtgttttctggaggggacactgaagggaatggggagctagggttcttgttgccttcagggccagggccaacatctgggggagggggtccatcctggaaaccagtggatcttcatgggaatgaaatcctgtcagggggtggaggacctgggggagcaggccaggccgtgcatgggcctgtgaagctaggggggacaccccctgcagatggaaaacgctttggttgcctgtgtgggaagcggtttgcagtgaagccaaagcgtgaccggcacatcatgctgaccttcagccttcggccttttggctgtggcatctgcaacaagcgcttcaagctgaagcaccatctgacagagcacatgaagacccatgctggagccctgcatgcctgtccccactgtggccgtcggttccgagtccatgcctgttttctccgccaccgggacctatgcaagggccagggctgggccactgcccactggacttacaagtgactgctgaggctatacactagcttctagaacaagataaccactgctgctgatggatacttttccctcactgccatggcacaccagtcatggatcttgtaatcatgccaagagaatagatacattatggacctcttgttcttagatatgggcctctcagcctggcagatgtggaaactcaaatttctcgtcccactccaggttttggctagccaaccctgcaggaaagtggtttataggccattcatacttaagttgatcacttgcccatggtggacatttttgtggtggtgatgtccattaaggaaaccagattttcaattatttagtgagagaagagttagagcaaaagacagtggtaaatgttttattccgtctccatgaggaattgaaggagttggtctccacctagagatacatttgatttacagcttaagtaattcagaggctaagctctaagcttttttctctcattgctggaatgatttaagcagaagtccttttgtgtacttttaaaattgtatctttccaggagcccctcagattgtaccttgctttctcaccaatagacaccttcccgacacttttttaatgttgtagctgagcactttaacaagttgagcattccatgtttcattcttagaaccttctttaatagagggtcttccctcaacagcctgtgcctctggtctacctttgaccaccactgataactaatatattggtcacaatgactggaatgtgactagtgatctcaggagatggcactgtcctaaagtgctgtcagggtggcaccactgctctctgaacaacttaccttggtcagagggactcaggtttgggacagcacaagctgaaggctggagagtaacttgcatagtaggaccatacctcttcctttcccatcccacccacatatgatagacagcccctctgttgagatatggaggggacagatactggaatcgggggtgggacttgcagttacttaaaattttttaataaactgtgccctgaaacctaaaaaaacagtg

SEQ ID NO: 736395 - DNA, 9106 bp, Homo sapiens
  misc_feature (5583)..(5583): n is a, c, g, or t
aggcctgatgagcaggtctcgagcctccatccatcgggggagcatccccgcgatgtcctatgcccccttcagagatgtacggggaccctctatgcaccgaacccaatacgttcattccccgtatgatcgtcctggttggaaccctcggttctgcatcatctcggggaaccagctgctcatgctggatgaggatgagatacaccccctactgatccgggaccggaggagcgagtccagtcgcaacaaactgctgagacgcacagtctccgtgccggtggaggggcggccccacggcgagcatgaataccacttgggtcgctcgaggaggaagagtgtcccaggggggaagcagtacagcatggagggtgcccctgctgcgcccttccggccctcgcaaggcttcctgagccgacggctaaaaagctccatcaaacgaacgaagtcacaacccaaacttgaccggaccagcagctttcgccagatcctgcctcgcttccgaagtgctgaccatgaccgggcccggctgatgcaaagctttaaggagtcacactctcatgagtccttgctgagtcctagcagtgcagctgaggcattggagctcaacttggatgaagattccattatcaagccagtgcacagctccatcctgggccaggagttctgttttgaggtaacaacttcatcaggaacaaaatgctttgcctgtcggtctgcggccgaaagagacaaatggattgagaatctgcagcgggcagtaaagcccaacaaggacaacagccgccgggtagacaatgtgctaaagctgtggatcatagaggcccgggagctgccccccaagaagcggtactactgtgagctctgcctggatgacatgctgtatgcacgcaccacctccaagccccgctctgcctctggggacaccgtcttctggggcgagcacttcgagtttaacaacctgccggctgtccgtgccctgcggctgcatctgtaccgtgactcagacaaaaagcgcaagaaggacaaggcaggctatgtcggcctggtgactgtgccagtggccaccctggctgggcgccacttcacagagcagtggtaccctgtaaccctgccaacaggcagtgggggatctgggggcatgggttcgggagggggagggggctcggggggtggctcagggggcaagggcaaaggaggttgcccggctgtgcggctgaaagcacgttaccagacaatgagcatcttgcccatggagctatataaagagtttgcagagtatgtcaccaaccattatcggatgctgtgtgcagtcttggagcccgccctgaatgtcaaaggcaaggaggaggttgccagtgcactagttcacatcctgcagagtacaggcaaggccaaggacttcctttcagacatggccatgtctgaggtagaccggttcatggaacgggagcacctcatattccgcgagaacacgcttgccactaaagccatagaagagtatatgagactgattggtcagaaatacctcaaggatgccattggagaattcatccgtgctctgtatgaatctgaggaaaactgcgaggtagaccctatcaagtgcacagcatccagtttggcagagcaccaggccaacctgcgaatgtgctgtgagttggccctgtgcaaggtggtcaactcccactgcgtgttcccgagggagctgaaggaggtgtttgcttcgtggcggctgcgctgcgcagagcgaggccgggaggacatcgcagacaggcttatcagcgcctcactcttcctgcgcttcctctgcccagcgattatgtcgcccagtctctttgggcttatgcaggagtacccagatgagcagacctcacgaaccctcaccctcattgccaaggtcatccagaacctggccaacttttccaagtttacctcaaaggaggactttctgggcttcatgaatgagtttctggagctggaatggggttccatgcagcagtttttgtatgagatctccaatctggacacgctaaccaacagcagtagctttgagggttacatcgacttgggccgagagctctccacactgcatgccctactctgggaggtgctgccccagctcagcaaggaagccctcctgaagctgggtccactgccccggctcctcaacgacatcagcacagctctgaggaaccccaacatccaaaggcagccaagccgccagagtgagcggccccggcctcagcctgtggtactgcgggggccatcggctgagatgcagggctacatgatgcgggacctcaacagctccatcgaccttcagtccttcatggctcgaggcctcaacagctctatggacatggctcgcctcccctccccaaccaaggaaaagccacccccaccaccgcctggtggtggtaaagacctgttctatgtaagccgtccacccctggcccgttcctcaccagcatactgcacgagcagctcggacatcacagagccagagcagaagatgctgagtgtcaacaagagtgtgtccatgctggacttacagggtgatgggcctggtggccgcctcaacagcagcagtgtttcgaacctggcggccgtaggggacctgctgcactcaagccaggcctcgctgacagcagccttggggctacggcctgcgcctgccggacgcctctcccaggggagtggctcatccatcacggcggctggcatgcgcctcagccagatgggtgtcaccacagacggtgtccctgcccagcaactgcgaatccccctctccttccagaaccctctcttccacatggctgctgatgggccaggtcccccaggcggccatggagggggcggtggccatggcccaccttcctcccatcaccaccaccaccaccatcaccaccaccgaggtggagagccccctggggacacctttgccccattccatggctatagcaagagtgaggacctctcttccggggtccccaagccccctgctgcctccatccttcatagccacagctacagtgatgagtttggaccctctggcactgacttcacccgtcggcagctttcactccaggacaacctgcagcacatgctgtcccctccccagatcaccattggtccccagaggccagccccctcagggcctggaggtgggagcggtgggggcagcggtgggggtggcgggggccagccgcctccattgcagaggggcaagtctcagcagttgacagtcagcgcagcccagaaaccccggccatccagcgggaatctattgcagtccccagagccaagttatggccccgcccgtccacggcaacagagcctcagcaaggagggcagcattgggggcagcgggggcagcggtggcggagggggtggggggctgaagccctccatcaccaagcagcattctcagacaccatccacattgaaccccacaatgccagcctctgagcggacagtggcctgggtctccaacatgcctcacctgtcggctgacatcgagagtgcccacatcgagcgggaagagtacaagctcaaggagtactcaaaatcgatggatgagagccggctggatagggtgaaggagtacgaggaggagattcactcactgaaagagcggctgcacatgtccaaccggaagctggaagagtatgagcggaggctgctgtcccaggaagaacaaaccagcaaaatcctgatgcagtatcaggcccgactggagcagagtgagaagaggctaaggcagcagcaggcagagaaggattcccagatcaagagcatcattggcaggctgatgctggtggaggaggagctgcgccgggaccaccccgccatggctgagccgctgccagaacccaagaagaggctgctcgacgctcaggagaggcagcttccccccttgggtccaacaaacccgcgtgtgacgctggccccaccgtggaatggcctggcccccccagccccaccacccccaccccggctgcagattacggagaacggcgagttccgaaacaccgcagaccactagcccacccagcatcagagaccttctcttcctttcctgtgcaccccaccctgtaacagcaccaaccaccaggattggacatcaccgaggaacagcgggattgcctccccgaatgcctccctgggaggcacactgattgcccacccccaccactgcaccatttccaggagggagagtggggaccctcagccgcccccttttccttcccattggggtgctgccctctctttgacccccagggacccttgccccaggacaccgcctaccccgtacagaccccttcactccggggtgctatccccatcctctgcctcatcgttcccctgagcactgggggacagaccctcacccccaccctgggggtgtggcacctccaaactttcaacttcagggtgatttttttagcagtaaccagagctgacaatctaactcccctccaccgccccattttggcctcccctgccccccttgttatggggaggggaccccgggtgagggggccctattaccccttgatttctcaggagcgtctgggggggctcagcacgcacaaactccttctccttctaccactcttaaatttactccctccccacccagaacccagatggggtggagggggccaccggggcagggagggggcggcaaggggggaatgggagttgtctccccttctccccacacctgatctgctctcggctggtcccagagcggggtgagggggcttatgcccccccctcccccagtgtgttgggtggggtggaattgaggttagggtgaggggtcagggtttaggagggtgtgtatgttgggaggacaggctagttgatctgtcctactctgacacacagtcccctctgccccttccttctctcttcttggtctctactcccagggggaggggggaacttactctaggaaaagccatgtctctctcccccagggtggggggacctgtgttggaggaggggtgttggggggcccccttccatgactctgtcccctgggggaggtaggacagggctgggcttccctctcatcctccccctcccaatctccttccacctccctccctcccgccagctccacgatttttcggtgtttctctgtacatagttttctggcgggataggggaggtaggatggatggggtttggggtgggtaggccatgggaggggagaagcccctccttggcaccccctcttccctgactgctgtcccctacccagccttgcccccttcatccttttgcgtttggtattgagactctcctagactctactcctctttcttttgtatggacagttccccttcagtcccatccccccaccccactcccagccttatctatcccccctcactgtccccttttctccactcccagccccatttcctttttttctggagtgtgtggtgaaacagaaaaaaacatgtttaataaacggagattgttcttttatcgctgtgccgactttcttaggcagggctctccagacctgtacggtggtaagatctgctttctgaaaggaagctgacagcctgagangaaaaccgtatatccccacctgatgccacactctcctcatagaatgtcactctcccctcccaatgagattttttatattttagagcaggagttttgcaccggccaaacttctccaatctaactctcccctcaccactgtgtcacttagtccgaggccaggaacagcggcgttatctgataaaagagttcatgtatatatccacatttatctcttttaaaaattacctagaaataaggtttctttaattgctggttaaaatgctcccgtgcagaaaacaggaaagaacctgcctggttccttagcaaatctgagttccagtcccaggtccactactattagctgagtgacgcttccagcccgtttcccccgcctggaaactgaggacggcaacccccaccctcgcagggccggtgggaagacacaaagtgatgtgggcaagtgccaggcccacatggtaagtacccaactaatctcgcccctctcaggacctaccgggggcgggtgctacacttaatcaccgggaaacgcagctttccggggcggctgacggcccaccccctccgaccgggctgttctctcccgggccctgcctctcggtcctctgcagcggggaggacttcagcagctccccgggacgcccgttgcgaggacaccctgggcctgtgccctcctactagcaccgccctcctcgtctgcagtagccaatcaacacgaggcttgtaggctgccgttcctcgattggctacggctctagctccgcccgccgcacttggcgacggtgtccggcggggaggcggcggcttccggtctgggacggagctgtagcggcactgtaactgcgagggcagcgccgcgtgtgtaacggcgggggcgtgtcggcgggaaggacaatcgggccgggactcgcggtgtccgggtgaccgcggcttcccgggagcagacctctgtgggcactgtgaggcggaacggagcggcggggcaggagctgttgtgggcagccttcatcccgcgtggagtctacccccaagcccttctcctcttcccaattcttgtcaccttcgaggaggccatggaaaccccaacacctttgccgcctgtacccgcctccccgacctgcaacccagccccacggacaatccagatcgagttcccacagcatagctcgtcgctgctggaatctctgaaccgccacaggctagagggaaagttctgtgatgtgtccctcctggtgcagggccgggaacttagggctcataaagcagtgttagctgctgcctctccttacttccatgacaagctgcttctgggggatgcgcctcgtctcactctaccgagtgtcattgaagccgatgccttcgaggggctgctccagctcatttattcagggcgtctccgcctgccactggatgctcttcctgctcatctccttgtggccagtggccttcaaatgtggcaggtagtagatcagtgctcagaaattcttagagaattagaaacttcaggtggtggaatttcagcccgtggaggaaactcctaccatgcccttctttccactacatcctctacaggaggctggtgcattcgctcttcgcctttccagaccccagtacagtcctctgcttctactgaaagccctgcttccactgagagccctgtgggaggggagggaagtgaactgggagaagtgctgcaaattcaggtggaagaagaagaggaggaggaggaagatgatgatgatgaggaccaggggtcagccacactctctcagactcctcagccccagagagtatcaggggtttttccccgtcctcatggaccccacccactgcccatgactgctactccccgaaagcttccagagggtgagagtgcaccacttgagcttcctgcccctcctgcactgccccccaaaatcttctacattaagcaggaacccttcgagcctaaggaggagatatcaggaagcggaactcagcctggaggagcaaaggaggaaaccaaagtgttttctggaggggacactgaagggaatggggagctagggttcttgttgccttcagggccagggccaacatctgggggagggggtccatcctggaaaccagtggatcttcatgggaatgaaatcctgtcagggggtggaggacctgggggagcaggccaggccgtgcatgggcctgtgaagctaggggggacaccccctgcagatggaaaacgctttggttgcctgtgtgggaagcggtttgcagtgaagccaaagcgtgaccggcacatcatgctgaccttcagccttcggccttttggctgtggcatctgcaacaagcgcttcaagctgaagcaccatctgacagagcacatgaagacccatgctggagccctgcatgcctgtccccactgtggccgtcggttccgagtccatgcctgttttctccgccaccgggacctatgcaagggccagggctgggccactgcccactggacttacaagtgactgctgaggctatacactagcttctagaacaagataaccactgctgctgatggatacttttccctcactgccatggcacaccagtcatggatcttgtaatcatgccaagagaatagatacattatggacctcttgttcttagatatgggcctctcagcctggcagatgtggaaactcaaatttctcgtcccactccaggttttggctagccaaccctgcaggaaagtggtttataggccattcatacttaagttgatcacttgcccatggtggacatttttgtggtggtgatgtccattaaggaaaccagattttcaattatttagtgagagaagagttagagcaaaagacagtggtaaatgttttattccgtctccatgaggaattgaaggagttggtctccacctagagatacatttgatttacagcttaagtaattcagaggctaagctctaagcttttttctctcattgctggaatgatttaagcagaagtccttttgtgtacttttaaaattgtatctttccaggagcccctcagattgtaccttgctttctcaccaatagacaccttcccgacacttttttaatgttgtagctgagcactttaacaagttgagcattccatgtttcattcttagaaccttctttaatagagggtcttccctcaacagcctgtgcctctggtctacctttgaccaccactgataactaatatattggtcacaatgactggaatgtgactagtgatctcaggagatggcactgtcctaaagtgctgtcagggtggcaccactgctctctgaacaacttaccttggtcagagggactcaggtttgggacagcacaagctgaaggctggagagtaacttgcatagtaggaccatacctcttcctttcccatcccacccacatatgatagacagcccctctgttgagatatggaggggacagatactggaatcgggggtgggacttgcagttacttaaaattttttaataaactgtgccctgaaacctaaaaaaacagtg

SEQ ID NO: 736396 - DNA, 4273 bp, Homo sapiens
aggcctgatgagcaggtctcgagcctccatccatcgggggagcatccccgcgatgtcctatgcccccttcagagatgtacggggaccctctatgcaccgaacccaatacgttcattccccgtatgatcgtcctggttggaaccctcggttctgcatcatctcggggaaccagctgctcatgctggatgaggatgagatacaccccctactgatccgggaccggaggagcgagtccagtcgcaacaaactgctgagacgcacagtctccgtgccggtggaggggcggccccacggcgagcatgaataccacttgggtcgctcgaggaggaagagtgtcccaggggggaagcagtacagcatggagggtgcccctgctgcgcccttccggccctcgcaaggcttcctgagccgacggctaaaaagctccatcaaacgaacgaagtcacaacccaaacttgaccggaccagcagctttcgccagatcctgcctcgcttccgaagtgctgaccatgaccgggcccggctgatgcaaagctttaaggagtcacactctcatgagtccttgctgagtcctagcagtgcagctgaggcattggagctcaacttggatgaagattccattatcaagccagtgcacagctccatcctgggccaggagttctgttttgaggtaacaacttcatcaggaacaaaatgctttgcctgtcggtctgcggccgaaagagacaaatggattgagaatctgcagcgggcagtaaagcccaacaaggacaacagccgccgggtagacaatgtgctaaagctgtggatcatagaggcccgggagctgccccccaagaagcggtactactgtgagctctgcctggatgacatgctgtatgcacgcaccacctccaagccccgctctgcctctggggacaccgtcttctggggcgagcacttcgagtttaacaacctgccggctgtccgtgccctgcggctgcatctgtaccgtgactcagacaaaaagcgcaagaaggacaaggcaggctatgtcggcctggtgactgtgccagtggccaccctggctgggcgccacttcacagagcagtggtaccctgtaaccctgccaacaggcagtgggggatctgggggcatgggttcgggagggggagggggctcggggggtggctcagggggcaagggcaaaggaggttgcccggctgtgcggctgaaagcacgttaccagacaatgagcatcttgcccatggagctatataaagagtttgcagagtatgtcaccaaccattatcggatgctgtgtgcagtcttggagcccgccctgaatgtcaaaggcaaggaggaggttgccagtgcactagttcacatcctgcagagtacaggcaaggccaaggacttcctttcagacatggccatgtctgaggtagaccggttcatggaacgggagcacctcatattccgcgagaacacgcttgccactaaagccatagaagagtatatgagactgattggtcagaaatacctcaaggatgccattggagaattcatccgtgctctgtatgaatctgaggaaaactgcgaggtagaccctatcaagtgcacagcatccagtttggcagagcaccaggccaacctgcgaatgtgctgtgagttggccctgtgcaaggtggtcaactcccactgcgtgttcccgagggagctgaaggaggtgtttgcttcgtggcggctgcgctgcgcagagcgaggccgggaggacatcgcagacaggcttatcagcgcctcactcttcctgcgcttcctctgcccagcgattatgtcgcccagtctctttgggcttatgcaggagtacccagatgagcagacctcacgaaccctcaccctcattgccaaggtcatccagaacctggccaacttttccaagtttacctcaaaggaggactttctgggcttcatgaatgagtttctggagctggaatggggttccatgcagcagtttttgtatgagatctccaatctggacacgctaaccaacagcagtagctttgagggttacatcgacttgggccgagagctctccacactgcatgccctactctgggaggtgctgccccagctcagcaaggaagccctcctgaagctgggtccactgccccggctcctcaacgacatcagcacagctctgaggaaccccaacatccaaaggcagccaagccgccagagtgagcggccccggcctcagcctgtggtactgcgggggccatcggctgagatgcagggctacatgatgcgggacctcaacagctccatcgaccttcagtccttcatggctcgaggcctcaacagctctatggacatggctcgcctcccctccccaaccaaggaaaagccacccccaccaccgcctggtggtggtaaagacctgttctatgtaagccgtccacccctggcccgttcctcaccagcatactgcacgagcagctcggacatcacagagccagagcagaagatgctgagtgtcaacaagagtgtgtccatgctggacttacagggtgatgggcctggtggccgcctcaacagcagcagtgtttcgaacctggcggccgtaggggacctgctgcactcaagccaggcctcgctgacagcagccttggggctacggcctgcgcctgccggacgcctctcccaggggagtggctcatccatcacggcggctggcatgcgcctcagccagatgggtgtcaccacagacggtgtccctgcccagcaactgcgaatccccctctccttccagaaccctctcttccacatggctgctgatgggccaggtcccccaggcggccatggagggggcggtggccatggcccaccttcctcccatcaccaccaccaccaccatcaccaccaccgaggtggagagccccctggggacacctttgccccattccatggctatagcaagagtgaggacctctcttccggggtccccaagccccctgctgcctccatccttcatagccacagctacagtgatgagtttggaccctctggcactgacttcacccgtcggcagctttcactccaggacaacctgcagcacatgctgtcccctccccagatcaccattggtccccagaggccagccccctcagggcctggaggtgggagcggtgggggcagcggtgggggtggcgggggccagccgcctccattgcagaggggcaagtctcagcagttgacagtcagcgcagcccagaaaccccggccatccagcgggaatctattgcagtccccagagccaagttatggccccgcccgtccacggcaacagagcctcagcaaggagggcagcattgggggcagcgggggcagcggtggcggagggggtggggggctgaagccctccatcaccaagcagcattctcagacaccatccacattgaaccccacaatgccagcctctgagcggacagtggcctgggtctccaacatgcctcacctgtcggctgacatcgagagtgcccacatcgagcgggaagagtacaagctcaaggagtactcaaaatcgatggatgagagccggctggatagggtgaaggagtacgaggaggagattcactcactgaaagagcggctgcacatgtccaaccggaagctggaagagtatgagcggaggctgctgtcccaggaagaacaaaccagcaaaatcctgatgcagtatcaggcccgactggagcagagtgagaagaggctaaggcagcagcaggcagagaaggattcccagatcaagagcatcattggcaggctgatgctggtggaggaggagctgcgccgggaccaccccgccatggctgagccgctgccagaacccaagaagaggctgctcgacgctcagctcctcatcaggtaattctcctggttccgctttggccacgggcggaggacacagggggaggtgactccggaccactgcaggttggtcgtgaagcccactccctccaacacctccggagcctctcccctctcactgctgccctccacacccagagaacctccacagactccagccctccgacacctgcacagatccatctcccaagacaccacccaaagagagcatttgctgctgcttcccagaactgtccaacaataccttagcaacaccaagagttgggccctagatgggcccagcacattcacaggtcacacccacttccctgcaaaacccaccccctcccagcctcctcctgactctaagccctcctcttcctctaaa

SEQ ID NO: 736397 - DNA, 1962 bp, Homo sapiens
  misc_feature (1962)..(1962): n is a, c, g, or t
aggcctgatgagcaggtctcgagcctccatccatcgggggagcatccccgcgatgtcctatgcccccttcagagatgtacggggaccctctatgcaccgaacccaatacgttcattccccgtatgatcgtcctggttggaaccctcggttctgcatcatctcggggaaccagctgctcatgctggatgaggatgagatacaccccctactgatccgggaccggaggagcgagtccagtcgcaacaaactgctgagacgcacagtctccgtgccggtggaggggcggccccacggcgagcatgaataccacttgggtcgctcgaggaggaagagtgtcccaggggggaagcagtacagcatggagggtgcccctgctgcgcccttccggccctcgcaaggcttcctgagccgacggctaaaaagctccatcaaacgaacgaagtcacaacccaaacttgaccggaccagcagctttcgccagatcctgcctcgcttccgaagtgctgaccatgaccgggcccggctgatgcaaagctttaaggagtcacactctcatgagtccttgctgagtcctagcagtgcagctgaggcattggagctcaacttggatgaagattccattatcaagccagtgcacagctccatcctgggccaggagttctgttttgaggtaacaacttcatcaggaacaaaatgctttgcctgtcggtctgcggccgaaagagacaaatggattgagaatctgcagcgggcagtaaagcccaacaaggacaacagccgccgggtagacaatgtgctaaagctgtggatcatagaggcccgggagctgccccccaagaagcggtactactgtgagctctgcctggatgacatgctgtatgcacgcaccacctccaagccccgctctgcctctggggacaccgtcttctggggcgagcacttcgagtttaacaacctgccggctgtccgtgccctgcggctgcatctgtaccgtgactcagacaaaaagcgcaagaaggacaaggcaggctatgtcggcctggtgactgtgccagtggccaccctggctgggcgccacttcacagagcagtggtaccctgtaaccctgccaacaggcagtgggggatctgggggcatgggttcgggagggggagggggctcggggggtggctcagggggcaagggcaaaggaggttgcccggctgtgcggctgaaagcacgttaccagacaatgagcatcttgcccatggagctatataaagagtttgcagagtatgtcaccaaccattatcggatgctgtgtgcagtcttggagcccgccctgaatgtcaaaggcaaggaggaggttgccagtgcactagttcacatcctgcagagtacaggcaaggccaaggacttcctttcagacatggccatgtctgaggtagaccggttcatggaacgggagcacctcatattccgcgagaacacgcttgccactaaagccatagaagagtatatgagactgattggtcagaaatacctcaaggatgccattggagaattcatccgtgctctgtatgaatctgaggaaaactgcgaggtagaccctatcaagtgcacagcatccagtttggcagagcaccaggccaacctgcgaatgtgctgtgagttggccctgtgcaaggtggtcaactcccactgcgtgttcccgagggagctgaaggaggtgtttgcttcgtggcggctgcgctgcgcagagcgaggccgggaggacatcgcagacaggcttatcagcgcctcactcttcctgcgcttcctctgcccagcgattatgtcgcccagtctctttgggcttatgcaggagtacccagatgagcagacctcacgaaccctcaccctcattgccaaggtcatccagaacctggccaacttttccaagtttacctcaaaggagggatgagggggatactctagagtgan

SEQ ID NO: 736398 - DNA, 1706 bp, Homo sapiens
aggcctgatgagcaggtctcgagcctccatccatcgggggagcatccccgcgatgtcctatgcccccttcagagatgtacggggaccctctatgcaccgaacccaatacgttcattccccgtatgatcgtcctggttggaaccctcggttctgcatcatctcggggaaccagctgctcatgctggatgaggatgagatacaccccctactgatccgggaccggaggagcgagtccagtcgcaacaaactgctgagacgcacagtctccgtgccggtggaggggcggccccacggcgagcatgaataccacttgggtcgctcgaggaggaagagtgtcccaggggggaagcagtacagcatggagggtgcccctgctgcgcccttccggccctcgcaaggcttcctgagccgacggctaaaaagctccatcaaacgaacgaagtcacaacccaaacttgaccggaccagcagctttcgccagatcctgcctcgcttccgaagtgctgaccatgaccgggcccggctgatgcaaagctttaaggagtcacactctcatgagtccttgctgagtcctagcagtgcagctgaggcattggagctcaacttggatgaagattccattatcaagccagtgcacagctccatcctgggccaggagttctgttttgaggtaacaacttcatcaggaacaaaatgctttgcctgtcggtctgcggccgaaagagacaaatggattgagaatctgcagcgggcagtaaagcccaacaaggacaacagccgccgggtagacaatgtgctaaagctgtggatcatagaggcccgggagctgccccccaagaagcggtactactgtgagctctgcctggatgacatgctgtatgcacgcaccacctccaagccccgctctgcctctggggacaccgtcttctggggcgagcacttcgagtttaacaacctgccggctgtccgtgccctgcggctgcatctgtaccgtgactcagacaaaaagcgcaagaaggacaaggcaggctatgtcggcctggtgactgtgccagtggccaccctggctgggcgccacttcacagagcagtggtaccctgtaaccctgccaacaggcagtgggggatctgggggcatgggttcgggagggggagggggctcggggggtggctcagggggcaagggcaaaggaggttgcccggctgtgcggctgaaagcacgttaccagacaatgagcatcttgcccatggagctatataaagagtttgcagagtatgtcaccaaccattatcggatgctgtgtgcagtcttggagcccgccctgaatgtcaaaggcaaggaggaggttgccagtgcactagttcacatcctgcagagtacaggcaaggccaaggacttcctttcagacatggccatgtctgaggtagaccggttcatggaacgggagcacctcatattccgcgagaacacgcttgccactaaagccatagaagagtatatgagactgattggtcagaaatacctcaaggatgccattggagaattcatccgtgctctgtatgaatctgaggaaaactgcgaggtagaccctatcaagtgcacagcatccagtttggcagagcaccaggccaacctgcgaatgtgctgtgagttggccctgtgcaaggtggtcaactcccactgcctcccatcttgctcctgcggtc

SEQ ID NO: 736399 - DNA, 2384 bp, Homo sapiens
tacccccaacgggctccccctcacacccaccaatataaccaaaaaggctgcaccggtccggaatcccgggattgtgatgtgtccctcctggtgcagggccgggaacttagggctcataaagcagtgttagctgctgcctctccttacttccatgacaagctgcttctgggggatgcgcctcgtctcactctaccgagtgtcattgaagccgatgccttcgaggggctgctccagctcatttattcagggcgtctccgcctgccactggatgctcttcctgctcatctccttgtggccagtggccttcaaatgtggcaggtagtagatcagtgctcagaaattcttagagaattagaaacttcaggtggtggaatttcagcccgtggaggaaactcctaccatgcccttctttccactacatcctctacaggaggctggtgcattcgctcttcgcctttccagaccccagtacagtcctctgcttctactgaaagccctgcttccactgagagccctgtgggaggggagggaagtgaactgggagaagtgctgcaaattcaggtggaagaagaagaggaggaggaggaagatgatgatgatgaggaccaggggtcagccacactctctcagactcctcagccccagagagtatcaggggtttttccccgtcctcatggaccccacccactgcccatgactgctactccccgaaagcttccagagggtgagagtgcaccacttgagcttcctgcccctcctgcactgccccccaaaatcttctacattaagcaggaacccttcgagcctaaggaggagatatcaggaagcggaactcagcctggaggagcaaaggaggaaaccaaagtgttttctggaggggacactgaagggaatggggagctagggttcttgttgccttcagggccagggccaacatctgggggagggggtccatcctggaaaccagtggatcttcatgggaatgaaatcctgtcagggggtggaggacctgggggagcaggccaggccgtgcatgggcctgtgaagctaggggggacaccccctgcagatggaaaacgctttggttgcctgtgtgggaagcggtttgcagtgaagccaaagcgtgaccggcacatcatgctgaccttcagccttcggccttttggctgtggcatctgcaacaagcgcttcaagctgaagcaccatctgacagagcacatgaagacccatgctggagccctgcatgcctgtccccactgtggccgtcggttccgagtccatgcctgttttctccgccaccgggacctatgcaagggccagggctgggccactgcccactggacttacaagtgactgctgaggctatacactagcttctagaacaagataaccactgctgctgatggatacttttccctcactgccatggcacaccagtcatggatcttgtaatcatgccaagagaatagatacattatggacctcttgttcttagatatgggcctctcagcctggcagatgtggaaactcaaatttctcgtcccactccaggttttggctagccaaccctgcaggaaagtggtttataggccattcatacttaagttgatcacttgcccatggtggacatttttgtggtggtgatgtccattaaggaaaccagattttcaattatttagtgagagaagagttagagcaaaagacagtggtaaatgttttattccgtctccatgaggaattgaaggagttggtctccacctagagatacatttgatttacagcttaagtaattcagaggctaagctctaagcttttttctctcattgctggaatgatttaagcagaagtccttttgtgtacttttaaaattgtatctttccaggagcccctcagattgtaccttgctttctcaccaatagacaccttcccgacacttttttaatgttgtagctgagcactttaacaagttgagcattccatgtttcattcttagaaccttctttaatagagggtcttccctcaacagcctgtgcctctggtctacctttgaccaccactgataactaatatattggtcacaatgactggaatgtgactagtgatctcaggagatggcactgtcctaaagtgctgtcagggtggcaccactgctctctgaacaacttaccttggtcagagggactcaggtttgggacagcacaagctgaaggctggagagtaacttgcatagtaggaccatacctcttcctttcccatcccacccacatatgatagacagcccctctgttgagatatggaggggacagatactggaatcgggggtgggacttgcagttacttaaaattttttaataaactgtgccctgaaacctaaaaaaacagtg

SEQ ID NO: 736400 - DNA, 933 bp, Homo sapiens
gtttttccagagagctatggggttccatgggcaggctctgagcctgtgcccgccactaaccccactgaagcccgtcccttcaggctgatgctggtggaggaggagctgcgccgggaccaccccgccatggctgagccgctgccagaacccaagaagaggctgctcgacgctcaggtggaaattacaatgtcatttatcttctccgtgtcccatccccatccatcccactgtctttcgtgcactcactacaccagccacctagccccatcaccatctgtctctcatagtctgctgtttgtccactggctgctcctggcagccccctagtgaccccatcttcatcccatcgtctgtgcctttgtcactcctggcagcgtcagcccaactcctgtgccttcccatccagtcttcccactcctctctgcatctcaggaccttctctaccagaaccttggtctttctgcccctagaccccacctagttccaagaacccctgccccttctttgctcactcctattcaagccacgttgttcagcttcctctgcgctcttgggccagagggctagaagctgccgttttctggaatagagcacagggcagtatgatctgtagtttctccaggccctggccggtaccctgaaaacttggggacccatcacctctgttctcttggctccctaattttcctgtctccttggcagctcctgcatagcttcctcttcctgactcttcagatcttgaaggccttccatcctgtaacctccctttgccctcagtatttaagtccagcctccctctggcctccctcccactctggccctcagaccttcccagctgcctgctgcccagcctctcttctcacaagccagcttctaggacctcccttctgcacccttaccccttgctttcccaaaattctgctcattttccta

SEQ ID NO: 736401 - DNA, 6969 bp, Homo sapiens
  misc_feature (3195)..(3195): n is a, c, g, or t
gaccggtccggaattctccggatgtcatcacagacggtgtccctgcccagcaactgcgaatccccctctccttccagaaccctctcttccacatggctgctgatgggccaggtcccccaggcggccatggagggggcggtggccatggcccaccttcctcccatcaccaccaccaccaccatcaccaccaccgaggtggagagccccctggggacacctttgccccattccatggctatagcaagagtgaggacctctcttccggggtccccaagccccctgctgcctccatccttcatagccacagctacagtgatgagtttggaccctctggcactgacttcacccgtcggcagctttcactccaggacaacctgcagcacatgctgtcccctccccagatcaccattggtccccagaggccagccccctcagggcctggaggtgggagcggtgggggcagcggtgggggtggcgggggccagccgcctccattgcagaggggcaagtctcagcagttgacagtcagcgcagcccagaaaccccggccatccagcgggaatctattgcagtccccagagccaagttatggccccgcccgtccacggcaacagagcctcagcaaggagggcagcattgggggcagcgggggcagcggtggcggagggggtggggggctgaagccctccatcaccaagcagcattctcagacaccatccacattgaaccccacaatgccagcctctgagcggacagtggcctgggtctccaacatgcctcacctgtcggctgacatcgagagtgcccacatcgagcgggaagagtacaagctcaaggagtactcaaaatcgatggatgagagccggctggatagggtgaaggagtacgaggaggagattcactcactgaaagagcggctgcacatgtccaaccggaagctggaagagtatgagcggaggctgctgtcccaggaagaacaaaccagcaaaatcctgatgcagtatcaggcccgactggagcagagtgagaagaggctaaggcagcagcaggcagagaaggattcccagatcaagagcatcattggcaggctgatgctggtggaggaggagctgcgccgggaccaccccgccatggctgagccgctgccagaacccaagaagaggctgctcgacgctcaggagaggcagcttccccccttgggtccaacaaacccgcgtgtgacgctggccccaccgtggaatggcctggcccccccagccccaccacccccaccccggctgcagattacggagaacggcgagttccgaaacaccgcagaccactagcccacccagcatcagagaccttctcttcctttcctgtgcaccccaccctgtaacagcaccaaccaccaggattggacatcaccgaggaacagcgggattgcctccccgaatgcctccctgggaggcacactgattgcccacccccaccactgcaccatttccaggagggagagtggggaccctcagccgcccccttttccttcccattggggtgctgccctctctttgacccccagggacccttgccccaggacaccgcctaccccgtacagaccccttcactccggggtgctatccccatcctctgcctcatcgttcccctgagcactgggggacagaccctcacccccaccctgggggtgtggcacctccaaactttcaacttcagggtgatttttttagcagtaaccagagctgacaatctaactcccctccaccgccccattttggcctcccctgccccccttgttatggggaggggaccccgggtgagggggccctattaccccttgatttctcaggagcgtctgggggggctcagcacgcacaaactccttctccttctaccactcttaaatttactccctccccacccagaacccagatggggtggagggggccaccggggcagggagggggcggcaaggggggaatgggagttgtctccccttctccccacacctgatctgctctcggctggtcccagagcggggtgagggggcttatgcccccccctcccccagtgtgttgggtggggtggaattgaggttagggtgaggggtcagggtttaggagggtgtgtatgttgggaggacaggctagttgatctgtcctactctgacacacagtcccctctgccccttccttctctcttcttggtctctactcccagggggaggggggaacttactctaggaaaagccatgtctctctcccccagggtggggggacctgtgttggaggaggggtgttggggggcccccttccatgactctgtcccctgggggaggtaggacagggctgggcttccctctcatcctccccctcccaatctccttccacctccctccctcccgccagctccacgatttttcggtgtttctctgtacatagttttctggcgggataggggaggtaggatggatggggtttggggtgggtaggccatgggaggggagaagcccctccttggcaccccctcttccctgactgctgtcccctacccagccttgcccccttcatccttttgcgtttggtattgagactctcctagactctactcctctttcttttgtatggacagttccccttcagtcccatccccctacacatacacccagccggggccaaatttatacttatataaaagttgtaaatatgtgaaattttatccctgtgccctttccccacctcaggccctacccctggaccctccccaaccttccttctctcttctttggctgttgtaattatctggggtttgtactgtacatatccggggtgtgtgtgtgtgggctgggggcaacccttctgtacagagcttcctggccccctccccccccgcccctctgcttccctccccacccaccacctcaagggtagggagttgctcttcctacctgttttattttgttttctcgttctccctccccaccccactcccagccttatctatcccccctcactgtccccttttctccactcccagccccatttcctttttttctggagtgtgtggtgaaacagaaaaaaacatgtttaataaacggagattgttcttttatcgctgtgccgactttcttaggcagggctctccagacctgtacggtggtaagatctgctttctgaaaggaagctgacagcctgagangaaaaccgtatatccccacctgatgccacactctcctcatagaatgtcactctcccctcccaatgagattttttatattttagagcaggagttttgcaccggccaaacttctccaatctaactctcccctcaccactgtgtcacttagtccgaggccaggaacagcggcgttatctgataaaagagttcatgtatatatccacatttatctcttttaaaaattacctagaaataaggtttctttaattgctggttaaaatgctcccgtgcagaaaacaggaaagaacctgcctggttccttagcaaatctgagttccagtcccaggtccactactattagctgagtgacgcttccagcccgtttcccccgcctggaaactgaggacggcaacccccaccctcgcagggccggtgggaagacacaaagtgatgtgggcaagtgccaggcccacatggtaagtacccaactaatctcgcccctctcaggacctaccgggggcgggtgctacacttaatcaccgggaaacgcagctttccggggcggctgacggcccaccccctccgaccgggctgttctctcccgggccctgcctctcggtcctctgcagcggggaggacttcagcagctccccgggacgcccgttgcgaggacaccctgggcctgtgccctcctactagcaccgccctcctcgtctgcagtagccaatcaacacgaggcttgtaggctgccgttcctcgattggctacggctctagctccgcccgccgcacttggcgacggtgtccggcggggaggcggcggcttccggtctgggacggagctgtagcggcactgtaactgcgagggcagcgccgcgtgtgtaacggcgggggcgtgtcggcgggaaggacaatcgggccgggactcgcggtgtccgggtgaccgcggcttcccgggagcagacctctgtgggcactgtgaggcggaacggagcggcggggcaggagctgttgtgggcaggtgaaggcaggctggtggctgaaggacctccttcttatcttccacaggggctggaagttaaaacccctgttggtgtttagtggtggtggttgttgttgtttgtttttgctttcttggtgtgcgggactgatttgcagaaaccgccactgacttaaaagtttccagttattgctcgtggggagggggttgtttgagaagatgtggctccctttatccagggcttctgtgacctccatctttttcctctgcagccttcatcccgcgtggagtctacccccaagcccttctcctcttcccaattcttgtcaccttcgaggaggccatggaaaccccaacacctttgccgcctgtacccgcctccccgacctgcaacccagccccacggacaatccagatcgagttcccacagcatagctcgtcgctgctggaatctctgaaccgccacaggctagagggaaagttctgtgatgtgtccctcctggtgcagggccgggaacttagggctcataaagcagtgttagctgctgcctctccttacttccatgacaagctgcttctgggggatgcgcctcgtctcactctaccgagtgtcattgaagccgatgccttcgaggggctgctccagctcatttattcagggcgtctccgcctgccactggatgctcttcctgctcatctccttgtggccagtggccttcaaatgtggcaggtagtagatcagtgctcagaaattcttagagaattagaaacttcaggtggtggaatttcagcccgtggaggaaactcctaccatgcccttctttccactacatcctctacaggaggctggtgcattcgctcttcgcctttccagaccccagtacagtcctctgcttctactgaaagccctgcttccactgagagccctgtgggaggggagggaagtgaactgggagaagtgctgcaaattcaggtggaagaagaagaggaggaggaggaagatgatgatgatgaggaccaggggtcagccacactctctcagactcctcagccccagagagtatcaggggtttttccccgtcctcatggaccccacccactgcccatgactgctactccccgaaagcttccagagggtgagagtgcaccacttgagcttcctgcccctcctgcactgccccccaaaatcttctacattaagcaggaacccttcgagcctaaggaggagatatcaggaagcggaactcagcctggaggagcaaaggaggaaaccaaagtgttttctggaggggacactgaagggaatggggagctagggttcttgttgccttcagggccagggccaacatctgggggagggggtccatcctggaaaccagtggatcttcatgggaatgaaatcctgtcagggggtggaggacctgggggagcaggccaggccgtgcatgggcctgtgaagctaggggggacaccccctgcagatggaaaacgctttggttgcctgtgtgggaagcggtttgcagtgaagccaaagcgtgaccggcacatcatgctgaccttcagccttcggccttttggctgtggcatctgcaacaagcgcttcaagctgaagcaccatctgacagagcacatgaagacccatgctggagccctgcatgcctgtccccactgtggccgtcggttccgagtccatgcctgttttctccgccaccgggacctatgcaagggccagggctgggccactgcccactggacttacaagtgactgctgaggctatacactagcttctagaacaagataaccactgctgctgatggatacttttccctcactgccatggcacaccagtcatggatcttgtaatcatgccaagagaatagatacattatggacctcttgttcttagatatgggcctctcagcctggcagatgtggaaactcaaatttctcgtcccactccaggttttggctagccaaccctgcaggaaagtggtttataggccattcatacttaagttgatcacttgcccatggtggacatttttgtggtggtgatgtccattaaggaaaccagattttcaattatttagtgagagaagagttagagcaaaagacagtggtaaatgttttattccgtctccatgaggaattgaaggagttggtctccacctagagatacatttgatttacagcttaagtaattcagaggctaagctctaagcttttttctctcattgctggaatgatttaagcagaagtccttttgtgtacttttaaaattgtatctttccaggagcccctcagattgtaccttgctttctcaccaatagacaccttcccgacacttttttaatgttgtagctgagcactttaacaagttgagcattccatgtttcattcttagaaccttctttaatagagggtcttccctcaacagcctgtgcctctggtctacctttgaccaccactgataactaatatattggtcacaatgactggaatgtgactagtgatctcaggagatggcactgtcctaaagtgctgtcagggtggcaccactgctctctgaacaacttaccttggtcagagggactcaggtttgggacagcacaagctgaaggctggagagtaacttgcatagtaggaccatacctcttcctttcccatcccacccacatatgatagacagcccctctgttgagatatggaggggacagatactggaatcgggggtgggacttgcagttacttaaaattttttaataaactgtgccctgaaacctaaaaaaacagtg

SEQ ID NO: 736402 - DNA, 1866 bp, Homo sapiens
  misc_feature (580)..(580): n is a, c, g, or t
gttcctgctgggtgccgaggtagcgaggtcaggggtcaagagtggaacaccctcactggcccgggccggcgcgggagggctgtgtgatggcctcggagcgcccggagccggaggtggaagaagctgggcaggtgttcctgttaatgaaaaaggattatcgaatctcccgaaatgttcgcctggcttggttcctcagtcatctgcaccaaactgtgcaggccacaccccaggagatgctgtctgaacaggaattggaagtcctcagtgtcctgccccctgggtggcagccagatgaaccagtggtcccaaggccattcctcctggtaccttccacccgggtcaccttcctggcttggcagtatcggtttgtcattgagttggaccttagcccatctactggcattgtggatgattccacaggggagatcttgtttgatgaagttttccatgccctgtcccgctgcttaggcgggctgcttcggcccttccgagtgcctggatcttgcatcgacttccagcctgagatctatgtaactatccaggcctactcctccatcattggactgcagtcccaccaggngctggtacagggctgcctcttggacccttcccagcgggaggtgttcctgcagcagatatatgagcagctctgcctctttgaggataaggtggccaccatgctgcagcagcagtacgatccccagagccaggcagaagaccagtccccagactcaggggacctactgggccggaaggtaggcgtctccatggtgacagctgatcttgggctggtcagtatgattcgtcagggcatcttggcactgcagttactaccctcgaactctagtgcagggattatcgtgatcacggatggggtgaccagtgtacctgatgttgctgtctgtgagacactgctgaaccagcttcgcagtggcactgtggcttgttcctttgtccaggtgggaggagtttactcttatgactgcagttttggccatgtgcccaatgtggaattaatgaagttcatcgcaatggcaacatttgggtcctacctgtccacttgtcctgagccggagccaggcaacctgggtctgactgtctaccaccgggcatttctcctctattccttcctgcgcagtggggaagcactgaaccctgaatattactgcggtgagagggctctcagcaccgcctatttaatgagcacctggtctctgcaagcagcaaccctgcctggccttgcgccggaagaagcacactgagaaggaggtgccagccgacttggcagcactgtgtcgtacggcttcgagagggctacagtgtccgagaggtcacactggccaaaggagggtcccaacttggaggtaaagctgggtgcatgcatgtggaaacacaacatgcgcattgagtatgtggctatggcatcctggcccctggagcctgagggccctcgagtaacacgggtggaagtgacgatggaaggcggctacgacattttgcatgatgtgtcctgtgcactaaggcagcccattcgttcattgtatcgtacccatgttatccggcgtttctggaacacgctgcagagcatcaaccagacagaccagatgcttgcccaccttcagtccttctcctcagtgcctgagcatttcacgcttcctgacagcaccaagagcggagtgccactcttctacatccctccaggctccaccaccccggtgctctccctccagcccagtggttctgactcatcccatgcccagtttgctgcctactggaagccagtgctgtccatggatgcaaattcctggcagcgatggctgcacatgcatcgcctggtgctaatcctggagcatgacacgtgggtgc

SEQ ID NO: 736403 - DNA, 2167 bp, Homo sapiens
  misc_feature (881)..(881): n is a, c, g, or t
gttcctgctgggtgccgaggtagcgaggtcaggggtcaagagtggaacaccctcactggcccgggccggcgcgggagggctgtgtgatggcctcggagcgcccggagccggaggtggaagaagctgggcaggtgttcctgttaatgaaaaaggattatcgaatctcccgaaatgttcgcctggcttggttcctcagtcatctgcaccaaactgtgcaggccacaccccaggagatgctggtgaggcttagacacacgaaaggtgtgaggggccagcccagaaggatctgttttttaggagagtgctagaaacagacagggtgggagactaactcttaagtctggttagggcaagggactgcctacaagatgatggaaataaaaaataatttttccagagagtgagaggaagagtatacggttagattgagggaggtagagccaatgatgtgtcatttgggatatagaaggcaggtcctgggaagaaagggatacttcgctgatcctttccttttctttccatcctaattttcagcttcagtctgaacaggaattggaagtcctcagtgtcctgccccctgggtggcagccagatgaaccagtggtcccaaggccattcctcctggtaccttccacccgggtcaccttcctggcttggcagtatcggtttgtcattgagttggaccttagcccatctactggcattgtggatgattccacaggggagatcttgtttgatgaagttttccatgccctgtcccgctgcttaggcgggctgcttcggcccttccgagtgcctggatcttgcatcgacttccagcctgagatctatgtaactatccaggcctactcctccatcattggactgcagtcccaccaggngctggtacagggctgcctcttggacccttcccagcgggaggtgttcctgcagcagatatatgagcagctctgcctctttgaggataaggtggccaccatgctgcagcagcagtacgatccccagagccaggcagaagaccagtccccagactcaggggacctactgggccggaaggtaggcgtctccatggtgacagctgatcttgggctggtcagtatgattcgtcagggcatcttggcactgcagttactaccctcgaactctagtgcagggattatcgtgatcacggatggggtgaccagtgtacctgatgttgctgtctgtgagacactgctgaaccagcttcgcagtggcactgtggcttgttcctttgtccaggtgggaggagtttactcttatgactgcagttttggccatgtgcccaatgtggaattaatgaagttcatcgcaatggcaacatttgggtcctacctgtccacttgtcctgagccggagccaggcaacctgggtctgactgtctaccaccgggcatttctcctctattccttcctgcgcagtggggaagcactgaaccctgaatattactgcggtgagagggctctcagcaccgcctatttaatgagcacctggtctctgcaagcagcaaccctgcctggccttgcgccggaagaagcacactgagaaggaggtgccagccgacttggcagcactgtgtcgtacggcttcgagagggctacagtgtccgagaggtcacactggccaaaggagggtcccaacttggaggtaaagctgggtgcatgcatgtggaaacacaacatgcgcattgagtatgtggctatggcatcctggcccctggagcctgagggccctcgagtaacacgggtggaagtgacgatggaaggcggctacgacattttgcatgatgtgtcctgtgcactaaggcagcccattcgttcattgtatcgtacccatgttatccggcgtttctggaacacgctgcagagcatcaaccagacagaccagatgcttgcccaccttcagtccttctcctcagtgcctgagcatttcacgcttcctgacagcaccaagagcggagtgccactcttctacatccctccaggctccaccaccccggtgctctccctccagcccagtggttctgactcatcccatgcccagtttgctgcctactggaagccagtgctgtccatggatgcaaattcctggcagcgatggctgcacatgcatcgcctggtgctaatcctggagcatgacacgtgggtgc

SEQ ID NO: 736404 - DNA, 957 bp, Homo sapiens
gctggtacggccggagagtttgggatctggcccaggcattggaagtcgtcattcagttacaagagaagcatgtcaaagatgagcagattgaacattggaagaagatagtgaaaactcaggaagaattgaaagaacttcttaataagatggtaaatttgaaagagaaaattaaagaactccatcagcaatacaaagaagcatctgaagtaaagccacccagagatattactgccgagttcttagtgaaaagcaaacacagggatctgaccgccctatgcaaggaatatgatgaattagctgaaacacaaggaaagctagaagaaaaacttcaggagttggaagcgaatcccccaagtgatgtatatctctcatcaagagacagacaaatacttgattggcattttgcaaatcttgaatttgctaatgccacacctctctcaactctctcccttaagcactgggatcaggatgatgactttgagttcactggcagccacctgacagtaaggaatggctactcgtgtgtgcctgtggctttagcagaaggcctagacattaaactgaatacagcagtgcgacaggttcgctacacggcttcaggatgtgaagtgatagctgtgaatacccgctccacgagtcaaacctttatttataaatgcgacgcagttctctgtacccttcccctgggtgtgctgaagcagcagccaccagccgttcagtttgtgccacctctccctgagtggaaaacatctgcagtccaaaggatgggatttggcaaccttaacaaggtgggctgcgctttgaaccgggtgttacaggatcccaggtcacattgtcccggcattttgcaaacaactgcccagggtgagaacttcctcctcgtgaacctttaaggccacactgtggcactgggaaacccggctcgtgacacaacctcgtatagtgcagacggcccaa

SEQ ID NO: 736405 - DNA, 734 bp, Homo sapiens; identical to SEQ ID NO: 380610

SEQ ID NO: 736406 - DNA, 1516 bp, Homo sapiens
caagcgattctcttgcctcagtctcccaagcagctgagaatacaggcatgcgccaccacgccaggctaattttgtatttttagtagagatggggtttcacctgttggccaggctgatctcgaactcctgacctcaggtgatccacctgcctcgacctcccaaagtgctgggattacaggcatgagccacagcatccagcctgcccatcctttctatagagtctatgctgtgtgtaaaatataagacattttttacaactagtaagcttttatgatataaggtgatttcatatgaagcattcttttttttttttccttcagacaaatgaggcctacatgtaatttgctttacgtagtgagcttggcactgctctagacatcagagataaagaggttaataagacagataagatgctactttttgatttgtaatttcttcatataaggcacagccctggcttaggttctgacacagttactgagatcacctacatcacactgagagaactagtgatatcttttaataatcctgtagtcctttgttcttttgcagtgatgtatatctctcatcaagagacagacaaatacttgattggcattttgcaaatcttgaatttgctaatgccacacctctctcaactctctcccttaagcactgggatcaggtaagtttcccttattgtttattttattgcacatgtctttgggagggattgtaagagaaatagttaattttgtatgtgtgtttttaaacagctttagtaagagacatcatttacatacagtgaaattcacctattttaagtgaacagtttattgatttgccagacttcagtcataagcccccacacaatcagaatatagaacatgcccatcatcctgaaatgttttctcctgcctctttgtagttaatcccccatgctctggctcctggccctggacaaccactgatttgcgttatcactgtaattttgtttattctacagtttcatataaagtgaatcatacagtacatagctttttgtgtgtgatatatttcacttagtatagtttttgagatgtgcatgaagtttttgagattcatcttttttgcctgtatcagtagtttgttccttttaattatttaatagaattccattgtgtggatataccactggtgccttaatgggcatttgggttgtttcccttttttgactgctaatgaacgaagctgcttaagaatgttcatgtctttctcttgagtaaatatttatgaatggaattgctgggtactatggaaagtggatttttaactttataaatcaacttccaaactattttccaaattgccttcccatcagcaatgtatgaaaattccattttctccaaatcctcaccaatcttggtaatgccagtttttaaaatgtcagccattctaataggtatagtagtatttgcatttccctgatgactagtgatgtagagcaactcttcctgagcttatgagccattcatatgtcatctttgagtaaatgtct

SEQ ID NO: 736407 - DNA, 491 bp, Homo sapiens
gacaaaagaaacttccctaatctcactacccgaagatttagggacattttttggtgttttctctttttccttcagtttcctttggtaactgtagctaaatactgagtgatttgttctttagtttgccttaaaatattgactgtttccacaagcttgtgttttcattgttgttgtacagaactaggtgcaaatgacacagattaataaaaggttggaaatatgttcttttctctcctctttaggatgatgactttgagttcactggcagccacctgacagtaaggaatggctactcgtgtgtgcctgtggctttagcagaaggcctagacattaaactgaatacagcagtgcgacaggttcgctacacggcttcaggtatgtcactgctttacaaaaggtaagagagaactctcctgaaacaggactgatcttttgttaggtgcgacctatcaggtacatttcctgatagagtgtttatgacaccataggta

SEQ ID NO: 736408 - DNA, 1136 bp, Homo sapiens
catgtactgagctttcatatttattttgagatatataatttcaaaatatatatagtatataaacagacattcattaaaaaacaaacgaggaaaacgatgttaacataatttcagtaccctctctgaggtcagctttgaactcattcatactctgacaagctgagaatcactgtgcattctcaagcatagcacgctccacagttttaggctgcatcccccagatctgcatcacagccttcttgtagcattcttctgttggtcgatagtgagcagctaaccacagtcagaagacattggttctattgggatgagcactttattctttatttttggtctaaatgtacttaacttgagtaagtggtataaggtcctttcattagtctagatcaccagtgtatcaggagggtagtgtggggatgacagttgaggattctgaagttgactacaagggtttgaatcctggcacttattacgtgtgtagccttagatgagttatttcacctctacctcagttttcttatgtgaaacatgaaggtaatgaaaatagaaaaatgagaattgagaaatggatgtccatctgttgtacactaaatgttcagtgtccttatcagtgccatattcatcaccactagtcttttcccacccaacctctgcaggatgtgaagtgatagctgtgaatacccgctccacgagtcaaacctttatttataaatgcgacgcagttctctgtacccttcccctgggtgtgctgaagcagcagccaccagccgttcagtttgtgccacctctccctgagtggaaaacatctgcagtccaaaggatgggatttggcaaccttaacaaggtagcttgccctagacactcctgtctacagatctgatgtacaaatagcagtcttcgttgtttacttggtgaggaggtggccttgcatttttgggcatttggctatgctcccaattgtgacatcagggctgaggcgtgtcagttgattctcttcagtgcctaagtctatcatcaagtgtctgttcatatggacttagtcttatggggtcatttcacaaactcaggcctataaaaaggggatcgtaaatgtcatcctaaataataaggattgctgggcttattttgaaagcaga

SEQ ID NO: 736409 - DNA, 356 bp, Homo sapiens; identical to SEQ ID NO: 380612

SEQ ID NO: 736410 - DNA, 4848 bp, Homo sapiens
gagacgtcatttcactcttgttgcccaggctggagtacaatggtgcgatcttggctcactgcaacctccgcctcctgggttcaagtgattctcctgcctcagcctcctgagtagctgcgattacaggcatgtgccaccacacccagctaattttgtatttttagtagagacggggtttcactatattgtccaggctggtcttgaactcctgaccttgtgatccgcctgccttggcctcccaaagtgctgggattacaggtgtgagccaccacgcctggccagaattctacctttttaatattctccttggttctcccaagcaaatgcagatcaaagaataacataggcatgagtaagaaaggttagcagagtagaaagagcattggatttagagacaggaatcttggattcaagtcttcgctcttccagtaattctgctgggtgaccttaggtaagatattttgtgtttctgacccttagcttctacatctgaaaaatggggataatatctgcccccaggcagatattcaagggactgaataagatagtgggtagtgaagtacttttgtccagtgttaagtaccctgtaaagagtcacagggcttttcaagttaacagagtcatctgcttttttaaagaagggagcactgtgtccaggtccaagaagtttttcatcatcacaggtttctcatcaaaaagacactcccaggggcttctccagatgctgttctgacaccctgagcctcacactcacataaggcaggtggttctggatttatcaaagctgtaatgagctatactgaaccagccctgccctcagactgataatatgagacagacagctgtctggggggcaaaagaaagtgtcacttggaattgggtatacgcttatctaaaataggcccagtgtaagccccggctctcctcatccctgagaggccagcagcctgtgaagatctgctaactgaggcggccgagaacttgctgacctggctccccctcactgtgccctacagaaagggcaccgggcctcctcctgttgcccagagctccccatcagctgcagctgcttcttgtgcttttcatgctgttctgagggcctacggggagctcctttagctgctctggcaaaccaagggaagagaagacagatttcctttttatgtcaccttcatatacgagagcaaaatgaagacaacaaattggaaaagggattttggaaagtgatgctgccaaaaaccttctttaggagaaaggtcaaacccccctgatttttcaacagttctctaaggaacccagttctactcagttctcaagatcctgggtcacacaggccagagcagaggggaaaaaggaaaaggcaaagaaggaaaagggagggagaaaagagagaggggagagaggctggaactcaccatgcttgctgagtggttccaggctgcgacagtgatggtgtctcctacccgattccgacgggtaagcacctctgacacagtgaggctactttgggtccttctggaggagggctcaggggcatcccctgaacttggtcctacccttcgagtgccctgctcaaaaaggcaggacctgggctgttcgagttctgagaagtctgtggaagacctctgggtgtaggcattgctattggtagattccacgtttttacctattcgagttggggggtcttctaaagatttcaagtctcgcctactcttccaggcattccgcacagtaacatgtctggcatctgagaagcccacttctgaaggggcactatggcttttccacctgattgtctccgctggaggtgcatggctattcctctccacaggatccgatggcttgattataatgctgctccgagagaccactgtttctggcctgttcttcaggggcccatctgccattctctccgcttctgcaagctgcagggtgatgtcatgtttgtgaatggagagctcaaaaggggagctgacatggttgctaactgatgtgagctctgccagccccacctggatattgctagtggatgtgtgcctctccctcagggcctcacccggagcagctctggggctgctgctgtcagatggatatatagtaatgctacttgtcactttgtttggccctggtttggagacgggtttctgtttctccaacgtagtctctgttccagatcctcccatgatttttttcacatccttatcaacaataacaggtttgatgatggctctagaccgcaacgcctctctggggctaaagggcctttggctttttaccccagcaccattggtatctgggagctccatggtattggtggaggctctgacagatttcacagattcattctccattccagcatctttatcattctcaaatagggaggttctaggtgcccctcgggttttagccttttctctagagttaggctgtggtttgggctctggctctggagtgatggttgtatttaccaacttggcagtaacaagagatgctatgtccaagtcatcatctgagtctggcttctctctgccactggatttgatgactcgacacctcaaggcttcatgcggactgctgtcttccatcacaactgctgcaggttgattaaccccttctttatgtgaggttgaaaatccctgaaggatgttctcttggcttctacagctataaggatacttcgatagaacaggagccttggaattcgggcaactgttatcagcctcaaggccattggcagcctttttgcctttagagagcccttctgaggaggatcttcgagatgaggccagggctccaatggccttagaacagccagagtttgcagcctgagttacttgacttccgttgccaagcacgtgtcccctcttgccaaagacagtctcagaggaggtgtcagaagccttgtcagctctacccaatgggtcactgggaacagatccatgggtggtgtcactaaacgttcgtgttgtcttctccacttttcccttcagtccactctcggtgcctggcttggaagtccccttccacgctttactgtgctcctgagcagccggggggtagcgactcagcactgagggctgctccctagacttcttcccttcgctcttggaggagctgggtacaaaccggtcttcagttttctttgtctcctgagtcccactgtctgtactcacccccatgtgagaagcttttgctgccctcctgttggtgaaactgggagaagaaacctgcctgttgctcagagaatagttttcattgttgagagcaaactccctgttccggagtcgttcccgcttatgctgaggagacagttcccgcgctgtgtgcttggacacagaagcttcacttccgtggcctctaaacttagtcctctcatgtctgcctttgctggacaggaaagcatcttccccttctacctctccattttctaactctttctgtttcttgatttgtagctttatctcctccagttggctggctaataatttgtttttattttgttcacttaggtaattatcctgaaggtcgttatttttggacttcattttcttaagctcttcttccaacgattcaaagtgtttgatttgcgtcttaagtttctcaatctcttggttaaggtctttgactttgttgtcttcctgattgcggttcttttcattttctgatttgtttcttgtttcattctctacctgctttaggtagtccagaccacccttccttcttgattctttggacggcagtgtggaagagatgccatcctcaatccgtaggtcatttctttccagattagaagcattccttgtataatctcggttcatttttttgttctgctctagtttttgagtgagttcttttatcaatttctcattttctttctccttttcattcaagtattttctctcacttacaaagctcagagttaatgatttcagcttttctaactctgacgctaaactctgctcagttttatccaggcggtcctcagaagattctagttctttcactttgactctgagcatttccagctcagaggagattttcttggtcagatttctctcctcattcaggctcagacacagctgggtacagtcattcttactcctgctgaaggcctcttctagcttctctaattcagccattcgtttctgaagccgctcaatctcagatttcagctcccgggtgaggttttcttcctcttcaagtttctccttcatcagacgacacagatcctctgctctcttaatttcctcgtctttgccttcaattctcagcacccgctggcgcagcacttcaatctccgccaacatgctggagttgctaccttctgcctgaatcaccttgtcctggagatccaggagttcatcctctgctttctggaggttttttgtggcttcctccaactcatcaaggcggcggcttagactctgtagcttaaaccgcaagtggcggctggaggccgtctccttgtagcttgtaaattcggccatgtctactgccagccaatgtgggctcctagaggcatccaattccactcaaggggatgagaaatggttacctttctcttggcaaccacaatcttctttgacagctggagaccatcatcaatcatgtaggtaattcaagctttccgtcaatacttccggcggctctccctatgcttgctgttttggaaacagtcactcactctctttcaaaggcagttgtctcttgacctgatctcatctgataggtcgcagtcaaaatacaggcacacaatactcaggtttattcaatgtcccctctgcggccccgaaccgcgctcccgccagcgaagggttccgccgctcagctgccagcgaccctcgtgcc

SEQ ID NO: 736411 - DNA, 1210 bp, Homo sapiens
gcaggttagcattttattagataaaaacaggaaggagggtgcctggactacctgctttaggtagtccagaccacccttccttcttgattctttggacggcagtgtggaagagatgccatcctcaatccgtaggtcatttctttccagattagaagcattccttgtataatctcggttcatttttttgttctgctctagtttttgagtgagttcttttatcaatttctcattttctttctccttttcattcaagtattttctctcacttacaaagctcagagttaatgatttcagcttttctaactctgacgctaaactctgctcagttttatccaggcggtcctcagaagattctagttctttcactttgactctgagcatttccagctcagaggagattttcttggtcagatttctctcctcattcaggctcagacacagctgggtacagtcattcttactcctgctgaaggcctcttctagcttctctaattcagccattcgtttctgaagccgctcaatctcagatttcagctcccgggtgaggttttcttcctcttcaagtttctccttcatcagacgacacagatcctctgctctcttaatttcctcgtctttgccttcaattctcagcacccgctggcgcagcacttcaatctccgccaacatgctggagttgctaccttctgcctgaatcaccttgtcctggagatccaggagttcatcctctgctttctggaggttttttgtggcttcctccaactcatcaaggcggcggcttagactctgtagcttaaaccgcaagtggcggctggaggccgtctccttgtagcttgtaaattcggccatgtctactgccagccaatgtgggctcctagaggcatccaattccactcaaggggatgagaaatggttacctttctcttggcaaccacaatcttctttgacagctggagaccatcatcaatcatgtaggtaattcaagctttccgtcaatacttccggcggctctccctatgcttgctgttttggaaacagtcactcactctctttcaaaggcagttgtctcttgacctgatctcatctgataggtcgcagtcaaaatacaggcacacaatactcaggtttattcaatgtcccctctgcggccccgaaccgcgctcccgccagcgaagggttccgccgctcagctgccagcgaccctcgtgcc

SEQ ID NO: 736412 - DNA, 338 bp, Homo sapiens
ctggatagaatataaacagaatggaagagataggtaatgcatgaatcataccaagactgaggtgacccagagggctgtcccaaagactttcacatacaattcactgtcagcaaggggccaaggtaagatctgcatctagatcctgacactaaaggaacctggctaagctggctatgtctctctcaggaaagtcaagaaagaatttggctgtaggagacttcccctttcctataagatgatatggtcctagggtagaacccactgtctttgcttaaattaaaacacccgaacattcctcaacagtctaaaaatgtacatgacatcttacagctaggaag

SEQ ID NO: 736413 - DNA, 413 bp, Homo sapiens
aactataatcacaaccgccagtgtaataattgattcaagctaagattatcagtggatgctaaaaccatttggttggaaaataggatatttatactctctcaaagtcaccgtacagatttctcacaaagggaagtagggatccctacaacggaaagataaaacttaccatcaacaatgagacagactgggcgcagtggctcatgcctgtaatcccagcactctggaaggccgaggcgagtggatgacttgaagtcaggagtttgagaacagcctggccaaaatggtgaaaccctgtttctactaaaaatacaaaaattagccaggcatggtggcacacacttgtcatcccagcttcttgggaggctgaggcgggaggatcacttgaacctaggagggggaggctgcagtgagcc

SEQ ID NO: 736414 - DNA, 12028 bp, Homo sapiens
tgtcccggcgcggcgggagcgcgcttggcgcgtgcgtacgcgacggcggttggcggcgcgcgggcagcgtgaagcgaggcgaggcaaggcttttcggacccacggagcgacagagcgagcggcccctacggccgtcggcggcccggcggcccgagatgttatctgggaagaaggcggcagccgcggcggcggcggctgcagcggcagcaaccgggacggaggctggccctgggacagcaggcggctccgagaacgggtctgaggtggccgcgcagcccgcgggcctgtcgggcccagccgaggtcgggccgggggcggtgggggagcgcacaccccgcaagaaagagcctccgcgggcctcgccccccgggggcctggcggaaccgccggggtccgcagggcctcaggccggccctactgtcgtgcctgggtctgcgacccccatggaaactggaatagcagagactccggaggggcgtcggaccagccggcgcaagcgggcgaaggtagagtacagagagatggatgaaagcttggccaacctctcagaagatgagtattattcagaagaagagagaaatgccaaagcagagaaggaaaagaagcttcccccaccaccccctcaagccccacctgaggaagaaaatgaaagtgagcctgaagaaccatcggggcaagcaggaggacttcaagacgacagttctggagggtatggagacggccaagcatcaggtgagggtggcattagatgcttgccacttagtagcaagagccgccaagtaggaattgatgcttgcaagtgtttttggctgtggtatccacattttagccagaagcgcagatgtcctttgctttcttcgttaggtgtggagggcgcagctttccagagccgacttcctcatgaccggatgacttctcaagaagcagcctgttttccagatattatcagtggaccacaacagacccagaaggtttttcttttcattagaaaccgcacactgcagttgtggttggataatccaaagattcagctgacatttgaggctactctccaacaattagaagcaccttataacagtgatactgtgcttgtccaccgagttcacagttatttagagcgtcatggtcttatcaacttcggcatctataagaggataaaacccctaccaactaaaaagacaggaaaggtaattattataggctctggggtctcaggcttggcagcagctcgacagttacaaagttttggaatggatgtcacacttttggaagccagggatcgtgtgggtggacgagttgccacatttcgcaaaggaaactatgtagctgatcttggagccatggtggtaacaggtcttggagggaatcctatggctgtggtcagcaaacaagtaaatatggaactggccaagatcaagcaaaaatgcccactttatgaagccaacggacaagctgttcctaaagagaaagatgaaatggtagagcaagagtttaaccggttgctagaagctacatcttaccttagtcatcaactagacttcaatgtcctcaataataagcctgtgtcccttggccaggcattggaagttgtcattcagttacaagagaagcatgtcaaagatgagcagattgaacattggaagaagatagtgaaaactcaggaagaattgaaagaacttcttaataagatggtaaatttgaaagagaaaattaaagaactccatcagcaatacaaagaagcatctgaagtaaagccacccagagatattactgccgagttcttagtgaaaagcaaacacagggatctgaccgccctatgcaaggaatatgatgaattagctgaaacacaaggaaagctagaagaaaaacttcaggagttggaagcgaatcccccaagtgatgtatatctctcatcaagagacagacaaatacttgattggcattttgcaaatcttgaatttgctaatgccacacctctctcaactctctcccttaagcactgggatcaggatgatgactttgagttcactggcagccacctgacagtaaggaatggctactcgtgtgtgcctgtggctttagcagaaggcctagacattaaactgaatacagcagtgcgacaggttcgctacacggcttcaggatgtgaagtgatagctgtgaatacccgctccacgagtcaaacctttatttataaatgcgacgcagttctctgtacccttcccctgggtgtgctgaagcagcagccaccagccgttcagtttgtgccacctctccctgagtggaaaacatctgcagtccaaaggatgggatttggcaaccttaacaaggtggtgttgtgttttgatcgggtgttctgggatccaagtgtcaatttgttcgggcatgttggcagtacgactgccagcaggggtgagctcttcctcttctggaacctctataaagctccaatactgttggcactagtggcaggagaagctgctggtatcatggaaaacataagtgacgatgtgattgttggccgatgcctggccattctcaaagggatttttggtagcagtgcagtacctcagcccaaagaaactgtggtgtctcgttggcgtgctgatccctgggctcggggctcttattcctatgttgctgcaggatcatctggaaatgactatgatttaatggctcagccaatcactcctggcccctcgattccaggtgccccacagccgattccacgactcttctttgcgggagaacatacgatccgtaactacccagccacagtgcatggtgctctgctgagtgggctgcgagaagcgggaagaattgcagaccagtttttgggggccatgtatacgctgcctcgccaggccacaccaggtgttcctgcacagcagtccccaagcatgtgagacagatgcattctaagggaagaggcccatgtgcctgtttctgccatgtaaggaaggctcttctagcaatactagatcccactgagaaaatccaccctggcatctgggctcctgatcagctgatggagctcctgatttgacaaaggagcttgcctcctttgaatgacctagagcacagggaggaacttgtccattagtttggaattgtgttcttcgtaaagactgaggcaagcaagtgctgtgaaataacatcatcttagtcccttggtgtgtggggtttgttttttttttttatattttgagaataaaacttcatataaaattggccctctcttttgttcctttgagttggagttacatacaagatgggggcattactcctttggaaatgccaagtttatcctatggcaatagtaatacatgttttctccatgtttaaataaggaagaagatgttcatataaaagagaaaaatggtttgatcaggtcagaagataaggtaggggggccggtcctgtagaagcagtggacttcctggtcagtcggactaggcttcctcacttgggtgggggtggagtgtggtggtgtgccaagaacatggttattaggaaactttggatgcactttcaagatagaacacaaaagagctgaaacaaagtctgagcctttgggagaccagtctgcctttattcctgattccctccatgggtatgtgctaaaacttcccaattctactaaaggtggtggtgtacattttgggaagcgcactacataggatcaagggcttaggtaacagctggtttaacagattgccacaaacttagtggctcttaaaaaaacagaaatctattcgaaagttctggatgcttaaagtctaaaatgggtccacagggctgcattcattacagaggctctcagagcagggaggatcagttcatttccttgctcttttcagcttctaggtgtgggaaggctcgtggctccttcctccatcctcagagcacataactccagtttctgcttccatcatcacattgccttctcctgtagtcaaatcttttgtctctctcttaaaaggatactacctgtgattacatttaaggcccacctggatcatctaggatgttctgcctcatcccagcatccttatctgcaaagtcccttttgccatataagatgataaaaacatgttacatgctggttccttcccaggggctcctgactgactgacagatagatgataaacactgttactgcaaatccaagtaatgtcccttaaatgtggttttattctttcttactgtgagttaagggacatcattatatatattggtgatctgactggaagatgaaaacggagaaggcttttcccccccctagtcttagaattcgtggcagtaatggaaagaatctgcacaccaggatcagggcagttaatgtttccagtccttgcagtatcagtaattggttaggtaaaatacccaattttaagtattacacaatgaaataaataaatatactagagctgcgccaacgcatagaagacagatgatacacagggatgacattgacaaaactggcatcacagactcgcacagagtatacggaaacgagggagctttattggttacatattgtactgcagagccaacagagagcattcgcgccagaggatacatgcagacaggcagctccaatgatacacatgcacccaaggagccctgagccactgctttgccctggtttccagcgacaggttctggcctccttggtcccatgcttggagctgctgcacctagactctaaggggcaggggtgagagagaccagagcacctgcctgagcaagtaggtgtggaccaacaggctgcccccaacaaaggggcctataatgcaataacagtttatttgagggctactttcttagccctctcaatctttaaaatacaaaaaaatagactttattctcttaaaaatacattccattcagtatatgttctgagctgggaagcagcaggaaaatagggcccctttcctatgatcctatggttgtgaggctttgaggagaaccctgctccccactcggggtattcaaaaaataatccctaaaagcagctctttccaaagcaatcttgtcagagaaataacaaaacctcataacaaggtagccagggacccagcctctgggtccccattcctttattgggaagtggtagcacttggcactgacccactaaatataaagaactaaaactgccccaggacgacaagtccaagaacactatagtgccccctgcatcccgaacactccactgacgggggttatttatgtgcaagcttgcctacagctgagggtggggtggcatccttggccccactgcagatccctttaacccacactgtgactctttctcattgccacccaaaagcaaaaaacagccacagcttctttatccacctgcagctttctctggtttagtatcagagtggcaaaaaaagcagcagcacgtggaagagatcagctgctggtactaagccagcttcacttcctccaaccaagcagctctattgccaggtcccccaactcactaggaaccctccaacaaccatacacctgccagtaaaatttaagagccaagctgcggaagaaaactgtcataaaagtgggtttgttgaccgggggcagtgggactatttggcttgattaaacaactattcaactaccaggtctcccctctacttggaggcttcctccaggacccctgatgatgaggcctgggtccaaacagtcacacctcagttgcttttcagaaacatgcctcccaactttgggatttgagagccagccttgccagccatttgaagcccagagaaacagcctccagcctttacttgctattacaatgttattttctgcaatgctgaggacacttaaaaataaaatctatctagaaagtgtgcagattaaagaaacaaaatatcctgaaataactgttacaagcaaatcctattgcactcagatttcaagatggcagccccagcaaaagggcatcacagctgtccctcttcaacaggacattttgagtagcagcagatgttggtgctgctgaaatgtggaaagatccagactttggcaccaggagctatagcaccagaatccagggctccaacacccaaagacaagaattattggcgagatctttttaggcatggcttggcgcccttctgtttccatcagcagagaagagccacagacttagtttcctaatacctttagttgaccaccacagaggttgattttctttgaactctcaaggttgccaaccagtgaaggagaatggcagggaggctgcaagtgaaggatggcagccttgagtgagctagtttctggccagtaagccaggagaagcagcagtaagagatcttggaaatagcatcttgagcatcagaggtggggatgtggacaggaaaggcaggccacatgacaatgcctttagattggcaaaactctgggaagcagaagtatgagcaatagattcctgtccctgaaagtaaggtaggtgctccccaagcctcctcactgccaaatctgatacagacaagggcaggatgaacactggttcccatgctgagtgaaggcagagaagacaaattcctctggaggaagtcttgagtcttcctcttgccaggaaattcataggagatgcacaggaacaggagatacacagacttgggtactttccataatacctagactcctagaacgccaggagatactgtgtggcactgggcaaggctgatgccacaaagagcctcagagaccatcccatctaatcccttcacactttgcagactgggaaacaggcccacggagcttctctgagctcatccccatgagattaaaacatacagaaactaaaaaacaaggcccagaaaaacaattgagggcaggagggaagaacccacacggatgataccttccacaagcaaaaatcatcccatactattatagatggtgaaaacaggagaaccttagaataccagatttggtgcccttagagatcatccatttcaaagaactcattttacagacagggaaactgaggctccaagaagacaatgactcacccaaggtcacacagcaaggaagtaaagccatggggaaaaaaatccagcttaccagactggtagtttaatgttctctcattctgagggcaatagtgtctacttcataaaggtagcctttgaaagaggatcccttctttgaattgacagaatgctaaagaaaaagcactgccaagaatatacaattcttttcaacttccccatgtgactggtataaggaacctaaccaatttatttacgtggctttctgaaaagtttgctgcattttgaactatataaagctgaggccctcaatgcgtatgtacgtatcacctttcctccagcgaagtcatcatgatagtcgacttgcagaaatccggggcccacttctgtaggaatgcatcagcttggtaaagtgcgatgcctcctccatgggggatggagaaggaggaacaggagggagtagtctcacagtccatgcctctcatggagctattgcttgtggagtgactaaaggggtctgctttccctcttgctgggcacttcctagaaggcagaggatgctgggtcaggcccagcttagcctagggattttcccaaggtggaaacaatgaagtcagcttgaagtctccagccactggagagaaagcaggcgatgccagcagcattactggtgctcaggaaaggagatgcatgaggcttgcacctccaggtgcctttggaaggtgagcagagagagctggggttggggagggatgatgtcattccaatgggtatccgcatgagtatctgcatgctctgcttccaggagactggtaagccaggagcaggtcaaacttcaacctaaagggtagtctcataatcctttagaggcagcacagacccctttctgctttaagtctgaagaaaagaactccaaggggaaagaaatgaaagccccctagatagagctgatggctggtaaatcttatggggtacttgagcccattgggcaaatgaggagtgaagtggatatagtgaggagactgagaaaccagaacattaaccacacagacagaggctgccctaggatccagaaacaacccaccaaggagccgagaagaatttttgactcctgctgtgtgctggggactttatcttcccttgtttgggggccagaatggtccaactacttggtggacagggacaaggagagagagaggactcgtgcattggggaaggttgggcctgggtgactgtccagcttgtagtctctgattccctctggccaaatggcaaaaattacctgagccacagcccggctctaccacagttttccagccaaggcttgtgtcttgcctggttaactggccttggatccttcgtggggcaggacggtggaagagctgagaagcaggagcagagggcagacaacagacacccagcgggctcagttctcctcagcacagggcctggttggccgtaatcgttcctcggcccgtactcgcccagactctggcagcccctgcttcccaggcagttcagacggatccagggagttgtgcagttgcctgtagacactgagtgtacagtcttccccttcttcctccatgcttgctgagtggttccaggctgcgacagtgatggtgtctcctacccgattccgacgggtaagcacctctgacacagtgaggctactttgggtccttctggaggagggctcaggggcatcccctgaacttggtcctacccttcgagtgccctgctcaaaaaggcaggacctgggctgttcgagttctgagaagtctgtggaagacctctgggtgtaggcattgctattggtagattccacgtttttacctattcgagttggggggtcttctaaagatttcaagtctcgcctactcttccaggcattccgcacagtaacatgtctggcatctgagaagcccacttctgaaggggcactatggcttttccacctgattgtctccgctggaggtgcatggctattcctctccacaggatccgatggcttgattataatgctgctccgagagaccactgtttctggcctgttcttcaggggcccatctgccattctctccgcttctgcaagctgcagggtgatgtcatgtttgtgaatggagagctcaaaaggggagctgacatggttgctaactgatgtgagctctgccagccccacctggatattgctagtggatgtgtgcctctccctcagggcctcacccggagcagctctggggctgctgctgtcagatggatatatagtaatgctacttgtcactttgtttggccctggtttggagacgggtttctgtttctccaacgtagtctctgttccagatcctcccatgatttttttcacatccttatcaacaataacaggtttgatgatggctctagaccgcaacgcctctctggggctaaagggcctttggctttttaccccagcaccattggtatctgggagctccatggtattggtggaggctctgacagatttcacagattcattctccattccagcatctttatcattctcaaatagggaggttctaggtgcccctcgggttttagccttttctctagagttaggctgtggtttgggctctggctctggagtgatggttgtatttaccaacttggcagtaacaagagatgctatgtccaagtcatcatctgagtctggcttctctctgccactggatttgatgactcgacacctcaaggcttcatgcggactgctgtcttccatcacaactgctgcaggttgattaaccccttctttatgtgaggttgaaaatccctgaaggatgttctcttggcttctacagctataaggatacttcgatagaacaggagccttggaattcgggcaactgttatcagcctcaaggccattggcagcctttttgcctttagagagcccttctgaggaggatcttcgagatgaggccagggctccaatggccttagaacagccagagtttgcagcctgagttacttgacttccgttgccaagcacgtgtcccctcttgccaaagacagtctcagaggaggtgtcagaagccttgtcagctctacccaatgggtcactgggaacagatccatgggtggtgtcactaaacgttcgtgttgtcttctccacttttcccttcagtccactctcggtgcctggcttggaagtccccttccacgctttactgtgctcctgagcagccggggggtagcgactcagcactgagggctgctccctagacttcttcccttcgctcttggaggagctgggtacaaaccggtcttcagttttctttgtctcctgagtcccactgtctgtactcacccccatgtgagaagcttttgctgccctcctgttggtgaaactgggagaagaaacctgcctgttgctcagagaatagttttcattgttgagagcaaactccctgttccggagtcgttcccgcttatgctgaggagacagttcccgcgctgtgtgcttggacacagaagcttcacttccgtggcctctaaacttagtcctctcatgtctgcctttgctggacaggaaagcatcttccccttctacctctccattttctaactctttctgtttcttgatttgtagctttatctcctccagttggctggctaataatttgtttttattttgttcacttaggtaattatcctgaaggtcgttatttttggacttcattttcttaagctcttcttccaacgattcaaagtgtttgatttgcgtcttaagtttctcaatctcttggttaaggtctttgactttgttgtcttcctgattgcggttcttttcattttctgatttgtttcttgtttcattctctacctgctttaggtagtccagaccacccttccttcttgattctttggacggcagtgtggaagagatgccatcctcaatccgtaggtcatttctttccagattagaagcattccttgtataatctcggttcatttttttgttctgctctagtttttgagtgagttcttttatcaatttctcattttctttctccttttcattcaagtattttctctcacttacaaagctcagagttaatgatttcagcttttctaactctgacgctaaactctgctcagttttatccaggcggtcctcagaagattctagttctttcactttgactctgagcatttccagctcagaggagattttcttggtcagatttctctcctcattcaggctcagacacagctgggtacagtcattcttactcctgctgaaggcctcttctagcttctctaattcagccattcgtttctgaagccgctcaatctcagatttcagctcccgggtgaggttttcttcctcttcaagtttctccttcatcagacgacacagatcctctgctctcttaatttcctcgtctttgccttcaattctcagcacccgctggcgcagcacttcaatctccgccaacatgctggagttgctaccttctgcctgaatcaccttgtcctggagatccaggagttcatcctctgctttctggaggttttttgtggcttcctccaactcatcaaggcggcggcttagactctgtagcttaaaccgcaagtggcggctggaggccgtctccttgtagcttgtaaattcggccatgtctactgccagccaatgtgggctcctagaggcatccaattccactcaaggggatgagaaatggttacctttctcttggcaaccacaatcttctttgacagctggagaccatcatcaatcatgtaggtaattcaagctttccgtcaatacttccggcggctctccctatgcttgctgttttggaaacagtcactcactctctttcaaaggcagttgtctcttgacctgatctcatctgataggtcgcagtcaaaatacaggcacacaatactcaggtttattcaatgtcccctctgcggccccgaaccgcgctcccgccagcgaagggttccgccgctcagctgccagcgaccctcgtgcc

SEQ ID NO: 736415 - DNA, 12171 bp, Homo sapiens
tgtcccggcgcggcgggagcgcgcttggcgcgtgcgtacgcgacggcggttggcggcgcgcgggcagcgtgaagcgaggcgaggcaaggcttttcggacccacggagcgacagagcgagcggcccctacggccgtcggcggcccggcggcccgagatgttatctgggaagaaggcggcagccgcggcggcggcggctgcagcggcagcaaccgggacggaggctggccctgggacagcaggcggctccgagaacgggtctgaggtggccgcgcagcccgcgggcctgtcgggcccagccgaggtcgggccgggggcggtgggggagcgcacaccccgcaagaaagagcctccgcgggcctcgccccccgggggcctggcggaaccgccggggtccgcagggcctcaggccggccctactgtcgtgcctgggtctgcgacccccatggaaactggaatagcagagactccggaggggcgtcggaccagccggcgcaagcgggcgaaggtagagtacagagagatggatgaaagcttggccaacctctcagaagatgagtattattcagaagaagagagaaatgccaaagcagagaaggaaaagaagcttcccccaccaccccctcaagccccacctgaggaagaaaatgaaagtgagcctgaagaaccatcggggcaagcaggaggacttcaagacgacagttctggagggtatggagacggccaagcatcaggtgagggtggcattagatgcttgccacttagtagcaagagccgccaagtaggaattgatgcttgcaagtgtttttggctgtggtatccacattttagccagaagcgcagatgtcctttgctttcttcgttaggtgtggagggcgcagctttccagagccgacttcctcatgaccggatgacttctcaagaagcagcctgttttccagatattatcagtggaccacaacagacccagaaggtttttcttttcattagaaaccgcacactgcagttgtggttggataatccaaagattcagctgacatttgaggctactctccaacaattagaagcaccttataacagtgatactgtgcttgtccaccgagttcacagttatttagagcgtcatggtcttatcaacttcggcatctataagaggataaaacccctaccaactaaaaagacaggaaaggtaattattataggctctggggtctcaggcttggcagcagctcgacagttacaaagttttggaatggatgtcacacttttggaagccagggatcgtgtgggtggacgagttgccacatttcgcaaaggaaactatgtagctgatcttggagccatggtggtaacaggtcttggagggaatcctatggctgtggtcagcaaacaagtaaatatggaactggccaagatcaagcaaaaatgcccactttatgaagccaacggacaagctgttcctaaagagaaagatgaaatggtagagcaagagtttaaccggttgctagaagctacatcttaccttagtcatcaactagacttcaatgtcctcaataataagcctgtgtcccttggccaggcattggaagttgtcattcagttacaagagaagcatgtcaaagatgagcagattgaacattggaagaagatagtgaaaactcaggaagaattgaaagaacttcttaataagatggtaaatttgaaagagaaaattaaagaactccatcagcaatacaaagaagcatctgaagtaaagccacccagagatattactgccgagttcttagtgaaaagcaaacacagggatctgaccgccctatgcaaggaatatgatgaattagctgaaacacaaggaaagctagaagaaaaacttcaggagttggaagcgaatcccccaagtgatgtatatctctcatcaagagacagacaaatacttgattggcattttgcaaatcttgaatttgctaatgccacacctctctcaactctctcccttaagcactgggatcaggatgatgactttgagttcactggcagccacctgacagtaaggaatggctactcgtgtgtgcctgtggctttagcagaaggcctagacattaaactgaatacagcagtgcgacaggttcgctacacggcttcaggatgtgaagtgatagctgtgaatacccgctccacgagtcaaacctttatttataaatgcgacgcagttctctgtacccttcccctgggtgtgctgaagcagcagccaccagccgttcagtttgtgccacctctccctgagtggaaaacatctgcagtccaaaggatgggatttggcaaccttaacaaggtggtgttgtgttttgatcgggtgttctgggatccaagtgtcaatttgttcgggcatgttggcagtacgactgccagcaggggtgagctcttcctcttctggaacctctataaagctccaatactgttggcactagtggcaggagaagctgctggtatcatggaaaacataagtgacgatgtgattgttggccgatgcctggccattctcaaagggatttttggtagcagtgcagtacctcagcccaaagaaactgtggtgtctcgttggcgtgctgatccctgggctcggggctcttattcctatgttgctgcaggatcatctggaaatgactatgatttaatggctcagccaatcactcctggcccctcgattccaggtgccccacagccgattccacgactcttctttgcgggagaacatacgatccgtaactacccagccacagtgcatggtgctctgctgagtgggctgcgagaagcgggaagaattgcagaccagtttttgggggccatgtatacgctgcctcgccaggccacaccaggtgttcctgcacagcagtccccaagcatgtgagacagatgcattctaagggaagaggcccatgtgcctgtttctgccatgtaaggaaggctcttctagcaatactagatcccactgagaaaatccaccctggcatctgggctcctgatcagctgatggagctcctgatttgacaaaggagcttgcctcctttgaatgacctagagcacagggaggaacttgtccattagtttggaattgtgttcttcgtaaagactgaggcaagcaagtgctgtgaaataacatcatcttagtcccttggtgtgtggggtttgttttttttttttatattttgagaataaaacttcatataaaattggccctctcttttgttcctttgagttggagttacatacaagatgggggcattactcctttggaaatgccaagtttatcctatggcaatagtaatacatgttttctccatgtttaaataaggaagaagatgttcatataaaagagaaaaatggtttgatcaggtcagaagataaggtaggggggccggtcctgtagaagcagtggacttcctggtcagtcggactaggcttcctcacttgggtgggggtggagtgtggtggtgtgccaagaacatggttattaggaaactttggatgcactttcaagatagaacacaaaagagctgaaacaaagtctgagcctttgggagaccagtctgcctttattcctgattccctccatgggtatgtgctaaaacttcccaattctactaaaggtggtggtgtacattttgggaagcgcactacataggatcaagggcttaggtaacagctggtttaacagattgccacaaacttagtggctcttaaaaaaacagaaatctattcgaaagttctggatgcttaaagtctaaaatgggtccacagggctgcattcattacagaggctctcagagcagggaggatcagttcatttccttgctcttttcagcttctaggtgtgggaaggctcgtggctccttcctccatcctcagagcacataactccagtttctgcttccatcatcacattgccttctcctgtagtcaaatcttttgtctctctcttaaaaggatactacctgtgattacatttaaggcccacctggatcatctaggatgttctgcctcatcccagcatccttatctgcaaagtcccttttgccatataagatgataaaaacatgttacatgctggttccttcccaggggctcctgactgactgacagatagatgataaacactgttactgcaaatccaagtaatgtcccttaaatgtggttttattctttcttactgtgagttaagggacatcattatatatattggtgatctgactggaagatgaaaacggagaaggcttttcccccccctagtcttagaattcgtggcagtaatggaaagaatctgcacaccaggatcagggcagttaatgtttccagtccttgcagtatcagtaattggttaggtaaaatacccaattttaagtattacacaatgaaataaataaatatactagagctgcgccaacgcatagaagacagatgatacacagggatgacattgacaaaactggcatcacagactcgcacagagtatacggaaacgagggagctttattggttacatattgtactgcagagccaacagagagcattcgcgccagaggatacatgcagacaggcagctccaatgatacacatgcacccaaggagccctgagccactgctttgccctggtttccagcgacaggttctggcctccttggtcccatgcttggagctgctgcacctagactctaaggggcaggggtgagagagaccagagcacctgcctgagcaagtaggtgtggaccaacaggctgcccccaacaaaggggcctataatgcaataacagtttatttgagggctactttcttagccctctcaatctttaaaatacaaaaaaatagactttattctcttaaaaatacattccattcagtatatgttctgagctgggaagcagcaggaaaatagggcccctttcctatgatcctatggttgtgaggctttgaggagaaccctgctccccactcggggtattcaaaaaataatccctaaaagcagctctttccaaagcaatcttgtcagagaaataacaaaacctcataacaaggtagccagggacccagcctctgggtccccattcctttattgggaagtggtagcacttggcactgacccactaaatataaagaactaaaactgccccaggacgacaagtccaagaacactatagtgccccctgcatcccgaacactccactgacgggggttatttatgtgcaagcttgcctacagctgagggtggggtggcatccttggccccactgcagatccctttaacccacactgtgactctttctcattgccacccaaaagcaaaaaacagccacagcttctttatccacctgcagctttctctggtttagtatcagagtggcaaaaaaagcagcagcacgtggaagagatcagctgctggtactaagccagcttcacttcctccaaccaagcagctctattgccaggtcccccaactcactaggaaccctccaacaaccatacacctgccagtaaaatttaagagccaagctgcggaagaaaactgtcataaaagtgggtttgttgaccgggggcagtgggactatttggcttgattaaacaactattcaactaccaggtctcccctctacttggaggcttcctccaggacccctgatgatgaggcctgggtccaaacagtcacacctcagttgcttttcagaaacatgcctcccaactttgggatttgagagccagccttgccagccatttgaagcccagagaaacagcctccagcctttacttgctattacaatgttattttctgcaatgctgaggacacttaaaaataaaatctatctagaaagtgtgcagattaaagaaacaaaatatcctgaaataactgttacaagcaaatcctattgcactcagatttcaagatggcagccccagcaaaagggcatcacagctgtccctcttcaacaggacattttgagtagcagcagatgttggtgctgctgaaatgtggaaagatccagactttggcaccaggagctatagcaccagaatccagggctccaacacccaaagacaagaattattggcgagatctttttaggcatggcttggcgcccttctgtttccatcagcagagaagagccacagacttagtttcctaatacctttagttgaccaccacagaggttgattttctttgaactctcaaggttgccaaccagtgaaggagaatggcagggaggctgcaagtgaaggatggcagccttgagtgagctagtttctggccagtaagccaggagaagcagcagtaagagatcttggaaatagcatcttgagcatcagaggtggggatgtggacaggaaaggcaggccacatgacaatgcctttagattggcaaaactctgggaagcagaagtatgagcaatagattcctgtccctgaaagtaaggtaggtgctccccaagcctcctcactgccaaatctgatacagacaagggcaggatgaacactggttcccatgctgagtgaaggcagagaagacaaattcctctggaggaagtcttgagtcttcctcttgccaggaaattcataggagatgcacaggaacaggagatacacagacttgggtactttccataatacctagactcctagaacgccaggagatactgtgtggcactgggcaaggctgatgccacaaagagcctcagagaccatcccatctaatcccttcacactttgcagactgggaaacaggcccacggagcttctctgagctcatccccatgagattaaaacatacagaaactaaaaaacaaggcccagaaaaacaattgagggcaggagggaagaacccacacggatgataccttccacaagcaaaaatcatcccatactattatagatggtgaaaacaggagaaccttagaataccagatttggtgcccttagagatcatccatttcaaagaactcattttacagacagggaaactgaggctccaagaagacaatgactcacccaaggtcacacagcaaggaagtaaagccatggggaaaaaaatccagcttaccagactggtagtttaatgttctctcattctgagggcaatagtgtctacttcataaaggtagcctttgaaagaggatcccttctttgaattgacagaatgctaaagaaaaagcactgccaagaatatacaattcttttcaacttccccatgtgactggtataaggaacctaaccaatttatttacgtggctttctgaaaagtttgctgcattttgaactatataaagctgaggccctcaatgcgtatgtacgtatcacctttcctccagcgaagtcatcatgatagtcgacttgcagaaatccggggcccacttctgtaggaatgcatcagcttggtaaagtgcgatgcctcctccatgggggatggagaaggaggaacaggagggagtagtctcacagtccatgcctctcatggagctattgcttgtggagtgactaaaggggtctgctttccctcttgctgggcacttcctagaaggcagaggatgctgggtcaggcccagcttagcctagggattttcccaaggtggaaacaatgaagtcagcttgaagtctccagccactggagagaaagcaggcgatgccagcagcattactggtgctcaggaaaggagatgcatgaggcttgcacctccaggtgcctttggaaggtgagcagagagagctggggttggggagggatgatgtcattccaatgggtatccgcatgagtatctgcatgctctgcttccaggagactggtaagccaggagcaggtcaaacttcaacctaaagggtagtctcataatcctttagaggcagcacagacccctttctgctttaagtctgaagaaaagaactccaaggggaaagaaatgaaagccccctagatagagctgatggctggtaaatcttatggggtacttgagcccattgggcaaatgaggagtgaagtggatatagtgaggagactgagaaaccagaacattaaccacacagacagaggctgccctaggatccagaaacaacccaccaaggagccgagaagaatttttgactcctgctgtgtgctggggactttatcttcccttgtttgggggccagaatggtccaactacttggtggacagggacaaggagagagagaggactcgtgcattggggaaggttgggcctgggtgactgtccagcttgtagtctctgattccctctggccaaatggcaaaaattacctgagccacagcccggctctaccacagttttccagccaaggcttgtgtcttgcctggttaactggccttggatccttcgtggggcaggacggtggaagagctgagaagcaggagcagagggcagacaacagacacccagcgggctcagttctcctcagcacagggcctggttggccgtaatcgttcctcggcccgtactcgcccagactctggcagcccctgcttcccaggcagttcagacggatccagggagttgtgcagttgcctgtagacactgagtgtacagtcttccccttcttcctccatgcttgctgagtggttccaggctgcgacagtgatggtgtctcctacccgattccgacgggtaagcacctctgacacagtgaggctactttgggtccttctggaggagggctcaggggcatcccctgaacttggtcctacccttcgagtgccctgctcaaaaaggcaggacctgggctgttcgagttctgagaagtctgtggaagacctctgggtgtaggcattgctattggtagattccacgtttttacctattcgagttggggggtcttctaaagatttcaagtctcgcctactcttccaggcattccgcacagtaacatgtctggcatctgagaagcccacttctgaaggggcactatggcttttccacctgattgtctccgctggaggtgcatggctattcctctccacaggatccgatggcttgattataatgctgctccgagagaccactgtttctggcctgttcttcaggggcccatctgccattctctccgcttctgcaagctgcagggtgatgtcatgtttgtgaatggagagctcaaaaggggagctgacatggttgctaactgatgtgagctctgccagccccacctggatattgctagtggatgtgtgcctctccctcagggcctcacccggagcagctctggggctgctgctgtcagatggatatatagtaatgctacttgtcactttgtttggccctggtttggagacgggtttctgtttctccaacgtagtctctgttccagatcctcccatgatttttttcacatccttatcaacaataacaggtttgatgatggctctagaccgcaacgcctctctggggctaaagggcctttggctttttaccccagcaccattggtatctgggagctccatggtattggtggaggctctgacagatttcacagattcattctccattccagcatctttatcattctcaaatagggaggttctaggtgcccctcgggttttagccttttctctagagttaggctgtggtttgggctctggctctggagtgatggttgtatttaccaacttggcagtaacaagagatgctatgtccaagtcatcatctgagtctggcttctctctgccactggatttgatgactcgacacctcaaggcttcatgcggactgctgtcttccatcacaactgctgcaggttgattaaccccttctttatgtgaggttgaaaatccctgaaggatgttctcttggcttctacagctataaggatacttcgatagaacaggagccttggaattcgggcaactgttatcagcctcaaggccattggcagcctttttgcctttagagagcccttctgaggaggatcttcgagatgaggccagggctccaatggccttagaacagccagagtttgcagcctgagttacttgacttccgttgccaagcacgtgtcccctcttgccaaagacagtctcagaggaggtgtcagaagccttgtcagctctacccaatgggtcactgggaacagatccatgggtggtgtcactaaacgttcgtgttgtcttctccacttttcccttcagtccactctcggtgcctggcttggaagtccccttccacgctttactgtgctcctgagcagccggggggtagcgactcagcactgagggctgctccctagacttcttcccttcgctcttggaggagctgggtacaaaccggtcttcagttttctttgtctcctgagtcccactgtctgtactcacccccatgtgagaagcttttgctgccctcctgttggtgaaactgggagaagaaacctgcctgttgctcagagaatagttttcattgttgagagcaaactccctgttccggagtcgttcccgcttatgctgaggagacagttcccgcgctgtgtgcttggacacagaagcttcacttccgtggcctctaaacttagtcctctcatgtctgcctttgctggacaggaaagcatcttccccttctacctctccattttctaactctttctgtttcttgatttgtagctttatctcctccagttggctggctaataatttgtttttattttgttcacttaggtaattatcctgaaggtcgttatttttggacttcattttcttaagctcttcttccaacgattcaaagtgtttgatttgcgtcttaagtttctcaatctcttggttaaggtctttgactttgttgtcttcctgattgcggttcttttcattttctgatttgtttcttgtttcattctctacctgctttaggtagtccagaccacccttccttcttgattctttggacggcagtgtggaagagatgccatcctcaatccgtaggtcatttctttccagattagaagcattccttgtataatctcggttcatttttttgttctgctctagtttttgagtgagttcttttatcaatttctcattttctttctccttttcattcaagtattttctctcacttacaaagctcagagttaatgatttcagcttttctaactctgacgctaaactctgctcagttttatccaggcggtcctcagaagattctagttctttcactttgactctgagcatttccagctcagaggagattttcttggtcagatttctctcctcattcaggctcagacacagctgggtacagtcattcttactcctgctgaaggcctcttctagcttctctaattcagccattcgtttctgaagccgctcaatctcagatttcagctcccgggtgaggttttcttcctcttcaagtttctccttcatcagacgacacagatcctctgctctcttaatttcctcgtctttgccttcaattctcagcacccgctggcgcagcacttcaatctccgccaacatgctggagttgctaccttctgcctgaatcaccttgtcctggagatccaggagttcatcctctgctttctggaggttttttgtggcttcctccaactcatcaaggcggcggcttagactctgtagcttaaaccgcaagtggcggctggaggccgtctccttgtagcttgtaaattcggccatgtctactgccagccaatgtgggctcctagaggcatccaattccactcaaggggatgagaaatggttacctttctcttggcaaccacaatcttctttgacagctggagaccatcatcaatcatgtaggtaattcaagctttccgtcaatacttccggcggctctccctatgcttgctgttttggaaacagtcactcactctctttcaaaggcagttgtctcttgacctgatctcatctgataggtcgcagtcaaaatacaggcacacaatactcaggtttattcaatgtccccatcaacaatgagacagactgggcgcagtggctcatgcctgtaatcccagcacttttgggaggataaggtgggaggattgcttgagctcaggagtttgagaccagcctgggcaacaaagtgagaccttgtctctacaaaaaataaaaaaataaaattagctgggcatggtggtgggcacccagctactcgggaggctgaggcaggagaatcac

SEQ ID NO: 736416 - DNA, 11962 bp, Homo sapiens
tgtcccggcgcggcgggagcgcgcttggcgcgtgcgtacgcgacggcggttggcggcgcgcgggcagcgtgaagcgaggcgaggcaaggcttttcggacccacggagcgacagagcgagcggcccctacggccgtcggcggcccggcggcccgagatgttatctgggaagaaggcggcagccgcggcggcggcggctgcagcggcagcaaccgggacggaggctggccctgggacagcaggcggctccgagaacgggtctgaggtggccgcgcagcccgcgggcctgtcgggcccagccgaggtcgggccgggggcggtgggggagcgcacaccccgcaagaaagagcctccgcgggcctcgccccccgggggcctggcggaaccgccggggtccgcagggcctcaggccggccctactgtcgtgcctgggtctgcgacccccatggaaactggaatagcagagactccggaggggcgtcggaccagccggcgcaagcgggcgaaggtagagtacagagagatggatgaaagcttggccaacctctcagaagatgagtattattcagaagaagagagaaatgccaaagcagagaaggaaaagaagcttcccccaccaccccctcaagccccacctgaggaagaaaatgaaagtgagcctgaagaaccatcggggcaagcaggaggacttcaagacgacagttctggagggtatggagacggccaagcatcaggtgagggtggcattagatgcttgccacttagtagcaagagccgccaagtaggaattgatgcttgcaagtgtttttggctgtggtatccacattttagccagaagcgcagatgtcctttgctttcttcgttaggtgtggagggcgcagctttccagagccgacttcctcatgaccggatgacttctcaagaagcagcctgttttccagatattatcagtggaccacaacagacccagaaggtttttcttttcattagaaaccgcacactgcagttgtggttggataatccaaagattcagctgacatttgaggctactctccaacaattagaagcaccttataacagtgatactgtgcttgtccaccgagttcacagttatttagagcgtcatggtcttatcaacttcggcatctataagaggataaaacccctaccaactaaaaagacaggaaaggtaattattataggctctggggtctcaggcttggcagcagctcgacagttacaaagttttggaatggatgtcacacttttggaagccagggatcgtgtgggtggacgagttgccacatttcgcaaaggaaactatgtagctgatcttggagccatggtggtaacaggtcttggagggaatcctatggctgtggtcagcaaacaagtaaatatggaactggccaagatcaagcaaaaatgcccactttatgaagccaacggacaagctgttcctaaagagaaagatgaaatggtagagcaagagtttaaccggttgctagaagctacatcttaccttagtcatcaactagacttcaatgtcctcaataataagcctgtgtcccttggccaggcattggaagttgtcattcagttacaagagaagcatgtcaaagatgagcagattgaacattggaagaagatagtgaaaactcaggaagaattgaaagaacttcttaataagatggtaaatttgaaagagaaaattaaagaactccatcagcaatacaaagaagcatctgaagtaaagccacccagagatattactgccgagttcttagtgaaaagcaaacacagggatctgaccgccctatgcaaggaatatgatgaattagctgaaacacaaggaaagctagaagaaaaacttcaggagttggaagcgaatcccccaagtgatgtatatctctcatcaagagacagacaaatacttgattggcattttgcaaatcttgaatttgctaatgccacacctctctcaactctctcccttaagcactgggatcaggatgatgactttgagttcactggcagccacctgacagtaaggaatggctactcgtgtgtgcctgtggctttagcagaaggcctagacattaaactgaatacagcagtgcgacaggttcgctacacggcttcaggatgtgaagtgatagctgtgaatacccgctccacgagtcaaacctttatttataaatgcgacgcagttctctgtacccttcccctgggtgtgctgaagcagcagccaccagccgttcagtttgtgccacctctccctgagtggaaaacatctgcagtccaaaggatgggatttggcaaccttaacaaggtggtgttgtgttttgatcgggtgttctgggatccaagtgtcaatttgttcgggcatgttggcagtacgactgccagcaggggtgagctcttcctcttctggaacctctataaagctccaatactgttggcactagtggcaggagaagctgctggtatcatggaaaacataagtgacgatgtgattgttggccgatgcctggccattctcaaagggatttttggtagcagtgcagtacctcagcccaaagaaactgtggtgtctcgttggcgtgctgatccctgggctcggggctcttattcctatgttgctgcaggatcatctggaaatgactatgatttaatggctcagccaatcactcctggcccctcgattccaggtgccccacagccgattccacgactcttctttgcgggagaacatacgatccgtaactacccagccacagtgcatggtgctctgctgagtgggctgcgagaagcgggaagaattgcagaccagtttttgggggccatgtatacgctgcctcgccaggccacaccaggtgttcctgcacagcagtccccaagcatgtgagacagatgcattctaagggaagaggcccatgtgcctgtttctgccatgtaaggaaggctcttctagcaatactagatcccactgagaaaatccaccctggcatctgggctcctgatcagctgatggagctcctgatttgacaaaggagcttgcctcctttgaatgacctagagcacagggaggaacttgtccattagtttggaattgtgttcttcgtaaagactgaggcaagcaagtgctgtgaaataacatcatcttagtcccttggtgtgtggggtttgttttttttttttatattttgagaataaaacttcatataaaattggccctctcttttgttcctttgagttggagttacatacaagatgggggcattactcctttggaaatgccaagtttatcctatggcaatagtaatacatgttttctccatgtttaaataaggaagaagatgttcatataaaagagaaaaatggtttgatcaggtcagaagataaggtaggggggccggtcctgtagaagcagtggacttcctggtcagtcggactaggcttcctcacttgggtgggggtggagtgtggtggtgtgccaagaacatggttattaggaaactttggatgcactttcaagatagaacacaaaagagctgaaacaaagtctgagcctttgggagaccagtctgcctttattcctgattccctccatgggtatgtgctaaaacttcccaattctactaaaggtggtggtgtacattttgggaagcgcactacataggatcaagggcttaggtaacagctggtttaacagattgccacaaacttagtggctcttaaaaaaacagaaatctattcgaaagttctggatgcttaaagtctaaaatgggtccacagggctgcattcattacagaggctctcagagcagggaggatcagttcatttccttgctcttttcagcttctaggtgtgggaaggctcgtggctccttcctccatcctcagagcacataactccagtttctgcttccatcatcacattgccttctcctgtagtcaaatcttttgtctctctcttaaaaggatactacctgtgattacatttaaggcccacctggatcatctaggatgttctgcctcatcccagcatccttatctgcaaagtcccttttgccatataagatgataaaaacatgttacatgctggttccttcccaggggctcctgactgactgacagatagatgataaacactgttactgcaaatccaagtaatgtcccttaaatgtggttttattctttcttactgtgagttaagggacatcattatatatattggtgatctgactggaagatgaaaacggagaaggcttttcccccccctagtcttagaattcgtggcagtaatggaaagaatctgcacaccaggatcagggcagttaatgtttccagtccttgcagtatcagtaattggttaggtaaaatacccaattttaagtattacacaatgaaataaataaatatactagagctgcgccaacgcatagaagacagatgatacacagggatgacattgacaaaactggcatcacagactcgcacagagtatacggaaacgagggagctttattggttacatattgtactgcagagccaacagagagcattcgcgccagaggatacatgcagacaggcagctccaatgatacacatgcacccaaggagccctgagccactgctttgccctggtttccagcgacaggttctggcctccttggtcccatgcttggagctgctgcacctagactctaaggggcaggggtgagagagaccagagcacctgcctgagcaagtaggtgtggaccaacaggctgcccccaacaaaggggcctataatgcaataacagtttatttgagggctactttcttagccctctcaatctttaaaatacaaaaaaatagactttattctcttaaaaatacattccattcagtatatgttctgagctgggaagcagcaggaaaatagggcccctttcctatgatcctatggttgtgaggctttgaggagaaccctgctccccactcggggtattcaaaaaataatccctaaaagcagctctttccaaagcaatcttgtcagagaaataacaaaacctcataacaaggtagccagggacccagcctctgggtccccattcctttattgggaagtggtagcacttggcactgacccactaaatataaagaactaaaactgccccaggacgacaagtccaagaacactatagtgccccctgcatcccgaacactccactgacgggggttatttatgtgcaagcttgcctacagctgagggtggggtggcatccttggccccactgcagatccctttaacccacactgtgactctttctcattgccacccaaaagcaaaaaacagccacagcttctttatccacctgcagctttctctggtttagtatcagagtggcaaaaaaagcagcagcacgtggaagagatcagctgctggtactaagccagcttcacttcctccaaccaagcagctctattgccaggtcccccaactcactaggaaccctccaacaaccatacacctgccagtaaaatttaagagccaagctgcggaagaaaactgtcataaaagtgggtttgttgaccgggggcagtgggactatttggcttgattaaacaactattcaactaccaggtctcccctctacttggaggcttcctccaggacccctgatgatgaggcctgggtccaaacagtcacacctcagttgcttttcagaaacatgcctcccaactttgggatttgagagccagccttgccagccatttgaagcccagagaaacagcctccagcctttacttgctattacaatgttattttctgcaatgctgaggacacttaaaaataaaatctatctagaaagtgtgcagattaaagaaacaaaatatcctgaaataactgttacaagcaaatcctattgcactcagatttcaagatggcagccccagcaaaagggcatcacagctgtccctcttcaacaggacattttgagtagcagcagatgttggtgctgctgaaatgtggaaagatccagactttggcaccaggagctatagcaccagaatccagggctccaacacccaaagacaagaattattggcgagatctttttaggcatggcttggcgcccttctgtttccatcagcagagaagagccacagacttagtttcctaatacctttagttgaccaccacagaggttgattttctttgaactctcaaggttgccaaccagtgaaggagaatggcagggaggctgcaagtgaaggatggcagccttgagtgagctagtttctggccagtaagccaggagaagcagcagtaagagatcttggaaatagcatcttgagcatcagaggtggggatgtggacaggaaaggcaggccacatgacaatgcctttagattggcaaaactctgggaagcagaagtatgagcaatagattcctgtccctgaaagtaaggtaggtgctccccaagcctcctcactgccaaatctgatacagacaagggcaggatgaacactggttcccatgctgagtgaaggcagagaagacaaattcctctggaggaagtcttgagtcttcctcttgccaggaaattcataggagatgcacaggaacaggagatacacagacttgggtactttccataatacctagactcctagaacgccaggagatactgtgtggcactgggcaaggctgatgccacaaagagcctcagagaccatcccatctaatcccttcacactttgcagactgggaaacaggcccacggagcttctctgagctcatccccatgagattaaaacatacagaaactaaaaaacaaggcccagaaaaacaattgagggcaggagggaagaacccacacggatgataccttccacaagcaaaaatcatcccatactattatagatggtgaaaacaggagaaccttagaataccagatttggtgcccttagagatcatccatttcaaagaactcattttacagacagggaaactgaggctccaagaagacaatgactcacccaaggtcacacagcaaggaagtaaagccatggggaaaaaaatccagcttaccagactggtagtttaatgttctctcattctgagggcaatagtgtctacttcataaaggtagcctttgaaagaggatcccttctttgaattgacagaatgctaaagaaaaagcactgccaagaatatacaattcttttcaacttccccatgtgactggtataaggaacctaaccaatttatttacgtggctttctgaaaagtttgctgcattttgaactatataaagctgaggccctcaatgcgtatgtacgtatcacctttcctccagcgaagtcatcatgatagtcgacttgcagaaatccggggcccacttctgtaggaatgcatcagcttggtaaagtgcgatgcctcctccatgggggatggagaaggaggaacaggagggagtagtctcacagtccatgcctctcatggagctattgcttgtggagtgactaaaggggtctgctttccctcttgctgggcacttcctagaaggcagaggatgctgggtcaggcccagcttagcctagggattttcccaaggtggaaacaatgaagtcagcttgaagtctccagccactggagagaaagcaggcgatgccagcagcattactggtgctcaggaaaggagatgcatgaggcttgcacctccaggtgcctttggaaggtgagcagagagagctggggttggggagggatgatgtcattccaatgggtatccgcatgagtatctgcatgctctgcttccaggagactggtaagccaggagcaggtcaaacttcaacctaaagggtagtctcataatcctttagaggcagcacagacccctttctgctttaagtctgaagaaaagaactccaaggggaaagaaatgaaagccccctagatagagctgatggctggtaaatcttatggggtacttgagcccattgggcaaatgaggagtgaagtggatatagtgaggagactgagaaaccagaacattaaccacacagacagaggctgccctaggatccagaaacaacccaccaaggagccgagaagaatttttgactcctgctgtgtgctggggactttatcttcccttgtttgggggccagaatggtccaactacttggtggacagggacaaggagagagagaggactcgtgcattggggaaggttgggcctgggtgactgtccagcttgtagtctctgattccctctggccaaatggcaaaaattacctgagccacagcccggctctaccacagttttccagccaaggcttgtgtcttgcctggttaactggccttggatccttcgtggggcaggacggtggaagagctgagaagcaggagcagagggcagacaacagacacccagcgggctcagttctcctcagcacagggcctggttggccgtaatcgttcctcggcccgtactcgcccagactctggcagcccctgcttcccaggcagttcagacggatccagggagttgtgcagttgcctgtagacactgagtgtacagtcttccccttcttcctccatgcttgctgagtggttccaggctgcgacagtgatggtgtctcctacccgattccgacgggtaagcacctctgacacagtgaggctactttgggtccttctggaggagggctcaggggcatcccctgaacttggtcctacccttcgagtgccctgctcaaaaaggcaggacctgggctgttcgagttctgagaagtctgtggaagacctctgggtgtaggcattgctattggtagattccacgtttttacctattcgagttggggggtcttctaaagatttcaagtctcgcctactcttccaggcattccgcacagtaacatgtctggcatctgagaagcccacttctgaaggggcactatggcttttccacctgattgtctccgctggaggtgcatggctattcctctccacaggatccgatggcttgattataatgctgctccgagagaccactgtttctggcctgttcttcaggggcccatctgccattctctccgcttctgcaagctgcagggtgatgtcatgtttgtgaatggagagctcaaaaggggagctgacatggttgctaactgatgtgagctctgccagccccacctggatattgctagtggatgtgtgcctctccctcagggcctcacccggagcagctctggggctgctgctgtcagatggatatatagtaatgctacttgtcactttgtttggccctggtttggagacgggtttctgtttctccaacgtagtctctgttccagatcctcccatgatttttttcacatccttatcaacaataacaggtttgatgatggctctagaccgcaacgcctctctggggctaaagggcctttggctttttaccccagcaccattggtatctgggagctccatggtattggtggaggctctgacagatttcacagattcattctccattccagcatctttatcattctcaaatagggaggttctaggtgcccctcgggttttagccttttctctagagttaggctgtggtttgggctctggctctggagtgatggttgtatttaccaacttggcagtaacaagagatgctatgtccaagtcatcatctgagtctggcttctctctgccactggatttgatgactcgacacctcaaggcttcatgcggactgctgtcttccatcacaactgctgcaggttgattaaccccttctttatgtgaggttgaaaatccctgaaggatgttctcttggcttctacagctataaggatacttcgatagaacaggagccttggaattcgggcaactgttatcagcctcaaggccattggcagcctttttgcctttagagagcccttctgaggaggatcttcgagatgaggccagggctccaatggccttagaacagccagagtttgcagcctgagttacttgacttccgttgccaagcacgtgtcccctcttgccaaagacagtctcagaggaggtgtcagaagccttgtcagctctacccaatgggtcactgggaacagatccatgggtggtgtcactaaacgttcgtgttgtcttctccacttttcccttcagtccactctcggtgcctggcttggaagtccccttccacgctttactgtgctcctgagcagccggggggtagcgactcagcactgagggctgctccctagacttcttcccttcgctcttggaggagctgggtacaaaccggtcttcagttttctttgtctcctgagtcccactgtctgtactcacccccatgtgagaagcttttgctgccctcctgttggtgaaactgggagaagaaacctgcctgttgctcagagaatagttttcattgttgagagcaaactccctgttccggagtcgttcccgcttatgctgaggagacagttcccgcgctgtgtgcttggacacagaagcttcacttccgtggcctctaaacttagtcctctcatgtctgcctttgctggacaggaaagcatcttccccttctacctctccattttctaactctttctgtttcttgatttgtagctttatctcctccagttggctggctaataatttgtttttattttgttcacttaggtaattatcctgaaggtcgttatttttggacttcattttcttaagctcttcttccaacgattcaaagtgtttgatttgcgtcttaagtttctcaatctcttggttaaggtctttgactttgttgtcttcctgattgcggttcttttcattttctgatttgtttcttgtttcattctctacctgctttaggtagtccagaccacccttccttcttgattctttggacggcagtgtggaagagatgccatcctcaatccgtaggtcatttctttccagattagaagcattccttgtataatctcggttcatttttttgttctgctctagtttttgagtgagttcttttatcaatttctcattttctttctccttttcattcaagtattttctctcacttacaaagctcagagttaatgatttcagcttttctaactctgacgctaaactctgctcagttttatccaggcggtcctcagaagattctagttctttcactttgactctgagcatttccagctcagaggagattttcttggtcagatttctctcctcattcaggctcagacacagctgggtacagtcattcttactcctgctgaaggcctcttctagcttctctaattcagccattcgtttctgaagccgctcaatctcagatttcagctcccgggtgaggttttcttcctcttcaagtttctccttcatcagacgacacagatcctctgctctcttaatttcctcgtctttgccttcaattctcagcacccgctggcgcagcacttcaatctccgccaacatgctggagttgctaccttctgcctgaatcaccttgtcctggagatccaggagttcatcctctgctttctggaggttttttgtggcttcctccaactcatcaaggcggcggcttagactctgtagcttaaaccgcaagtggcggctggaggccgtctccttgtagcttgtaaattcggccatgtctactgccagccaatgtgggctcctagaggcatccaattccactcaaggggatgagaaatggttacctttctcttggcaaccacaatcttctttgacagctggagaccatcatcaatcatgtaggtaattcaagctttccgtcaatacttccggcggctctccctatgcttgctgttttggaaacagtcactcactctctttcaaaggcagttgtctcttgacctctgcggccccgaaccgcgctcccgccagcgaagggttccgccgctcagctgccagcgaccctcgtgcc

SEQ ID NO: 736417 - DNA, 11883 bp, Homo sapiens
tgtcccggcgcggcgggagcgcgcttggcgcgtgcgtacgcgacggcggttggcggcgcgcgggcagcgtgaagcgaggcgaggcaaggcttttcggacccacggagcgacagagcgagcggcccctacggccgtcggcggcccggcggcccgagatgttatctgggaagaaggcggcagccgcggcggcggcggctgcagcggcagcaaccgggacggaggctggccctgggacagcaggcggctccgagaacgggtctgaggtggccgcgcagcccgcgggcctgtcgggcccagccgaggtcgggccgggggcggtgggggagcgcacaccccgcaagaaagagcctccgcgggcctcgccccccgggggcctggcggaaccgccggggtccgcagggcctcaggccggccctactgtcgtgcctgggtctgcgacccccatggaaactggaatagcagagactccggaggggcgtcggaccagccggcgcaagcgggcgaaggtagagtacagagagatggatgaaagcttggccaacctctcagaagatgagtattattcagaagaagagagaaatgccaaagcagagaaggaaaagaagcttcccccaccaccccctcaagccccacctgaggaagaaaatgaaagtgagcctgaagaaccatcggggcaagcaggaggacttcaagacgacagttctggagggtatggagacggccaagcatcaggtgagggtggcattagatgcttgccacttagtagcaagagccgccaagtaggaattgatgcttgcaagtgtttttggctgtggtatccacattttagccagaagcgcagatgtcctttgctttcttcgttaggtgtggagggcgcagctttccagagccgacttcctcatgaccggatgacttctcaagaagcagcctgttttccagatattatcagtggaccacaacagacccagaaggtttttcttttcattagaaaccgcacactgcagttgtggttggataatccaaagattcagctgacatttgaggctactctccaacaattagaagcaccttataacagtgatactgtgcttgtccaccgagttcacagttatttagagcgtcatggtcttatcaacttcggcatctataagaggataaaacccctaccaactaaaaagacaggaaaggtaattattataggctctggggtctcaggcttggcagcagctcgacagttacaaagttttggaatggatgtcacacttttggaagccagggatcgtgtgggtggacgagttgccacatttcgcaaaggaaactatgtagctgatcttggagccatggtggtaacaggtcttggagggaatcctatggctgtggtcagcaaacaagtaaatatggaactggccaagatcaagcaaaaatgcccactttatgaagccaacggacaagctgttcctaaagagaaagatgaaatggtagagcaagagtttaaccggttgctagaagctacatcttaccttagtcatcaactagacttcaatgtcctcaataataagcctgtgtcccttggccaggcattggaagttgtcattcagttacaagagaagcatgtcaaagatgagcagattgaacattggaagaagatagtgaaaactcaggaagaattgaaagaacttcttaataagatggtaaatttgaaagagaaaattaaagaactccatcagcaatacaaagaagcatctgaagtaaagccacccagagatattactgccgagttcttagtgaaaagcaaacacagggatctgaccgccctatgcaaggaatatgatgaattagctgaaacacaaggaaagctagaagaaaaacttcaggagttggaagcgaatcccccaagtgatgtatatctctcatcaagagacagacaaatacttgattggcattttgcaaatcttgaatttgctaatgccacacctctctcaactctctcccttaagcactgggatcaggatgatgactttgagttcactggcagccacctgacagtaaggaatggctactcgtgtgtgcctgtggctttagcagaaggcctagacattaaactgaatacagcagtgcgacaggttcgctacacggcttcaggatgtgaagtgatagctgtgaatacccgctccacgagtcaaacctttatttataaatgcgacgcagttctctgtacccttcccctgggtgtgctgaagcagcagccaccagccgttcagtttgtgccacctctccctgagtggaaaacatctgcagtccaaaggatgggatttggcaaccttaacaaggtggtgttgtgttttgatcgggtgttctgggatccaagtgtcaatttgttcgggcatgttggcagtacgactgccagcaggggtgagctcttcctcttctggaacctctataaagctccaatactgttggcactagtggcaggagaagctgctggtatcatggaaaacataagtgacgatgtgattgttggccgatgcctggccattctcaaagggatttttggtagcagtgcagtacctcagcccaaagaaactgtggtgtctcgttggcgtgctgatccctgggctcggggctcttattcctatgttgctgcaggatcatctggaaatgactatgatttaatggctcagccaatcactcctggcccctcgattccaggtgccccacagccgattccacgactcttctttgcgggagaacatacgatccgtaactacccagccacagtgcatggtgctctgctgagtgggctgcgagaagcgggaagaattgcagaccagtttttgggggccatgtatacgctgcctcgccaggccacaccaggtgttcctgcacagcagtccccaagcatgtgagacagatgcattctaagggaagaggcccatgtgcctgtttctgccatgtaaggaaggctcttctagcaatactagatcccactgagaaaatccaccctggcatctgggctcctgatcagctgatggagctcctgatttgacaaaggagcttgcctcctttgaatgacctagagcacagggaggaacttgtccattagtttggaattgtgttcttcgtaaagactgaggcaagcaagtgctgtgaaataacatcatcttagtcccttggtgtgtggggtttgttttttttttttatattttgagaataaaacttcatataaaattggccctctcttttgttcctttgagttggagttacatacaagatgggggcattactcctttggaaatgccaagtttatcctatggcaatagtaatacatgttttctccatgtttaaataaggaagaagatgttcatataaaagagaaaaatggtttgatcaggtcagaagataaggtaggggggccggtcctgtagaagcagtggacttcctggtcagtcggactaggcttcctcacttgggtgggggtggagtgtggtggtgtgccaagaacatggttattaggaaactttggatgcactttcaagatagaacacaaaagagctgaaacaaagtctgagcctttgggagaccagtctgcctttattcctgattccctccatgggtatgtgctaaaacttcccaattctactaaaggtggtggtgtacattttgggaagcgcactacataggatcaagggcttaggtaacagctggtttaacagattgccacaaacttagtggctcttaaaaaaacagaaatctattcgaaagttctggatgcttaaagtctaaaatgggtccacagggctgcattcattacagaggctctcagagcagggaggatcagttcatttccttgctcttttcagcttctaggtgtgggaaggctcgtggctccttcctccatcctcagagcacataactccagtttctgcttccatcatcacattgccttctcctgtagtcaaatcttttgtctctctcttaaaaggatactacctgtgattacatttaaggcccacctggatcatctaggatgttctgcctcatcccagcatccttatctgcaaagtcccttttgccatataagatgataaaaacatgttacatgctggttccttcccaggggctcctgactgactgacagatagatgataaacactgttactgcaaatccaagtaatgtcccttaaatgtggttttattctttcttactgtgagttaagggacatcattatatatattggtgatctgactggaagatgaaaacggagaaggcttttcccccccctagtcttagaattcgtggcagtaatggaaagaatctgcacaccaggatcagggcagttaatgtttccagtccttgcagtatcagtaattggttaggtaaaatacccaattttaagtattacacaatgaaataaataaatatactagagctgcgccaacgcatagaagacagatgatacacagggatgacattgacaaaactggcatcacagactcgcacagagtatacggaaacgagggagctttattggttacatattgtactgcagagccaacagagagcattcgcgccagaggatacatgcagacaggcagctccaatgatacacatgcacccaaggagccctgagccactgctttgccctggtttccagcgacaggttctggcctccttggtcccatgcttggagctgctgcacctagactctaaggggcaggggtgagagagaccagagcacctgcctgagcaagtaggtgtggaccaacaggctgcccccaacaaaggggcctataatgcaataacagtttatttgagggctactttcttagccctctcaatctttaaaatacaaaaaaatagactttattctcttaaaaatacattccattcagtatatgttctgagctgggaagcagcaggaaaatagggcccctttcctatgatcctatggttgtgaggctttgaggagaaccctgctccccactcggggtattcaaaaaataatccctaaaagcagctctttccaaagcaatcttgtcagagaaataacaaaacctcataacaaggtagccagggacccagcctctgggtccccattcctttattgggaagtggtagcacttggcactgacccactaaatataaagaactaaaactgccccaggacgacaagtccaagaacactatagtgccccctgcatcccgaacactccactgacgggggttatttatgtgcaagcttgcctacagctgagggtggggtggcatccttggccccactgcagatccctttaacccacactgtgactctttctcattgccacccaaaagcaaaaaacagccacagcttctttatccacctgcagctttctctggtttagtatcagagtggcaaaaaaagcagcagcacgtggaagagatcagctgctggtactaagccagcttcacttcctccaaccaagcagctctattgccaggtcccccaactcactaggaaccctccaacaaccatacacctgccagtaaaatttaagagccaagctgcggaagaaaactgtcataaaagtgggtttgttgaccgggggcagtgggactatttggcttgattaaacaactattcaactaccaggtctcccctctacttggaggcttcctccaggacccctgatgatgaggcctgggtccaaacagtcacacctcagttgcttttcagaaacatgcctcccaactttgggatttgagagccagccttgccagccatttgaagcccagagaaacagcctccagcctttacttgctattacaatgttattttctgcaatgctgaggacacttaaaaataaaatctatctagaaagtgtgcagattaaagaaacaaaatatcctgaaataactgttacaagcaaatcctattgcactcagatttcaagatggcagccccagcaaaagggcatcacagctgtccctcttcaacaggacattttgagtagcagcagatgttggtgctgctgaaatgtggaaagatccagactttggcaccaggagctatagcaccagaatccagggctccaacacccaaagacaagaattattggcgagatctttttaggcatggcttggcgcccttctgtttccatcagcagagaagagccacagacttagtttcctaatacctttagttgaccaccacagaggttgattttctttgaactctcaaggttgccaaccagtgaaggagaatggcagggaggctgcaagtgaaggatggcagccttgagtgagctagtttctggccagtaagccaggagaagcagcagtaagagatcttggaaatagcatcttgagcatcagaggtggggatgtggacaggaaaggcaggccacatgacaatgcctttagattggcaaaactctgggaagcagaagtatgagcaatagattcctgtccctgaaagtaaggtaggtgctccccaagcctcctcactgccaaatctgatacagacaagggcaggatgaacactggttcccatgctgagtgaaggcagagaagacaaattcctctggaggaagtcttgagtcttcctcttgccaggaaattcataggagatgcacaggaacaggagatacacagacttgggtactttccataatacctagactcctagaacgccaggagatactgtgtggcactgggcaaggctgatgccacaaagagcctcagagaccatcccatctaatcccttcacactttgcagactgggaaacaggcccacggagcttctctgagctcatccccatgagattaaaacatacagaaactaaaaaacaaggcccagaaaaacaattgagggcaggagggaagaacccacacggatgataccttccacaagcaaaaatcatcccatactattatagatggtgaaaacaggagaaccttagaataccagatttggtgcccttagagatcatccatttcaaagaactcattttacagacagggaaactgaggctccaagaagacaatgactcacccaaggtcacacagcaaggaagtaaagccatggggaaaaaaatccagcttaccagactggtagtttaatgttctctcattctgagggcaatagtgtctacttcataaaggtagcctttgaaagaggatcccttctttgaattgacagaatgctaaagaaaaagcactgccaagaatatacaattcttttcaacttccccatgtgactggtataaggaacctaaccaatttatttacgtggctttctgaaaagtttgctgcattttgaactatataaagctgaggccctcaatgcgtatgtacgtatcacctttcctccagcgaagtcatcatgatagtcgacttgcagaaatccggggcccacttctgtaggaatgcatcagcttggtaaagtgcgatgcctcctccatgggggatggagaaggaggaacaggagggagtagtctcacagtccatgcctctcatggagctattgcttgtggagtgactaaaggggtctgctttccctcttgctgggcacttcctagaaggcagaggatgctgggtcaggcccagcttagcctagggattttcccaaggtggaaacaatgaagtcagcttgaagtctccagccactggagagaaagcaggcgatgccagcagcattactggtgctcaggaaaggagatgcatgaggcttgcacctccaggtgcctttggaaggtgagcagagagagctggggttggggagggatgatgtcattccaatgggtatccgcatgagtatctgcatgctctgcttccaggagactggtaagccaggagcaggtcaaacttcaacctaaagggtagtctcataatcctttagaggcagcacagacccctttctgctttaagtctgaagaaaagaactccaaggggaaagaaatgaaagccccctagatagagctgatggctggtaaatcttatggggtacttgagcccattgggcaaatgaggagtgaagtggatatagtgaggagactgagaaaccagaacattaaccacacagacagaggctgccctaggatccagaaacaacccaccaaggagccgagaagaatttttgactcctgctgtgtgctggggactttatcttcccttgtttgggggccagaatggtccaactacttggtggacagggacaaggagagagagaggactcgtgcattggggaaggttgggcctgggtgactgtccagcttgtagtctctgattccctctggccaaatggcaaaaattacctgagccacagcccggctctaccacagttttccagccaaggcttgtgtcttgcctggttaactggccttggatccttcgtggggcaggacggtggaagagctgagaagcaggagcagagggcagacaacagacacccagcgggctcagttctcctcagcacagggcctggttggccgtaatcgttcctcggcccgtactcgcccagactctggcagcccctgcttcccaggcagttcagacggatccagggagttgtgcagttgcctgtagacactgagtgtacagtcttccccttcttcctccatgcttgctgagtggttccaggctgcgacagtgatggtgtctcctacccgattccgacgggtaagcacctctgacacagtgaggctactttgggtccttctggaggagggctcaggggcatcccctgaacttggtcctacccttcgagtgccctgctcaaaaaggcaggacctgggctgttcgagttctgagaagtctgtggaagacctctgggtgtaggcattgctattggtagattccacgtttttacctattcgagttggggggtcttctaaagatttcaagtctcgcctactcttccaggcattccgcacagtaacatgtctggcatctgagaagcccacttctgaaggggcactatggcttttccacctgattgtctccgctggaggtgcatggctattcctctccacaggatccgatggcttgattataatgctgctccgagagaccactgtttctggcctgttcttcaggggcccatctgccattctctccgcttctgcaagctgcagggtgatgtcatgtttgtgaatggagagctcaaaaggggagctgacatggttgctaactgatgtgagctctgccagccccacctggatattgctagtggatgtgtgcctctccctcagggcctcacccggagcagctctggggctgctgctgtcagatggatatatagtaatgctacttgtcactttgtttggccctggtttggagacgggtttctgtttctccaacgtagtctctgttccagatcctcccatgatttttttcacatccttatcaacaataacaggtttgatgatggctctagaccgcaacgcctctctggggctaaagggcctttggctttttaccccagcaccattggtatctgggagctccatggtattggtggaggctctgacagatttcacagattcattctccattccagcatctttatcattctcaaatagggaggttctaggtgcccctcgggttttagccttttctctagagttaggctgtggtttgggctctggctctggagtgatggttgtatttaccaacttggcagtaacaagagatgctatgtccaagtcatcatctgagtctggcttctctctgccactggatttgatgactcgacacctcaaggcttcatgcggactgctgtcttccatcacaactgctgcaggttgattaaccccttctttatgtgaggttgaaaatccctgaaggatgttctcttggcttctacagctataaggatacttcgatagaacaggagccttggaattcgggcaactgttatcagcctcaaggccattggcagcctttttgcctttagagagcccttctgaggaggatcttcgagatgaggccagggctccaatggccttagaacagccagagtttgcagcctgagttacttgacttccgttgccaagcacgtgtcccctcttgccaaagacagtctcagaggaggtgtcagaagccttgtcagctctacccaatgggtcactgggaacagatccatgggtggtgtcactaaacgttcgtgttgtcttctccacttttcccttcagtccactctcggtgcctggcttggaagtccccttccacgctttactgtgctcctgagcagccggggggtagcgactcagcactgagggctgctccctagacttcttcccttcgctcttggaggagctgggtacaaaccggtcttcagttttctttgtctcctgagtcccactgtctgtactcacccccatgtgagaagcttttgctgccctcctgttggtgaaactgggagaagaaacctgcctgttgctcagagaatagttttcattgttgagagcaaactccctgttccggagtcgttcccgcttatgctgaggagacagttcccgcgctgtgtgcttggacacagaagcttcacttccgtggcctctaaacttagtcctctcatgtctgcctttgctggacaggaaagcatcttccccttctacctctccattttctaactctttctgtttcttgatttgtagctttatctcctccagttggctggctaataatttgtttttattttgttcacttaggtaattatcctgaaggtcgttatttttggacttcattttcttaagctcttcttccaacgattcaaagtgtttgatttgcgtcttaagtttctcaatctcttggttaaggtctttgactttgttgtcttcctgattgcggttcttttcattttctgatttgtttcttgtttcattctctacctgctttaggtagtccagaccacccttccttcttgattctttggacggcagtgtggaagagatgccatcctcaatccgtaggtcatttctttccagattagaagcattccttgtataatctcggttcatttttttgttctgctctagtttttgagtgagttcttttatcaatttctcattttctttctccttttcattcaagtattttctctcacttacaaagctcagagttaatgatttcagcttttctaactctgacgctaaactctgctcagttttatccaggcggtcctcagaagattctagttctttcactttgactctgagcatttccagctcagaggagattttcttggtcagatttctctcctcattcaggctcagacacagctgggtacagtcattcttactcctgctgaaggcctcttctagcttctctaattcagccattcgtttctgaagccgctcaatctcagatttcagctcccgggtgaggttttcttcctcttcaagtttctccttcatcagacgacacagatcctctgctctcttaatttcctcgtctttgccttcaattctcagcacccgctggcgcagcacttcaatctccgccaacatgctggagttgctaccttctgcctgaatcaccttgtcctggagatccaggagttcatcctctgctttctggaggttttttgtggcttcctccaactcatcaaggcggcggcttagactctgtagcttaaaccgcaagtggcggctggaggccgtctccttgtagcttgtaaattcggccatgtctactgccagccaatgtgggctcctagaggcatccaattccactcaaggggatgagaaatggttacctttctcttggcaaccacaatcttctttgacagctggagaccatcatcaatcatgtaggtaattcaagctttccgtcaatacttccagggattcaagaatgagaggggatactctagagcagactagcagcaatcacggtgcactgcc

SEQ ID NO: 736418 - DNA, 11856 bp, Homo sapiens
tgtcccggcgcggcgggagcgcgcttggcgcgtgcgtacgcgacggcggttggcggcgcgcgggcagcgtgaagcgaggcgaggcaaggcttttcggacccacggagcgacagagcgagcggcccctacggccgtcggcggcccggcggcccgagatgttatctgggaagaaggcggcagccgcggcggcggcggctgcagcggcagcaaccgggacggaggctggccctgggacagcaggcggctccgagaacgggtctgaggtggccgcgcagcccgcgggcctgtcgggcccagccgaggtcgggccgggggcggtgggggagcgcacaccccgcaagaaagagcctccgcgggcctcgccccccgggggcctggcggaaccgccggggtccgcagggcctcaggccggccctactgtcgtgcctgggtctgcgacccccatggaaactggaatagcagagactccggaggggcgtcggaccagccggcgcaagcgggcgaaggtagagtacagagagatggatgaaagcttggccaacctctcagaagatgagtattattcagaagaagagagaaatgccaaagcagagaaggaaaagaagcttcccccaccaccccctcaagccccacctgaggaagaaaatgaaagtgagcctgaagaaccatcggggcaagcaggaggacttcaagacgacagttctggagggtatggagacggccaagcatcaggtgagggtggcattagatgcttgccacttagtagcaagagccgccaagtaggaattgatgcttgcaagtgtttttggctgtggtatccacattttagccagaagcgcagatgtcctttgctttcttcgttaggtgtggagggcgcagctttccagagccgacttcctcatgaccggatgacttctcaagaagcagcctgttttccagatattatcagtggaccacaacagacccagaaggtttttcttttcattagaaaccgcacactgcagttgtggttggataatccaaagattcagctgacatttgaggctactctccaacaattagaagcaccttataacagtgatactgtgcttgtccaccgagttcacagttatttagagcgtcatggtcttatcaacttcggcatctataagaggataaaacccctaccaactaaaaagacaggaaaggtaattattataggctctggggtctcaggcttggcagcagctcgacagttacaaagttttggaatggatgtcacacttttggaagccagggatcgtgtgggtggacgagttgccacatttcgcaaaggaaactatgtagctgatcttggagccatggtggtaacaggtcttggagggaatcctatggctgtggtcagcaaacaagtaaatatggaactggccaagatcaagcaaaaatgcccactttatgaagccaacggacaagctgttcctaaagagaaagatgaaatggtagagcaagagtttaaccggttgctagaagctacatcttaccttagtcatcaactagacttcaatgtcctcaataataagcctgtgtcccttggccaggcattggaagttgtcattcagttacaagagaagcatgtcaaagatgagcagattgaacattggaagaagatagtgaaaactcaggaagaattgaaagaacttcttaataagatggtaaatttgaaagagaaaattaaagaactccatcagcaatacaaagaagcatctgaagtaaagccacccagagatattactgccgagttcttagtgaaaagcaaacacagggatctgaccgccctatgcaaggaatatgatgaattagctgaaacacaaggaaagctagaagaaaaacttcaggagttggaagcgaatcccccaagtgatgtatatctctcatcaagagacagacaaatacttgattggcattttgcaaatcttgaatttgctaatgccacacctctctcaactctctcccttaagcactgggatcaggatgatgactttgagttcactggcagccacctgacagtaaggaatggctactcgtgtgtgcctgtggctttagcagaaggcctagacattaaactgaatacagcagtgcgacaggttcgctacacggcttcaggatgtgaagtgatagctgtgaatacccgctccacgagtcaaacctttatttataaatgcgacgcagttctctgtacccttcccctgggtgtgctgaagcagcagccaccagccgttcagtttgtgccacctctccctgagtggaaaacatctgcagtccaaaggatgggatttggcaaccttaacaaggtggtgttgtgttttgatcgggtgttctgggatccaagtgtcaatttgttcgggcatgttggcagtacgactgccagcaggggtgagctcttcctcttctggaacctctataaagctccaatactgttggcactagtggcaggagaagctgctggtatcatggaaaacataagtgacgatgtgattgttggccgatgcctggccattctcaaagggatttttggtagcagtgcagtacctcagcccaaagaaactgtggtgtctcgttggcgtgctgatccctgggctcggggctcttattcctatgttgctgcaggatcatctggaaatgactatgatttaatggctcagccaatcactcctggcccctcgattccaggtgccccacagccgattccacgactcttctttgcgggagaacatacgatccgtaactacccagccacagtgcatggtgctctgctgagtgggctgcgagaagcgggaagaattgcagaccagtttttgggggccatgtatacgctgcctcgccaggccacaccaggtgttcctgcacagcagtccccaagcatgtgagacagatgcattctaagggaagaggcccatgtgcctgtttctgccatgtaaggaaggctcttctagcaatactagatcccactgagaaaatccaccctggcatctgggctcctgatcagctgatggagctcctgatttgacaaaggagcttgcctcctttgaatgacctagagcacagggaggaacttgtccattagtttggaattgtgttcttcgtaaagactgaggcaagcaagtgctgtgaaataacatcatcttagtcccttggtgtgtggggtttgttttttttttttatattttgagaataaaacttcatataaaattggccctctcttttgttcctttgagttggagttacatacaagatgggggcattactcctttggaaatgccaagtttatcctatggcaatagtaatacatgttttctccatgtttaaataaggaagaagatgttcatataaaagagaaaaatggtttgatcaggtcagaagataaggtaggggggccggtcctgtagaagcagtggacttcctggtcagtcggactaggcttcctcacttgggtgggggtggagtgtggtggtgtgccaagaacatggttattaggaaactttggatgcactttcaagatagaacacaaaagagctgaaacaaagtctgagcctttgggagaccagtctgcctttattcctgattccctccatgggtatgtgctaaaacttcccaattctactaaaggtggtggtgtacattttgggaagcgcactacataggatcaagggcttaggtaacagctggtttaacagattgccacaaacttagtggctcttaaaaaaacagaaatctattcgaaagttctggatgcttaaagtctaaaatgggtccacagggctgcattcattacagaggctctcagagcagggaggatcagttcatttccttgctcttttcagcttctaggtgtgggaaggctcgtggctccttcctccatcctcagagcacataactccagtttctgcttccatcatcacattgccttctcctgtagtcaaatcttttgtctctctcttaaaaggatactacctgtgattacatttaaggcccacctggatcatctaggatgttctgcctcatcccagcatccttatctgcaaagtcccttttgccatataagatgataaaaacatgttacatgctggttccttcccaggggctcctgactgactgacagatagatgataaacactgttactgcaaatccaagtaatgtcccttaaatgtggttttattctttcttactgtgagttaagggacatcattatatatattggtgatctgactggaagatgaaaacggagaaggcttttcccccccctagtcttagaattcgtggcagtaatggaaagaatctgcacaccaggatcagggcagttaatgtttccagtccttgcagtatcagtaattggttaggtaaaatacccaattttaagtattacacaatgaaataaataaatatactagagctgcgccaacgcatagaagacagatgatacacagggatgacattgacaaaactggcatcacagactcgcacagagtatacggaaacgagggagctttattggttacatattgtactgcagagccaacagagagcattcgcgccagaggatacatgcagacaggcagctccaatgatacacatgcacccaaggagccctgagccactgctttgccctggtttccagcgacaggttctggcctccttggtcccatgcttggagctgctgcacctagactctaaggggcaggggtgagagagaccagagcacctgcctgagcaagtaggtgtggaccaacaggctgcccccaacaaaggggcctataatgcaataacagtttatttgagggctactttcttagccctctcaatctttaaaatacaaaaaaatagactttattctcttaaaaatacattccattcagtatatgttctgagctgggaagcagcaggaaaatagggcccctttcctatgatcctatggttgtgaggctttgaggagaaccctgctccccactcggggtattcaaaaaataatccctaaaagcagctctttccaaagcaatcttgtcagagaaataacaaaacctcataacaaggtagccagggacccagcctctgggtccccattcctttattgggaagtggtagcacttggcactgacccactaaatataaagaactaaaactgccccaggacgacaagtccaagaacactatagtgccccctgcatcccgaacactccactgacgggggttatttatgtgcaagcttgcctacagctgagggtggggtggcatccttggccccactgcagatccctttaacccacactgtgactctttctcattgccacccaaaagcaaaaaacagccacagcttctttatccacctgcagctttctctggtttagtatcagagtggcaaaaaaagcagcagcacgtggaagagatcagctgctggtactaagccagcttcacttcctccaaccaagcagctctattgccaggtcccccaactcactaggaaccctccaacaaccatacacctgccagtaaaatttaagagccaagctgcggaagaaaactgtcataaaagtgggtttgttgaccgggggcagtgggactatttggcttgattaaacaactattcaactaccaggtctcccctctacttggaggcttcctccaggacccctgatgatgaggcctgggtccaaacagtcacacctcagttgcttttcagaaacatgcctcccaactttgggatttgagagccagccttgccagccatttgaagcccagagaaacagcctccagcctttacttgctattacaatgttattttctgcaatgctgaggacacttaaaaataaaatctatctagaaagtgtgcagattaaagaaacaaaatatcctgaaataactgttacaagcaaatcctattgcactcagatttcaagatggcagccccagcaaaagggcatcacagctgtccctcttcaacaggacattttgagtagcagcagatgttggtgctgctgaaatgtggaaagatccagactttggcaccaggagctatagcaccagaatccagggctccaacacccaaagacaagaattattggcgagatctttttaggcatggcttggcgcccttctgtttccatcagcagagaagagccacagacttagtttcctaatacctttagttgaccaccacagaggttgattttctttgaactctcaaggttgccaaccagtgaaggagaatggcagggaggctgcaagtgaaggatggcagccttgagtgagctagtttctggccagtaagccaggagaagcagcagtaagagatcttggaaatagcatcttgagcatcagaggtggggatgtggacaggaaaggcaggccacatgacaatgcctttagattggcaaaactctgggaagcagaagtatgagcaatagattcctgtccctgaaagtaaggtaggtgctccccaagcctcctcactgccaaatctgatacagacaagggcaggatgaacactggttcccatgctgagtgaaggcagagaagacaaattcctctggaggaagtcttgagtcttcctcttgccaggaaattcataggagatgcacaggaacaggagatacacagacttgggtactttccataatacctagactcctagaacgccaggagatactgtgtggcactgggcaaggctgatgccacaaagagcctcagagaccatcccatctaatcccttcacactttgcagactgggaaacaggcccacggagcttctctgagctcatccccatgagattaaaacatacagaaactaaaaaacaaggcccagaaaaacaattgagggcaggagggaagaacccacacggatgataccttccacaagcaaaaatcatcccatactattatagatggtgaaaacaggagaaccttagaataccagatttggtgcccttagagatcatccatttcaaagaactcattttacagacagggaaactgaggctccaagaagacaatgactcacccaaggtcacacagcaaggaagtaaagccatggggaaaaaaatccagcttaccagactggtagtttaatgttctctcattctgagggcaatagtgtctacttcataaaggtagcctttgaaagaggatcccttctttgaattgacagaatgctaaagaaaaagcactgccaagaatatacaattcttttcaacttccccatgtgactggtataaggaacctaaccaatttatttacgtggctttctgaaaagtttgctgcattttgaactatataaagctgaggccctcaatgcgtatgtacgtatcacctttcctccagcgaagtcatcatgatagtcgacttgcagaaatccggggcccacttctgtaggaatgcatcagcttggtaaagtgcgatgcctcctccatgggggatggagaaggaggaacaggagggagtagtctcacagtccatgcctctcatggagctattgcttgtggagtgactaaaggggtctgctttccctcttgctgggcacttcctagaaggcagaggatgctgggtcaggcccagcttagcctagggattttcccaaggtggaaacaatgaagtcagcttgaagtctccagccactggagagaaagcaggcgatgccagcagcattactggtgctcaggaaaggagatgcatgaggcttgcacctccaggtgcctttggaaggtgagcagagagagctggggttggggagggatgatgtcattccaatgggtatccgcatgagtatctgcatgctctgcttccaggagactggtaagccaggagcaggtcaaacttcaacctaaagggtagtctcataatcctttagaggcagcacagacccctttctgctttaagtctgaagaaaagaactccaaggggaaagaaatgaaagccccctagatagagctgatggctggtaaatcttatggggtacttgagcccattgggcaaatgaggagtgaagtggatatagtgaggagactgagaaaccagaacattaaccacacagacagaggctgccctaggatccagaaacaacccaccaaggagccgagaagaatttttgactcctgctgtgtgctggggactttatcttcccttgtttgggggccagaatggtccaactacttggtggacagggacaaggagagagagaggactcgtgcattggggaaggttgggcctgggtgactgtccagcttgtagtctctgattccctctggccaaatggcaaaaattacctgagccacagcccggctctaccacagttttccagccaaggcttgtgtcttgcctggttaactggccttggatccttcgtggggcaggacggtggaagagctgagaagcaggagcagagggcagacaacagacacccagcgggctcagttctcctcagcacagggcctggttggccgtaatcgttcctcggcccgtactcgcccagactctggcagcccctgcttcccaggcagttcagacggatccagggagttgtgcagttgcctgtagacactgagtgtacagtcttccccttcttcctccatgcttgctgagtggttccaggctgcgacagtgatggtgtctcctacccgattccgacgggtaagcacctctgacacagtgaggctactttgggtccttctggaggagggctcaggggcatcccctgaacttggtcctacccttcgagtgccctgctcaaaaaggcaggacctgggctgttcgagttctgagaagtctgtggaagacctctgggtgtaggcattgctattggtagattccacgtttttacctattcgagttggggggtcttctaaagatttcaagtctcgcctactcttccaggcattccgcacagtaacatgtctggcatctgagaagcccacttctgaaggggcactatggcttttccacctgattgtctccgctggaggtgcatggctattcctctccacaggatccgatggcttgattataatgctgctccgagagaccactgtttctggcctgttcttcaggggcccatctgccattctctccgcttctgcaagctgcagggtgatgtcatgtttgtgaatggagagctcaaaaggggagctgacatggttgctaactgatgtgagctctgccagccccacctggatattgctagtggatgtgtgcctctccctcagggcctcacccggagcagctctggggctgctgctgtcagatggatatatagtaatgctacttgtcactttgtttggccctggtttggagacgggtttctgtttctccaacgtagtctctgttccagatcctcccatgatttttttcacatccttatcaacaataacaggtttgatgatggctctagaccgcaacgcctctctggggctaaagggcctttggctttttaccccagcaccattggtatctgggagctccatggtattggtggaggctctgacagatttcacagattcattctccattccagcatctttatcattctcaaatagggaggttctaggtgcccctcgggttttagccttttctctagagttaggctgtggtttgggctctggctctggagtgatggttgtatttaccaacttggcagtaacaagagatgctatgtccaagtcatcatctgagtctggcttctctctgccactggatttgatgactcgacacctcaaggcttcatgcggactgctgtcttccatcacaactgctgcaggttgattaaccccttctttatgtgaggttgaaaatccctgaaggatgttctcttggcttctacagctataaggatacttcgatagaacaggagccttggaattcgggcaactgttatcagcctcaaggccattggcagcctttttgcctttagagagcccttctgaggaggatcttcgagatgaggccagggctccaatggccttagaacagccagagtttgcagcctgagttacttgacttccgttgccaagcacgtgtcccctcttgccaaagacagtctcagaggaggtgtcagaagccttgtcagctctacccaatgggtcactgggaacagatccatgggtggtgtcactaaacgttcgtgttgtcttctccacttttcccttcagtccactctcggtgcctggcttggaagtccccttccacgctttactgtgctcctgagcagccggggggtagcgactcagcactgagggctgctccctagacttcttcccttcgctcttggaggagctgggtacaaaccggtcttcagttttctttgtctcctgagtcccactgtctgtactcacccccatgtgagaagcttttgctgccctcctgttggtgaaactgggagaagaaacctgcctgttgctcagagaatagttttcattgttgagagcaaactccctgttccggagtcgttcccgcttatgctgaggagacagttcccgcgctgtgtgcttggacacagaagcttcacttccgtggcctctaaacttagtcctctcatgtctgcctttgctggacaggaaagcatcttccccttctacctctccattttctaactctttctgtttcttgatttgtagctttatctcctccagttggctggctaataatttgtttttattttgttcacttaggtaattatcctgaaggtcgttatttttggacttcattttcttaagctcttcttccaacgattcaaagtgtttgatttgcgtcttaagtttctcaatctcttggttaaggtctttgactttgttgtcttcctgattgcggttcttttcattttctgatttgtttcttgtttcattctctacctgctttaggtagtccagaccacccttccttcttgattctttggacggcagtgtggaagagatgccatcctcaatccgtaggtcatttctttccagattagaagcattccttgtataatctcggttcatttttttgttctgctctagtttttgagtgagttcttttatcaatttctcattttctttctccttttcattcaagtattttctctcacttacaaagctcagagttaatgatttcagcttttctaactctgacgctaaactctgctcagttttatccaggcggtcctcagaagattctagttctttcactttgactctgagcatttccagctcagaggagattttcttggtcagatttctctcctcattcaggctcagacacagctgggtacagtcattcttactcctgctgaaggcctcttctagcttctctaattcagccattcgtttctgaagccgctcaatctcagatttcagctcccgggtgaggttttcttcctcttcaagtttctccttcatcagacgacacagatcctctgctctcttaatttcctcgtctttgccttcaattctcagcacccgctggcgcagcacttcaatctccgccaacatgctggagttgctaccttctgcctgaatcaccttgtcctggagatccaggagttcatcctctgctttctggaggttttttgtggcttcctccaactcatcaaggcggcggcttagactctgtagcttaaaccgcaagtggcggctggaggccgtctccttgtagcttgtaaattcggccatgtctactgccagccaatgtgggctcctagaggcatccaattccactcaaggggatgagaaatggttacctttctcttggcaaccacaatcttctttgacagctggagaccatcatcaatctctgcggccccgaaccgcgctcccgccagcgaagggttccgccgctcagctgccagcgaccctcgtgcc

SEQ ID NO: 736419 - DNA, 11867 bp, Homo sapiens
tgtcccggcgcggcgggagcgcgcttggcgcgtgcgtacgcgacggcggttggcggcgcgcgggcagcgtgaagcgaggcgaggcaaggcttttcggacccacggagcgacagagcgagcggcccctacggccgtcggcggcccggcggcccgagatgttatctgggaagaaggcggcagccgcggcggcggcggctgcagcggcagcaaccgggacggaggctggccctgggacagcaggcggctccgagaacgggtctgaggtggccgcgcagcccgcgggcctgtcgggcccagccgaggtcgggccgggggcggtgggggagcgcacaccccgcaagaaagagcctccgcgggcctcgccccccgggggcctggcggaaccgccggggtccgcagggcctcaggccggccctactgtcgtgcctgggtctgcgacccccatggaaactggaatagcagagactccggaggggcgtcggaccagccggcgcaagcgggcgaaggtagagtacagagagatggatgaaagcttggccaacctctcagaagatgagtattattcagaagaagagagaaatgccaaagcagagaaggaaaagaagcttcccccaccaccccctcaagccccacctgaggaagaaaatgaaagtgagcctgaagaaccatcggggcaagcaggaggacttcaagacgacagttctggagggtatggagacggccaagcatcaggtgagggtggcattagatgcttgccacttagtagcaagagccgccaagtaggaattgatgcttgcaagtgtttttggctgtggtatccacattttagccagaagcgcagatgtcctttgctttcttcgttaggtgtggagggcgcagctttccagagccgacttcctcatgaccggatgacttctcaagaagcagcctgttttccagatattatcagtggaccacaacagacccagaaggtttttcttttcattagaaaccgcacactgcagttgtggttggataatccaaagattcagctgacatttgaggctactctccaacaattagaagcaccttataacagtgatactgtgcttgtccaccgagttcacagttatttagagcgtcatggtcttatcaacttcggcatctataagaggataaaacccctaccaactaaaaagacaggaaaggtaattattataggctctggggtctcaggcttggcagcagctcgacagttacaaagttttggaatggatgtcacacttttggaagccagggatcgtgtgggtggacgagttgccacatttcgcaaaggaaactatgtagctgatcttggagccatggtggtaacaggtcttggagggaatcctatggctgtggtcagcaaacaagtaaatatggaactggccaagatcaagcaaaaatgcccactttatgaagccaacggacaagctgttcctaaagagaaagatgaaatggtagagcaagagtttaaccggttgctagaagctacatcttaccttagtcatcaactagacttcaatgtcctcaataataagcctgtgtcccttggccaggcattggaagttgtcattcagttacaagagaagcatgtcaaagatgagcagattgaacattggaagaagatagtgaaaactcaggaagaattgaaagaacttcttaataagatggtaaatttgaaagagaaaattaaagaactccatcagcaatacaaagaagcatctgaagtaaagccacccagagatattactgccgagttcttagtgaaaagcaaacacagggatctgaccgccctatgcaaggaatatgatgaattagctgaaacacaaggaaagctagaagaaaaacttcaggagttggaagcgaatcccccaagtgatgtatatctctcatcaagagacagacaaatacttgattggcattttgcaaatcttgaatttgctaatgccacacctctctcaactctctcccttaagcactgggatcaggatgatgactttgagttcactggcagccacctgacagtaaggaatggctactcgtgtgtgcctgtggctttagcagaaggcctagacattaaactgaatacagcagtgcgacaggttcgctacacggcttcaggatgtgaagtgatagctgtgaatacccgctccacgagtcaaacctttatttataaatgcgacgcagttctctgtacccttcccctgggtgtgctgaagcagcagccaccagccgttcagtttgtgccacctctccctgagtggaaaacatctgcagtccaaaggatgggatttggcaaccttaacaaggtggtgttgtgttttgatcgggtgttctgggatccaagtgtcaatttgttcgggcatgttggcagtacgactgccagcaggggtgagctcttcctcttctggaacctctataaagctccaatactgttggcactagtggcaggagaagctgctggtatcatggaaaacataagtgacgatgtgattgttggccgatgcctggccattctcaaagggatttttggtagcagtgcagtacctcagcccaaagaaactgtggtgtctcgttggcgtgctgatccctgggctcggggctcttattcctatgttgctgcaggatcatctggaaatgactatgatttaatggctcagccaatcactcctggcccctcgattccaggtgccccacagccgattccacgactcttctttgcgggagaacatacgatccgtaactacccagccacagtgcatggtgctctgctgagtgggctgcgagaagcgggaagaattgcagaccagtttttgggggccatgtatacgctgcctcgccaggccacaccaggtgttcctgcacagcagtccccaagcatgtgagacagatgcattctaagggaagaggcccatgtgcctgtttctgccatgtaaggaaggctcttctagcaatactagatcccactgagaaaatccaccctggcatctgggctcctgatcagctgatggagctcctgatttgacaaaggagcttgcctcctttgaatgacctagagcacagggaggaacttgtccattagtttggaattgtgttcttcgtaaagactgaggcaagcaagtgctgtgaaataacatcatcttagtcccttggtgtgtggggtttgttttttttttttatattttgagaataaaacttcatataaaattggccctctcttttgttcctttgagttggagttacatacaagatgggggcattactcctttggaaatgccaagtttatcctatggcaatagtaatacatgttttctccatgtttaaataaggaagaagatgttcatataaaagagaaaaatggtttgatcaggtcagaagataaggtaggggggccggtcctgtagaagcagtggacttcctggtcagtcggactaggcttcctcacttgggtgggggtggagtgtggtggtgtgccaagaacatggttattaggaaactttggatgcactttcaagatagaacacaaaagagctgaaacaaagtctgagcctttgggagaccagtctgcctttattcctgattccctccatgggtatgtgctaaaacttcccaattctactaaaggtggtggtgtacattttgggaagcgcactacataggatcaagggcttaggtaacagctggtttaacagattgccacaaacttagtggctcttaaaaaaacagaaatctattcgaaagttctggatgcttaaagtctaaaatgggtccacagggctgcattcattacagaggctctcagagcagggaggatcagttcatttccttgctcttttcagcttctaggtgtgggaaggctcgtggctccttcctccatcctcagagcacataactccagtttctgcttccatcatcacattgccttctcctgtagtcaaatcttttgtctctctcttaaaaggatactacctgtgattacatttaaggcccacctggatcatctaggatgttctgcctcatcccagcatccttatctgcaaagtcccttttgccatataagatgataaaaacatgttacatgctggttccttcccaggggctcctgactgactgacagatagatgataaacactgttactgcaaatccaagtaatgtcccttaaatgtggttttattctttcttactgtgagttaagggacatcattatatatattggtgatctgactggaagatgaaaacggagaaggcttttcccccccctagtcttagaattcgtggcagtaatggaaagaatctgcacaccaggatcagggcagttaatgtttccagtccttgcagtatcagtaattggttaggtaaaatacccaattttaagtattacacaatgaaataaataaatatactagagctgcgccaacgcatagaagacagatgatacacagggatgacattgacaaaactggcatcacagactcgcacagagtatacggaaacgagggagctttattggttacatattgtactgcagagccaacagagagcattcgcgccagaggatacatgcagacaggcagctccaatgatacacatgcacccaaggagccctgagccactgctttgccctggtttccagcgacaggttctggcctccttggtcccatgcttggagctgctgcacctagactctaaggggcaggggtgagagagaccagagcacctgcctgagcaagtaggtgtggaccaacaggctgcccccaacaaaggggcctataatgcaataacagtttatttgagggctactttcttagccctctcaatctttaaaatacaaaaaaatagactttattctcttaaaaatacattccattcagtatatgttctgagctgggaagcagcaggaaaatagggcccctttcctatgatcctatggttgtgaggctttgaggagaaccctgctccccactcggggtattcaaaaaataatccctaaaagcagctctttccaaagcaatcttgtcagagaaataacaaaacctcataacaaggtagccagggacccagcctctgggtccccattcctttattgggaagtggtagcacttggcactgacccactaaatataaagaactaaaactgccccaggacgacaagtccaagaacactatagtgccccctgcatcccgaacactccactgacgggggttatttatgtgcaagcttgcctacagctgagggtggggtggcatccttggccccactgcagatccctttaacccacactgtgactctttctcattgccacccaaaagcaaaaaacagccacagcttctttatccacctgcagctttctctggtttagtatcagagtggcaaaaaaagcagcagcacgtggaagagatcagctgctggtactaagccagcttcacttcctccaaccaagcagctctattgccaggtcccccaactcactaggaaccctccaacaaccatacacctgccagtaaaatttaagagccaagctgcggaagaaaactgtcataaaagtgggtttgttgaccgggggcagtgggactatttggcttgattaaacaactattcaactaccaggtctcccctctacttggaggcttcctccaggacccctgatgatgaggcctgggtccaaacagtcacacctcagttgcttttcagaaacatgcctcccaactttgggatttgagagccagccttgccagccatttgaagcccagagaaacagcctccagcctttacttgctattacaatgttattttctgcaatgctgaggacacttaaaaataaaatctatctagaaagtgtgcagattaaagaaacaaaatatcctgaaataactgttacaagcaaatcctattgcactcagatttcaagatggcagccccagcaaaagggcatcacagctgtccctcttcaacaggacattttgagtagcagcagatgttggtgctgctgaaatgtggaaagatccagactttggcaccaggagctatagcaccagaatccagggctccaacacccaaagacaagaattattggcgagatctttttaggcatggcttggcgcccttctgtttccatcagcagagaagagccacagacttagtttcctaatacctttagttgaccaccacagaggttgattttctttgaactctcaaggttgccaaccagtgaaggagaatggcagggaggctgcaagtgaaggatggcagccttgagtgagctagtttctggccagtaagccaggagaagcagcagtaagagatcttggaaatagcatcttgagcatcagaggtggggatgtggacaggaaaggcaggccacatgacaatgcctttagattggcaaaactctgggaagcagaagtatgagcaatagattcctgtccctgaaagtaaggtaggtgctccccaagcctcctcactgccaaatctgatacagacaagggcaggatgaacactggttcccatgctgagtgaaggcagagaagacaaattcctctggaggaagtcttgagtcttcctcttgccaggaaattcataggagatgcacaggaacaggagatacacagacttgggtactttccataatacctagactcctagaacgccaggagatactgtgtggcactgggcaaggctgatgccacaaagagcctcagagaccatcccatctaatcccttcacactttgcagactgggaaacaggcccacggagcttctctgagctcatccccatgagattaaaacatacagaaactaaaaaacaaggcccagaaaaacaattgagggcaggagggaagaacccacacggatgataccttccacaagcaaaaatcatcccatactattatagatggtgaaaacaggagaaccttagaataccagatttggtgcccttagagatcatccatttcaaagaactcattttacagacagggaaactgaggctccaagaagacaatgactcacccaaggtcacacagcaaggaagtaaagccatggggaaaaaaatccagcttaccagactggtagtttaatgttctctcattctgagggcaatagtgtctacttcataaaggtagcctttgaaagaggatcccttctttgaattgacagaatgctaaagaaaaagcactgccaagaatatacaattcttttcaacttccccatgtgactggtataaggaacctaaccaatttatttacgtggctttctgaaaagtttgctgcattttgaactatataaagctgaggccctcaatgcgtatgtacgtatcacctttcctccagcgaagtcatcatgatagtcgacttgcagaaatccggggcccacttctgtaggaatgcatcagcttggtaaagtgcgatgcctcctccatgggggatggagaaggaggaacaggagggagtagtctcacagtccatgcctctcatggagctattgcttgtggagtgactaaaggggtctgctttccctcttgctgggcacttcctagaaggcagaggatgctgggtcaggcccagcttagcctagggattttcccaaggtggaaacaatgaagtcagcttgaagtctccagccactggagagaaagcaggcgatgccagcagcattactggtgctcaggaaaggagatgcatgaggcttgcacctccaggtgcctttggaaggtgagcagagagagctggggttggggagggatgatgtcattccaatgggtatccgcatgagtatctgcatgctctgcttccaggagactggtaagccaggagcaggtcaaacttcaacctaaagggtagtctcataatcctttagaggcagcacagacccctttctgctttaagtctgaagaaaagaactccaaggggaaagaaatgaaagccccctagatagagctgatggctggtaaatcttatggggtacttgagcccattgggcaaatgaggagtgaagtggatatagtgaggagactgagaaaccagaacattaaccacacagacagaggctgccctaggatccagaaacaacccaccaaggagccgagaagaatttttgactcctgctgtgtgctggggactttatcttcccttgtttgggggccagaatggtccaactacttggtggacagggacaaggagagagagaggactcgtgcattggggaaggttgggcctgggtgactgtccagcttgtagtctctgattccctctggccaaatggcaaaaattacctgagccacagcccggctctaccacagttttccagccaaggcttgtgtcttgcctggttaactggccttggatccttcgtggggcaggacggtggaagagctgagaagcaggagcagagggcagacaacagacacccagcgggctcagttctcctcagcacagggcctggttggccgtaatcgttcctcggcccgtactcgcccagactctggcagcccctgcttcccaggcagttcagacggatccagggagttgtgcagttgcctgtagacactgagtgtacagtcttccccttcttcctccatgcttgctgagtggttccaggctgcgacagtgatggtgtctcctacccgattccgacgggtaagcacctctgacacagtgaggctactttgggtccttctggaggagggctcaggggcatcccctgaacttggtcctacccttcgagtgccctgctcaaaaaggcaggacctgggctgttcgagttctgagaagtctgtggaagacctctgggtgtaggcattgctattggtagattccacgtttttacctattcgagttggggggtcttctaaagatttcaagtctcgcctactcttccaggcattccgcacagtaacatgtctggcatctgagaagcccacttctgaaggggcactatggcttttccacctgattgtctccgctggaggtgcatggctattcctctccacaggatccgatggcttgattataatgctgctccgagagaccactgtttctggcctgttcttcaggggcccatctgccattctctccgcttctgcaagctgcagggtgatgtcatgtttgtgaatggagagctcaaaaggggagctgacatggttgctaactgatgtgagctctgccagccccacctggatattgctagtggatgtgtgcctctccctcagggcctcacccggagcagctctggggctgctgctgtcagatggatatatagtaatgctacttgtcactttgtttggccctggtttggagacgggtttctgtttctccaacgtagtctctgttccagatcctcccatgatttttttcacatccttatcaacaataacaggtttgatgatggctctagaccgcaacgcctctctggggctaaagggcctttggctttttaccccagcaccattggtatctgggagctccatggtattggtggaggctctgacagatttcacagattcattctccattccagcatctttatcattctcaaatagggaggttctaggtgcccctcgggttttagccttttctctagagttaggctgtggtttgggctctggctctggagtgatggttgtatttaccaacttggcagtaacaagagatgctatgtccaagtcatcatctgagtctggcttctctctgccactggatttgatgactcgacacctcaaggcttcatgcggactgctgtcttccatcacaactgctgcaggttgattaaccccttctttatgtgaggttgaaaatccctgaaggatgttctcttggcttctacagctataaggatacttcgatagaacaggagccttggaattcgggcaactgttatcagcctcaaggccattggcagcctttttgcctttagagagcccttctgaggaggatcttcgagatgaggccagggctccaatggccttagaacagccagagtttgcagcctgagttacttgacttccgttgccaagcacgtgtcccctcttgccaaagacagtctcagaggaggtgtcagaagccttgtcagctctacccaatgggtcactgggaacagatccatgggtggtgtcactaaacgttcgtgttgtcttctccacttttcccttcagtccactctcggtgcctggcttggaagtccccttccacgctttactgtgctcctgagcagccggggggtagcgactcagcactgagggctgctccctagacttcttcccttcgctcttggaggagctgggtacaaaccggtcttcagttttctttgtctcctgagtcccactgtctgtactcacccccatgtgagaagcttttgctgccctcctgttggtgaaactgggagaagaaacctgcctgttgctcagagaatagttttcattgttgagagcaaactccctgttccggagtcgttcccgcttatgctgaggagacagttcccgcgctgtgtgcttggacacagaagcttcacttccgtggcctctaaacttagtcctctcatgtctgcctttgctggacaggaaagcatcttccccttctacctctccattttctaactctttctgtttcttgatttgtagctttatctcctccagttggctggctaataatttgtttttattttgttcacttaggtaattatcctgaaggtcgttatttttggacttcattttcttaagctcttcttccaacgattcaaagtgtttgatttgcgtcttaagtttctcaatctcttggttaaggtctttgactttgttgtcttcctgattgcggttcttttcattttctgatttgtttcttgtttcattctctacctgctttaggtagtccagaccacccttccttcttgattctttggacggcagtgtggaagagatgccatcctcaatccgtaggtcatttctttccagattagaagcattccttgtataatctcggttcatttttttgttctgctctagtttttgagtgagttcttttatcaatttctcattttctttctccttttcattcaagtattttctctcacttacaaagctcagagttaatgatttcagcttttctaactctgacgctaaactctgctcagttttatccaggcggtcctcagaagattctagttctttcactttgactctgagcatttccagctcagaggagattttcttggtcagatttctctcctcattcaggctcagacacagctgggtacagtcattcttactcctgctgaaggcctcttctagcttctctaattcagccattcgtttctgaagccgctcaatctcagatttcagctcccgggtgaggttttcttcctcttcaagtttctccttcatcagacgacacagatcctctgctctcttaatttcctcgtctttgccttcaattctcagcacccgctggcgcagcacttcaatctccgccaacatgctggagttgctaccttctgcctgaatcaccttgtcctggagatccaggagttcatcctctgctttctggaggttttttgtggcttcctccaactcatcaaggcggcggcttagactctgtagcttaaaccgcaagtggcggctggaggccgtctccttgtagcttgtaaattcggccatgtctactgccagccaatgtgggctcctagaggcatccaattccactcaaggggatgagaaatggttacctttctcttggcaaccacaatcttctttgacagctggagaccatcatcaatattgcagcacctttactccttcggctgtgatccaatctccagctcactttttgccagcaccaacattggcctactatgggc

SEQ ID NO: 736420 - DNA, 5398 bp, Homo sapiens
tgtcccggcgcggcgggagcgcgcttggcgcgtgcgtacgcgacggcggttggcggcgcgcgggcagcgtgaagcgaggcgaggcaaggcttttcggacccacggagcgacagagcgagcggcccctacggccgtcggcggcccggcggcccgagatgttatctgggaagaaggcggcagccgcggcggcggcggctgcagcggcagcaaccgggacggaggctggccctgggacagcaggcggctccgagaacgggtctgaggtggccgcgcagcccgcgggcctgtcgggcccagccgaggtcgggccgggggcggtgggggagcgcacaccccgcaagaaagagcctccgcgggcctcgccccccgggggcctggcggaaccgccggggtccgcagggcctcaggccggccctactgtcgtgcctgggtctgcgacccccatggaaactggaatagcagagactccggaggggcgtcggaccagccggcgcaagcgggcgaaggtagagtacagagagatggatgaaagcttggccaacctctcagaagatgagtattattcagaagaagagagaaatgccaaagcagagaaggaaaagaagcttcccccaccaccccctcaagccccacctgaggaagaaaatgaaagtgagcctgaagaaccatcggggcaagcaggaggacttcaagacgacagttctggagggtatggagacggccaagcatcaggtgagggtggcattagatgcttgccacttagtagcaagagccgccaagtaggaattgatgcttgcaagtgtttttggctgtggtatccacattttagccagaagcgcagatgtcctttgctttcttcgttaggtgtggagggcgcagctttccagagccgacttcctcatgaccggatgacttctcaagaagcagcctgttttccagatattatcagtggaccacaacagacccagaaggtttttcttttcattagaaaccgcacactgcagttgtggttggataatccaaagattcagctgacatttgaggctactctccaacaattagaagcaccttataacagtgatactgtgcttgtccaccgagttcacagttatttagagcgtcatggtcttatcaacttcggcatctataagaggataaaacccctaccaactaaaaagacaggaaaggtaattattataggctctggggtctcaggcttggcagcagctcgacagttacaaagttttggaatggatgtcacacttttggaagccagggatcgtgtgggtggacgagttgccacatttcgcaaaggaaactatgtagctgatcttggagccatggtggtaacaggtcttggagggaatcctatggctgtggtcagcaaacaagtaaatatggaactggccaagatcaagcaaaaatgcccactttatgaagccaacggacaagctgttcctaaagagaaagatgaaatggtagagcaagagtttaaccggttgctagaagctacatcttaccttagtcatcaactagacttcaatgtcctcaataataagcctgtgtcccttggccaggcattggaagttgtcattcagttacaagagaagcatgtcaaagatgagcagattgaacattggaagaagatagtgaaaactcaggaagaattgaaagaacttcttaataagatggtaaatttgaaagagaaaattaaagaactccatcagcaatacaaagaagcatctgaagtaaagccacccagagatattactgccgagttcttagtgaaaagcaaacacagggatctgaccgccctatgcaaggaatatgatgaattagctgaaacacaaggaaagctagaagaaaaacttcaggagttggaagcgaatcccccaagtgatgtatatctctcatcaagagacagacaaatacttgattggcattttgcaaatcttgaatttgctaatgccacacctctctcaactctctcccttaagcactgggatcaggatgatgactttgagttcactggcagccacctgacagtaaggaatggctactcgtgtgtgcctgtggctttagcagaaggcctagacattaaactgaatacagcagtgcgacaggttcgctacacggcttcaggatgtgaagtgatagctgtgaatacccgctccacgagtcaaacctttatttataaatgcgacgcagttctctgtacccttcccctgggtgtgctgaagcagcagccaccagccgttcagtttgtgccacctctccctgagtggaaaacatctgcagtccaaaggatgggatttggcaaccttaacaaggtggtgttgtgttttgatcgggtgttctgggatccaagtgtcaatttgttcgggcatgttggcagtacgactgccagcaggggtgagctcttcctcttctggaacctctataaagctccaatactgttggcactagtggcaggagaagctgctggtatcatggaaaacataagtgacgatgtgattgttggccgatgcctggccattctcaaagggatttttggtagcagtgcagtacctcagcccaaagaaactgtggtgtctcgttggcgtgctgatccctgggctcggggctcttattcctatgttgctgcaggatcatctggaaatgactatgatttaatggctcagccaatcactcctggcccctcgattccaggtgccccacagccgattccacgactcttctttgcgggagaacatacgatccgtaactacccagccacagtgcatggtgctctgctgagtgggctgcgagaagcgggaagaattgcagaccagtttttgggggccatgtatacgctgcctcgccaggccacaccaggtgttcctgcacagcagtccccaagcatgtgagacagatgcattctaagggaagaggcccatgtgcctgtttctgccatgtaaggaaggctcttctagcaatactagatcccactgagaaaatccaccctggcatctgggctcctgatcagctgatggagctcctgatttgacaaaggagcttgcctcctttgaatgacctagagcacagggaggaacttgtccattagtttggaattgtgttcttcgtaaagactgaggcaagcaagtgctgtgaaataacatcatcttagtcccttggtgtgtggggtttgttttttttttttatattttgagaataaaacttcatataaaattggccctctcttttgttcctttgagttggagttacatacaagatgggggcattactcctttggaaatgccaagtttatcctatggcaatagtaatacatgttttctccatgtttaaataaggaagaagatgttcatataaaagagaaaaatggtttgatcaggtcagaagataaggtaggggggccggtcctgtagaagcagtggacttcctggtcagtcggactaggcttcctcacttgggtgggggtggagtgtggtggtgtgccaagaacatggttattaggaaactttggatgcactttcaagatagaacacaaaagagctgaaacaaagtctgagcctttgggagaccagtctgcctttattcctgattccctccatgggtatgtgctaaaacttcccaattctactaaaggtggtggtgtacattttgggaagcgcactacataggatcaagggcttaggtaacagctggtttaacagattgccacaaacttagtggctcttaaaaaaacagaaatctattcgaaagttctggatgcttaaagtctaaaatgggtccacagggctgcattcattacagaggctctcagagcagggaggatcagttcatttccttgctcttttcagcttctaggtgtgggaaggctcgtggctccttcctccatcctcagagcacataactccagtttctgcttccatcatcacattgccttctcctgtagtcaaatcttttgtctctctcttaaaaggatactacctgtgattacatttaaggcccacctggatcatctaggatgttctgcctcatcccagcatccttatctgcaaagtcccttttgccatataagatgataaaaacatgttacatgctggttccttcccaggggctcctgactgactgacagatagatgataaacactgttactgcaaatccaagtaatgtcccttaaatgtggttttattctttcttactgtgagttaagggacatcattatatatattggtgatctgactggaagatgaaaacggagaaggcttttcccccccctagtcttagaattcgtggcagtaatggaaagaatctgcacaccaggatcagggcagttaatgtttccagtccttgcagtatcagtaattggttaggtaaaatacccaattttaagtattacacaatgaaataaataaatatactagagctgcgccaacgcatagaagacagatgatacacagggatgacattgacaaaactggcatcacagactcgcacagagtatacggaaacgagggagctttattggttacatattgtactgcagagccaacagagagcattcgcgccagaggatacatgcagacaggcagctccaatgatacacatgcacccaaggagccctgagccactgctttgccctggtttccagcgacaggttctggcctccttggtcccatgcttggagctgctgcacctagactctaaggggcaggggtgagagagaccagagcacctgcctgagcaagtaggtgtggaccaacaggctgcccccaacaaaggggcctataatgcaataacagtttatttgagggctactttcttagccctctcaatctttaaaatacaaaaaaatagactttattctcttaaaaatacattccattcagtatatgttctgagctgggaagcagcaggaaaatagggcccctttcctatgatcctatggttgtgaggctttgaggagaaccctgctccccactcggggtattcaaaaaataatccctaaaagcagctctttccaaagcaatcttgtcagagaaataacaaaacctcataacaaggtagccagggacccagcctctgggtccccattcctttattgggaagtggtagcacttggcactgacccactaaatataaagaactaaaactgccccaggacgacaagtccaagaacactatagtgccccctgcatcccgaacactccactgacgggggttatttatgtgcaagcttgcctacagctgagggtggggtggcatccttggccccactgcagatccctttaacccacactgtgactctttctcattgccacccaaaagcaaaaaacagccacagcttctttatccacctgcagctttctccctcgtgccgaattcgccaccagg

SEQ ID NO: 736421 - DNA, 4733 bp, Homo sapiens
  misc_feature (4710)..(4710): n is a, c, g, or t
  misc_feature (4714)..(4714): n is a, c, g, or t
tgtcccggcgcggcgggagcgcgcttggcgcgtgcgtacgcgacggcggttggcggcgcgcgggcagcgtgaagcgaggcgaggcaaggcttttcggacccacggagcgacagagcgagcggcccctacggccgtcggcggcccggcggcccgagatgttatctgggaagaaggcggcagccgcggcggcggcggctgcagcggcagcaaccgggacggaggctggccctgggacagcaggcggctccgagaacgggtctgaggtggccgcgcagcccgcgggcctgtcgggcccagccgaggtcgggccgggggcggtgggggagcgcacaccccgcaagaaagagcctccgcgggcctcgccccccgggggcctggcggaaccgccggggtccgcagggcctcaggccggccctactgtcgtgcctgggtctgcgacccccatggaaactggaatagcagagactccggaggggcgtcggaccagccggcgcaagcgggcgaaggtagagtacagagagatggatgaaagcttggccaacctctcagaagatgagtattattcagaagaagagagaaatgccaaagcagagaaggaaaagaagcttcccccaccaccccctcaagccccacctgaggaagaaaatgaaagtgagcctgaagaaccatcggggcaagcaggaggacttcaagacgacagttctggagggtatggagacggccaagcatcaggtgagggtggcattagatgcttgccacttagtagcaagagccgccaagtaggaattgatgcttgcaagtgtttttggctgtggtatccacattttagccagaagcgcagatgtcctttgctttcttcgttaggtgtggagggcgcagctttccagagccgacttcctcatgaccggatgacttctcaagaagcagcctgttttccagatattatcagtggaccacaacagacccagaaggtttttcttttcattagaaaccgcacactgcagttgtggttggataatccaaagattcagctgacatttgaggctactctccaacaattagaagcaccttataacagtgatactgtgcttgtccaccgagttcacagttatttagagcgtcatggtcttatcaacttcggcatctataagaggataaaacccctaccaactaaaaagacaggaaaggtaattattataggctctggggtctcaggcttggcagcagctcgacagttacaaagttttggaatggatgtcacacttttggaagccagggatcgtgtgggtggacgagttgccacatttcgcaaaggaaactatgtagctgatcttggagccatggtggtaacaggtcttggagggaatcctatggctgtggtcagcaaacaagtaaatatggaactggccaagatcaagcaaaaatgcccactttatgaagccaacggacaagctgttcctaaagagaaagatgaaatggtagagcaagagtttaaccggttgctagaagctacatcttaccttagtcatcaactagacttcaatgtcctcaataataagcctgtgtcccttggccaggcattggaagttgtcattcagttacaagagaagcatgtcaaagatgagcagattgaacattggaagaagatagtgaaaactcaggaagaattgaaagaacttcttaataagatggtaaatttgaaagagaaaattaaagaactccatcagcaatacaaagaagcatctgaagtaaagccacccagagatattactgccgagttcttagtgaaaagcaaacacagggatctgaccgccctatgcaaggaatatgatgaattagctgaaacacaaggaaagctagaagaaaaacttcaggagttggaagcgaatcccccaagtgatgtatatctctcatcaagagacagacaaatacttgattggcattttgcaaatcttgaatttgctaatgccacacctctctcaactctctcccttaagcactgggatcaggatgatgactttgagttcactggcagccacctgacagtaaggaatggctactcgtgtgtgcctgtggctttagcagaaggcctagacattaaactgaatacagcagtgcgacaggttcgctacacggcttcaggatgtgaagtgatagctgtgaatacccgctccacgagtcaaacctttatttataaatgcgacgcagttctctgtacccttcccctgggtgtgctgaagcagcagccaccagccgttcagtttgtgccacctctccctgagtggaaaacatctgcagtccaaaggatgggatttggcaaccttaacaaggtggtgttgtgttttgatcgggtgttctgggatccaagtgtcaatttgttcgggcatgttggcagtacgactgccagcaggggtgagctcttcctcttctggaacctctataaagctccaatactgttggcactagtggcaggagaagctgctggtatcatggaaaacataagtgacgatgtgattgttggccgatgcctggccattctcaaagggatttttggtagcagtgcagtacctcagcccaaagaaactgtggtgtctcgttggcgtgctgatccctgggctcggggctcttattcctatgttgctgcaggatcatctggaaatgactatgatttaatggctcagccaatcactcctggcccctcgattccaggtgccccacagccgattccacgactcttctttgcgggagaacatacgatccgtaactacccagccacagtgcatggtgctctgctgagtgggctgcgagaagcgggaagaattgcagaccagtttttgggggccatgtatacgctgcctcgccaggccacaccaggtgttcctgcacagcagtccccaagcatgtgagacagatgcattctaagggaagaggcccatgtgcctgtttctgccatgtaaggaaggctcttctagcaatactagatcccactgagaaaatccaccctggcatctgggctcctgatcagctgatggagctcctgatttgacaaaggagcttgcctcctttgaatgacctagagcacagggaggaacttgtccattagtttggaattgtgttcttcgtaaagactgaggcaagcaagtgctgtgaaataacatcatcttagtcccttggtgtgtggggtttgttttttttttttatattttgagaataaaacttcatataaaattggccctctcttttgttcctttgagttggagttacatacaagatgggggcattactcctttggaaatgccaagtttatcctatggcaatagtaatacatgttttctccatgtttaaataaggaagaagatgttcatataaaagagaaaaatggtttgatcaggtcagaagataaggtaggggggccggtcctgtagaagcagtggacttcctggtcagtcggactaggcttcctcacttgggtgggggtggagtgtggtggtgtgccaagaacatggttattaggaaactttggatgcactttcaagatagaacacaaaagagctgaaacaaagtctgagcctttgggagaccagtctgcctttattcctgattccctccatgggtatgtgctaaaacttcccaattctactaaaggtggtggtgtacattttgggaagcgcactacataggatcaagggcttaggtaacagctggtttaacagattgccacaaacttagtggctcttaaaaaaacagaaatctattcgaaagttctggatgcttaaagtctaaaatgggtccacagggctgcattcattacagaggctctcagagcagggaggatcagttcatttccttgctcttttcagcttctaggtgtgggaaggctcgtggctccttcctccatcctcagagcacataactccagtttctgcttccatcatcacattgccttctcctgtagtcaaatcttttgtctctctcttaaaaggatactacctgtgattacatttaaggcccacctggatcatctaggatgttctgcctcatcccagcatccttatctgcaaagtcccttttgccatataagatgataaaaacatgttacatgctggttccttcccaggggctcctgactgactgacagatagatgataaacactgttactgcaaatccaagtaatgtcccttaaatgtggttttattctttcttactgtgagttaagggacatcattatatatattggtgatctgactggaagatgaaaacggagaaggcttttcccccccctagtcttagaattcgtggcagtaatggaaagaatctgcacaccaggatcagggcagttaatgtttccagtccttgcagtatcagtaattggttaggtaaaatacccaattttaagtattacacaatgaaataaataaatatactagagctgcgccaacgcatagaagacagatgatacacagggatgacattgacaaaactggcatcacagactcgcacagagtatacggaaacgagggagctttattggttacatattgtactgcagagccaacagagagcattcgcgccagaggatacatgcagacaggcagctccaatgatacacatgcacccaaggagccctgagccactgctttgccctggtttccagcgacaggttctggcctccttggttcccccaaaaatttgggagcccctatttggtngggnaaaggatcctttgggggcc

SEQ ID NO: 736422 - DNA, 4268 bp, Homo sapiens
tgtcccggcgcggcgggagcgcgcttggcgcgtgcgtacgcgacggcggttggcggcgcgcgggcagcgtgaagcgaggcgaggcaaggcttttcggacccacggagcgacagagcgagcggcccctacggccgtcggcggcccggcggcccgagatgttatctgggaagaaggcggcagccgcggcggcggcggctgcagcggcagcaaccgggacggaggctggccctgggacagcaggcggctccgagaacgggtctgaggtggccgcgcagcccgcgggcctgtcgggcccagccgaggtcgggccgggggcggtgggggagcgcacaccccgcaagaaagagcctccgcgggcctcgccccccgggggcctggcggaaccgccggggtccgcagggcctcaggccggccctactgtcgtgcctgggtctgcgacccccatggaaactggaatagcagagactccggaggggcgtcggaccagccggcgcaagcgggcgaaggtagagtacagagagatggatgaaagcttggccaacctctcagaagatgagtattattcagaagaagagagaaatgccaaagcagagaaggaaaagaagcttcccccaccaccccctcaagccccacctgaggaagaaaatgaaagtgagcctgaagaaccatcggggcaagcaggaggacttcaagacgacagttctggagggtatggagacggccaagcatcaggtgagggtggcattagatgcttgccacttagtagcaagagccgccaagtaggaattgatgcttgcaagtgtttttggctgtggtatccacattttagccagaagcgcagatgtcctttgctttcttcgttaggtgtggagggcgcagctttccagagccgacttcctcatgaccggatgacttctcaagaagcagcctgttttccagatattatcagtggaccacaacagacccagaaggtttttcttttcattagaaaccgcacactgcagttgtggttggataatccaaagattcagctgacatttgaggctactctccaacaattagaagcaccttataacagtgatactgtgcttgtccaccgagttcacagttatttagagcgtcatggtcttatcaacttcggcatctataagaggataaaacccctaccaactaaaaagacaggaaaggtaattattataggctctggggtctcaggcttggcagcagctcgacagttacaaagttttggaatggatgtcacacttttggaagccagggatcgtgtgggtggacgagttgccacatttcgcaaaggaaactatgtagctgatcttggagccatggtggtaacaggtcttggagggaatcctatggctgtggtcagcaaacaagtaaatatggaactggccaagatcaagcaaaaatgcccactttatgaagccaacggacaagctgttcctaaagagaaagatgaaatggtagagcaagagtttaaccggttgctagaagctacatcttaccttagtcatcaactagacttcaatgtcctcaataataagcctgtgtcccttggccaggcattggaagttgtcattcagttacaagagaagcatgtcaaagatgagcagattgaacattggaagaagatagtgaaaactcaggaagaattgaaagaacttcttaataagatggtaaatttgaaagagaaaattaaagaactccatcagcaatacaaagaagcatctgaagtaaagccacccagagatattactgccgagttcttagtgaaaagcaaacacagggatctgaccgccctatgcaaggaatatgatgaattagctgaaacacaaggaaagctagaagaaaaacttcaggagttggaagcgaatcccccaagtgatgtatatctctcatcaagagacagacaaatacttgattggcattttgcaaatcttgaatttgctaatgccacacctctctcaactctctcccttaagcactgggatcaggatgatgactttgagttcactggcagccacctgacagtaaggaatggctactcgtgtgtgcctgtggctttagcagaaggcctagacattaaactgaatacagcagtgcgacaggttcgctacacggcttcaggatgtgaagtgatagctgtgaatacccgctccacgagtcaaacctttatttataaatgcgacgcagttctctgtacccttcccctgggtgtgctgaagcagcagccaccagccgttcagtttgtgccacctctccctgagtggaaaacatctgcagtccaaaggatgggatttggcaaccttaacaaggtggtgttgtgttttgatcgggtgttctgggatccaagtgtcaatttgttcgggcatgttggcagtacgactgccagcaggggtgagctcttcctcttctggaacctctataaagctccaatactgttggcactagtggcaggagaagctgctggtatcatggaaaacataagtgacgatgtgattgttggccgatgcctggccattctcaaagggatttttggtagcagtgcagtacctcagcccaaagaaactgtggtgtctcgttggcgtgctgatccctgggctcggggctcttattcctatgttgctgcaggatcatctggaaatgactatgatttaatggctcagccaatcactcctggcccctcgattccaggtgccccacagccgattccacgactcttctttgcgggagaacatacgatccgtaactacccagccacagtgcatggtgctctgctgagtgggctgcgagaagcgggaagaattgcagaccagtttttgggggccatgtatacgctgcctcgccaggccacaccaggtgttcctgcacagcagtccccaagcatgtgagacagatgcattctaagggaagaggcccatgtgcctgtttctgccatgtaaggaaggctcttctagcaatactagatcccactgagaaaatccaccctggcatctgggctcctgatcagctgatggagctcctgatttgacaaaggagcttgcctcctttgaatgacctagagcacagggaggaacttgtccattagtttggaattgtgttcttcgtaaagactgaggcaagcaagtgctgtgaaataacatcatcttagtcccttggtgtgtggggtttgttttttttttttatattttgagaataaaacttcatataaaattggccctctcttttgttcctttgagttggagttacatacaagatgggggcattactcctttggaaatgccaagtttatcctatggcaatagtaatacatgttttctccatgtttaaataaggaagaagatgttcatataaaagagaaaaatggtttgatcaggtcagaagataaggtaggggggccggtcctgtagaagcagtggacttcctggtcagtcggactaggcttcctcacttgggtgggggtggagtgtggtggtgtgccaagaacatggttattaggaaactttggatgcactttcaagatagaacacaaaagagctgaaacaaagtctgagcctttgggagaccagtctgcctttattcctgattccctccatgggtatgtgctaaaacttcccaattctactaaaggtggtggtgtacattttgggaagcgcactacataggatcaagggcttaggtaacagctggtttaacagattgccacaaacttagtggctcttaaaaaaacagaaatctattcgaaagttctggatgcttaaagtctaaaatgggtccacagggctgcattcattacagaggctctcagagcagggaggatcagttcatttccttgctcttttcagcttctaggtgtgggaaggctcgtggctccttcctccatcctcagagcacataactccagtttctgcttccatcatcacattgccttctcctgtagtcaaatcttttgtctctctcttaaaaggatactacctgtgattacatttaaggcccacctggatcatctaggatgttctgcctcatcccagcatccttatctgcaaagtcccttttgccatataagatgataaaaacatgttacatgctggttccttcccaggggctcctgactgactgacagatagatgataaacactgttactgcaaatccaagtaatgtcccttaaatgtggttttattctttcttactgtgagttaagggacatcattatatatattggcccgcgtacctgcccgggcggccgctcgaa

SEQ ID NO: 736423 - DNA, 3721 bp, Homo sapiens
tgtcccggcgcggcgggagcgcgcttggcgcgtgcgtacgcgacggcggttggcggcgcgcgggcagcgtgaagcgaggcgaggcaaggcttttcggacccacggagcgacagagcgagcggcccctacggccgtcggcggcccggcggcccgagatgttatctgggaagaaggcggcagccgcggcggcggcggctgcagcggcagcaaccgggacggaggctggccctgggacagcaggcggctccgagaacgggtctgaggtggccgcgcagcccgcgggcctgtcgggcccagccgaggtcgggccgggggcggtgggggagcgcacaccccgcaagaaagagcctccgcgggcctcgccccccgggggcctggcggaaccgccggggtccgcagggcctcaggccggccctactgtcgtgcctgggtctgcgacccccatggaaactggaatagcagagactccggaggggcgtcggaccagccggcgcaagcgggcgaaggtagagtacagagagatggatgaaagcttggccaacctctcagaagatgagtattattcagaagaagagagaaatgccaaagcagagaaggaaaagaagcttcccccaccaccccctcaagccccacctgaggaagaaaatgaaagtgagcctgaagaaccatcggggcaagcaggaggacttcaagacgacagttctggagggtatggagacggccaagcatcaggtgagggtggcattagatgcttgccacttagtagcaagagccgccaagtaggaattgatgcttgcaagtgtttttggctgtggtatccacattttagccagaagcgcagatgtcctttgctttcttcgttaggtgtggagggcgcagctttccagagccgacttcctcatgaccggatgacttctcaagaagcagcctgttttccagatattatcagtggaccacaacagacccagaaggtttttcttttcattagaaaccgcacactgcagttgtggttggataatccaaagattcagctgacatttgaggctactctccaacaattagaagcaccttataacagtgatactgtgcttgtccaccgagttcacagttatttagagcgtcatggtcttatcaacttcggcatctataagaggataaaacccctaccaactaaaaagacaggaaaggtaattattataggctctggggtctcaggcttggcagcagctcgacagttacaaagttttggaatggatgtcacacttttggaagccagggatcgtgtgggtggacgagttgccacatttcgcaaaggaaactatgtagctgatcttggagccatggtggtaacaggtcttggagggaatcctatggctgtggtcagcaaacaagtaaatatggaactggccaagatcaagcaaaaatgcccactttatgaagccaacggacaagctgttcctaaagagaaagatgaaatggtagagcaagagtttaaccggttgctagaagctacatcttaccttagtcatcaactagacttcaatgtcctcaataataagcctgtgtcccttggccaggcattggaagttgtcattcagttacaagagaagcatgtcaaagatgagcagattgaacattggaagaagatagtgaaaactcaggaagaattgaaagaacttcttaataagatggtaaatttgaaagagaaaattaaagaactccatcagcaatacaaagaagcatctgaagtaaagccacccagagatattactgccgagttcttagtgaaaagcaaacacagggatctgaccgccctatgcaaggaatatgatgaattagctgaaacacaaggaaagctagaagaaaaacttcaggagttggaagcgaatcccccaagtgatgtatatctctcatcaagagacagacaaatacttgattggcattttgcaaatcttgaatttgctaatgccacacctctctcaactctctcccttaagcactgggatcaggatgatgactttgagttcactggcagccacctgacagtaaggaatggctactcgtgtgtgcctgtggctttagcagaaggcctagacattaaactgaatacagcagtgcgacaggttcgctacacggcttcaggatgtgaagtgatagctgtgaatacccgctccacgagtcaaacctttatttataaatgcgacgcagttctctgtacccttcccctgggtgtgctgaagcagcagccaccagccgttcagtttgtgccacctctccctgagtggaaaacatctgcagtccaaaggatgggatttggcaaccttaacaaggtggtgttgtgttttgatcgggtgttctgggatccaagtgtcaatttgttcgggcatgttggcagtacgactgccagcaggggtgagctcttcctcttctggaacctctataaagctccaatactgttggcactagtggcaggagaagctgctggtatcatggaaaacataagtgacgatgtgattgttggccgatgcctggccattctcaaagggatttttggtagcagtgcagtacctcagcccaaagaaactgtggtgtctcgttggcgtgctgatccctgggctcggggctcttattcctatgttgctgcaggatcatctggaaatgactatgatttaatggctcagccaatcactcctggcccctcgattccaggtgccccacagccgattccacgactcttctttgcgggagaacatacgatccgtaactacccagccacagtgcatggtgctctgctgagtgggctgcgagaagcgggaagaattgcagaccagtttttgggggccatgtatacgctgcctcgccaggccacaccaggtgttcctgcacagcagtccccaagcatgtgagacagatgcattctaagggaagaggcccatgtgcctgtttctgccatgtaaggaaggctcttctagcaatactagatcccactgagaaaatccaccctggcatctgggctcctgatcagctgatggagctcctgatttgacaaaggagcttgcctcctttgaatgacctagagcacagggaggaacttgtccattagtttggaattgtgttcttcgtaaagactgaggcaagcaagtgctgtgaaataacatcatcttagtcccttggtgtgtggggtttgttttttttttttatattttgagaataaaacttcatataaaattggcaaaaaaaaaaaaaaaaaaaaaaaaaaaaaaaaaaaaaaaaaaaaaaaaaaaaaaaaaaaaaaaaaaaaaaaaaaaaaaaaaaaaaaaaaaaaaaaaaaaaaaaaaaaaaaaaaaaaaaaaaaaaaaaaaaaaaaaaaaaaaaaaaaaaaaattgcccccaaattttgcttttttttgccaaattccccttttgggggggctttaaaaatctaaggggccggttttaataaacttgcgtcgggaaaaaacctggggttccaccaataaaccccttttgaaaaaatctcctttttccgagggggcattaatctggaaaagctcctccatatgtccctttcaaaaagtttgatcccctatatggctaacgaaatatgttccggttaatttttttaaaaatcggtgaaaattttttcaaaaacgcctttttttttatacacaatagtgcccaattctggactctttttttattcatatccccccggttgggg

SEQ ID NO: 736424 - DNA, 1295 bp, Homo sapiens
tgtcccggcgcggcgggagcgcgcttggcgcgtgcgtacgcgacggcggttggcggcgcgcgggcagcgtgaagcgaggcgaggcaaggcttttcggacccacggagcgacagagcgagcggcccctacggccgtcggcggcccggcggcccgagatgttatctgggaagaaggcggcagccgcggcggcggcggctgcagcggcagcaaccgggacggaggctggccctgggacagcaggcggctccgagaacgggtctgaggtggccgcgcagcccgcgggcctgtcgggcccagccgaggtcgggccgggggcggtgggggagcgcacaccccgcaagaaagagcctccgcgggcctcgccccccgggggcctggcggaaccgccggggtccgcagggcctcaggccggccctactgtcgtgcctgggtctgcgacccccatggaaactggaatagcagagactccggaggggcgtcggaccagccggcgcaagcgggcgaaggtagagtacagagagatggatgaaagcttggccaacctctcagaagatgagtattattcagaagaagagagaaatgccaaagcagagaaggaaaagaagcttcccccaccaccccctcaagccccacctgaggaagaaaatgaaagtgagcctgaagaaccatcggggcaagcaggaggacttcaagacgacagttctggagggtatggagacggccaagcatcaggtgtggagggcgcagctttccagagccgacttcctcatgaccggatgacttctcaagaagcagcctgttttccagatattatcagtggaccacaacagacccagaaggtttttcttttcattagaaaccgcacactgcagttgtggttggataatccaaagattcagctgacatttgaggctactctccaacaattagaagcaccttataacagtgatactgtgcttgtccaccgagttcacagttatttagagcgtcatggtcttatcaacttcggcatctataagaggataaaacccctaccaagtaaggacctcctacctggctgataaattttacatttttaagttacggtttcaggactgtattttatatctatgatgacgttaggattttattttgattcataagactatatttaaaaatatttccaagtttatcttcttaaagtcaagttaaatataataaataaataataaaaaatatagtctcttaataaatgtgcatttcccttaatttctagtttgatagctacttagtaaaagatactggatttccaattt

SEQ ID NO: 736425 - DNA, 11896 bp, Homo sapiens
tgtcccggcgcggcgggagcgcgcttggcgcgtgcgtacgcgacggcggttggcggcgcgcgggcagcgtgaagcgaggcgaggcaaggcttttcggacccacggagcgacagagcgagcggcccctacggccgtcggcggcccggcggcccgagatgttatctgggaagaaggcggcagccgcggcggcggcggctgcagcggcagcaaccgggacggaggctggccctgggacagcaggcggctccgagaacgggtctgaggtggccgcgcagcccgcgggcctgtcgggcccagccgaggtcgggccgggggcggtgggggagcgcacaccccgcaagaaagagcctccgcgggcctcgccccccgggggcctggcggaaccgccggggtccgcagggcctcaggccggccctactgtcgtgcctgggtctgcgacccccatggaaactggaatagcagagactccggaggggcgtcggaccagccggcgcaagcgggcgaaggtagagtacagagagatggatgaaagcttggccaacctctcagaagatgagtattattcagaagaagagagaaatgccaaagcagagaaggaaaagaagcttcccccaccaccccctcaagccccacctgaggaagaaaatgaaagtgagcctgaagaaccatcggggcaagcaggaggacttcaagacgacagttctggagggtatggagacggccaagcatcaggtgtggagggcgcagctttccagagccgacttcctcatgaccggatgacttctcaagaagcagcctgttttccagatattatcagtggaccacaacagacccagaaggtttttcttttcattagaaaccgcacactgcagttgtggttggataatccaaagattcagctgacatttgaggctactctccaacaattagaagcaccttataacagtgatactgtgcttgtccaccgagttcacagttatttagagcgtcatggtcttatcaacttcggcatctataagaggataaaacccctaccaactaaaaagacaggaaaggtaattattataggctctggggtctcaggcttggcagcagctcgacagttacaaagttttggaatggatgtcacacttttggaagccagggatcgtgtgggtggacgagttgccacatttcgcaaaggaaactatgtagctgatcttggagccatggtggtaacaggtcttggagggaatcctatggctgtggtcagcaaacaagtaaatatggaactggccaagatcaagcaaaaatgcccactttatgaagccaacggacaagctgttcctaaagagaaagatgaaatggtagagcaagagtttaaccggttgctagaagctacatcttaccttagtcatcaactagacttcaatgtcctcaataataagcctgtgtcccttggccaggcattggaagttgtcattcagttacaagagaagcatgtcaaagatgagcagattgaacattggaagaagatagtgaaaactcaggaagaattgaaagaacttcttaataagatggtaaatttgaaagagaaaattaaagaactccatcagcaatacaaagaagcatctgaagtaaagccacccagagatattactgccgagttcttagtgaaaagcaaacacagggatctgaccgccctatgcaaggaatatgatgaattagctgaaacacaaggaaagctagaagaaaaacttcaggagttggaagcgaatcccccaagtgatgtatatctctcatcaagagacagacaaatacttgattggcattttgcaaatcttgaatttgctaatgccacacctctctcaactctctcccttaagcactgggatcaggatgatgactttgagttcactggcagccacctgacagtaaggaatggctactcgtgtgtgcctgtggctttagcagaaggcctagacattaaactgaatacagcagtgcgacaggttcgctacacggcttcaggatgtgaagtgatagctgtgaatacccgctccacgagtcaaacctttatttataaatgcgacgcagttctctgtacccttcccctgggtgtgctgaagcagcagccaccagccgttcagtttgtgccacctctccctgagtggaaaacatctgcagtccaaaggatgggatttggcaaccttaacaaggtggtgttgtgttttgatcgggtgttctgggatccaagtgtcaatttgttcgggcatgttggcagtacgactgccagcaggggtgagctcttcctcttctggaacctctataaagctccaatactgttggcactagtggcaggagaagctgctggtatcatggaaaacataagtgacgatgtgattgttggccgatgcctggccattctcaaagggatttttggtagcagtgcagtacctcagcccaaagaaactgtggtgtctcgttggcgtgctgatccctgggctcggggctcttattcctatgttgctgcaggatcatctggaaatgactatgatttaatggctcagccaatcactcctggcccctcgattccaggtgccccacagccgattccacgactcttctttgcgggagaacatacgatccgtaactacccagccacagtgcatggtgctctgctgagtgggctgcgagaagcgggaagaattgcagaccagtttttgggggccatgtatacgctgcctcgccaggccacaccaggtgttcctgcacagcagtccccaagcatgtgagacagatgcattctaagggaagaggcccatgtgcctgtttctgccatgtaaggaaggctcttctagcaatactagatcccactgagaaaatccaccctggcatctgggctcctgatcagctgatggagctcctgatttgacaaaggagcttgcctcctttgaatgacctagagcacagggaggaacttgtccattagtttggaattgtgttcttcgtaaagactgaggcaagcaagtgctgtgaaataacatcatcttagtcccttggtgtgtggggtttgttttttttttttatattttgagaataaaacttcatataaaattggccctctcttttgttcctttgagttggagttacatacaagatgggggcattactcctttggaaatgccaagtttatcctatggcaatagtaatacatgttttctccatgtttaaataaggaagaagatgttcatataaaagagaaaaatggtttgatcaggtcagaagataaggtaggggggccggtcctgtagaagcagtggacttcctggtcagtcggactaggcttcctcacttgggtgggggtggagtgtggtggtgtgccaagaacatggttattaggaaactttggatgcactttcaagatagaacacaaaagagctgaaacaaagtctgagcctttgggagaccagtctgcctttattcctgattccctccatgggtatgtgctaaaacttcccaattctactaaaggtggtggtgtacattttgggaagcgcactacataggatcaagggcttaggtaacagctggtttaacagattgccacaaacttagtggctcttaaaaaaacagaaatctattcgaaagttctggatgcttaaagtctaaaatgggtccacagggctgcattcattacagaggctctcagagcagggaggatcagttcatttccttgctcttttcagcttctaggtgtgggaaggctcgtggctccttcctccatcctcagagcacataactccagtttctgcttccatcatcacattgccttctcctgtagtcaaatcttttgtctctctcttaaaaggatactacctgtgattacatttaaggcccacctggatcatctaggatgttctgcctcatcccagcatccttatctgcaaagtcccttttgccatataagatgataaaaacatgttacatgctggttccttcccaggggctcctgactgactgacagatagatgataaacactgttactgcaaatccaagtaatgtcccttaaatgtggttttattctttcttactgtgagttaagggacatcattatatatattggtgatctgactggaagatgaaaacggagaaggcttttcccccccctagtcttagaattcgtggcagtaatggaaagaatctgcacaccaggatcagggcagttaatgtttccagtccttgcagtatcagtaattggttaggtaaaatacccaattttaagtattacacaatgaaataaataaatatactagagctgcgccaacgcatagaagacagatgatacacagggatgacattgacaaaactggcatcacagactcgcacagagtatacggaaacgagggagctttattggttacatattgtactgcagagccaacagagagcattcgcgccagaggatacatgcagacaggcagctccaatgatacacatgcacccaaggagccctgagccactgctttgccctggtttccagcgacaggttctggcctccttggtcccatgcttggagctgctgcacctagactctaaggggcaggggtgagagagaccagagcacctgcctgagcaagtaggtgtggaccaacaggctgcccccaacaaaggggcctataatgcaataacagtttatttgagggctactttcttagccctctcaatctttaaaatacaaaaaaatagactttattctcttaaaaatacattccattcagtatatgttctgagctgggaagcagcaggaaaatagggcccctttcctatgatcctatggttgtgaggctttgaggagaaccctgctccccactcggggtattcaaaaaataatccctaaaagcagctctttccaaagcaatcttgtcagagaaataacaaaacctcataacaaggtagccagggacccagcctctgggtccccattcctttattgggaagtggtagcacttggcactgacccactaaatataaagaactaaaactgccccaggacgacaagtccaagaacactatagtgccccctgcatcccgaacactccactgacgggggttatttatgtgcaagcttgcctacagctgagggtggggtggcatccttggccccactgcagatccctttaacccacactgtgactctttctcattgccacccaaaagcaaaaaacagccacagcttctttatccacctgcagctttctctggtttagtatcagagtggcaaaaaaagcagcagcacgtggaagagatcagctgctggtactaagccagcttcacttcctccaaccaagcagctctattgccaggtcccccaactcactaggaaccctccaacaaccatacacctgccagtaaaatttaagagccaagctgcggaagaaaactgtcataaaagtgggtttgttgaccgggggcagtgggactatttggcttgattaaacaactattcaactaccaggtctcccctctacttggaggcttcctccaggacccctgatgatgaggcctgggtccaaacagtcacacctcagttgcttttcagaaacatgcctcccaactttgggatttgagagccagccttgccagccatttgaagcccagagaaacagcctccagcctttacttgctattacaatgttattttctgcaatgctgaggacacttaaaaataaaatctatctagaaagtgtgcagattaaagaaacaaaatatcctgaaataactgttacaagcaaatcctattgcactcagatttcaagatggcagccccagcaaaagggcatcacagctgtccctcttcaacaggacattttgagtagcagcagatgttggtgctgctgaaatgtggaaagatccagactttggcaccaggagctatagcaccagaatccagggctccaacacccaaagacaagaattattggcgagatctttttaggcatggcttggcgcccttctgtttccatcagcagagaagagccacagacttagtttcctaatacctttagttgaccaccacagaggttgattttctttgaactctcaaggttgccaaccagtgaaggagaatggcagggaggctgcaagtgaaggatggcagccttgagtgagctagtttctggccagtaagccaggagaagcagcagtaagagatcttggaaatagcatcttgagcatcagaggtggggatgtggacaggaaaggcaggccacatgacaatgcctttagattggcaaaactctgggaagcagaagtatgagcaatagattcctgtccctgaaagtaaggtaggtgctccccaagcctcctcactgccaaatctgatacagacaagggcaggatgaacactggttcccatgctgagtgaaggcagagaagacaaattcctctggaggaagtcttgagtcttcctcttgccaggaaattcataggagatgcacaggaacaggagatacacagacttgggtactttccataatacctagactcctagaacgccaggagatactgtgtggcactgggcaaggctgatgccacaaagagcctcagagaccatcccatctaatcccttcacactttgcagactgggaaacaggcccacggagcttctctgagctcatccccatgagattaaaacatacagaaactaaaaaacaaggcccagaaaaacaattgagggcaggagggaagaacccacacggatgataccttccacaagcaaaaatcatcccatactattatagatggtgaaaacaggagaaccttagaataccagatttggtgcccttagagatcatccatttcaaagaactcattttacagacagggaaactgaggctccaagaagacaatgactcacccaaggtcacacagcaaggaagtaaagccatggggaaaaaaatccagcttaccagactggtagtttaatgttctctcattctgagggcaatagtgtctacttcataaaggtagcctttgaaagaggatcccttctttgaattgacagaatgctaaagaaaaagcactgccaagaatatacaattcttttcaacttccccatgtgactggtataaggaacctaaccaatttatttacgtggctttctgaaaagtttgctgcattttgaactatataaagctgaggccctcaatgcgtatgtacgtatcacctttcctccagcgaagtcatcatgatagtcgacttgcagaaatccggggcccacttctgtaggaatgcatcagcttggtaaagtgcgatgcctcctccatgggggatggagaaggaggaacaggagggagtagtctcacagtccatgcctctcatggagctattgcttgtggagtgactaaaggggtctgctttccctcttgctgggcacttcctagaaggcagaggatgctgggtcaggcccagcttagcctagggattttcccaaggtggaaacaatgaagtcagcttgaagtctccagccactggagagaaagcaggcgatgccagcagcattactggtgctcaggaaaggagatgcatgaggcttgcacctccaggtgcctttggaaggtgagcagagagagctggggttggggagggatgatgtcattccaatgggtatccgcatgagtatctgcatgctctgcttccaggagactggtaagccaggagcaggtcaaacttcaacctaaagggtagtctcataatcctttagaggcagcacagacccctttctgctttaagtctgaagaaaagaactccaaggggaaagaaatgaaagccccctagatagagctgatggctggtaaatcttatggggtacttgagcccattgggcaaatgaggagtgaagtggatatagtgaggagactgagaaaccagaacattaaccacacagacagaggctgccctaggatccagaaacaacccaccaaggagccgagaagaatttttgactcctgctgtgtgctggggactttatcttcccttgtttgggggccagaatggtccaactacttggtggacagggacaaggagagagagaggactcgtgcattggggaaggttgggcctgggtgactgtccagcttgtagtctctgattccctctggccaaatggcaaaaattacctgagccacagcccggctctaccacagttttccagccaaggcttgtgtcttgcctggttaactggccttggatccttcgtggggcaggacggtggaagagctgagaagcaggagcagagggcagacaacagacacccagcgggctcagttctcctcagcacagggcctggttggccgtaatcgttcctcggcccgtactcgcccagactctggcagcccctgcttcccaggcagttcagacggatccagggagttgtgcagttgcctgtagacactgagtgtacagtcttccccttcttcctccatgcttgctgagtggttccaggctgcgacagtgatggtgtctcctacccgattccgacgggtaagcacctctgacacagtgaggctactttgggtccttctggaggagggctcaggggcatcccctgaacttggtcctacccttcgagtgccctgctcaaaaaggcaggacctgggctgttcgagttctgagaagtctgtggaagacctctgggtgtaggcattgctattggtagattccacgtttttacctattcgagttggggggtcttctaaagatttcaagtctcgcctactcttccaggcattccgcacagtaacatgtctggcatctgagaagcccacttctgaaggggcactatggcttttccacctgattgtctccgctggaggtgcatggctattcctctccacaggatccgatggcttgattataatgctgctccgagagaccactgtttctggcctgttcttcaggggcccatctgccattctctccgcttctgcaagctgcagggtgatgtcatgtttgtgaatggagagctcaaaaggggagctgacatggttgctaactgatgtgagctctgccagccccacctggatattgctagtggatgtgtgcctctccctcagggcctcacccggagcagctctggggctgctgctgtcagatggatatatagtaatgctacttgtcactttgtttggccctggtttggagacgggtttctgtttctccaacgtagtctctgttccagatcctcccatgatttttttcacatccttatcaacaataacaggtttgatgatggctctagaccgcaacgcctctctggggctaaagggcctttggctttttaccccagcaccattggtatctgggagctccatggtattggtggaggctctgacagatttcacagattcattctccattccagcatctttatcattctcaaatagggaggttctaggtgcccctcgggttttagccttttctctagagttaggctgtggtttgggctctggctctggagtgatggttgtatttaccaacttggcagtaacaagagatgctatgtccaagtcatcatctgagtctggcttctctctgccactggatttgatgactcgacacctcaaggcttcatgcggactgctgtcttccatcacaactgctgcaggttgattaaccccttctttatgtgaggttgaaaatccctgaaggatgttctcttggcttctacagctataaggatacttcgatagaacaggagccttggaattcgggcaactgttatcagcctcaaggccattggcagcctttttgcctttagagagcccttctgaggaggatcttcgagatgaggccagggctccaatggccttagaacagccagagtttgcagcctgagttacttgacttccgttgccaagcacgtgtcccctcttgccaaagacagtctcagaggaggtgtcagaagccttgtcagctctacccaatgggtcactgggaacagatccatgggtggtgtcactaaacgttcgtgttgtcttctccacttttcccttcagtccactctcggtgcctggcttggaagtccccttccacgctttactgtgctcctgagcagccggggggtagcgactcagcactgagggctgctccctagacttcttcccttcgctcttggaggagctgggtacaaaccggtcttcagttttctttgtctcctgagtcccactgtctgtactcacccccatgtgagaagcttttgctgccctcctgttggtgaaactgggagaagaaacctgcctgttgctcagagaatagttttcattgttgagagcaaactccctgttccggagtcgttcccgcttatgctgaggagacagttcccgcgctgtgtgcttggacacagaagcttcacttccgtggcctctaaacttagtcctctcatgtctgcctttgctggacaggaaagcatcttccccttctacctctccattttctaactctttctgtttcttgatttgtagctttatctcctccagttggctggctaataatttgtttttattttgttcacttaggtaattatcctgaaggtcgttatttttggacttcattttcttaagctcttcttccaacgattcaaagtgtttgatttgcgtcttaagtttctcaatctcttggttaaggtctttgactttgttgtcttcctgattgcggttcttttcattttctgatttgtttcttgtttcattctctacctgctttaggtagtccagaccacccttccttcttgattctttggacggcagtgtggaagagatgccatcctcaatccgtaggtcatttctttccagattagaagcattccttgtataatctcggttcatttttttgttctgctctagtttttgagtgagttcttttatcaatttctcattttctttctccttttcattcaagtattttctctcacttacaaagctcagagttaatgatttcagcttttctaactctgacgctaaactctgctcagttttatccaggcggtcctcagaagattctagttctttcactttgactctgagcatttccagctcagaggagattttcttggtcagatttctctcctcattcaggctcagacacagctgggtacagtcattcttactcctgctgaaggcctcttctagcttctctaattcagccattcgtttctgaagccgctcaatctcagatttcagctcccgggtgaggttttcttcctcttcaagtttctccttcatcagacgacacagatcctctgctctcttaatttcctcgtctttgccttcaattctcagcacccgctggcgcagcacttcaatctccgccaacatgctggagttgctaccttctgcctgaatcaccttgtcctggagatccaggagttcatcctctgctttctggaggttttttgtggcttcctccaactcatcaaggcggcggcttagactctgtagcttaaaccgcaagtggcggctggaggccgtctccttgtagcttgtaaattcggccatgtctactgccagccaatgtgggctcctagaggcatccaattccactcaaggggatgagaaatggttacctttctcttggcaaccacaatcttctttgacagctggagaccatcatcaatcatgtaggtaattcaagctttccgtcaatacttccggcggctctccctatgcttgctgttttggaaacagtcactcactctctttcaaaggcagttgtctcttgacctgatctcatctgataggtcgcagtcaaaatacaggcacacaatactcaggtttattcaatgtcccctctgcggccccgaaccgcgctcccgccagcgaagggttccgccgctcagctgccagcgaccctcgtgcc

SEQ ID NO: 736426 - DNA, 2461 bp, Homo sapiens
tgtcccggcgcggcgggagcgcgcttggcgcgtgcgtacgcgacggcggttggcggcgcgcgggcagcgtgaagcgaggcgaggcaaggcttttcggacccacggagcgacagagcgagcggcccctacggccgtcggcggcccggcggcccgagatgttatctgggaagaaggcggcagccgcggcggcggcggctgcagcggcagcaaccgggacggaggctggccctgggacagcaggcggctccgagaacgggtctgaggtggccgcgcagcccgcgggcctgtcgggcccagccgaggtcgggccgggggcggtgggggagcgcacaccccgcaagaaagagcctccgcgggcctcgccccccgggggcctggcggaaccgccggggtccgcagggcctcaggccggccctactgtcgtgcctgggtctgcgacccccatggaaactggaatagcagagactccggaggggcgtcggaccagccggcgcaagcgggcgaaggtagagtacagagagatggatgaaagcttggccaacctctcagaagatgagtattattcagaagaagagagaaatgccaaagcagagaaggaaaagaagcttcccccaccaccccctcaagccccacctgaggaagaaaatgaaagtgagcctgaagaaccatcggggcaagcaggaggacttcaagacgacagttctggagggtatggagacggccaagcatcaggtgtggagggcgcagctttccagagccgacttcctcatgaccggatgacttctcaagaagcagcctgttttccagatattatcagtggaccacaacagacccagaaggtttttcttttcattagaaaccgcacactgcagttgtggttggataatccaaagattcagctgacatttgaggctactctccaacaattagaagcaccttataacagtgatactgtgcttgtccaccgagttcacagttatttagagcgtcatggtcttatcaacttcggcatctataagaggataaaacccctaccaactaaaaagacaggaaaggtaattattataggctctggggtctcaggcttggcagcagctcgacagttacaaagttttggaatggatgtcacacttttggaagccagggatcgtgtgggtggacgagttgccacatttcgcaaaggaaactatgtagctgatcttggagccatggtggtaacaggtcttggagggaatcctatggctgtggtcagcaaacaagtaaatatggaactggccaagatcaagcaaaaatgcccactttatgaagccaacggacaagctgttcctaaagagaaagatgaaatggtagagcaagagtttaaccggttgctagaagctacatcttaccttagtcatcaactagacttcaatgtcctcaataataagcctgtgtcccttggccaggcattggaagttgtcattcagttacaagagaagcatgtcaaagatgagcagattgaacattggaagaagatagtgaaaactcaggaagaattgaaagaacttcttaataagatggtaaatttgaaagagaaaattaaagaactccatcagcaatacaaagaagcatctgaagtaaagccacccagagatattactgccgagttcttagtgaaaagcaaacacagggatctgaccgccctatgcaaggaatatgatgaattagctgaaacacaaggaaagctagaagaaaaacttcaggagttggaagcgaatcccccaagtgatgtatatctctcatcaagagacagacaaatacttgattggcattttgcaaatcttgaatttgctaatgccacacctctctcaactctctcccttaagcactgggatcaggatgatgactttgagttcactggcagccacctgacagtaaggaatggctactcgtgtgtgcctgtggctttagcagaaggcctagacattaaactgaatacagcagtgcgacaggttcgctacacggcttcaggatgtgaagtgatagctgtgaatacccgctccacgagtcaaacctttatttataaatgcgacgcagttctctgtacccttcccctgggtgtgctgaagcagcagccaccagccgttcagtttgtgccacctctccctgagtggaaaacatctgcagtccaaaggatgggatttggcaaccttaacaaggtggtgttgtgttttgatcgggtgttctgggatccaagtgtcaatttgttcgggcatgttggcagtacgactgccagcaggggtgagctcttcctcttctggaacctctataaagctccaatactgttggcactagtggcaggagaagctgctggtatcatggaaaacataagtgacacttggatcccagaacacccgatcaaaacacaacaccaccttgtaaggttgccaaatcccatcctttggactgcagatgtttggta

SEQ ID NO: 736427 - DNA, 2252 bp, Homo sapiens
tgtcccggcgcggcgggagcgcgcttggcgcgtgcgtacgcgacggcggttggcggcgcgcgggcagcgtgaagcgaggcgaggcaaggcttttcggacccacggagcgacagagcgagcggcccctacggccgtcggcggcccggcggcccgagatgttatctgggaagaaggcggcagccgcggcggcggcggctgcagcggcagcaaccgggacggaggctggccctgggacagcaggcggctccgagaacgggtctgaggtggccgcgcagcccgcgggcctgtcgggcccagccgaggtcgggccgggggcggtgggggagcgcacaccccgcaagaaagagcctccgcgggcctcgccccccgggggcctggcggaaccgccggggtccgcagggcctcaggccggccctactgtcgtgcctgggtctgcgacccccatggaaactggaatagcagagactccggaggggcgtcggaccagccggcgcaagcgggcgaaggtagagtacagagagatggatgaaagcttggccaacctctcagaagatgagtattattcagaagaagagagaaatgccaaagcagagaaggaaaagaagcttcccccaccaccccctcaagccccacctgaggaagaaaatgaaagtgagcctgaagaaccatcggggcaagcaggaggacttcaagacgacagttctggagggtatggagacggccaagcatcaggtgtggagggcgcagctttccagagccgacttcctcatgaccggatgacttctcaagaagcagcctgttttccagatattatcagtggaccacaacagacccagaaggtttttcttttcattagaaaccgcacactgcagttgtggttggataatccaaagattcagctgacatttgaggctactctccaacaattagaagcaccttataacagtgatactgtgcttgtccaccgagttcacagttatttagagcgtcatggtcttatcaacttcggcatctataagaggataaaacccctaccaactaaaaagacaggaaaggtaattattataggctctggggtctcaggcttggcagcagctcgacagttacaaagttttggaatggatgtcacacttttggaagccagggatcgtgtgggtggacgagttgccacatttcgcaaaggaaactatgtagctgatcttggagccatggtggtaacaggtcttggagggaatcctatggctgtggtcagcaaacaagtaaatatggaactggccaagatcaagcaaaaatgcccactttatgaagccaacggacaagctgttcctaaagagaaagatgaaatggtagagcaagagtttaaccggttgctagaagctacatcttaccttagtcatcaactagacttcaatgtcctcaataataagcctgtgtcccttggccaggcattggaagttgtcattcagttacaagagaagcatgtcaaagatgagcagattgaacattggaagaagatagtgaaaactcaggaagaattgaaagaacttcttaataagatggtaaatttgaaagagaaaattaaagaactccatcagcaatacaaagaagcatctgaagtaaagccacccagagatattactgccgagttcttagtgaaaagcaaacacagggatctgaccgccctatgcaaggaatatgatgaattagctgaaacacaaggaaagctagaagaaaaacttcaggagttggaagcgaatcccccaagtgatgtatatctctcatcaagagacagacaaatacttgattggcattttgcaaatcttgaatttgctaatgccacacctctctcaactctctcccttaagcactgggatcaggatgatgactttgagttcactggcagccacctgacagtaaggaatggctactcgtgtgtgcctgtggctttagcagaaggcctagacattaaactgaatacagcagtgcgacaggttcgctacacggcttcaggatgtgaagtgatagctgtgaatacccgctccacgagtcaaacctttatttataaatgcgacgcagttctctgtacccttcccctgggtgtgctgaagcagcagccaccagccgttcagtttgtgccacctctccctgagtggaaaacatctgcagtccaaaggatgggatttggcaaccttaacaagggtgtggtttgacggtgcttggaccaggcattgtcgctgtgcagacatgcacag

SEQ ID NO: 736428 - DNA, 2367 bp, Homo sapiens
tgtcccggcgcggcgggagcgcgcttggcgcgtgcgtacgcgacggcggttggcggcgcgcgggcagcgtgaagcgaggcgaggcaaggcttttcggacccacggagcgacagagcgagcggcccctacggccgtcggcggcccggcggcccgagatgttatctgggaagaaggcggcagccgcggcggcggcggctgcagcggcagcaaccgggacggaggctggccctgggacagcaggcggctccgagaacgggtctgaggtggccgcgcagcccgcgggcctgtcgggcccagccgaggtcgggccgggggcggtgggggagcgcacaccccgcaagaaagagcctccgcgggcctcgccccccgggggcctggcggaaccgccggggtccgcagggcctcaggccggccctactgtcgtgcctgggtctgcgacccccatggaaactggaatagcagagactccggaggggcgtcggaccagccggcgcaagcgggcgaaggtagagtacagagagatggatgaaagcttggccaacctctcagaagatgagtattattcagaagaagagagaaatgccaaagcagagaaggaaaagaagcttcccccaccaccccctcaagccccacctgaggaagaaaatgaaagtgagcctgaagaaccatcggggcaagcaggaggacttcaagacgacagttctggagggtatggagacggccaagcatcaggtgtggagggcgcagctttccagagccgacttcctcatgaccggatgacttctcaagaagcagcctgttttccagatattatcagtggaccacaacagacccagaaggtttttcttttcattagaaaccgcacactgcagttgtggttggataatccaaagattcagctgacatttgaggctactctccaacaattagaagcaccttataacagtgatactgtgcttgtccaccgagttcacagttatttagagcgtcatggtcttatcaacttcggcatctataagaggataaaacccctaccaactaaaaagacaggaaaggtaattattataggctctggggtctcaggcttggcagcagctcgacagttacaaagttttggaatggatgtcacacttttggaagccagggatcgtgtgggtggacgagttgccacatttcgcaaaggaaactatgtagctgatcttggagccatggtggtaacaggtcttggagggaatcctatggctgtggtcagcaaacaagtaaatatggaactggccaagatcaagcaaaaatgcccactttatgaagccaacggacaagctgttcctaaagagaaagatgaaatggtagagcaagagtttaaccggttgctagaagctacatcttaccttagtcatcaactagacttcaatgtcctcaataataagcctgtgtcccttggccaggcattggaagttgtcattcagttacaagagaagcatgtcaaagatgagcagattgaacattggaagaagatagtgaaaactcaggaagaattgaaagaacttcttaataagatggtaaatttgaaagagaaaattaaagaactccatcagcaatacaaagaagcatctgaagtaaagccacccagagatattactgccgagttcttagtgaaaagcaaacacagggatctgaccgccctatgcaaggaatatgatgaattagctgaaacacaaggaaagctagaagaaaaacttcaggagttggaagcgaatcccccaagtgatgtatatctctcatcaagagacagacaaatacttgattggcattttgcaaatcttgaatttgctaatgccacacctctctcaactctctcccttaagcactgggatcaggatgatgactttgagttcactggcagccacctgacagtaaggaatggctactcgtgtgtgcctgtggctttagcagaaggcctagacattaaactgaatacagcagtgcgacaggttcgctacacggcttcaggatgtgaagtgatagctgtgaatacccgctccacgagtcaaacctttatttataaatgcgacgcagttctctgtacccttcccctgggtgtgctgaagcagcagccaccagccgttcagtttgtgccacctctccctgagtggaaaacatctgcagtccaaaggatgggatttggcaaccttaacaaggtgggctgcgctttgaaccgggtgttacaggatcccaggtcacattgtcccggcattttgcaaacaactgcccagggtgagaacttcctcctcgtgaacctttaaggccacactgtggcactgggaaacccggctcgtgacacaacctcgtatagtgcagacggcccaa

SEQ ID NO: 736429 - DNA, 2048 bp, Homo sapiens
tgtcccggcgcggcgggagcgcgcttggcgcgtgcgtacgcgacggcggttggcggcgcgcgggcagcgtgaagcgaggcgaggcaaggcttttcggacccacggagcgacagagcgagcggcccctacggccgtcggcggcccggcggcccgagatgttatctgggaagaaggcggcagccgcggcggcggcggctgcagcggcagcaaccgggacggaggctggccctgggacagcaggcggctccgagaacgggtctgaggtggccgcgcagcccgcgggcctgtcgggcccagccgaggtcgggccgggggcggtgggggagcgcacaccccgcaagaaagagcctccgcgggcctcgccccccgggggcctggcggaaccgccggggtccgcagggcctcaggccggccctactgtcgtgcctgggtctgcgacccccatggaaactggaatagcagagactccggaggggcgtcggaccagccggcgcaagcgggcgaaggtagagtacagagagatggatgaaagcttggccaacctctcagaagatgagtattattcagaagaagagagaaatgccaaagcagagaaggaaaagaagcttcccccaccaccccctcaagccccacctgaggaagaaaatgaaagtgagcctgaagaaccatcggggcaagcaggaggacttcaagacgacagttctggagggtatggagacggccaagcatcaggtgtggagggcgcagctttccagagccgacttcctcatgaccggatgacttctcaagaagcagcctgttttccagatattatcagtggaccacaacagacccagaaggtttttcttttcattagaaaccgcacactgcagttgtggttggataatccaaagattcagctgacatttgaggctactctccaacaattagaagcaccttataacagtgatactgtgcttgtccaccgagttcacagttatttagagcgtcatggtcttatcaacttcggcatctataagaggataaaacccctaccaactaaaaagacaggaaaggtaattattataggctctggggtctcaggcttggcagcagctcgacagttacaaagttttggaatggatgtcacacttttggaagccagggatcgtgtgggtggacgagttgccacatttcgcaaaggaaactatgtagctgatcttggagccatggtggtaacaggtcttggagggaatcctatggctgtggtcagcaaacaagtaaatatggaactggccaagatcaagcaaaaatgcccactttatgaagccaacggacaagctgttcctaaagagaaagatgaaatggtagagcaagagtttaaccggttgctagaagctacatcttaccttagtcatcaactagacttcaatgtcctcaataataagcctgtgtcccttggccaggcattggaagttgtcattcagttacaagagaagcatgtcaaagatgagcagattgaacattggaagaagatagtgaaaactcaggaagaattgaaagaacttcttaataagatggtaaatttgaaagagaaaattaaagaactccatcagcaatacaaagaagcatctgaagtaaagccacccagagatattactgccgagttcttagtgaaaagcaaacacagggatctgaccgccctatgcaaggaatatgatgaattagctgaaacacaaggaaagctagaagaaaaacttcaggagttggaagcgaatcccccaagtgatgtatatctctcatcaagagacagacaaatacttgattggcattttgcaaatcttgaatttgctaatgccacacctctctcaactctctcccttaagcactgggatcaggatgatgactttgagttcactggcagccacctgacagtaaggaatggctactcgtgtgtgcctgtggctttagcagaaggcctagacattaaactgaatacagcgggtattcacagctatcacttcacatcctgaccccgtgtagcgaacctgtcgcactgctggtcgacc

SEQ ID NO: 736430 - DNA, 2251 bp, Homo sapiens
tgtcccggcgcggcgggagcgcgcttggcgcgtgcgtacgcgacggcggttggcggcgcgcgggcagcgtgaagcgaggcgaggcaaggcttttcggacccacggagcgacagagcgagcggcccctacggccgtcggcggcccggcggcccgagatgttatctgggaagaaggcggcagccgcggcggcggcggctgcagcggcagcaaccgggacggaggctggccctgggacagcaggcggctccgagaacgggtctgaggtggccgcgcagcccgcgggcctgtcgggcccagccgaggtcgggccgggggcggtgggggagcgcacaccccgcaagaaagagcctccgcgggcctcgccccccgggggcctggcggaaccgccggggtccgcagggcctcaggccggccctactgtcgtgcctgggtctgcgacccccatggaaactggaatagcagagactccggaggggcgtcggaccagccggcgcaagcgggcgaaggtagagtacagagagatggatgaaagcttggccaacctctcagaagatgagtattattcagaagaagagagaaatgccaaagcagagaaggaaaagaagcttcccccaccaccccctcaagccccacctgaggaagaaaatgaaagtgagcctgaagaaccatcggggcaagcaggaggacttcaagacgacagttctggagggtatggagacggccaagcatcaggtgtggagggcgcagctttccagagccgacttcctcatgaccggatgacttctcaagaagcagcctgttttccagatattatcagtggaccacaacagacccagaaggtttttcttttcattagaaaccgcacactgcagttgtggttggataatccaaagattcagctgacatttgaggctactctccaacaattagaagcaccttataacagtgatactgtgcttgtccaccgagttcacagttatttagagcgtcatggtcttatcaacttcggcatctataagaggataaaacccctaccaactaaaaagacaggaaaggtaattattataggctctggggtctcaggcttggcagcagctcgacagttacaaagttttggaatggatgtcacacttttggaagccagggatcgtgtgggtggacgagttgccacatttcgcaaaggaaactatgtagctgatcttggagccatggtggtaacaggtcttggagggaatcctatggctgtggtcagcaaacaagtaaatatggaactggccaagatcaagcaaaaatgcccactttatgaagccaacggacaagctgttcctaaagagaaagatgaaatggtagagcaagagtttaaccggttgctagaagctacatcttaccttagtcatcaactagacttcaatgtcctcaataataagcctgtgtcccttggccaggcattggaagttgtcattcagttacaagagaagcatgtcaaagatgagcagattgaacattggaagaagatagtgaaaactcaggaagaattgaaagaacttcttaataagatggtaaatttgaaagagaaaattaaagaactccatcagcaatacaaagaagcatctgaagtaaagccacccagagatattactgccgagttcttagtgaaaagcaaacacagggatctgaccgccctatgcaaggaatatgatgaattagctgaaacacaaggaaagctagaagaaaaacttcaggagttggaagcgaatcccccaagtgatgtatatctctcatcaagagacagacaaatacttgattggcattttgcaaatcttgtcataggttcgcaggggccacttgaaggacaaggaaggttggttgaaggtagttgtgtccctgccccttcttcatccatcaactgcccttccccaggctgcctataattcatccattagagaaggaaaaatcaatatttaccaacataaattaaaacccaggcagggaacaggcagagtataggcagggcctgggagcagagagtggctccgtgggcagccaggtggtagcccatgcacattgggacccggggatgctcaggtgacagaatggagcaggtgggccttctggtccagcggcctctgagaccccaccagagcaagcctgtctcctctcctgcagcgtcctccgtagagagcacggagaccccctcatcgaggagctcatcccggcgacgcttggacctgagggcggggccagttagggc

SEQ ID NO: 736431 - DNA, 11914 bp, Homo sapiens
tgtcccggcgcggcgggagcgcgcttggcgcgtgcgtacgcgacggcggttggcggcgcgcgggcagcgtgaagcgaggcgaggcaaggcttttcggacccacggagcgacagagcgagcggcccctacggccgtcggcggcccggcggcccgagatgttatctgggaagaaggcggcagccgcggcggcggcggctgcagcggcagcaaccgggacggaggctggccctgggacagcaggcggctccgagaacgggtctgaggtggccgcgcagcccgcgggcctgtcgggcccagccgaggtcgggccgggggcggtgggggagcgcacaccccgcaagaaagagcctccgcgggcctcgccccccgggggcctggcggaaccgccggggtccgcagggcctcaggccggccctactgtcgtgcctgggtctgcgacccccatggaaactggaatagcagagactccggaggggcgtcggaccagccggcgcaagcgggcgaaggtagagtacagagagatggatgaaagcttggccaacctctcagaagatgagtattattcagaagaagagagaaatgccaaagcagagaaggaaaagaagcttcccccaccaccccctcaagccccacctgaggaagaaaatgaaagtgagcctgaagaaccatcggggcaagcaggaggacttcaagacgacagttctggagggtatggagacggccaagcatcaggtgtggagggcgcagctttccagagccgacttcctcatgaccggatgacttctcaagaagcagcctgttttccagatattatcagtggaccacaacagacccagaaggtttttcttttcattagaaaccgcacactgcagttgtggttggataatccaaagattcagctgacatttgaggctactctccaacaattagaagcaccttataacagtgatactgtgcttgtccaccgagttcacagttatttagagcgtcatggtcttatcaacttcggcatctataagaggataaaacccctaccaactaaaaagacaggaaaggtaattattataggctctggggtctcaggcttggcagcagctcgacagttacaaagttttggaatggatgtcacacttttggaagccagggatcgtgtgggtggacgagttgccacatttcgcaaaggaaactatgtagctgatcttggagccatggtggtaacaggtcttggagggaatcctatggctgtggtcagcaaacaagtaaatatggaactggccaagatcaagcaaaaatgcccactttatgaagccaacggacaagctgttcctaaagagaaagatgaaatggtagagcaagagtttaaccggttgctagaagctacatcttaccttagtcatcaactagacttcaatgtcctcaataataagcctgtgtcccttggccaggcattggaagttgtcattcagttacaagagaagcatgtcaaagatgagcagattgaacattggaagaagatagtgaaaactcaggaagaattgaaagaacttcttaataagatggtaaatttgaaagagaaaattaaagaactccatcagcaatacaaagaagcatctgaagtaaagccacccagagatattactgccgagttcttagtgaaaagcaaacacagggatctgaccgccctatgcaaggaatatgatgaattagctgaaacacaaggaaagctagaagaaaaacttcaggagttggaagcgaatcccccaagtcctttgttcttttgcagtgatgtatatctctcatcaagagacagacaaatacttgattggcattttgcaaatcttgaatttgctaatgccacacctctctcaactctctcccttaagcactgggatcaggatgatgactttgagttcactggcagccacctgacagtaaggaatggctactcgtgtgtgcctgtggctttagcagaaggcctagacattaaactgaatacagcagtgcgacaggttcgctacacggcttcaggatgtgaagtgatagctgtgaatacccgctccacgagtcaaacctttatttataaatgcgacgcagttctctgtacccttcccctgggtgtgctgaagcagcagccaccagccgttcagtttgtgccacctctccctgagtggaaaacatctgcagtccaaaggatgggatttggcaaccttaacaaggtggtgttgtgttttgatcgggtgttctgggatccaagtgtcaatttgttcgggcatgttggcagtacgactgccagcaggggtgagctcttcctcttctggaacctctataaagctccaatactgttggcactagtggcaggagaagctgctggtatcatggaaaacataagtgacgatgtgattgttggccgatgcctggccattctcaaagggatttttggtagcagtgcagtacctcagcccaaagaaactgtggtgtctcgttggcgtgctgatccctgggctcggggctcttattcctatgttgctgcaggatcatctggaaatgactatgatttaatggctcagccaatcactcctggcccctcgattccaggtgccccacagccgattccacgactcttctttgcgggagaacatacgatccgtaactacccagccacagtgcatggtgctctgctgagtgggctgcgagaagcgggaagaattgcagaccagtttttgggggccatgtatacgctgcctcgccaggccacaccaggtgttcctgcacagcagtccccaagcatgtgagacagatgcattctaagggaagaggcccatgtgcctgtttctgccatgtaaggaaggctcttctagcaatactagatcccactgagaaaatccaccctggcatctgggctcctgatcagctgatggagctcctgatttgacaaaggagcttgcctcctttgaatgacctagagcacagggaggaacttgtccattagtttggaattgtgttcttcgtaaagactgaggcaagcaagtgctgtgaaataacatcatcttagtcccttggtgtgtggggtttgttttttttttttatattttgagaataaaacttcatataaaattggccctctcttttgttcctttgagttggagttacatacaagatgggggcattactcctttggaaatgccaagtttatcctatggcaatagtaatacatgttttctccatgtttaaataaggaagaagatgttcatataaaagagaaaaatggtttgatcaggtcagaagataaggtaggggggccggtcctgtagaagcagtggacttcctggtcagtcggactaggcttcctcacttgggtgggggtggagtgtggtggtgtgccaagaacatggttattaggaaactttggatgcactttcaagatagaacacaaaagagctgaaacaaagtctgagcctttgggagaccagtctgcctttattcctgattccctccatgggtatgtgctaaaacttcccaattctactaaaggtggtggtgtacattttgggaagcgcactacataggatcaagggcttaggtaacagctggtttaacagattgccacaaacttagtggctcttaaaaaaacagaaatctattcgaaagttctggatgcttaaagtctaaaatgggtccacagggctgcattcattacagaggctctcagagcagggaggatcagttcatttccttgctcttttcagcttctaggtgtgggaaggctcgtggctccttcctccatcctcagagcacataactccagtttctgcttccatcatcacattgccttctcctgtagtcaaatcttttgtctctctcttaaaaggatactacctgtgattacatttaaggcccacctggatcatctaggatgttctgcctcatcccagcatccttatctgcaaagtcccttttgccatataagatgataaaaacatgttacatgctggttccttcccaggggctcctgactgactgacagatagatgataaacactgttactgcaaatccaagtaatgtcccttaaatgtggttttattctttcttactgtgagttaagggacatcattatatatattggtgatctgactggaagatgaaaacggagaaggcttttcccccccctagtcttagaattcgtggcagtaatggaaagaatctgcacaccaggatcagggcagttaatgtttccagtccttgcagtatcagtaattggttaggtaaaatacccaattttaagtattacacaatgaaataaataaatatactagagctgcgccaacgcatagaagacagatgatacacagggatgacattgacaaaactggcatcacagactcgcacagagtatacggaaacgagggagctttattggttacatattgtactgcagagccaacagagagcattcgcgccagaggatacatgcagacaggcagctccaatgatacacatgcacccaaggagccctgagccactgctttgccctggtttccagcgacaggttctggcctccttggtcccatgcttggagctgctgcacctagactctaaggggcaggggtgagagagaccagagcacctgcctgagcaagtaggtgtggaccaacaggctgcccccaacaaaggggcctataatgcaataacagtttatttgagggctactttcttagccctctcaatctttaaaatacaaaaaaatagactttattctcttaaaaatacattccattcagtatatgttctgagctgggaagcagcaggaaaatagggcccctttcctatgatcctatggttgtgaggctttgaggagaaccctgctccccactcggggtattcaaaaaataatccctaaaagcagctctttccaaagcaatcttgtcagagaaataacaaaacctcataacaaggtagccagggacccagcctctgggtccccattcctttattgggaagtggtagcacttggcactgacccactaaatataaagaactaaaactgccccaggacgacaagtccaagaacactatagtgccccctgcatcccgaacactccactgacgggggttatttatgtgcaagcttgcctacagctgagggtggggtggcatccttggccccactgcagatccctttaacccacactgtgactctttctcattgccacccaaaagcaaaaaacagccacagcttctttatccacctgcagctttctctggtttagtatcagagtggcaaaaaaagcagcagcacgtggaagagatcagctgctggtactaagccagcttcacttcctccaaccaagcagctctattgccaggtcccccaactcactaggaaccctccaacaaccatacacctgccagtaaaatttaagagccaagctgcggaagaaaactgtcataaaagtgggtttgttgaccgggggcagtgggactatttggcttgattaaacaactattcaactaccaggtctcccctctacttggaggcttcctccaggacccctgatgatgaggcctgggtccaaacagtcacacctcagttgcttttcagaaacatgcctcccaactttgggatttgagagccagccttgccagccatttgaagcccagagaaacagcctccagcctttacttgctattacaatgttattttctgcaatgctgaggacacttaaaaataaaatctatctagaaagtgtgcagattaaagaaacaaaatatcctgaaataactgttacaagcaaatcctattgcactcagatttcaagatggcagccccagcaaaagggcatcacagctgtccctcttcaacaggacattttgagtagcagcagatgttggtgctgctgaaatgtggaaagatccagactttggcaccaggagctatagcaccagaatccagggctccaacacccaaagacaagaattattggcgagatctttttaggcatggcttggcgcccttctgtttccatcagcagagaagagccacagacttagtttcctaatacctttagttgaccaccacagaggttgattttctttgaactctcaaggttgccaaccagtgaaggagaatggcagggaggctgcaagtgaaggatggcagccttgagtgagctagtttctggccagtaagccaggagaagcagcagtaagagatcttggaaatagcatcttgagcatcagaggtggggatgtggacaggaaaggcaggccacatgacaatgcctttagattggcaaaactctgggaagcagaagtatgagcaatagattcctgtccctgaaagtaaggtaggtgctccccaagcctcctcactgccaaatctgatacagacaagggcaggatgaacactggttcccatgctgagtgaaggcagagaagacaaattcctctggaggaagtcttgagtcttcctcttgccaggaaattcataggagatgcacaggaacaggagatacacagacttgggtactttccataatacctagactcctagaacgccaggagatactgtgtggcactgggcaaggctgatgccacaaagagcctcagagaccatcccatctaatcccttcacactttgcagactgggaaacaggcccacggagcttctctgagctcatccccatgagattaaaacatacagaaactaaaaaacaaggcccagaaaaacaattgagggcaggagggaagaacccacacggatgataccttccacaagcaaaaatcatcccatactattatagatggtgaaaacaggagaaccttagaataccagatttggtgcccttagagatcatccatttcaaagaactcattttacagacagggaaactgaggctccaagaagacaatgactcacccaaggtcacacagcaaggaagtaaagccatggggaaaaaaatccagcttaccagactggtagtttaatgttctctcattctgagggcaatagtgtctacttcataaaggtagcctttgaaagaggatcccttctttgaattgacagaatgctaaagaaaaagcactgccaagaatatacaattcttttcaacttccccatgtgactggtataaggaacctaaccaatttatttacgtggctttctgaaaagtttgctgcattttgaactatataaagctgaggccctcaatgcgtatgtacgtatcacctttcctccagcgaagtcatcatgatagtcgacttgcagaaatccggggcccacttctgtaggaatgcatcagcttggtaaagtgcgatgcctcctccatgggggatggagaaggaggaacaggagggagtagtctcacagtccatgcctctcatggagctattgcttgtggagtgactaaaggggtctgctttccctcttgctgggcacttcctagaaggcagaggatgctgggtcaggcccagcttagcctagggattttcccaaggtggaaacaatgaagtcagcttgaagtctccagccactggagagaaagcaggcgatgccagcagcattactggtgctcaggaaaggagatgcatgaggcttgcacctccaggtgcctttggaaggtgagcagagagagctggggttggggagggatgatgtcattccaatgggtatccgcatgagtatctgcatgctctgcttccaggagactggtaagccaggagcaggtcaaacttcaacctaaagggtagtctcataatcctttagaggcagcacagacccctttctgctttaagtctgaagaaaagaactccaaggggaaagaaatgaaagccccctagatagagctgatggctggtaaatcttatggggtacttgagcccattgggcaaatgaggagtgaagtggatatagtgaggagactgagaaaccagaacattaaccacacagacagaggctgccctaggatccagaaacaacccaccaaggagccgagaagaatttttgactcctgctgtgtgctggggactttatcttcccttgtttgggggccagaatggtccaactacttggtggacagggacaaggagagagagaggactcgtgcattggggaaggttgggcctgggtgactgtccagcttgtagtctctgattccctctggccaaatggcaaaaattacctgagccacagcccggctctaccacagttttccagccaaggcttgtgtcttgcctggttaactggccttggatccttcgtggggcaggacggtggaagagctgagaagcaggagcagagggcagacaacagacacccagcgggctcagttctcctcagcacagggcctggttggccgtaatcgttcctcggcccgtactcgcccagactctggcagcccctgcttcccaggcagttcagacggatccagggagttgtgcagttgcctgtagacactgagtgtacagtcttccccttcttcctccatgcttgctgagtggttccaggctgcgacagtgatggtgtctcctacccgattccgacgggtaagcacctctgacacagtgaggctactttgggtccttctggaggagggctcaggggcatcccctgaacttggtcctacccttcgagtgccctgctcaaaaaggcaggacctgggctgttcgagttctgagaagtctgtggaagacctctgggtgtaggcattgctattggtagattccacgtttttacctattcgagttggggggtcttctaaagatttcaagtctcgcctactcttccaggcattccgcacagtaacatgtctggcatctgagaagcccacttctgaaggggcactatggcttttccacctgattgtctccgctggaggtgcatggctattcctctccacaggatccgatggcttgattataatgctgctccgagagaccactgtttctggcctgttcttcaggggcccatctgccattctctccgcttctgcaagctgcagggtgatgtcatgtttgtgaatggagagctcaaaaggggagctgacatggttgctaactgatgtgagctctgccagccccacctggatattgctagtggatgtgtgcctctccctcagggcctcacccggagcagctctggggctgctgctgtcagatggatatatagtaatgctacttgtcactttgtttggccctggtttggagacgggtttctgtttctccaacgtagtctctgttccagatcctcccatgatttttttcacatccttatcaacaataacaggtttgatgatggctctagaccgcaacgcctctctggggctaaagggcctttggctttttaccccagcaccattggtatctgggagctccatggtattggtggaggctctgacagatttcacagattcattctccattccagcatctttatcattctcaaatagggaggttctaggtgcccctcgggttttagccttttctctagagttaggctgtggtttgggctctggctctggagtgatggttgtatttaccaacttggcagtaacaagagatgctatgtccaagtcatcatctgagtctggcttctctctgccactggatttgatgactcgacacctcaaggcttcatgcggactgctgtcttccatcacaactgctgcaggttgattaaccccttctttatgtgaggttgaaaatccctgaaggatgttctcttggcttctacagctataaggatacttcgatagaacaggagccttggaattcgggcaactgttatcagcctcaaggccattggcagcctttttgcctttagagagcccttctgaggaggatcttcgagatgaggccagggctccaatggccttagaacagccagagtttgcagcctgagttacttgacttccgttgccaagcacgtgtcccctcttgccaaagacagtctcagaggaggtgtcagaagccttgtcagctctacccaatgggtcactgggaacagatccatgggtggtgtcactaaacgttcgtgttgtcttctccacttttcccttcagtccactctcggtgcctggcttggaagtccccttccacgctttactgtgctcctgagcagccggggggtagcgactcagcactgagggctgctccctagacttcttcccttcgctcttggaggagctgggtacaaaccggtcttcagttttctttgtctcctgagtcccactgtctgtactcacccccatgtgagaagcttttgctgccctcctgttggtgaaactgggagaagaaacctgcctgttgctcagagaatagttttcattgttgagagcaaactccctgttccggagtcgttcccgcttatgctgaggagacagttcccgcgctgtgtgcttggacacagaagcttcacttccgtggcctctaaacttagtcctctcatgtctgcctttgctggacaggaaagcatcttccccttctacctctccattttctaactctttctgtttcttgatttgtagctttatctcctccagttggctggctaataatttgtttttattttgttcacttaggtaattatcctgaaggtcgttatttttggacttcattttcttaagctcttcttccaacgattcaaagtgtttgatttgcgtcttaagtttctcaatctcttggttaaggtctttgactttgttgtcttcctgattgcggttcttttcattttctgatttgtttcttgtttcattctctacctgctttaggtagtccagaccacccttccttcttgattctttggacggcagtgtggaagagatgccatcctcaatccgtaggtcatttctttccagattagaagcattccttgtataatctcggttcatttttttgttctgctctagtttttgagtgagttcttttatcaatttctcattttctttctccttttcattcaagtattttctctcacttacaaagctcagagttaatgatttcagcttttctaactctgacgctaaactctgctcagttttatccaggcggtcctcagaagattctagttctttcactttgactctgagcatttccagctcagaggagattttcttggtcagatttctctcctcattcaggctcagacacagctgggtacagtcattcttactcctgctgaaggcctcttctagcttctctaattcagccattcgtttctgaagccgctcaatctcagatttcagctcccgggtgaggttttcttcctcttcaagtttctccttcatcagacgacacagatcctctgctctcttaatttcctcgtctttgccttcaattctcagcacccgctggcgcagcacttcaatctccgccaacatgctggagttgctaccttctgcctgaatcaccttgtcctggagatccaggagttcatcctctgctttctggaggttttttgtggcttcctccaactcatcaaggcggcggcttagactctgtagcttaaaccgcaagtggcggctggaggccgtctccttgtagcttgtaaattcggccatgtctactgccagccaatgtgggctcctagaggcatccaattccactcaaggggatgagaaatggttacctttctcttggcaaccacaatcttctttgacagctggagaccatcatcaatcatgtaggtaattcaagctttccgtcaatacttccggcggctctccctatgcttgctgttttggaaacagtcactcactctctttcaaaggcagttgtctcttgacctgatctcatctgataggtcgcagtcaaaatacaggcacacaatactcaggtttattcaatgtcccctctgcggccccgaaccgcgctcccgccagcgaagggttccgccgctcagctgccagcgaccctcgtgcc

SEQ ID NO: 736432 - DNA, 1631 bp, Homo sapiens
tgtcccggcgcggcgggagcgcgcttggcgcgtgcgtacgcgacggcggttggcggcgcgcgggcagcgtgaagcgaggcgaggcaaggcttttcggacccacggagcgacagagcgagcggcccctacggccgtcggcggcccggcggcccgagatgttatctgggaagaaggcggcagccgcggcggcggcggctgcagcggcagcaaccgggacggaggctggccctgggacagcaggcggctccgagaacgggtctgaggtggccgcgcagcccgcgggcctgtcgggcccagccgaggtcgggccgggggcggtgggggagcgcacaccccgcaagaaagagcctccgcgggcctcgccccccgggggcctggcggaaccgccggggtccgcagggcctcaggccggccctactgtcgtgcctgggtctgcgacccccatggaaactggaatagcagagactccggaggggcgtcggaccagccggcgcaagcgggcgaaggtagagtacagagagatggatgaaagcttggccaacctctcagaagatgagtattattcagaagaagagagaaatgccaaagcagagaaggaaaagaagcttcccccaccaccccctcaagccccacctgaggaagaaaatgaaagtgagcctgaagaaccatcggggcaagcaggaggacttcaagacgacagttctggagggtatggagacggccaagcatcaggtgtggagggcgcagctttccagagccgacttcctcatgaccggatgacttctcaagaagcagcctgttttccagatattatcagtggaccacaacagacccagaaggtttttcttttcattagaaaccgcacactgcagttgtggttggataatccaaagattcagctgacatttgaggctactctccaacaattagaagcaccttataacagtgatactgtgcttgtccaccgagttcacagttatttagagcgtcatggtcttatcaacttcggcatctataagaggataaaacccctaccaactaaaaagacaggaaaggtaattattataggctctggggtctcaggcttggcagcagctcgacagttacaaagttttggaatggatgtcacacttttggaagccagggatcgtgtgggtggacgagttgccacatttcgcaaaggaaactatgtagctgatcttggagccatggtggtaacaggtcttggagggaatcctatggctgtggtcagcaaacaagtaaatatggaactggccaagatcaagcaaaaatgcccactttatgaagccaacggacaagctgttcctaaagagaaagatgaaatggtagagcaagagtttaaccggttgctagaagctacatcttaccttagtcatcaactagacttcaatgtcctcaataataagcctgtgtcccttggccaggcattggaagttgtcattcagttacaagagaagcatgtcaaagatgagcagattgaacattggaagaagatagtgaaaactcaggaagaattgaaagaacttcttaataagatggtaaatttgaaagagaaaattaaagaactccatcagcaatacaaccccccgagtgaagttcgggcaaagatt

SEQ ID NO: 736433 - DNA, 2066 bp, Homo sapiens
tgtcccggcgcggcgggagcgcgcttggcgcgtgcgtacgcgacggcggttggcggcgcgcgggcagcgtgaagcgaggcgaggcaaggcttttcggacccacggagcgacagagcgagcggcccctacggccgtcggcggcccggcggcccgagatgttatctgggaagaaggcggcagccgcggcggcggcggctgcagcggcagcaaccgggacggaggctggccctgggacagcaggcggctccgagaacgggtctgaggtggccgcgcagcccgcgggcctgtcgggcccagccgaggtcgggccgggggcggtgggggagcgcacaccccgcaagaaagagcctccgcgggcctcgccccccgggggcctggcggaaccgccggggtccgcagggcctcaggccggccctactgtcgtgcctgggtctgcgacccccatggaaactggaatagcagagactccggaggggcgtcggaccagccggcgcaagcgggcgaaggtagagtacagagagatggatgaaagcttggccaacctctcagaagatgagtattattcagaagaagagagaaatgccaaagcagagaaggaaaagaagcttcccccaccaccccctcaagccccacctgaggaagaaaatgaaagtgagcctgaagaaccatcgggtgtggagggcgcagctttccagagccgacttcctcatgaccggatgacttctcaagaagcagcctgttttccagatattatcagtggaccacaacagacccagaaggtttttcttttcattagaaaccgcacactgcagttgtggttggataatccaaagattcagctgacatttgaggctactctccaacaattagaagcaccttataacagtgatactgtgcttgtccaccgagttcacagttatttagagcgtcatggtcttatcaacttcggcatctataagaggataaaacccctaccaactaaaaagacaggaaaggtaattattataggctctggggtctcaggcttggcagcagctcgacagttacaaagttttggaatggatgtcacacttttggaagccagggatcgtgtgggtggacgagttgccacatttcgcaaaggaaactatgtagctgatcttggagccatggtggtaacaggtcttggagggaatcctatggctgtggtcagcaaacaagtaaatatggaactggccaagatcaagcaaaaatgcccactttatgaagccaacggacaagctgttcctaaagagaaagatgaaatggtagagcaagagtttaaccggttgctagaagctacatcttaccttagtcatcaactagacttcaatgtcctcaataataagcctgtgtcccttggccaggcattggaagttgtcattcagttacaagagaagcatgtcaaagatgagcagattgaacattggaagaagatagtgaaaactcaggaagaattgaaagaacttcttaataagatggtaaatttgaaagagaaaattaaagaactccatcagcaatacaaagaagcatctgaagtaaagccacccagagatattactgccgagttcttagtgaaaagcaaacacagggatctgaccgccctatgcaaggaatatgatgaattagctgaaacacaaggaaagctagaagaaaaacttcaggagttggaagcgaatcccccaagtgatgtatatctctcatcaagagacagacaaatacttgattggcattttgcaaatcttgaatttgctaatgccacacctctctcaactctctcccttaagcactgggatcaggatgatgactttgagttcactggcagccacctgacagtaaggaatggctactcgtgtgtgcctgtggctttagcagaaggcctagacattaaactgaatacagcagtgcgacaggttcgctacacggcttcaggtatgtcactgctttacaaaaggtaagagagaactctcctgaaacaggactgatcttttgttaggtgcgacctatcaggtacatttcctgatagagtgtttatgacaccataggta

SEQ ID NO: 736434 - DNA, 2500 bp, Homo sapiens
  misc_feature (1116)..(1116): n is a, c, g, or t
agtctaagcaaaccccagcaggaaagcaggggtacagagaggagcccccttggcaccgccaccgcaccctaggccacccaccatggcgctgggcttggagcaggcggaggagcagcggttgtaccagcagacgctcctgcaagacgggctcaaagacatgctggaccatggcaagttcctcgactgtgtggtgcgggcgggcgagcgcgagttcccgtgccatcgcctggtgctggccgcctgcagcccctacttccgggcgcgctttctagccgagccggagcgcgcgggcgagctgcacctggaggaggtgtccccggacgtggtggcccaggtgctgcactacctgtacacatcagagatcgcgctggatgaggcgagcgtgcaggatttgttcgccgcggcacaccgcttccagatcccttccatcttcaccatctgcgtgtccttcctgcagaagcgcctgtgcctctccaactgcttggccgtcttccgtctcggcctcctgctcgactgcgcgcgtctcgccgtggctgcccgcgacttcatctgcgctcacttcacgctggtggcgcgcgacgctgacttcctcggactctcggccgacgagctcatcgccatcatctccagcgacggccttaacgtggagaaggaggaggcagtgttcgaggcggtgatgcggtgggcgggtagcggcgacgccgaggcgcaggctgagcgccagcgcgcgctgcccaccgtcttcgagagcgtgcgctgccgcttgctgccgcgcgcctttctggaaagccgcgtggagcgccaccctctcgtgcgtgcccagcccgagttgctgcgcaaggtgcagatggtgaaggatgcacacgagggccgcatcaccacgctgcggaagaaaaagaaggggaaggatggagccggggccaaggaggctgataagggcacaagcaaagccaaagcagaggaggatgaggaggccgaacgtatccttcctgggatcctcaatgacaccctgcgcttcggcatgttcctgcaggatctcatcttcatgatcagtgaggagggcgctgtggcctacgatccagcagccaacgagtgctactgtgcttccctctccanccaggtccccaagaaccacgtcagcctggttaccaaggagaaccaggtcttcgtggctggaggcctcttctacaacgaagacaacaaagaggaccccatgagcgcatacttcctgcagtttgaccatctggactcagagtggctggggatgccaccgctgccctcgccccgctgcctctttggcctgggagaagctctcaactccatctacgtggtcggtggcagagagatcaaggacggcgagcgctgcctggactcggtcatgtgctacgacaggctgtcattcaaatggggtgaatcggacccgctgccttacgtggtgtatggccacacagtgctctcccacatggaccttgtctacgtaattggcggcaaaggcagtgacaggaagtgcctgaacaagatgtgcgtctatgaccccaagaagtttgagtggaaggagctggcacccatgcagaccgcccgctcactctttggggccactgtccatgatggccgcattatcgtggcagctggggtcaccgacacagggctgaccagttctgccgaagtgtacagcatcacagacaacaagtgggcacccttcgaggccttcccacaggagcgtagctcactcagcctggtcagcctggtgggtaccctctatgccattggtggctttgccacactggagacggagtctggagagctggttcccacagagctcaatgacatctggaggtataacgaggaggagaagaaatgggagggtgtcctgcgggagatcgcctatgcagcaggtgccaccttcctaccagtgcggctcaatgtgctgcgcctgactaagatgtgaccagctcaggcagactgaactaagcacccctcccatcctgcgaccctcactggcctggccttgtgggggctccagaaaagaggctaggagaggccagagtctacctggatccagttatggtgcctcaggggctgcgtcagccaaggaaagggaagtgctgcttagtcctggacttttgggccagggtgagaaactagaggcttctccagtgttgccatatccccctaggttgtcttgatccatgaaccagaaccacagggcggtatcccaggccgtgtgctggccctgccccagcctagctgagtgtgctggcaaagttccccacaggactcagccttctcgtctgtccgatgggagcatccccatcaagtgcagtgtacagtgcagatatgtctccttctttaggaagaataaagtgccttctgagcaagcagctcagggtctgcatcagtgctccaagagtcagtgagcaggtgtgttgaagacttggggcttcagtgttctgctgttgggctgccaaggtcgatggtctctgctctccatctggtgtcc

SEQ ID NO: 736435 - DNA, 2267 bp, Homo sapiens
  misc_feature (1116)..(1116): n is a, c, g, or t
agtctaagcaaaccccagcaggaaagcaggggtacagagaggagcccccttggcaccgccaccgcaccctaggccacccaccatggcgctgggcttggagcaggcggaggagcagcggttgtaccagcagacgctcctgcaagacgggctcaaagacatgctggaccatggcaagttcctcgactgtgtggtgcgggcgggcgagcgcgagttcccgtgccatcgcctggtgctggccgcctgcagcccctacttccgggcgcgctttctagccgagccggagcgcgcgggcgagctgcacctggaggaggtgtccccggacgtggtggcccaggtgctgcactacctgtacacatcagagatcgcgctggatgaggcgagcgtgcaggatttgttcgccgcggcacaccgcttccagatcccttccatcttcaccatctgcgtgtccttcctgcagaagcgcctgtgcctctccaactgcttggccgtcttccgtctcggcctcctgctcgactgcgcgcgtctcgccgtggctgcccgcgacttcatctgcgctcacttcacgctggtggcgcgcgacgctgacttcctcggactctcggccgacgagctcatcgccatcatctccagcgacggccttaacgtggagaaggaggaggcagtgttcgaggcggtgatgcggtgggcgggtagcggcgacgccgaggcgcaggctgagcgccagcgcgcgctgcccaccgtcttcgagagcgtgcgctgccgcttgctgccgcgcgcctttctggaaagccgcgtggagcgccaccctctcgtgcgtgcccagcccgagttgctgcgcaaggtgcagatggtgaaggatgcacacgagggccgcatcaccacgctgcggaagaaaaagaaggggaaggatggagccggggccaaggaggctgataagggcacaagcaaagccaaagcagaggaggatgaggaggccgaacgtatccttcctgggatcctcaatgacaccctgcgcttcggcatgttcctgcaggatctcatcttcatgatcagtgaggagggcgctgtggcctacgatccagcagccaacgagtgctactgtgcttccctctccanccaggtccccaagaaccacgtcagcctggttaccaaggagaaccaggtcttcgtggctggaggcctcttctacaacgaagacaacaaagaggaccccatgagcgcatacttcctgcagtttgaccatctggactcagagtggctggggatgccaccgctgccctcgccccgctgcctctttggcctgggagaagctctcaactccatctacgtggtcggtggcagagagatcaaggacggcgagcgctgcctggactcggtcatgtgctacgacaggctctggggtcaccgacacagggctgaccagttctgccgaagtgtacagcatcacagacaacaagtgggcacccttcgaggccttcccacaggagcgtagctcactcagcctggtcagcctggtgggtaccctctatgccattggtggctttgccacactggagacggagtctggagagctggttcccacagagctcaatgacatctggaggtataacgaggaggagaagaaatgggagggtgtcctgcgggagatcgcctatgcagcaggtgccaccttcctaccagtgcggctcaatgtgctgcgcctgactaagatgtgaccagctcaggcagactgaactaagcacccctcccatcctgcgaccctcactggcctggccttgtgggggctccagaaaagaggctaggagaggccagagtctacctggatccagttatggtgcctcaggggctgcgtcagccaaggaaagggaagtgctgcttagtcctggacttttgggccagggtgagaaactagaggcttctccagtgttgccatatccccctaggttgtcttgatccatgaaccagaaccacagggcggtatcccaggccgtgtgctggccctgccccagcctagctgagtgtgctggcaaagttccccacaggactcagccttctcgtctgtccgatgggagcatccccatcaagtgcagtgtacagtgcagatatgtctccttctttaggaagaataaagtgccttctgagcaagcagctcagggtctgcatcagtgctccaagagtcagtgagcaggtgtgttgaagacttggggcttcagtgttctgctgttgggctgccaaggtcgatggtctctgctctccatctggtgtcc

SEQ ID NO: 736436 - DNA, 633 bp, Homo sapiens
agcgggctggtacgtcatcaccaaagccaatctgctctagctgcccacagatgccaccaaaacctgctatctcttcatcaccaggatgattatttcagaaactggaatcccaacaagccctttgaccaagccctggacccatccaaggacccctgcctgaaggtaaaatgcagccctcacaaagtgtgtgtgacccaggactaccagaccgccctgtgtgtcagccgcaagcacctgctccccaggcaaaagaaggggaacgtggcccagaaacactgggttggaccttcgaatttggtcaagtgcaagccctgtcccgtggcacagtcagccatggtctgcggctcagatggccactcctacacatccaagtgcaaattggagttccatgcttgttctactggcaaaagcctcgccaccctctgtgatgggccctgtccctgtctcccagagcctgagccaccaaagcacaaggcagaaaggagtgcctgcacagacaaggagttgcggaaccttgcctcccggctgaaggattggtttggagctctccacgaggatgcgaacagagtcatcaagcccaccagctccaacacagcccaaggcaggtttgacactagcatatcccgggaattc

SEQ ID NO: 736437 - DNA, 1015 bp, Homo sapiens
  misc_feature (1015)..(1015): n is a, c, g, or t
gaacagatggaagataccatcaatgaagaaccgtcaccaggcaccgaatctgctggcaccttgatcttggacttccccagcctccggaactgatgattatttcagaaactggaatcccaacaagccctttgaccaagccctggacccatccaaggacccctgcctgaaggtaaaatgcagccctcacaaagtgtgtgtgacccaggactaccagaccgccctgtgtgtcagccgcaagcacctgctccccaggcaaaagaaggggaacgtggcccagaaacactgggttggaccttcgaatttggtcaagtgcaagccctgtcccgtggcacagtcagccatggtctgcggctcagatggccactcctacacatccaagtgcaaattggagttccatgcttgttctactggcaaaagcctcgccaccctctgtgatgggccctgtccctgtctcccagagcctgagccaccaaagcacaaggcagaaaggagtgccctggacccatccaaggacccctgcctgaaggtaaaatgcagccctcacaaagtgtgtgtgacccaggactaccagacccgccctgtgtgtcagccgcaagcacctgctccccaggcaaaagaaggggaacgtgggcccagaaacactggggttggacctttcgaatttggtcaagtgcaagccctgtcccgtggcacagtcagccatggtctgcggctcaaatggccactcctacacatccaagtgcaaattggaagttcatgcttgttctactggcaaaagcctcgccacccttctgtgatgggccctgtccctggctcccagagcctgaagccacaaagcacagggcaaaaaaagagtgccctgcccaaacaaggaatttgcggaaaccttgcccccccggcctaaaggattggccttgcaactttcccccaaggaattccaccctatttactcaagccgcccccttttccgcctgtttttcaaggcacgtttcgcccattaacacaacctgtcttn

SEQ ID NO: 736438 - DNA, 192 bp, Homo sapiens
  misc_feature (55)..(55): n is a, c, g, or t
cagcttgatgctgcaggtcatctagagatcccccagcagcatagatattaccgcncttaggatttctctccctatcaagctggcccagatacaagtaccaaacagtagtctctgaagttcccccatttccttcagtaccagtctataagctactgtttggtacttgtatctgggccagcttgatagggagag

SEQ ID NO: 736439 - DNA, 798 bp, Homo sapiens
gcggccgcctactactactactactgctcgaattcaagcttctaacgatgtacggggcatgagaataccttaatactgagttggagattttgtatctgtttctcctcctttacgcccattttcctacccacagcagcaaatgacaacgtgtctgtccaggtctgtccccctgctcatcccaggatgccactcacatttttttcttcttgttaccttgaccacgctgtacagtaacatccaagagcccattctacagtgggtggttttggtctttttataactttttctcaaagtcactgatgtttgttcctgttaaatgtatagcattgtaatgagagcccatcaaatcctgagtgtcagtttgttgtccctattgtagatgaaatagtgatgtagcaaaaacctagtaaattctgaatgcttttccacgtagacttatctggaatgtgaacacaactctttggttaatagtaaatgcttaactgtagtcctgagtaggtgcatttctgtctgtctcaataaattttactttgtctgcaaaaaaaaaaaacgacacaccacaaaaacaaacgtgtgttgcgggcgcgcccttcggccccctggagaaaagagctttctcaaagaacccatttccgttgtgggcgcggcggggcccccagatgatgtatagcggtgacaccggggtccaaaacgagtgtccccaaaagaaaaaccgcgggcaagaaaaggtcgcgggtttcctcacccaattaaaaaaaggcgcgggggacaaaccacgctgtcgtgaacaatcccgag

SEQ ID NO: 736440 - DNA, 5138 bp, Homo sapiens
cactctctgttgtccaatggacacacctgtcgtgttttgagccagcgagagatgcagtggaagtgaaaagcatggttacagactccccatgcgacagtacactcttctgaagtagcggacgcctggttagcttgacattctatgcaaagatccataatgtggttcctgcagatggcacagttatcaaccacaatatcccaggcccagagggctactgcattccactttttcacttcaaagcgcttcttgcccgcgccgctgttggtgccgctcggggtatccacatccatcgctgcgggctcacaaagcggccagacgctcggcggcggcgtgtggcaggagcgcaggggcgcgagccggcgatcagccttcccggcgaccgtgccgcgggagctcgagcaactcggactaggggacccgggccggcccccaagatgccggcgatcgcggtgttggcggcggccgccgcggcgtggtgcttcctccaagtcgagagccggcacctggacgcgctcgccggaggcgcgggccccaaccacggcaatttcctagacaatgaccagtggctgagcaccgtctcccagtacgaccgggacaagtactggaaccgctttcgagacgatgattatttcagaaactggaatcccaacaagccctttgaccaagccctggacccatccaaggacccctgcctgaaggtaaaatgcagccctcacaaagtgtgtgtgacccaggactaccagaccgccctgtgtgtcagccgcaagcacctgctccccaggcaaaagaaggggaacgtggcccagaaacactgggttggaccttcgaatttggtcaagtgcaagccctgtcccgtggcacagtcagccatggtctgcggctcagatggccactcctacacatccaagtgcaaattggagttccatgcttgttctactggcaaaagcctcgccaccctctgtgatgggccctgtccctgtctcccagagcctgagccaccaaagcacaaggcagaaaggagtgcctgcacagacaaggagttgcggaaccttgcctcccggctgaaggattggtttggagctctccacgaggatgcgaacagagtcatcaagcccaccagctccaacacagcccaaggcaggtttgacactagcatcctgcccatctgcaaggactccctgggctggatgttcaacaagttggacatgaactatgacctcctgcttgacccttcagagatcaatgccatctacctggataagtacgagccctgtatcaagcctcttttcaactcgtgtgactccttcaaggatggcaagctttctaacaatgagtggtgctactgcttccagaagcctggaggtctcccttgccagaatgaaatgaacagaattcagaagctgagtaaggggaaaagcctgttgggggccttcatacctcggtgtaatgaggagggctattacaaagccacacagtgccacggcagcacggggcagtgctggtgtgtggacaaatatgggaatgagttggctggctccaggaaacagggtgctgtgagctgtgaagaggagcaggaaacctcaggggattttggcagtggtgggtccgtggtcctgctggatgacctagaatatgaacgggagctgggaccaaaggacaaagaggggaagctgagggtgcacacccgagccgtgacagaggatgatgaggatgaggatgatgacaaagaggatgaggtcgggtacatatggtagtgcccacaagaaagaggacacaagttttgcacaaaattgcaagtcacttcctattcctgcatttgtatctaagactccaaggcaccaaggtctcttctccattgttgctctctatacccgacctaaggtttggaagacaactgcttgttcccagaggattctgattttgcatatgtttgtatgggagaaagggtgttgtgtttttttttttgttgttgtttattttttggatagggaagtcattggcttaattagagcctccttcctttctgtgagatttttccaacaagcatgtgatttacgtggaattctgacagtgcagggagcccccaccctcttaaatgtcaaagaccctttttgattacccacactggtggttattacagcatggttcccagccttacagtgtctaagtgcttctcttgtgtcctgtagatgttgtgaaaaagaaaaaaacaaaaaatacaccacactgtactttttccccctgcccccgttactgccggtgattattattaaaaattagtttttttcacatcattatatctggcttcctataaacaacagccttaattcagtcaagactccctttggggaattcattttattaaaaattggtgtctggatacttccctgtacatgcataaatatgcatgcatgtacagaaagactgtatgtgtgtgccttgcacacacacccatacctctcagaaaaagtgtttgggtatcttaaaaactcgaaaaacaatgataaatttctcagcttgtccagacctggaacaaaatttctggaataagaaatttgtattaaagtccttttttgcactaacagttggctcttgtagcctgcaggctgaggaagtctcttctctgtgcatcagcagagttactgaaagcctctgattgagaaaaaacctccgtctgcctaaatcacttttctcgcagaagccatgcgactcccacacgacacgggcagcttcacaagccatctctttcatttctgcttgaagcccccttggctgcagcaatcctgtctgccataggtttcttccttccttacctactcaagggctttttctaaggcatgcacacatatctcctgttctctgagagtaccatggtgttccttaaaagaagaaaatttctaattctgaactcaatgttttgcttttactccctttctactgacaaatcatgataagggcacaaaagctgtacagatttttttttttaaccactcaatcccaaatggaggcctacaaagaacatcgtaataacacatggaagcaaaccctgggtttttaagagcaaattctgtccccccctcactcccccaagtgacaagatactaatgaagaaagttcttcaccatagtgtttgttttaactaaactcattggagtctagttccaaatttggtagggtcatcatctctacattccttaggatttctctccctatcaagctggcccagatacaagtaccaaacagtagtctctgaagttcccccatttccttcagtaccagtctataagctactgtccgccactgattttcatctatcagggtgtcctaatcagaatcagccacccaagcaagcctctctggcccacatatctatctcttgccttcccccatgaacttcagcctgtccacacaaaagccacataaactcaagcaagaaatatgttcagccaaaacatgattatagtggcagctgaccaatcccccatcccaaattgaccatttagatgtaccaactcaccttaaattagcatgttccaatccagtcggcattgcctgaatacagtagcatcatacctatagttggtcttagataagaaatgaactacttgatatagcaaagtcctttggcttcgtaaataaccctgaggttttgtacttactttccccataggaagacagaccataggcaaactctgttttgggatctcaactccatcacctttgtttcaatattttttttctctcttgaacaaaactgagataatttagaaaacaggtgcttaattgcaataaaattactatgaagtatattaaaaatcacgacattgtaaaatctcactttagatcatcaaagaaaaccattgttactatctcctttgagcttaggaaaatgtacaagagaacaaattaaaattgaaaaattgatttcacttagaaaaacttctaggaacagggtgaaccactgattttaatttgcctaattatcttatgacaagtatcaaattaagatgacacttaaagatccttagcattaacttaatgatggagaagagtgctcaacagacagttcccagtaaggtaatgagatgccattttcagagacattctaagaagatattttgattcattaaaacattaaataaaaagccctcctcagattggaacccccaaatcgatggagccacattaataatacttttcatgcctcactttgacatgacagcattcgatttttttaaagatctttaatactttccatgagtactaaagattgtaatgagttaccttatccttagaagtagaatgtttgctttcttcttcttggaaatagtcctccaaaaagtccacttgtaccagtgacaagaagtcacttgtatagtgaccaagtacacataaaatactgattataaaaatattgtaataaaccacttcctcatttgatacaggtattaagctgaatcctcactaattcacttttgaaaagttcttaatgaacagttttattcttattccatgaacagctcttttaatacaatttccttggtatccaacttaaatcccagaattttgttccaccatggttagttatttgccatatgaatgtattcttgtttctaccaatattctaggcatgagaataccttaatactgagttggagattttgtatctgtttctcctcctttacgcccattttcctacccacagcagcaaatgacaacgtgtctgtccaggtctgtccccctgctcatcccaggatgccactcacatttttttcttcttgttaccttgaccacgctgtacagtaacatccaagagcccattctacagtgggtggttttggtctttttataactttttctcaaagtcactgatgtttgttcctgttaaatgtatagcattgtaatgagagcccatcaaatcctgagtgtcagtttgttgtccctattgtagatgaaatagtgatgtagcaaaaacctagtaaattctgaatgcttttccacgtagacttatctggaatgtgaacacaactctttggttaatagtaaatgcttaactgtagtcctgagtaggtgcatttctgtctgtctcaataaattttactttgtctgcaatatctgagtgtttgtatttcattggg

SEQ ID NO: 736441 - DNA, 5370 bp, Homo sapiens
cactctctgttgtccaatggacacacctgtcgtgttttgagccagcgagagatgcagtggaagtgaaaagcatggttacagactccccatgcgacagtacactcttctgaagtagcggacgcctggttagcttgacattctatgcaaagatccataatgtggttcctgcagatggcacagttatcaaccacaatatcccaggcccagagggctactgcattccactttttcacttcaaagcgcttcttgcccgcgccgctgttggtgccgctcggggtatccacatccatcgctgcgggctcacaaagcggccagacgctcggcggcggcgtgtggcaggagcgcaggggcgcgagccggcgatcagccttcccggcgaccgtgccgcgggagctcgagcaactcggactaggggacccgggccggcccccaagatgccggcgatcgcggtgttggcggcggccgccgcggcgtggtgcttcctccaagtcgagagccggcacctggacgcgctcgccggaggcgcgggccccaaccacggcaatttcctagacaatgaccagtggctgagcaccgtctcccagtacgaccgggacaagtactggaaccgctttcgagacgatgattatttcagaaactggaatcccaacaagccctttgaccaagccctggacccatccaaggacccctgcctgaaggtaaaatgcagccctcacaaagtgtgtgtgacccaggactaccagaccgccctgtgtgtcagccgcaagcacctgctccccaggcaaaagaaggggaacgtggcccagaaacactgggttggaccttcgaatttggtcaagtgcaagccctgtcccgtggcacagtcagccatggtctgcggctcagatggccactcctacacatccaagtgcaaattggagttccatgcttgttctactggcaaaagcctcgccaccctctgtgatgggccctgtccctgtctcccagagcctgagccaccaaagcacaaggcagaaaggagtgcctgcacagacaaggagttgcggaaccttgcctcccggctgaaggattggtttggagctctccacgaggatgcgaacagagtcatcaagcccaccagctccaacacagcccaaggcaggtttgacactagcatcctgcccatctgcaaggactccctgggctggatgttcaacaagttggacatgaactatgacctcctgcttgacccttcagagatcaatgccatctacctggataagtacgagccctgtatcaagcctcttttcaactcgtgtgactccttcaaggatggcaagctttctaacaatgagtggtgctactgcttccagaagcctggaggtctcccttgccagaatgaaatgaacagaattcagaagctgagtaaggggaaaagcctgttgggggccttcatacctcggtgtaatgaggagggctattacaaagccacacagtgccacggcagcacggggcagtgctggtgtgtggacaaatatgggaatgagttggctggctccaggaaacagggtgctgtgagctgtgaagaggagcaggaaacctcaggggattttggcagtggtgggtccgtggtcctgctggatgacctagaatatgaacgggagctgggaccaaaggacaaagaggggaagctgagggtgcacacccgagccgtgacagaggatgatgaggatgaggatgatgacaaagaggatgaggtcgggtacatatggtagtgcccacaagaaagaggacacaagttttgcacaaaattgcaagtcacttcctattcctgcatttgtatctaagactccaaggcaccaaggtctcttctccattgttgctctctatacccgacctaaggtttggaagacaactgcttgttcccagaggattctgattttgcatatgtttgtatgggagaaagggtgttgtgtttttttttttgttgttgtttattttttggatagggaagtcattggcttaattagagcctccttcctttctgtgagatttttccaacaagcatgtgatttacgtggaattctgacagtgcagggagcccccaccctcttaaatgtcaaagaccctttttgattacccacactggtggttattacagcatggttcccagccttacagtgtctaagtgcttctcttgtgtcctgtagatgttgtgaaaaagaaaaaaacaaaaaatacaccacactgtactttttccccctgcccccgttactgccggtgattattattaaaaattagtttttttcacatcattatatctggcttcctataaacaacagccttaattcagtcaagactccctttggggaattcattttattaaaaattggtgtctggatacttccctgtacatgcataaatatgcatgcatgtacagaaagactgtatgtgtgtgccttgcacacacacccatacctctcagaaaaagtgtttgggtatcttaaaaactcgaaaaacaatgataaatttctcagcttgtccagacctggaacaaaatttctggaataagaaatttgtattaaagtccttttttgcactaacagttggctcttgtagcctgcaggctgaggaagtctcttctctgtgcatcagcagagttactgaaagcctctgattgagaaaaaacctccgtctgcctaaatcacttttctcgcagaagccatgcgactcccacacgacacgggcagcttcacaagccatctctttcatttctgcttgaagcccccttggctgcagcaatcctgtctgccataggtttcttccttccttacctactcaagggctttttctaaggcatgcacacatatctcctgttctctgagagtaccatggtgttccttaaaagaagaaaatttctaattctgaactcaatgttttgcttttactccctttctactgacaaatcatgataagggcacaaaagctgtacagatttttttttttaaccactcaatcccaaatggaggcctacaaagaacatcgtaataacacatggaagcaaaccctgggtttttaagagcaaattctgtccccccctcactcccccaagtgacaagatactaatgaagaaagttcttcaccatagtgtttgttttaactaaactcattggagtctagttccaaatttggtagggtcatcatctctacattccttaggatttctctccctatcaagctggcccagatacaagtaccaaacagtagtctctgaagttcccccatttccttcagtaccagtctataagctactgtccgccactgattttcatctatcagggtgtcctaatcagaatcagccacccaagcaagcctctctggcccacatatctatctcttgccttcccccatgaacttcagcctgtccacacaaaagccacataaactcaagcaagaaatatgttcagccaaaacatgattatagtggcagctgaccaatcccccatcccaaattgaccatttagatgtaccaactcaccttaaattagcatgttccaatccagtcggcattgcctgaatacagtagcatcatacctatagttggtcttagataagaaatgaactacttgatatagcaaagtcctttggcttcgtaaataaccctgaggttttgtacttactttccccataggaagacagaccataggcaaactctgttttgggatctcaactccatcacctttgtttcaatattttttttctctcttgaacaaaactgagataatttagaaaacaggtgcttaattgcaataaaattactatgaagtatattaaaaatcacgacattgtaaaatctcactttagatcatcaaagaaaaccattgttactatctcctttgagcttaggaaaatgtacaagagaacaaattaaaattgaaaaattgatttcacttagaaaaacttctaggaacagggtgaaccactgattttaatttgcctaattatcttatgacaagtatcaaattaagatgacacttaaagatccttagcattaacttaatgatggagaagagtgctcaacagacagttcccagtaaggtaatgagatgccattttcagagacattctaagaagatattttgattcattaaaacattaaataaaaagccctcctcagattggaacccccaaatcgatggagccacattaataatacttttcatgcctcactttgacatgacagcattcgatttttttaaagatctttaatactttccatgagtactaaagattgtaatgagttaccttatccttagaagtagaatgtttgctttcttcttcttggaaatagtcctccaaaaagtccacttgtaccagtgacaagaagtcacttgtatagtgaccaagtacacataaaatactgattataaaaatattgtaataaaccacttcctcatttgatacaggtattaagctgaatcctcactaattcacttttgaaaagttcttaatgaacagttttattcttattccatgaacagctcttttaatacaatttccttggtatccaacttaaatcccagaattttgttccaccatggttagttatttgccatatgaatgtattcttgtttctaccaatattctaggcatgagaataccttaatactgagttggagattttgtatctgtttctcctcctttacgcccattttcctacccacagcagcaaatgacaacgtgtctgtccaggtctgtccccctgctcatcccaggatgccactcacatttttttcttcttgttaccttgaccacgctgtacagtaacatccaagagcccattctacagtgggtggttttggtctttttataactttttctcaaagtcactgatgtttgttcctgttaaatgtatagcattgtaatgagagcccatcaaatcctgagtgtcagtttgttgtccctattgtagatgaaatagtgatgtagcaaaaacctagtaaattctgaatgcttttccacgtagacttatctggaatgtgaacacaactctttggttaatagtaaatgcttaactgtagtcctgagtaggtgcatttctgtctgtctcaataaattttactttgtctgcaaaaaaaaaaaacgacacaccacaaaaacaaacgtgtgttgcgggcgcgcccttcggccccctggagaaaagagctttctcaaagaacccatttccgttgtgggcgcggcggggcccccagatgatgtatagcggtgacaccggggtccaaaacgagtgtccccaaaagaaaaaccgcgggcaagaaaaggtcgcgggtttcctcacccaattaaaaaaaggcgcgggggacaaaccacgctgtcgtgaacaatcccgag

SEQ ID NO: 736442 - DNA, 3883 bp, Homo sapiens
cactctctgttgtccaatggacacacctgtcgtgttttgagccagcgagagatgcagtggaagtgaaaagcatggttacagactccccatgcgacagtacactcttctgaagtagcggacgcctggttagcttgacattctatgcaaagatccataatgtggttcctgcagatggcacagttatcaaccacaatatcccaggcccagagggctactgcattccactttttcacttcaaagcgcttcttgcccgcgccgctgttggtgccgctcggggtatccacatccatcgctgcgggctcacaaagcggccagacgctcggcggcggcgtgtggcaggagcgcaggggcgcgagccggcgatcagccttcccggcgaccgtgccgcgggagctcgagcaactcggactaggggacccgggccggcccccaagatgccggcgatcgcggtgttggcggcggccgccgcggcgtggtgcttcctccaagtcgagagccggcacctggacgcgctcgccggaggcgcgggccccaaccacggcaatttcctagacaatgaccagtggctgagcaccgtctcccagtacgaccgggacaagtactggaaccgctttcgagacgatgattatttcagaaactggaatcccaacaagccctttgaccaagccctggacccatccaaggacccctgcctgaaggtaaaatgcagccctcacaaagtgtgtgtgacccaggactaccagaccgccctgtgtgtcagccgcaagcacctgctccccaggcaaaagaaggggaacgtggcccagaaacactgggttggaccttcgaatttggtcaagtgcaagccctgtcccgtggcacagtcagccatggtctgcggctcagatggccactcctacacatccaagtgcaaattggagttccatgcttgttctactggcaaaagcctcgccaccctctgtgatgggccctgtccctgtctcccagagcctgagccaccaaagcacaaggcagaaaggagtgcctgcacagacaaggagttgcggaaccttgcctcccggctgaaggattggtttggagctctccacgaggatgcgaacagagtcatcaagcccaccagctccaacacagcccaaggcaggtttgacactagcatcctgcccatctgcaaggactccctgggctggatgttcaacaagttggacatgaactatgacctcctgcttgacccttcagagatcaatgccatctacctggataagtacgagccctgtatcaagcctcttttcaactcgtgtgactccttcaaggatggcaagctttctaacaatgagtggtgctactgcttccagaagcctggaggtctcccttgccagaatgaaatgaacagaattcagaagctgagtaaggggaaaagcctgttgggggccttcatacctcggtgtaatgaggagggctattacaaagccacacagtgccacggcagcacggggcagtgctggtgtgtggacaaatatgggaatgagttggctggctccaggaaacagggtgctgtgagctgtgaagaggagcaggaaacctcaggggattttggcagtggtgggtccgtggtcctgctggatgacctagaatatgaacgggagctgggaccaaaggacaaagaggggaagctgagggtgcacacccgagccgtgacagaggatgatgaggatgaggatgatgacaaagaggatgaggtcgggtacatatggtagtgcccacaagaaagaggacacaagttttgcacaaaattgcaagtcacttcctattcctgcatttgtatctaagactccaaggcaccaaggtctcttctccattgttgctctctatacccgacctaaggtttggaagacaactgcttgttcccagaggattctgattttgcatatgtttgtatgggagaaagggtgttgtgtttttttttttgttgttgtttattttttggatagggaagtcattggcttaattagagcctccttcctttctgtgagatttttccaacaagcatgtgatttacgtggaattctgacagtgcagggagcccccaccctcttaaatgtcaaagaccctttttgattacccacactggtggttattacagcatggttcccagccttacagtgtctaagtgcttctcttgtgtcctgtagatgttgtgaaaaagaaaaaaacaaaaaatacaccacactgtactttttccccctgcccccgttactgccggtgattattattaaaaattagtttttttcacatcattatatctggcttcctataaacaacagccttaattcagtcaagactccctttggggaattcattttattaaaaattggtgtctggatacttccctgtacatgcataaatatgcatgcatgtacagaaagactgtatgtgtgtgccttgcacacacacccatacctctcagaaaaagtgtttgggtatcttaaaaactcgaaaaacaatgataaatttctcagcttgtccagacctggaacaaaatttctggaataagaaatttgtattaaagtccttttttgcactaacagttggctcttgtagcctgcaggctgaggaagtctcttctctgtgcatcagcagagttactgaaagcctctgattgagaaaaaacctccgtctgcctaaatcacttttctcgcagaagccatgcgactcccacacgacacgggcagcttcacaagccatctctttcatttctgcttgaagcccccttggctgcagcaatcctgtctgccataggtttcttccttccttacctactcaagggctttttctaaggcatgcacacatatctcctgttctctgagagtaccatggtgttccttaaaagaagaaaatttctaattctgaactcaatgttttgcttttactccctttctactgacaaatcatgataagggcacaaaagctgtacagatttttttttttaaccactcaatcccaaatggaggcctacaaagaacatcgtaataacacatggaagcaaaccctgggtttttaagagcaaattctgtccccccctcactcccccaagtgacaagatactaatgaagaaagttcttcaccatagtgtttgttttaactaaactcattggagtctagttccaaatttggtagggtcatcatctctacattccttaggatttctctccctatcaagctggcccagatacaagtaccaaacagtagtctctgaagttcccccatttccttcagtaccagtctataagctactgtccgccactgattttcatctatcagggtgtcctaatcagaatcagccacccaagcaagcctctctggcccacatatctatctcttgccttcccccatgaacttcagcctgtccacacaaaagccacataaactcaagcaagaaatatgttcagccaaaacatgattatagtggcagctgaccaatcccccatcccaaattgaccatttagatgtaccaactcaccttaaattagcatgttccaatccagtcggcattgcctgaatacagtagcatcatacctatagttggtcttagataagaaatgaactacttgatatagcaaagtcctttggcttcgtaaataaccctgaggttttgtacttactttccccataggaagacagaccataggcaaactctgttttgggatctcaactccatcacctttgtttcaatattttttttctctcttgaacaaaactgagataatttagaaaacaggtgcttaattgcaataaaattactatgaagtatattaaaaatcacgacattgtaaaatctagtttgttcaagagagagaccatgtacgagaagggccgagctgattat

SEQ ID NO: 736443 - DNA, 1267 bp, Homo sapiens
gaggagagagatagagagagagagagatagacacgagggcctttttacctcagattggaacccccaaatcgatggagccacattaataatacttttcatgcctcactttgacatgacagcattcgatttttttaaagatctttaatactttccatgagtactaaagattgtaatgagttaccttatccttagaagtagaatgtttgctttcttcttcttggaaatagtcctccaaaaagtccacttgtaccagtgacaagaagtcacttgtatagtgaccaagtacacataaaatactgattataaaaatattgtaataaaccacttcctcatttgatacaggtattaagctgaatcctcactaattcacttttgaaaagttcttaatgaacagttttattcttattccatgaacagctcttttaatacaatttccttggtatccaacttaaatcccagaattttgttccaccatggttagttatttgccatatgaatgtattcttgtttctaccaatattctaggcatgagaataccttaatactgagttggagattttgtatctgtttctcctcctttacgcccattttcctacccacagcagcaaatgacaacgtgtctgtccaggtctgtccccctgctcatcccaggatgccactcacatttttttcttcttgttaccttgaccacgctgtacagtaacatccaagagcccattctacagtgggtggttttggtctttttataactttttctcaaagtcactgatgtttgttcctgttaaatgtatagcattgtaatgagagcccatcaaatcctgagtgtcagtttgttgtccctattgtagatgaaatagtgatgtagcaaaaacctagtaaattctgaatgcttttccacgtagacttatctggaatgtgaacacaactctttggttaatagtaaatgcttaactgtagtcctgagtaggtgcatttctgtctgtctcaataaattttactttgtctgcaaaaaaaaaaaacgacacaccacaaaaacaaacgtgtgttgcgggcgcgcccttcggccccctggagaaaagagctttctcaaagaacccatttccgttgtgggcgcggcggggcccccagatgatgtatagcggtgacaccggggtccaaaacgagtgtccccaaaagaaaaaccgcgggcaagaaaaggtcgcgggtttcctcacccaattaaaaaaaggcgcgggggacaaaccacgctgtcgtgaacaatcccgag

SEQ ID NO: 736444 - DNA, 2232 bp, Homo sapiens
  misc_feature (55)..(55): n is a, c, g, or t
cagcttgatgctgcaggtcatctagagatcccccagcagcatagatattaccgcncttaggatttctctccctatcaagctggcccagatacaagtaccaaacagtagtctctgaagttcccccatttccttcagtaccagtctataagctactgtccgccactgattttcatctatcagggtgtcctaatcagaatcagccacccaagcaagcctctctggcccacatatctatctcttgccttcccccatgaacttcagcctgtccacacaaaagccacataaactcaagcaagaaatatgttcagccaaaacatgattatagtggcagctgaccaatcccccatcccaaattgaccatttagatgtaccaactcaccttaaattagcatgttccaatccagtcggcattgcctgaatacagtagcatcatacctatagttggtcttagataagaaatgaactacttgatatagcaaagtcctttggcttcgtaaataaccctgaggttttgtacttactttccccataggaagacagaccataggcaaactctgttttgggatctcaactccatcacctttgtttcaatattttttttctctcttgaacaaaactgagataatttagaaaacaggtgcttaattgcaataaaattactatgaagtatattaaaaatcacgacattgtaaaatctcactttagatcatcaaagaaaaccattgttactatctcctttgagcttaggaaaatgtacaagagaacaaattaaaattgaaaaattgatttcacttagaaaaacttctaggaacagggtgaaccactgattttaatttgcctaattatcttatgacaagtatcaaattaagatgacacttaaagatccttagcattaacttaatgatggagaagagtgctcaacagacagttcccagtaaggtaatgagatgccattttcagagacattctaagaagatattttgattcattaaaacattaaataaaaagccctcctcagattggaacccccaaatcgatggagccacattaataatacttttcatgcctcactttgacatgacagcattcgatttttttaaagatctttaatactttccatgagtactaaagattgtaatgagttaccttatccttagaagtagaatgtttgctttcttcttcttggaaatagtcctccaaaaagtccacttgtaccagtgacaagaagtcacttgtatagtgaccaagtacacataaaatactgattataaaaatattgtaataaaccacttcctcatttgatacaggtattaagctgaatcctcactaattcacttttgaaaagttcttaatgaacagttttattcttattccatgaacagctcttttaatacaatttccttggtatccaacttaaatcccagaattttgttccaccatggttagttatttgccatatgaatgtattcttgtttctaccaatattctaggcatgagaataccttaatactgagttggagattttgtatctgtttctcctcctttacgcccattttcctacccacagcagcaaatgacaacgtgtctgtccaggtctgtccccctgctcatcccaggatgccactcacatttttttcttcttgttaccttgaccacgctgtacagtaacatccaagagcccattctacagtgggtggttttggtctttttataactttttctcaaagtcactgatgtttgttcctgttaaatgtatagcattgtaatgagagcccatcaaatcctgagtgtcagtttgttgtccctattgtagatgaaatagtgatgtagcaaaaacctagtaaattctgaatgcttttccacgtagacttatctggaatgtgaacacaactctttggttaatagtaaatgcttaactgtagtcctgagtaggtgcatttctgtctgtctcaataaattttactttgtctgcaaaaaaaaaaaacgacacaccacaaaaacaaacgtgtgttgcgggcgcgcccttcggccccctggagaaaagagctttctcaaagaacccatttccgttgtgggcgcggcggggcccccagatgatgtatagcggtgacaccggggtccaaaacgagtgtccccaaaagaaaaaccgcgggcaagaaaaggtcgcgggtttcctcacccaattaaaaaaaggcgcgggggacaaaccacgctgtcgtgaacaatcccgag

SEQ ID NO: 736445 - DNA, 1054 bp, Homo sapiens
gtacccgaaatggaacgaacgaaaagtccacttgtaccagtgacaagaagtcacttgtatagtgaccaagtacacataaaatactgattataaaaatattgtaataaaccacttcctcatttgatacaggtattaagctgaatcctcactaattcacttttgaaaagttcttaatgaacagttttattcttattccatgaacagctcttttaatacaatttccttggtatccaacttaaatcccagaattttgttccaccatggttagttatttgccatatgaatgtattcttgtttctaccaatattctaggcatgagaataccttaatactgagttggagattttgtatctgtttctcctcctttacgcccattttcctacccacagcagcaaatgacaacgtgtctgtccaggtctgtccccctgctcatcccaggatgccactcacatttttttcttcttgttaccttgaccacgctgtacagtaacatccaagagcccattctacagtgggtggttttggtctttttataactttttctcaaagtcactgatgtttgttcctgttaaatgtatagcattgtaatgagagcccatcaaatcctgagtgtcagtttgttgtccctattgtagatgaaatagtgatgtagcaaaaacctagtaaattctgaatgcttttccacgtagacttatctggaatgtgaacacaactctttggttaatagtaaatgcttaactgtagtcctgagtaggtgcatttctgtctgtctcaataaattttactttgtctgcaaaaaaaaaaaacgacacaccacaaaaacaaacgtgtgttgcgggcgcgcccttcggccccctggagaaaagagctttctcaaagaacccatttccgttgtgggcgcggcggggcccccagatgatgtatagcggtgacaccggggtccaaaacgagtgtccccaaaagaaaaaccgcgggcaagaaaaggtcgcgggtttcctcacccaattaaaaaaaggcgcgggggacaaaccacgctgtcgtgaacaatcccgag

SEQ ID NO: 736446 - DNA, 801 bp, Homo sapiens
gcggccgctactactactaattcgcggccgtcagaccgttgtttctaccaatattctaggcatgagaataccttaatactgagttggagattttgtatctgtttctcctcctttacgcccattttcctacccacagcagcaaatgacaacgtgtctgtccaggtctgtccccctgctcatcccaggatgccactcacatttttttcttcttgttaccttgaccacgctgtacagtaacatccaagagcccattctacagtgggtggttttggtctttttataactttttctcaaagtcactgatgtttgttcctgttaaatgtatagcattgtaatgagagcccatcaaatcctgagtgtcagtttgttgtccctattgtagatgaaatagtgatgtagcaaaaacctagtaaattctgaatgcttttccacgtagacttatctggaatgtgaacacaactctttggttaatagtaaatgcttaactgtagtcctgagtaggtgcatttctgtctgtctcaataaattttactttgtctgcaaaaaaaaaaaacgacacaccacaaaaacaaacgtgtgttgcgggcgcgcccttcggccccctggagaaaagagctttctcaaagaacccatttccgttgtgggcgcggcggggcccccagatgatgtatagcggtgacaccggggtccaaaacgagtgtccccaaaagaaaaaccgcgggcaagaaaaggtcgcgggtttcctcacccaattaaaaaaaggcgcgggggacaaaccacgctgtcgtgaacaatcccgag

SEQ ID NO: 736447 - DNA, 4529 bp, Homo sapiens
cttcctgcttctgcccctcaccaagaccctccaccagcaaaaaggtcatgactttctgaaggctcagtgcaaattggagttccatgcttgttctactggcaaaagcctcgccaccctctgtgatgggccctgtccctgtctcccagagcctgagccaccaaagcacaaggcagaaaggagtgcctgcacagacaaggagttgcggaaccttgcctcccggctgaaggattggtttggagctctccacgaggatgcgaacagagtcatcaagcccaccagctccaacacagcccaaggcaggtttgacactagcatcctgcccatctgcaaggactccctgggctggatgttcaacaagttggacatgaactatgacctcctgcttgacccttcagagatcaatgccatctacctggataagtacgagccctgtatcaagcctcttttcaactcgtgtgactccttcaaggatggcaagctttctaacaatgagtggtgctactgcttccagaagcctggaggtctcccttgccagaatgaaatgaacagaattcagaagctgagtaaggggaaaagcctgttgggggccttcatacctcggtgtaatgaggagggctattacaaagccacacagtgccacggcagcacggggcagtgctggtgtgtggacaaatatgggaatgagttggctggctccaggaaacagggtgctgtgagctgtgaagaggagcaggaaacctcaggggattttggcagtggtgggtccgtggtcctgctggatgacctagaatatgaacgggagctgggaccaaaggacaaagaggggaagctgagggtgcacacccgagccgtgacagaggatgatgaggatgaggatgatgacaaagaggatgaggtcgggtacatatggtagtgcccacaagaaagaggacacaagttttgcacaaaattgcaagtcacttcctattcctgcatttgtatctaagactccaaggcaccaaggtctcttctccattgttgctctctatacccgacctaaggtttggaagacaactgcttgttcccagaggattctgattttgcatatgtttgtatgggagaaagggtgttgtgtttttttttttgttgttgtttattttttggatagggaagtcattggcttaattagagcctccttcctttctgtgagatttttccaacaagcatgtgatttacgtggaattctgacagtgcagggagcccccaccctcttaaatgtcaaagaccctttttgattacccacactggtggttattacagcatggttcccagccttacagtgtctaagtgcttctcttgtgtcctgtagatgttgtgaaaaagaaaaaaacaaaaaatacaccacactgtactttttccccctgcccccgttactgccggtgattattattaaaaattagtttttttcacatcattatatctggcttcctataaacaacagccttaattcagtcaagactccctttggggaattcattttattaaaaattggtgtctggatacttccctgtacatgcataaatatgcatgcatgtacagaaagactgtatgtgtgtgccttgcacacacacccatacctctcagaaaaagtgtttgggtatcttaaaaactcgaaaaacaatgataaatttctcagcttgtccagacctggaacaaaatttctggaataagaaatttgtattaaagtccttttttgcactaacagttggctcttgtagcctgcaggctgaggaagtctcttctctgtgcatcagcagagttactgaaagcctctgattgagaaaaaacctccgtctgcctaaatcacttttctcgcagaagccatgcgactcccacacgacacgggcagcttcacaagccatctctttcatttctgcttgaagcccccttggctgcagcaatcctgtctgccataggtttcttccttccttacctactcaagggctttttctaaggcatgcacacatatctcctgttctctgagagtaccatggtgttccttaaaagaagaaaatttctaattctgaactcaatgttttgcttttactccctttctactgacaaatcatgataagggcacaaaagctgtacagatttttttttttaaccactcaatcccaaatggaggcctacaaagaacatcgtaataacacatggaagcaaaccctgggtttttaagagcaaattctgtccccccctcactcccccaagtgacaagatactaatgaagaaagttcttcaccatagtgtttgttttaactaaactcattggagtctagttccaaatttggtagggtcatcatctctacattccttaggatttctctccctatcaagctggcccagatacaagtaccaaacagtagtctctgaagttcccccatttccttcagtaccagtctataagctactgtccgccactgattttcatctatcagggtgtcctaatcagaatcagccacccaagcaagcctctctggcccacatatctatctcttgccttcccccatgaacttcagcctgtccacacaaaagccacataaactcaagcaagaaatatgttcagccaaaacatgattatagtggcagctgaccaatcccccatcccaaattgaccatttagatgtaccaactcaccttaaattagcatgttccaatccagtcggcattgcctgaatacagtagcatcatacctatagttggtcttagataagaaatgaactacttgatatagcaaagtcctttggcttcgtaaataaccctgaggttttgtacttactttccccataggaagacagaccataggcaaactctgttttgggatctcaactccatcacctttgtttcaatattttttttctctcttgaacaaaactgagataatttagaaaacaggtgcttaattgcaataaaattactatgaagtatattaaaaatcacgacattgtaaaatctcactttagatcatcaaagaaaaccattgttactatctcctttgagcttaggaaaatgtacaagagaacaaattaaaattgaaaaattgatttcacttagaaaaacttctaggaacagggtgaaccactgattttaatttgcctaattatcttatgacaagtatcaaattaagatgacacttaaagatccttagcattaacttaatgatggagaagagtgctcaacagacagttcccagtaaggtaatgagatgccattttcagagacattctaagaagatattttgattcattaaaacattaaataaaaagccctcctcagattggaacccccaaatcgatggagccacattaataatacttttcatgcctcactttgacatgacagcattcgatttttttaaagatctttaatactttccatgagtactaaagattgtaatgagttaccttatccttagaagtagaatgtttgctttcttcttcttggaaatagtcctccaaaaagtccacttgtaccagtgacaagaagtcacttgtatagtgaccaagtacacataaaatactgattataaaaatattgtaataaaccacttcctcatttgatacaggtattaagctgaatcctcactaattcacttttgaaaagttcttaatgaacagttttattcttattccatgaacagctcttttaatacaatttccttggtatccaacttaaatcccagaattttgttccaccatggttagttatttgccatatgaatgtattcttgtttctaccaatattctaggcatgagaataccttaatactgagttggagattttgtatctgtttctcctcctttacgcccattttcctacccacagcagcaaatgacaacgtgtctgtccaggtctgtccccctgctcatcccaggatgccactcacatttttttcttcttgttaccttgaccacgctgtacagtaacatccaagagcccattctacagtgggtggttttggtctttttataactttttctcaaagtcactgatgtttgttcctgttaaatgtatagcattgtaatgagagcccatcaaatcctgagtgtcagtttgttgtccctattgtagatgaaatagtgatgtagcaaaaacctagtaaattctgaatgcttttccacgtagacttatctggaatgtgaacacaactctttggttaatagtaaatgcttaactgtagtcctgagtaggtgcatttctgtctgtctcaataaattttactttgtctgcaaaaaaaaaaaacgacacaccacaaaaacaaacgtgtgttgcgggcgcgcccttcggccccctggagaaaagagctttctcaaagaacccatttccgttgtgggcgcggcggggcccccagatgatgtatagcggtgacaccggggtccaaaacgagtgtccccaaaagaaaaaccgcgggcaagaaaaggtcgcgggtttcctcacccaattaaaaaaaggcgcgggggacaaaccacgctgtcgtgaacaatcccgag

SEQ ID NO: 736448 - DNA, 1292 bp, Homo sapiens
gagagggaacctgcagaccccaggggccagcctttgcctgattcctgaatttgttaaagccattttatgtagtgtggaaggtgcttcactgaagagcctcctcctcaccccagcagcctcctcccaggcagacccacccctgccatccccaacctgagacccttgaccttttcaccttgcactctgagctacctggcaccccaaaactcctcctggtagtggggttgagctcttgtaaggagcctgaggaagaaagaccagtattgggagctcatgtcccagcccctcatgcacagttcacctagactagagccaggaagtttagggagtcccagtgcatggctaggggtgccctgagggcgctgtctgaacctcaggctgtcacagttcatcaatcagccagccatgcacctgtcaggtgtgcctgccaacagcctgccccatctttctcatcctcccagccaaggcagaccactccagagggacctgcacagccccttcctcaagaccaccacaggaggcctgggagtgagaagggtcacggtgctgggtgcctgggttcctcagcaccggccactcccactttgccctggtgtgcccatcaggcccagagaagaaacccgctctgggcgtcttactttttactcttattcagaaaaaccttccttagccttttctttgtttctgacagcaaaatcaaaggaaattcaagatgaaattttaggccagagcctggcctaaaaactgcaagtgttcataattaacaaaagaaatctaaaaaaagagatgatgtgttgccgctcccctgcagctgtggaggaaggagagctgttctgcatccataaaaaccagttaaaagggatttcataaggtctgaaattgagaactttcccaagaatactgcatcttgttctcttgtgcaatatacagacgtgtgaatattcctaacagtaaccaaatgggtgcactctctgtgaaaacgcatctttcaaagagttttttaaacaaaggagactcctgggcctttagaaataattgccacaaactgcaaaaacaatctccaacctcccacttctgtaattctcatctgttgtcttactagaaaatttatttctctggtaataatgttataattgatatccctgtcttctcaagatgtaaaatacttgtaaaaacttctctgtccatcagaaaataattattggcacttttcttctctctcatgtgcatgatggaacaataaaaagcttatggctttgctagatctattatttaacaaacaatttgagagt

SEQ ID NO: 736449 - DNA, 417 bp, Homo sapiens; identical to SEQ ID NO: 7665

SEQ ID NO: 736450 - DNA, 606 bp, Homo sapiens
atacctaatattatacctaataatagtaattatagttgcttactgataacaacaactaataacacttattgaggccctactctgtgccagggattttctaatcacttaattccctaacacattatgaggttttattgttttctccaattttacagacagggaaactgagacatggagtagttaagttcatttacccagtgtaacacagctggcagtctggttttagattttgtccaatgcacactgtgtggcactgcccaggagcataagctccttcacctgggtccgtcgtcttccttctgtatggtgttgggtttatgtacacactataacacttcctgtgtgagttcatgtacctgtctgtgagtgctttggtgtattgagcctcagtacactccaagggcattaaagtcaagaactagaacctgggtgctgtgcctttcttttttagagatgtgctctcatctcttctctgacccccactttgccagcaaatattttttatttctgcttaaaatgtggtgtgtttggggatgccccacacaacaagacaggcttttccctgagaccagcagctgaatttctgccctgaaagggaggtgggcc

SEQ ID NO: 736451 - DNA, 4989 bp, Homo sapiens
cgcccccctccggccagcccgcagccggccgcgtcatgccaggcgctgctcggcggtagggagtgcccggggccgccgcctccgcccgcccgaagccgcgcccactgcccagagccagagggatggtggtagtcacggggcgggagccagacagccgtcgtcaggacggtgccatgtccagctctgacgccgaagacgactttctggagccggccacgccgacggccacgcaggcggggcacgcgctgcccctgctgccacaggagtttcctgaggttgttccccttaacatcggaggggctcacttcactacacgcctgtccacactgcggtgctacgaagacaccatgttggcagccatgttcagtgggcggcactacatccccacggactccgagggccggtacttcatcgaccgagatggcacacactttggagatgtgctgaatttcctgcgctcaggggacctcccacccagggagcgtgttcgagctgtgtacaaagaggcccagtactatgccatcgggcccctcctggagcagctggagaacatgcagccactgaagggcgagaaggtgcgccaagcgtttctgggactcatgccctattacaaagaccacttggagcggattgtggagatcgcccggctgcgtgcggtccagcggaaggcccgctttgccaagctcaaggtctgtgtcttcaaggaggagatgcccatcaccccctatgagtgtccgctcctcaactccctgcgatttgagcggagtgagagtgacgggcagctttttgagcaccactgtgaagtggatgtgtcttttgggccctgggaggctgtggctgatgtttatgacctgctgcactgcctggtcacggacctctcggcccagggtctcaccgtggaccaccagtgcatcggggtgtgtgacaagcacctcgtgaaccactactactgcaagcgccccatctatgagttcaagatcacatggtggtgagtagccccggtaggcgagagtcccatcagggaggatgtccaccttgcttggtggctctgggagtaagatccctgaaggggctgctgactgccccagaatctgccgaggtgagaacagcatcctgaggcacagctcccaggggacagaggtgtagctccaatctccctgactgcacctcagggttgggctcagggcttgcggcctgcaggcactccagccagcgctcacctggcctttcctcaaggcatggtagtctttccttgaggctgatagctagggcttgaccaggaagtcccgagaagttttgtcaccttcttgaccttgcaagagagtttctgcccattttagagccacgttaccaaatcgatgtaggcctaatcacttcctcaaccctgttcaagcgtccctcccttgtgctcagtatattggtgtgaacacggaacatgatgggggatttacctgaccagccaccccatagcccctggctgaagaagaaagagcatcttctctcccactgcaccccttctcctccaagaatagttgcccacattcccaaaatgtggaaagacttttcttttccttccggaacatgttcttcaccaccttttggagatttaaccatagctgccaaagctatgcacccagttggccttagaaaaccacaatgtttacagccctgtcttagggccgcggcttctcttatcttccaccaccttccttgcttgcagggttatcttctcacagggctggaatgcaaatttcagaggcttcttttgaagattccccaagtcaagcaggcaagatgcctagatcttctgttatctttgacatgtaacatcctttttagaggctcagaacacctccttggctgctatctcatgtgttagaatccagtttgtggtgaacctctttggaaggggaccccctctctttaaaccctgttcctctgtcctggtaacattctccttctaggagagcctctcttctgagaaggtaaaggaagggctgggtgagacacacagctatcctaggagccgtaggaagacaaaacttcccttttgttttactcctcactcctctatttttgttttactcacttctttatattttgttttactcctcactcctgtatattttggtttacttactcctctatttcagaaattgaaaaagatccccaaggatctgttactactgcatttccttcttgctctgtctacagcctaggccaactagtcagggtctggacatgcatctcctaaaggaagaactgtgtagcaccattgatcacaatgtaacatttccatgctgcattaagggtgtctctctctaatcatgattgtacctgtctcttcctgggtaaagggagatttttttttttaatgtgtaaagaattgatgcgagccaggaacatgtctgtagtcccagctacttgggcacacgcctgtagtccaggccactcgagcacacacctgtagtaccagctactctggaggctgaggcaggaggatcacttgagcccaggagattaagactgtagtatactatgatcgtgcctgtggctagccactgtgctccagcctgggcaacaccatcgtaaaaataaataaataaataaataaattggggaggacagcctcactggtatcagacttacaggaccagatagacaagatgggtataaggggagctgaagtctgtgttcatatgaggaagagaagaccaagccctgggactttggctgaattcctccgtggggctggacggcagtgatctcctgttccctatgtgtaaacaaagattccagggcgtggttttgcactcctgttgtactcttttagaggtggaaaagaggtggatactgagatctaagaggaaaggatagtcattcacgttctgagatatgcgctctctctattgttctcgtacacaaagggatagtctcttttctggagctgatgtccctgcttggaggttagccccaaaacatggctcttgtattgttctaagagaaaaggctttcattttggttcttctgattggtgttacctactgcctaatatgtgttcattttttgacagagaggcagactattgaaaaagtctgtgtgaacagagagcagttcattaagcccattgctttcagtaatgtggccttgaccccttctgcttcccccttctcccatggagcatggcagggcttggttatttagagtccatacatgcaagccattgagagacttgtttgctcaaatgcaagtttgctcaaaaacaggtcctgaaggcttgcttaggattacagggatgctgggtaagaacaccgttcctctctctcgctggagaaatccctgtttctctgactccctttgtgatcctcacagtaatgtattctgtgccactgtaggacacaaggctctgggccagtagaacaggcagagaggtgacactgggcagcaagctgagagctctttctaaatggagtgaaggaattcagtggcctagtttcgccattctctaatgagaaaccaaggccaggctgaaaagtgcaattagatgtggtggattgtggtaacggcctccagataaaggggttatccctgtggaagtgacttttccccatttgatcccttttcaactctaaatggccaggcccagagcagaagaagggttgggtctggaaggaaggctccaaaggatgaaagcttctccctgatcataaggaagtgcatctttatagaattgttgtgcataatgtcagtaaatccctctcacttgacaagggactggattcatcttgccttgagacgggccagtagttatcagtgagtcaaagcaaagtgaaagtttcaggagatgggaccaatggtgcaatgctcgccataacaaaattccttaaaaataaaaaagctaatgttatagcaacaaaaaaagactgaagcaaaaccacactgaaatgcatcccactccaggagaggaattcttagcgtaacactctaaataaatggaaggaatcatcaccttccttattttacctctgccttgttcaccaggctgcccagtgcttaccatgcagaaagcagtcagctgtactctggaagtttctgttcttctttcctggggcttaggatattctgggagctgtctgagccttgtgcctaaggcttatcaggtgatataatcttcctgttctgggctgcttgctggaggaataggaagtgacatttataagacacaggcggtgtgagcatccatgtgtggtcttggtctaaaccagctcttgaacaggttaaagcaaacagcaataacaaaacaaaaactactgatgctgagcgttttgatcctagtaatatttcaaatattgtccttctgcatatgttctatccatatttgattccaatatacattattaagctttcttgggtactattttgctggggctcttgcgtgaaggtggtacctgtctcatgatccttaaaagagagaggcttttttcatccaaagctgtagtgttgggaactggggtgggagaggcactttttggaattctgaaagaatcatatctgtgtatatacatactgagtggggaaggatgggggttggcaggggttgagggaggtgggaacaaacagtgagtatgggaacaggcagtcacctcgagtgtgggaggtcacctgggtccgtcgtcttccttctgtatggtgttgggtttatgtacacactataacacttcctgtgtgagttcatgtacctgtctgtgagtgctttggtgtattgagcctcagtacactccaagggcattaaagtcaagaactagaacctgggtgctgtgcctttcttttttagagatgtgctctcatctcttctctgacccccactttgccagcaaatattttttatttctgcttaaaatgtggtgtgtttggggatgccccacacaacaagacaggcttttccctgagaccagcagctgaatttctgccctgaaagggaggtgggcc

SEQ ID NO: 736452 - DNA, 4433 bp, Homo sapiens
cgcccccctccggccagcccgcagccggccgcgtcatgccaggcgctgctcggcggtagggagtgcccggggccgccgcctccgcccgcccgaagccgcgcccactgcccagagccagagggatggtggtagtcacggggcgggagccagacagccgtcgtcaggacggtgccatgtccagctctgacgccgaagacgactttctggagccggccacgccgacggccacgcaggcggggcacgcgctgcccctgctgccacaggagtttcctgaggttgttccccttaacatcggaggggctcacttcactacacgcctgtccacactgcggtgctacgaagacaccatgttggcagccatgttcagtgggcggcactacatccccacggactccgagggccggtacttcatcgaccgagatggcacacactttggagatgtgctgaatttcctgcgctcaggggacctcccacccagggagcgtgttcgagctgtgtacaaagaggcccagtactatgccatcgggcccctcctggagcagctggagaacatgcagccactgaagggcgagaaggtgcgccaagcgtttctgggactcatgccctattacaaagaccacttggagcggattgtggagatcgcccggctgcgtgcggtccagcggaaggcccgctttgccaagctcaaggtctgtgtcttcaaggaggagatgcccatcaccccctatgagtgtccgctcctcaactccctgcgatttgagcggagtgagagtgacgggcagctttttgagcaccactgtgaagtggatgtgtcttttgggccctgggaggctgtggctgatgtttatgacctgctgcactgcctggtcacggacctctcggcccagggtctcaccgtggaccaccagtgcatcggggtgtgtgacaagcacctcgtgaaccactactactgcaagcgccccatctatgagttcaagatcacatggtggtgagtagccccggtaggcgagagtcccatcagggaggatgtccaccttgcttggtggctctgggagtaagatccctgaaggggctgctgactgccccagaatctgccgaggtgagaacagcatcctgaggcacagctcccaggggacagaggtgtagctccaatctccctgactgcacctcagggttgggctcagggcttgcggcctgcaggcactccagccagcgctcacctggcctttcctcaaggcatggtagtctttccttgaggctgatagctagggcttgaccaggaagtcccgagaagttttgtcaccttcttgaccttgcaagagagtttctgcccattttagagccacgttaccaaatcgatgtaggcctaatcacttcctcaaccctgttcaagcgtccctcccttgtgctcagtatattggtgtgaacacggaacatgatgggggatttacctgaccagccaccccatagcccctggctgaagaagaaagagcatcttctctcccactgcaccccttctcctccaagaatagttgcccacattcccaaaatgtggaaagacttttcttttccttccggaacatgttcttcaccaccttttggagatttaaccatagctgccaaagctatgcacccagttggccttagaaaaccacaatgtttacagccctgtcttagggccgcggcttctcttatcttccaccaccttccttgcttgcagggttatcttctcacagggctggaatgcaaatttcagaggcttcttttgaagattccccaagtcaagcaggcaagatgcctagatcttctgttatctttgacatgtaacatcctttttagaggctcagaacacctccttggctgctatctcatgtgttagaatccagtttgtggtgaacctctttggaaggggaccccctctctttaaaccctgttcctctgtcctggtaacattctccttctaggagagcctctcttctgagaaggtaaaggaagggctgggtgagacacacagctatcctaggagccgtaggaagacaaaacttcccttttgttttactcctcactcctctatttttgttttactcacttctttatattttgttttactcctcactcctgtatattttggtttacttactcctctatttcagaaattgaaaaagatccccaaggatctgttactactgcatttccttcttgctctgtctacagcctaggccaactagtcagggtctggacatgcatctcctaaaggaagaactgtgtagcaccattgatcacaatgtaacatttccatgctgcattaagggtgtctctctctaatcatgattgtacctgtctcttcctgggtaaagggagatttttttttttaatgtgtaaagaattgatgcgagccaggaacatgtctgtagtcccagctacttgggcacacgcctgtagtccaggccactcgagcacacacctgtagtaccagctactctggaggctgaggcaggaggatcacttgagcccaggagattaagactgtagtatactatgatcgtgcctgtggctagccactgtgctccagcctgggcaacaccatcgtaaaaataaataaataaataaataaattggggaggacagcctcactggtatcagacttacaggaccagatagacaagatgggtataaggggagctgaagtctgtgttcatatgaggaagagaagaccaagccctgggactttggctgaattcctccgtggggctggacggcagtgatctcctgttccctatgtgtaaacaaagattccagggcgtggttttgcactcctgttgtactcttttagaggtggaaaagaggtggatactgagatctaagaggaaaggatagtcattcacgttctgagatatgcgctctctctattgttctcgtacacaaagggatagtctcttttctggagctgatgtccctgcttggaggttagccccaaaacatggctcttgtattgttctaagagaaaaggctttcattttggttcttctgattggtgttacctactgcctaatatgtgttcattttttgacagagaggcagactattgaaaaagtctgtgtgaacagagagcagttcattaagcccattgctttcagtaatgtggccttgaccccttctgcttcccccttctcccatggagcatggcagggcttggttatttagagtccatacatgcaagccattgagagacttgtttgctcaaatgcaagtttgctcaaaaacaggtcctgaaggcttgcttaggattacagggatgctgggtaagaacaccgttcctctctctcgctggagaaatccctgtttctctgactccctttgtgatcctcacagtaatgtattctgtgccactgtaggacacaaggctctgggccagtagaacaggcagagaggtgacactgggcagcaagctgagagctctttctaaatggagtgaaggaattcagtggcctagtttcgccattctctaatgagaaaccaaggccaggctgaaaagtgcaattagatgtggtggattgtggtaacggcctccagataaaggggttatccctgtggaagtgacttttccccatttgatcccttttcaactctaaatggccaggcccagagcagaagaagggttgggtctggaaggaaggctccaaaggatgaaagcttctccctgatcataaggaagtgcatctttatagaattgttgtgcataatgtcagtaaatccctctcacttgacaagggactggattcatcttgccttgagacgggccagtagttatcagtgagtcaaagcaaagtgaaagtttcaggagatgggaccaatggtgcaatgctcgccataacaaaattccttaaaaataaaaaagctaatgttatagcaacaaaaaaagactgaagcaaaaccacactgaaatgcatcccactccaggagaggcactttttggaattctgaaagaatcatatctgtgtatatacatactgagtggggaaggatgggggttggcaggggttgagggaggtgggaacaaacagtgagtatgggaacaggcagtcacctcgagtgtgggaggtcacctgggtccgtcgtcttccttctgtatggtgttgggtttatgtacacactataacacttcctgtgtgagttcatgtacctgtctgtgagtgctttggtgtattgagcctcagtacactccaagggcattaaagtcaagaactagaacctgggtgctgtgcctttcttttttagagatgtgctctcatctcttctctgacccccactttgccagcaaatattttttatttctgcttaaaatgtggtgtgtttggggatgccccacacaacaagacaggcttttccctgagaccagcagctgaatttctgccctgaaagggaggtgggcc

SEQ ID NO: 736453 - DNA, 3533 bp, Homo sapiens
cgcccccctccggccagcccgcagccggccgcgtcatgccaggcgctgctcggcggtagggagtgcccggggccgccgcctccgcccgcccgaagccgcgcccactgcccagagccagagggatggtggtagtcacggggcgggagccagacagccgtcgtcaggacggtgccatgtccagctctgacgccgaagacgactttctggagccggccacgccgacggccacgcaggcggggcacgcgctgcccctgctgccacaggagtttcctgaggttgttccccttaacatcggaggggctcacttcactacacgcctgtccacactgcggtgctacgaagacaccatgttggcagccatgttcagtgggcggcactacatccccacggactccgagggccggtacttcatcgaccgagatggcacacactttggagatgtgctgaatttcctgcgctcaggggacctcccacccagggagcgtgttcgagctgtgtacaaagaggcccagtactatgccatcgggcccctcctggagcagctggagaacatgcagccactgaagggcgagaaggtgcgccaagcgtttctgggactcatgccctattacaaagaccacttggagcggattgtggagatcgcccggctgcgtgcggtccagcggaaggcccgctttgccaagctcaaggtctgtgtcttcaaggaggagatgcccatcaccccctatgagtgtccgctcctcaactccctgcgatttgagcggagtgagagtgacgggcagctttttgagcaccactgtgaagtggatgtgtcttttgggccctgggaggctgtggctgatgtttatgacctgctgcactgcctggtcacggacctctcggcccagggtctcaccgtggaccaccagtgcatcggggtgtgtgacaagcacctcgtgaaccactactactgcaagcgccccatctatgagttcaagatcacatggtggtgagtagccccggtaggcgagagtcccatcagggaggatgtccaccttgcttggtggctctgggagtaagatccctgaaggggctgctgactgccccagaatctgccgaggtgagaacagcatcctgaggcacagctcccaggggacagaggtgtagctccaatctccctgactgcacctcagggttgggctcagggcttgcggcctgcaggcactccagccagcgctcacctggcctttcctcaaggcatggtagtctttccttgaggctgatagctagggcttgaccaggaagtcccgagaagttttgtcaccttcttgaccttgcaagagagtttctgcccattttagagccacgttaccaaatcgatgtaggcctaatcacttcctcaaccctgttcaagcgtccctcccttgtgctcagtatattggtgtgaacacggaacatgatgggggatttacctgaccagccaccccatagcccctggctgaagaagaaagagcatcttctctcccactgcaccccttctcctccaagaatagttgcccacattcccaaaatgtggaaagacttttcttttccttccggaacatgttcttcaccaccttttggagatttaaccatagctgccaaagctatgcacccagttggccttagaaaaccacaatgtttacagccctgtcttagggccgcggcttctcttatcttccaccaccttccttgcttgcagggttatcttctcacagggctggaatgcaaatttcagaggcttcttttgaagattccccaagtcaagcaggcaagatgcctagatcttctgttatctttgacatgtaacatcctttttagaggctcagaacacctccttggctgctatctcatgtgttagaatccagtttgtggtgaacctctttggaaggggaccccctctctttaaaccctgttcctctgtcctggtaacattctccttctaggagagcctctcttctgagaaggtaaaggaagggctgggtgagacacacagctatcctaggagccgtaggaagacaaaacttcccttttgttttactcctcactcctctatttttgttttactcacttctttatattttgttttactcctcactcctgtatattttggtttacttactcctctatttcagaaattgaaaaagatccccaaggatctgttactactgcatttccttcttgctctgtctacagcctaggccaactagtcagggtctggacatgcatctcctaaaggaagaactgtgtagcaccattgatcacaatgtaacatttccatgctgcattaagggtgtctctctctaatcatgattgtacctgtctcttcctgggtaaagggagatttttttttttaatgtgtaaagaattgatgcgagccaggaacatgtctgtagtcccagctacttgggcacacgcctgtagtccaggccactcgagcacacacctgtagtaccagctactctggaggctgaggcaggaggatcacttgagcccaggagattaagactgtagtatactatgatcgtgcctgtggctagccactgtgctccagcctgggcaacaccatcgtaaaaataaataaataaataaataaattggggaggacagcctcactggtatcagacttacaggaccagatagacaagatgggtataaggggagctgaagtctgtgttcatatgaggaagagaagaccaagccctgggactttggctgaattcctccgtggggctggacggcagtgatctcctgttccctatgtgtaaacaaagattccagggcgtggttttgcactcctgttgtactcttttagaggtggaaaagaggtggatactgagatctaagaggaaaggatagtcattcacgttctgagatatgcgctctctctattgttctcgtacacaaagggatagtctcttttctggagctgatgtccctgcttggaggttagccccaaaacatggctcttgtattgttctaagagaaaaggctttcattttggttcttctgattggtgttacctactgcctaatatgtgttcattttttgacagagaggcagactattgaaaaagtctgtgtatatacatactgagtggggaaggatgggggttggcaggggttgagggaggtgggaacaaacagtgagtatgggaacaggcagtcacctcgagtgtgggaggtcacctgggtccgtcgtcttccttctgtatggtgttgggtttatgtacacactataacacttcctgtgtgagttcatgtacctgtctgtgagtgctttggtgtattgagcctcagtacactccaagggcattaaagtcaagaactagaacctgggtgctgtgcctttcttttttagagatgtgctctcatctcttctctgacccccactttgccagcaaatattttttatttctgcttaaaatgtggtgtgtttggggatgccccacacaacaagacaggcttttccctgagaccagcagctgaatttctgccctgaaagggaggtgggcc

SEQ ID NO: 736454 - DNA, 1633 bp, Homo sapiens
cgcccccctccggccagcccgcagccggccgcgtcatgccaggcgctgctcggcggtagggagtgcccggggccgccgcctccgcccgcccgaagccgcgcccactgcccagagccagagggatggtggtagtcacggggcgggagccagacagccgtcgtcaggacggtgccatgtccagctctgacgccgaagacgactttctggagccggccacgccgacggccacgcaggcggggcacgcgctgcccctgctgccacaggagtttcctgaggttgttccccttaacatcggaggggctcacttcactacacgcctgtccacactgcggtgctacgaagacaccatgttggcagccatgttcagtgggcggcactacatccccacggactccgagggccggtacttcatcgaccgagatggcacacactttggagatgtgctgaatttcctgcgctcaggggacctcccacccagggagcgtgttcgagctgtgtacaaagaggcccagtactatgccatcgggcccctcctggagcagctggagaacatgcagccactgaagggcgagaaggtgcgccaagcgtttctgggactcatgccctattacaaagaccacttggagcggattgtggagatcgcccggctgcgtgcggtccagcggaaggcccgctttgccaagctcaaggtctgtgtcttcaaggaggagatgcccatcaccccctatgagtgtccgctcctcaactccctgcgatttgagcggagtgagagtgacgggcagctttttgagcaccactgtgaagtggatgtgtcttttgggccctgggaggctgtggctgatgtttatgacctgctgcactgcctggtcacggacctctcggcccagggtctcaccgtggaccaccagtgcatcggggtgtgtgacaagcacctcgtgaaccactactactgcaagcgccccatctatgagttcaagatcacatggtggtgagtagccccggtaggcgagagtcccatcagggaggatgtccaccttgcttggtggctctgggagtaagatccctgaaggggctgctgactgccccagaatctgccgaggtgagaacagcatcctgaggcacagctcccaggggacagaggtgtagctccaatctccctgactgcacctcagggttgggctcagggcttgcggcctgcaggcactccagccagcgctcacctggcctttcctcaaggcatggtagtctttccttgaggctgatagctagggcttgaccaggaagtcccgagaagttttgtcaccacctgggtccgtcgtcttccttctgtatggtgttgggtttatgtacacactataacacttcctgtgtgagttcatgtacctgtctgtgagtgctttggtgtattgagcctcagtacactccaagggcattaaagtcaagaactagaacctgggtgctgtgcctttcttttttagagatgtgctctcatctcttctctgacccccactttgccagcaaatattttttatttctgcttaaaatgtggtgtgtttggggatgccccacacaacaagacaggcttttccctgagaccagcagctgaatttctgccctgaaagggaggtgggcc

SEQ ID NO: 736455 - DNA, 2132 bp, Homo sapiens
tgttttgattgtgtaaagagtagagtgctgatttgtgtgttacagagggtggtctgtacaagtcataaagctcgacatggccttgcttcctgctaggtgttaggacacccatgatggtggagtctcttggcattctgtgtaattagataaggctgtttatagcattggtccatgagaacttccttgtttctatttaaaatgaaaatcattgtataagtaaaacttcttaaatgtagatagaaatagaattttaactgaaattttatgaagccattggccgcagggatgtgtgtcatggaggagggctccatacttttttggtatacttatctcaaacttaattcatttgcatactgctttttctctaagtgccaactgtcctagtatattttctaagtcaacttttactttcactttatcctaagcaagaatatctttggcatcacagactcagtaagcccgtttttttctaatgcacatacaaataaataaaatgcacaacttttaacataaatggctgcctccaatttgggaaatactgttctggccagaggccgttgctctgataatgtcatgtggttagtgcattttaggaagacctcctttccctttggttgactcctgcaggacataagatatcagtgacgttatcctttgttgagccatcctggtttgagtcaggatgagtgttgagagtttttggggagttgcccctgtgtcctatattattttatcctcttaaagtctgatggtctttggctccactgactccaggtaagttggggtgacagtgcagcatatttctattttctagttgtttctggccagacatggggaaggtcaagacatcttgttcatgcaaacggattgatggccattcctaatctgattttattagtgtattttaggaagtaaagtaagattcttgagcccagctgaacttcccctattgaattttctaacaaaaagagagtttgcgtatgggtttataattgagcctgctcttgtagaaatgttttatcagaattgaaatcctctctgatccccaaattctagagacaaagttgttttctgaatttgagaaatctgttcagttcacaaggaaaggtgacaatgtgtcatttggatgttgtcccacacgtgaggcctcgttgggtgcttgtggtgggagggaccctccaggcaggctttgtatggagggttttcatgtctggacacatttctgttccgagaagcactgctgcgtttttgggagcgtggaccctggccagagcctgtggccagctctgcctgccctccctttcttggcctgctcttttgagtatgtagtggggctttgtgtggcatcctgccaggttaaagctgcatggtgcttaggatagagctggtgctgtggggaggctcttgatgatgggggctgccatctatttgcctgttaactcttagaaaccaaacctcaaatgtcagaatttcctttctagaagaggctggttgaataggaaccagaaaggccctcatacaggcagggctgttcactcctcttgacttgcgtgtttgtgccttccttgtaggaaggcttcttagggaattgttatctgtttaggggaaataagcctgcaggaatgaacttttttttaaaataaaaactcttgatcaaaaatggaaagaaaaaaaccagtgaaacaggctaggtagtttgtggaattctcctttgcaggtgaggggagaaagcagctatctcaagggcacagctacagattgggagctggggcttccatccagggtctgggacacccaaaccttaggcttgcccctcccgggaggcctccccctcagagctatgtgggatgcagttgcctttttacctgtgatgagaaactggtgaattgccaggattctggctctggcttcagtctgcccctttccggggattagagggcattaaccctacttcctacagccaagcagctcttcctcatgactctactttctaactccgggggttgactgattgatttgaagaccgccttgttgatgaatgtgttgaaacttgctatcataatgtaaatgctccttaataaaataacaggacctggtgggttcagttgccttgcccacgtgtgaaaaaaaaa

SEQ ID NO: 736456 - DNA, 1427 bp, Homo sapiens; identical to SEQ ID NO: 424435

SEQ ID NO: 736457 - DNA, 9253 bp, Homo sapiens
gagttatttctcctatacctatgcaaagtaggaagagcaccttataggaggcactgtatagggacaggggacatgggatcagccataggaatgttaaatgaaattgcacagaggaaagtttaatatatgtctagagattatacatacacttttttaagcgtaaaaagaagacatctagtaatgacagatattctttttatatacaagcaaaagaaagtataaggaggttctacagtgcaacatccacaatctgtgcattcacatattatgggacttttattttttaaactctcatataaattttttaaaattactccttggaagagatcctggtttttttcttcatttatttttttctttaaaaacatttattttaagagaagagaaaaagagcttcatctaattttgcatcttgattaccaatcagtactagtcacagcaccagcaatactgtatgttttagactgacaaggtcagccaggaaatggcatttttttaaacgcagaaatgtgtttgtttcctctactctaacacgtcctttctcctcctggtgtcctgtcaccccccatgcagcaccactgatgcgagatgatgctctggcctggtccaggaagccctgagccatgggcagattgcccagtggccttgggcggccagagcttgtcacctgtttaaacaagttcaccatgtgtttaaatgacagggtacagtcctggaccagaggtttttctcttcagcaaagctccctggcccttgatcgttggactgttactaatagaaaaagattcaagtcatgaagtataaaatccatcccccatcccagaactttgaaacacaaggagggagagatctttgctatggagcagtcctggagcaaagccccgtggcttccacccccagatatataccccataagtagtgctgagctccagcttagctgagccaagctcagtccttatctggtgttcagccagtgcacaggtataagcagaactacagagctgaatgtagcttccctgggatctcttctcctttctaaagcatttttcacacagttctgtacctcctacggcacggactgttcctgttcctcatacctgtggggattcctccatattggaactgtttcatgtatcttttttgcattgtaactagccaaacctgaagtcagtaaataaaatgagattagcactttttttaggtaccagttgtatcactgagtaatgcacaccaatagagcaagaaagtataaaatgtatttaagaccaactggtttgcttattatgactgactttgaaaaagcccatatccaatgatatacatgctttaaaaggtatatctatcgtaggaccaggaaccaaaatgggaattttacttctggtcctgttttgtaaatagttcctttttttgaagacaatctcatgttttataacttttgttgtgggtctgagaatcacaatggtaatatgtcttggcaaaacataacctttaaatacaaaaacaattataacttaattttccaaataaaacaagaaatacactgattaggcttctacagttctaagagacatgacactttggtaataagcgtcagtactctacttctcaagttaactggaaatattttacaagatgcagtgttttgtaatcacaaagaacgcagacattttgtgagaaatgaccttggttttatacattgtagcttattttttaaaatatagtattttaccaggcaggaagtattaatattataagtaattcttgctcaccaaacaaagggctatgtctcttttaagcaaatgttttgatgcatatctttttaattaaccctctgcagcaagggtagaaatacagatcagatggaatgggtattataggagaatcaagatagcaacagctactccttttaccattactagtgtgttttcaaagtatggaaaaagatgcctgaagagtcattttatatattttaaatctaaaaagtgttaacaggtatgcttataggccatgggagaaatattcttataaattttttagtgtaaaatgataaattctgtgtcacaaagacaagtttaccacttgacctaccagaatcacagatacttgcatttaactagcaagtatcatttggtggaaatttctaaaatcatagtagacaggcccaaagatagaattcttaggtgatcagtagtgtttaaaataattttgtcctcagcactaactatataactgtaatttctacataagaacaagtgcttccaaaatatagtggagggaaaaaataaaaaaggaaaataaaaaaacaaaacaaaaagaacaagtgcttgatttttcactgtgaagaactagcaggcacatgaggttgtgatcagaaagtgactgagttcccaagaaccaggaaacagaggggagttgtgaagagtttattaaaactgtacaaataattcagagctttgccaaaaccatttcataatgctgtacagttttttcaagcccactcactgttaaaacaagaaagcaccttttctttctaagattttagtaatccaaaagctagcctaattagccaagtatgcagataacatcaaaagcaaagctgagatagaacagccatacacccgttgggcagctcttatgaggtggtcagaaggtcactcagaccttggtttcaaataggctttagaatctgcacacttgaggactagaaatgcacagagttagggaaagccatgtacaggcttggctcctagtctttgagatgaggcgtcttgcaaatctctgttttcactccttggaatgtctccattgttagcattaaagtccccaagaagtttttattgctgtacggttttgaacccaatgagtctcatttccaaaagattcctaattctatataggagaggttgcaaatgtcagtgcctcagaaggaccaggcaagttctgtaaatgattgatgtggataaggcaaagaggaacacaagaatggtggagaccaggttgaactgcagaacacatgccctctttgaaggggtgcccacactcagctctagacaatcagaaccatgcagaaatcaggcccagggctgctagatcttctgacgtggaagtatgatattacctgacacgtaagttttgacaactaactcaaactcttggccaacactgtgcagaccaaagagaagctgtacacagacaggtgcagcctgcagcccccagtttcaactattgggaaaagtggatttcacattccacagttgtcaggtcaggttcatccatcagccccacaaactcacatgtcggcactatctgggcaactaaaataaaagaggggaaagagatcatttctccccagatatcattctcatggcagacttgaatatagatacgctgagttatccagctctctcactctgcctccttttggcatgcccaggctgtgccccgtaaagtgttgaatcactgttatcctaattttcttagtgttttctaccgtggccactgtgatgaggggctggcaaagagcagcctcgtgccttccgagaaggctgccaggagcctctgaagcttgaagcgagcacacattgcctccttgtgccaaagcccttggccagcctccccacactccttccctctccatccggcctcatgagtcttcgttaccaagtaaaattaccactgcttcacctctgatacagcagaagccttgcttcagaactggtaggcatttaggctatttcagagtgtccactaacctcaaaaggaggtttttccacatacaaaaccctagcatctttgaggggaaagcaaaatgagaataaattatgtcatgaaaaaaattagaagttgcttccttcatttagatggactaagttattttaaactctatcttacatcagagtcctgatggtgttgggatagtcactgaccctttcacgtatgtaataagatacgtctcgttcacacactatttcatttgatctttgtaagaacccagtgtagaataggaatatttaaaatcaacattacccacctccaaggccaacccagagtagtcttgaacctgagtcagcctcagtattgcttgcaaggaagagggaaggggctcattaaaggcctggctcaaaccttagtcttccagactgactagggacgtaagaagacccagggacccaccatgttctcaaaccatctattcagtccaggcctttcagcatagacataaagagcccacccgttactcagtcatgttgccaagtgcaaactgatttatccccagatgaatccctttactgtagcagatccctaatccctaaatttcagccaatttggtagttaattataggagtttattagctaaatgtatgttctgagtaaaagttttgactctttggggaaaatttattttgctgctagcatacaacatttgctatgtatataaacttaagtcaatgccagaaattttaaaaccagctcaaatttataatctgtaatgatcaaatcaaaacatactgtaaactcagagttggaaacgcctggtaatatggttaagtcatgtttaaatatgaatgcaatttaaatgacattggcaatgcctgagatttctttcattgtgaatgattaaaaggcagtccaatatatgaatggatttcatcttacctttctcccgttaatttactaggtgtaacatcttgagtgtaaagtcattcacaggcagttgggttgtggagctagaaggagcctcaaaaaaaaactttttggccagactcctacatcatgaacagggtttttgatgaataatatttattattatgtttctaaagtaatacagtgttggagaatgaaacagtttagtcctttcctcttctgatggaaaagaatcatagcgccgttgccatgacaataacaggatgtagaaagacccatgaagaaagaaagaagaaagctatggttccgaaagcaggtaaccacagattttgaaaggaggcagagatggtgattaaactgtagtccttgttttttaaaatgttctttcatgttaggcaccaccacatagttaataactaccaacttctaaagagaagatccccttgatttatttatatcatgaaaatactaaaaatcaattctcaagtctaattaactattacattatcttgctaggtccttttccctaaatttttaattcagaaaattaaccagaattggccagatgcagtggttcacgcctataatcccagcactttgggagtccaaggcagatggatcacttgaggtcagtagttcaagaccagcctggccaacagaggaagaaagagtgaaaacaaaagaagaaagagggaaaccctgtctttactaaaaatacaaaaattagtcgggcgtggtggcgcacacctgtaattccagctacttgagaggctgaggcaggagaatcccttgaaactgcaggcagaggttgcagtgagccaagatttcactgctgcacctggggtgagactaccattaaggaaggaaatttcctttaaacagaaaaaaacaaaggtgctcatctatttcttctgaattctctctacatccttgacttaagaggaaaaccagcactcaagaaacagctttaaaagagaacagtccccattctagctaccagtcttgctttcccccatcttggcaagccccagtgaatttgccattgaaagattaccctcccctttgccctcatctgcctgagctagaggccaggctgttgttaatgttttttcagttccaaagcccctgatgggacattcttgtttctgtgctactgctttctctctcttaaattaaggtgcaaggggataaatattactataactgggatgtaaggctcagtcagtgtggctattccctcccttcgggggaaatattccatctgtctgaacggttttaggtgatcatgaggagagcggcttagtcacacagccagccacgctcatcacaaaagatttgttcagactcactgtaaagaatgacaaggcagatagctaatcctttcactgtgcctcaaagcccgccgtgcaagtcaccaaccctaccggtcctctccacgtgcgaggctaatagagtgatcagaaccaggaatgtgagctgggttccaccttaggaggggacaatgaggacagagcaagagggctccatgtttaattactccaggctctgacttctgcccacaattacagagcatgaaagcagaattggcctttagtaagtgaaaaggaagtggctcctgcagcatataattgttataatttcgtatttatggaaagagaaaaggacttcagtccactcatgttgttaagcacttgtccctcactccactggagcccccttcctatgttttgggcacagatggctgggaccgagaggaaagaggaagagcggctgccagagtgtgaatatacccctcagggatatacagcggagtttcatgataaactacccatactttcccaaaaaaggttgaggagcaatacataactttgcagattacaaacccttgttttactttttaaaccttttttccatactctgcttattggaaatcgatggctgtgatgtgaccaacacctgtgatgatagcaaagcccctcctttcacagtctcctgactgttcggggaacctccttggtcattggtagaaagctttagaaaagacttagctttttagggaagaactaaaaaatctccaaaacatactagtcccatgacttcgataactgaaaatgtcctgggtgtaaactaacccaggaatgtggatcatacatgttttttttaaaaaaaatccctgaatcaatattttcctacaacacaccctaaaattcctatttttgtaattaatggttggacagtgatcagccatttaaacataggctttctggaataaccagacactagaatagtttccaaagtgttttgcgtatcaaaatcctatatacttagaagaagaactcaggataagaaaaaatcgctaggtcccaaagggttcatgactatcatcagatgcaactgcgagtggcctacggtcattttttcaaatgagaagactggagagagagaacaacagtaatcacaaaacctctgttgcccttagtccatgacaatgtttaaggaaactttaaaaaattaagccatcttctgaattgttttctacaccaaatctaaaatattaaaatgaaattattaaatatttaaaatggggtatttagtggaaatgcaatcagtagaaaacattgctttttagtgcctgctaaacaagtaaaggagaaagaatgaagagaaaacagcagtccttcctgtgtgacactcgtgtggaaatgacaggcattcacatgtcattgagtgctaactcaaaagctaggtggcaatgctgtccaatgtttagagatcttttgaaatataattttaccaccattcagaggtaagtacttgcttaacagaagtctttaatgttagtgaatgaatgtataaaattataaactatgcattttcaaagagtagcatgtattttgtatcgaatccaagtaaatttttttcatagctacctaccacaactgcaaattattcaaaataaacttggatacatatccttatggggatatgggaagcccatctatattctcctacttgatgtttttaaagattgaaactttattctgaaacatcaggctctaaaaaattccatcattaagatgaataaatgggaaatggtttatttgttacttcgtaagcataaatgggaaatgttggctgttagaaaatgtgcccagttctttaaaggtggatgttctagtaacactggattaacaagcaaacaaaactgcatgaagtgaacgaatatttcattggataaagttagcataggttttatctgctgggtttaattctcaatcccagaaaaaaatattcttcaaggggtatcagttatagtttcaaagaacaaaatatgaaaatattgtccagcaaagcaaatcattgatcttttttcaaaattacttatattttggaaagtctatatagaatatccacaaatttcttcagccctcttgttgatttcatattttcatgaaactttttcccctaataatttgtcttcgctctttaatcagtgctttactacattactcagcctgaaaaaatatcttttccttcatctgacaatgtggaaataaagaactccatttctgtcattctggttctcttcagtgtccattgagaaagtttctcaactgtttgtaaaatacggggggaaaaaaacacgcatttctaaacctggtacttaaggttatactggattgtttgctacctaattagaagttattggggaaggggcattgtgtctttttatatgatttttagccaaatccagatgttctgatacacatttctgaatacctgtctgactgtaaatacagcctgtggaggttcaggttgataaacctttcacctgactgctccacagccatgctccttgccagcttctggcacattgtacatagatttgttgaatgtttaaatgatgttgtttttctaaatgctgttctctaaaacaattttttgaatttcttttgctttccattgttttggactttgtgtgttcgttttttaaaaaaaaaaatgtttcctaaatatttaacaccaggaaaaatatttttaaatacactggtgctaattgaaacagaaggaaattttcagatcgaagatgtacaatgttaaatgttcataccagttaaactgcactttcccaaggggacagctggcatctacttgaaatgggcatcaagagaccaccaaatgtttacagtttctgtggcccgtttaagtgtaaaatgcagaagtggctctgtccccccagagttaaggatttgctacactggtcctctggaagcatttaagtagaagaaaaggcttatagtcagaatcactttagtaatcgtcttctggtccttggacttttctgttctgtaatgcttgtaacaatgaatatggtgttgccaatctagtctgatatcattgttgacctgtacttactttgtggatggttctacctggggttgcactggcacaaacagagccagaacactggactttcaaaagaccattttgacttctacagtgtccacacacatgaatttaaatgcacttgtaactggttaattaccatgaagtaagtctaacttccacttaataaaagtttttgtgtatctgcttctaaaaaaaaaaa

SEQ ID NO: 736458 - DNA, 9142 bp, Homo sapiens
ggagccctggccaccgcagggagctcagaggccaatctacgcaaaaggcatgcaaaacaatggattctggtcccaaaatatttctaagtaaggcatgatgtagccttttgattttttttttatcctttgacaccccagccttcagaaaaggtttttcatctctctccaaagaagtcatttcatagtgactgacaggacattctccagagagcgacaaagcagagtggccagcaggcagtggtgttaagccttgggccttcccagcagatgtgtgctgcattggtgggtgggaggcagtgtgacagcctggagaaaacacacaggtagcaagggagtcaggggggaggtacaagagggctgtggacacctggctcttgctcatcttcttggtgctgatcagctggtggtcaccatccctaagtacctcccagggagctgccattttctcctctgggagcagctgcctgaagcaaggagagaatgacctgaagggaagtacctccggccaagagtgcagggctgctgtgcctagcctgagcgggccatctctagcagatatggacttctctccaccacactagctgaaaagttttctcccttggttggcaaaagccagtgtcaggaaaaaagctgtgggtttctgaccaagaatgtgtgcgcttagctgcaaagtgcctgtcagcagctccaggcaccaacaaggtgcccttttattagacaattcctgcccgaacataaccatattgcagatgaaaattttcaatagagaatgacacaattcttgacctttctaaaaacttttcaaagagatagtcacatgtgtatatgttgcaaaagatttttgaaactgaaatgtcctccattaaatctcaagagcactcgagttttaagtctgctgtttctggtgtcacactaagacacacttttgaaagcagccctgggttctgaattagttggcaggcacggactgttcctgttcctcatacctgtggggattcctccatattggaactgtttcatgtatcttttttgcattgtaactagccaaacctgaagtcagtaaataaaatgagattagcactttttttaggtaccagttgtatcactgagtaatgcacaccaatagagcaagaaagtataaaatgtatttaagaccaactggtttgcttattatgactgactttgaaaaagcccatatccaatgatatacatgctttaaaaggtatatctatcgtaggaccaggaaccaaaatgggaattttacttctggtcctgttttgtaaatagttcctttttttgaagacaatctcatgttttataacttttgttgtgggtctgagaatcacaatggtaatatgtcttggcaaaacataacctttaaatacaaaaacaattataacttaattttccaaataaaacaagaaatacactgattaggcttctacagttctaagagacatgacactttggtaataagcgtcagtactctacttctcaagttaactggaaatattttacaagatgcagtgttttgtaatcacaaagaacgcagacattttgtgagaaatgaccttggttttatacattgtagcttattttttaaaatatagtattttaccaggcaggaagtattaatattataagtaattcttgctcaccaaacaaagggctatgtctcttttaagcaaatgttttgatgcatatctttttaattaaccctctgcagcaagggtagaaatacagatcagatggaatgggtattataggagaatcaagatagcaacagctactccttttaccattactagtgtgttttcaaagtatggaaaaagatgcctgaagagtcattttatatattttaaatctaaaaagtgttaacaggtatgcttataggccatgggagaaatattcttataaattttttagtgtaaaatgataaattctgtgtcacaaagacaagtttaccacttgacctaccagaatcacagatacttgcatttaactagcaagtatcatttggtggaaatttctaaaatcatagtagacaggcccaaagatagaattcttaggtgatcagtagtgtttaaaataattttgtcctcagcactaactatataactgtaatttctacataagaacaagtgcttccaaaatatagtggagggaaaaaataaaaaaggaaaataaaaaaacaaaacaaaaagaacaagtgcttgatttttcactgtgaagaactagcaggcacatgaggttgtgatcagaaagtgactgagttcccaagaaccaggaaacagaggggagttgtgaagagtttattaaaactgtacaaataattcagagctttgccaaaaccatttcataatgctgtacagttttttcaagcccactcactgttaaaacaagaaagcaccttttctttctaagattttagtaatccaaaagctagcctaattagccaagtatgcagataacatcaaaagcaaagctgagatagaacagccatacacccgttgggcagctcttatgaggtggtcagaaggtcactcagaccttggtttcaaataggctttagaatctgcacacttgaggactagaaatgcacagagttagggaaagccatgtacaggcttggctcctagtctttgagatgaggcgtcttgcaaatctctgttttcactccttggaatgtctccattgttagcattaaagtccccaagaagtttttattgctgtacggttttgaacccaatgagtctcatttccaaaagattcctaattctatataggagaggttgcaaatgtcagtgcctcagaaggaccaggcaagttctgtaaatgattgatgtggataaggcaaagaggaacacaagaatggtggagaccaggttgaactgcagaacacatgccctctttgaaggggtgcccacactcagctctagacaatcagaaccatgcagaaatcaggcccagggctgctagatcttctgacgtggaagtatgatattacctgacacgtaagttttgacaactaactcaaactcttggccaacactgtgcagaccaaagagaagctgtacacagacaggtgcagcctgcagcccccagtttcaactattgggaaaagtggatttcacattccacagttgtcaggtcaggttcatccatcagccccacaaactcacatgtcggcactatctgggcaactaaaataaaagaggggaaagagatcatttctccccagatatcattctcatggcagacttgaatatagatacgctgagttatccagctctctcactctgcctccttttggcatgcccaggctgtgccccgtaaagtgttgaatcactgttatcctaattttcttagtgttttctaccgtggccactgtgatgaggggctggcaaagagcagcctcgtgccttccgagaaggctgccaggagcctctgaagcttgaagcgagcacacattgcctccttgtgccaaagcccttggccagcctccccacactccttccctctccatccggcctcatgagtcttcgttaccaagtaaaattaccactgcttcacctctgatacagcagaagccttgcttcagaactggtaggcatttaggctatttcagagtgtccactaacctcaaaaggaggtttttccacatacaaaaccctagcatctttgaggggaaagcaaaatgagaataaattatgtcatgaaaaaaattagaagttgcttccttcatttagatggactaagttattttaaactctatcttacatcagagtcctgatggtgttgggatagtcactgaccctttcacgtatgtaataagatacgtctcgttcacacactatttcatttgatctttgtaagaacccagtgtagaataggaatatttaaaatcaacattacccacctccaaggccaacccagagtagtcttgaacctgagtcagcctcagtattgcttgcaaggaagagggaaggggctcattaaaggcctggctcaaaccttagtcttccagactgactagggacgtaagaagacccagggacccaccatgttctcaaaccatctattcagtccaggcctttcagcatagacataaagagcccacccgttactcagtcatgttgccaagtgcaaactgatttatccccagatgaatccctttactgtagcagatccctaatccctaaatttcagccaatttggtagttaattataggagtttattagctaaatgtatgttctgagtaaaagttttgactctttggggaaaatttattttgctgctagcatacaacatttgctatgtatataaacttaagtcaatgccagaaattttaaaaccagctcaaatttataatctgtaatgatcaaatcaaaacatactgtaaactcagagttggaaacgcctggtaatatggttaagtcatgtttaaatatgaatgcaatttaaatgacattggcaatgcctgagatttctttcattgtgaatgattaaaaggcagtccaatatatgaatggatttcatcttacctttctcccgttaatttactaggtgtaacatcttgagtgtaaagtcattcacaggcagttgggttgtggagctagaaggagcctcaaaaaaaaactttttggccagactcctacatcatgaacagggtttttgatgaataatatttattattatgtttctaaagtaatacagtgttggagaatgaaacagtttagtcctttcctcttctgatggaaaagaatcatagcgccgttgccatgacaataacaggatgtagaaagacccatgaagaaagaaagaagaaagctatggttccgaaagcaggtaaccacagattttgaaaggaggcagagatggtgattaaactgtagtccttgttttttaaaatgttctttcatgttaggcaccaccacatagttaataactaccaacttctaaagagaagatccccttgatttatttatatcatgaaaatactaaaaatcaattctcaagtctaattaactattacattatcttgctaggtccttttccctaaatttttaattcagaaaattaaccagaattggccagatgcagtggttcacgcctataatcccagcactttgggagtccaaggcagatggatcacttgaggtcagtagttcaagaccagcctggccaacagaggaagaaagagtgaaaacaaaagaagaaagagggaaaccctgtctttactaaaaatacaaaaattagtcgggcgtggtggcgcacacctgtaattccagctacttgagaggctgaggcaggagaatcccttgaaactgcaggcagaggttgcagtgagccaagatttcactgctgcacctggggtgagactaccattaaggaaggaaatttcctttaaacagaaaaaaacaaaggtgctcatctatttcttctgaattctctctacatccttgacttaagaggaaaaccagcactcaagaaacagctttaaaagagaacagtccccattctagctaccagtcttgctttcccccatcttggcaagccccagtgaatttgccattgaaagattaccctcccctttgccctcatctgcctgagctagaggccaggctgttgttaatgttttttcagttccaaagcccctgatgggacattcttgtttctgtgctactgctttctctctcttaaattaaggtgcaaggggataaatattactataactgggatgtaaggctcagtcagtgtggctattccctcccttcgggggaaatattccatctgtctgaacggttttaggtgatcatgaggagagcggcttagtcacacagccagccacgctcatcacaaaagatttgttcagactcactgtaaagaatgacaaggcagatagctaatcctttcactgtgcctcaaagcccgccgtgcaagtcaccaaccctaccggtcctctccacgtgcgaggctaatagagtgatcagaaccaggaatgtgagctgggttccaccttaggaggggacaatgaggacagagcaagagggctccatgtttaattactccaggctctgacttctgcccacaattacagagcatgaaagcagaattggcctttagtaagtgaaaaggaagtggctcctgcagcatataattgttataatttcgtatttatggaaagagaaaaggacttcagtccactcatgttgttaagcacttgtccctcactccactggagcccccttcctatgttttgggcacagatggctgggaccgagaggaaagaggaagagcggctgccagagtgtgaatatacccctcagggatatacagcggagtttcatgataaactacccatactttcccaaaaaaggttgaggagcaatacataactttgcagattacaaacccttgttttactttttaaaccttttttccatactctgcttattggaaatcgatggctgtgatgtgaccaacacctgtgatgatagcaaagcccctcctttcacagtctcctgactgttcggggaacctccttggtcattggtagaaagctttagaaaagacttagctttttagggaagaactaaaaaatctccaaaacatactagtcccatgacttcgataactgaaaatgtcctgggtgtaaactaacccaggaatgtggatcatacatgttttttttaaaaaaaatccctgaatcaatattttcctacaacacaccctaaaattcctatttttgtaattaatggttggacagtgatcagccatttaaacataggctttctggaataaccagacactagaatagtttccaaagtgttttgcgtatcaaaatcctatatacttagaagaagaactcaggataagaaaaaatcgctaggtcccaaagggttcatgactatcatcagatgcaactgcgagtggcctacggtcattttttcaaatgagaagactggagagagagaacaacagtaatcacaaaacctctgttgcccttagtccatgacaatgtttaaggaaactttaaaaaattaagccatcttctgaattgttttctacaccaaatctaaaatattaaaatgaaattattaaatatttaaaatggggtatttagtggaaatgcaatcagtagaaaacattgctttttagtgcctgctaaacaagtaaaggagaaagaatgaagagaaaacagcagtccttcctgtgtgacactcgtgtggaaatgacaggcattcacatgtcattgagtgctaactcaaaagctaggtggcaatgctgtccaatgtttagagatcttttgaaatataattttaccaccattcagaggtaagtacttgcttaacagaagtctttaatgttagtgaatgaatgtataaaattataaactatgcattttcaaagagtagcatgtattttgtatcgaatccaagtaaatttttttcatagctacctaccacaactgcaaattattcaaaataaacttggatacatatccttatggggatatgggaagcccatctatattctcctacttgatgtttttaaagattgaaactttattctgaaacatcaggctctaaaaaattccatcattaagatgaataaatgggaaatggtttatttgttacttcgtaagcataaatgggaaatgttggctgttagaaaatgtgcccagttctttaaaggtggatgttctagtaacactggattaacaagcaaacaaaactgcatgaagtgaacgaatatttcattggataaagttagcataggttttatctgctgggtttaattctcaatcccagaaaaaaatattcttcaaggggtatcagttatagtttcaaagaacaaaatatgaaaatattgtccagcaaagcaaatcattgatcttttttcaaaattacttatattttggaaagtctatatagaatatccacaaatttcttcagccctcttgttgatttcatattttcatgaaactttttcccctaataatttgtcttcgctctttaatcagtgctttactacattactcagcctgaaaaaatatcttttccttcatctgacaatgtggaaataaagaactccatttctgtcattctggttctcttcagtgtccattgagaaagtttctcaactgtttgtaaaatacggggggaaaaaaacacgcatttctaaacctggtacttaaggttatactggattgtttgctacctaattagaagttattggggaaggggcattgtgtctttttatatgatttttagccaaatccagatgttctgatacacatttctgaatacctgtctgactgtaaatacagcctgtggaggttcaggttgataaacctttcacctgactgctccacagccatgctccttgccagcttctggcacattgtacatagatttgttgaatgtttaaatgatgttgtttttctaaatgctgttctctaaaacaattttttgaatttcttttgctttccattgttttggactttgtgtgttcgttttttaaaaaaaaaaatgtttcctaaatatttaacaccaggaaaaatatttttaaatacactggtgctaattgaaacagaaggaaattttcagatcgaagatgtacaatgttaaatgttcataccagttaaactgcactttcccaaggggacagctggcatctacttgaaatgggcatcaagagaccaccaaatgtttacagtttctgtggcccgtttaagtgtaaaatgcagaagtggctctgtccccccagagttaaggatttgctacactggtcctctggaagcatttaagtagaagaaaaggcttatagtcagaatcactttagtaatcgtcttctggtccttggacttttctgttctgtaatgcttgtaacaatgaatatggtgttgccaatctagtctgatatcattgttgacctgtacttactttgtggatggttctacctggggttgcactggcacaaacagagccagaacactggactttcaaaagaccattttgacttctacagtgtccacacacatgaatttaaatgcacttgtaactggttaattaccatgaagtaagtctaacttccacttaataaaagtttttgtgtatctgcttctaaaaaaaaaaa

SEQ ID NO: 736459 - DNA, 8596 bp, Homo sapiens
gcacgaggactcacgtaaggctttttctgaatgtaattgtgaatacaaagccttgctggtcctttttatcattacccaatggatgactgtttattagctatcagcagaattccgtaggcgaaagcaagccgtgaacgatgtacattttgctttaatagcatgttagcgaacaaacttccatggacttttgtggacaaggtgctgctttttctcatgaccctgtagaattgctatcgaccacatcttctgtagcactgacctgtgtgaactcagggaagaatttgtgcatacaaatgagtggaaacagagcaggattcatgaatatgaatgagaatgtgaatcattttggagaatgccctgggcacacgggtcaactggaaatttcatttctctaagaaagtagccctaccagcggcacggactgttcctgttcctcatacctgtggggattcctccatattggaactgtttcatgtatcttttttgcattgtaactagccaaacctgaagtcagtaaataaaatgagattagcactttttttaggtaccagttgtatcactgagtaatgcacaccaatagagcaagaaagtataaaatgtatttaagaccaactggtttgcttattatgactgactttgaaaaagcccatatccaatgatatacatgctttaaaaggtatatctatcgtaggaccaggaaccaaaatgggaattttacttctggtcctgttttgtaaatagttcctttttttgaagacaatctcatgttttataacttttgttgtgggtctgagaatcacaatggtaatatgtcttggcaaaacataacctttaaatacaaaaacaattataacttaattttccaaataaaacaagaaatacactgattaggcttctacagttctaagagacatgacactttggtaataagcgtcagtactctacttctcaagttaactggaaatattttacaagatgcagtgttttgtaatcacaaagaacgcagacattttgtgagaaatgaccttggttttatacattgtagcttattttttaaaatatagtattttaccaggcaggaagtattaatattataagtaattcttgctcaccaaacaaagggctatgtctcttttaagcaaatgttttgatgcatatctttttaattaaccctctgcagcaagggtagaaatacagatcagatggaatgggtattataggagaatcaagatagcaacagctactccttttaccattactagtgtgttttcaaagtatggaaaaagatgcctgaagagtcattttatatattttaaatctaaaaagtgttaacaggtatgcttataggccatgggagaaatattcttataaattttttagtgtaaaatgataaattctgtgtcacaaagacaagtttaccacttgacctaccagaatcacagatacttgcatttaactagcaagtatcatttggtggaaatttctaaaatcatagtagacaggcccaaagatagaattcttaggtgatcagtagtgtttaaaataattttgtcctcagcactaactatataactgtaatttctacataagaacaagtgcttccaaaatatagtggagggaaaaaataaaaaaggaaaataaaaaaacaaaacaaaaagaacaagtgcttgatttttcactgtgaagaactagcaggcacatgaggttgtgatcagaaagtgactgagttcccaagaaccaggaaacagaggggagttgtgaagagtttattaaaactgtacaaataattcagagctttgccaaaaccatttcataatgctgtacagttttttcaagcccactcactgttaaaacaagaaagcaccttttctttctaagattttagtaatccaaaagctagcctaattagccaagtatgcagataacatcaaaagcaaagctgagatagaacagccatacacccgttgggcagctcttatgaggtggtcagaaggtcactcagaccttggtttcaaataggctttagaatctgcacacttgaggactagaaatgcacagagttagggaaagccatgtacaggcttggctcctagtctttgagatgaggcgtcttgcaaatctctgttttcactccttggaatgtctccattgttagcattaaagtccccaagaagtttttattgctgtacggttttgaacccaatgagtctcatttccaaaagattcctaattctatataggagaggttgcaaatgtcagtgcctcagaaggaccaggcaagttctgtaaatgattgatgtggataaggcaaagaggaacacaagaatggtggagaccaggttgaactgcagaacacatgccctctttgaaggggtgcccacactcagctctagacaatcagaaccatgcagaaatcaggcccagggctgctagatcttctgacgtggaagtatgatattacctgacacgtaagttttgacaactaactcaaactcttggccaacactgtgcagaccaaagagaagctgtacacagacaggtgcagcctgcagcccccagtttcaactattgggaaaagtggatttcacattccacagttgtcaggtcaggttcatccatcagccccacaaactcacatgtcggcactatctgggcaactaaaataaaagaggggaaagagatcatttctccccagatatcattctcatggcagacttgaatatagatacgctgagttatccagctctctcactctgcctccttttggcatgcccaggctgtgccccgtaaagtgttgaatcactgttatcctaattttcttagtgttttctaccgtggccactgtgatgaggggctggcaaagagcagcctcgtgccttccgagaaggctgccaggagcctctgaagcttgaagcgagcacacattgcctccttgtgccaaagcccttggccagcctccccacactccttccctctccatccggcctcatgagtcttcgttaccaagtaaaattaccactgcttcacctctgatacagcagaagccttgcttcagaactggtaggcatttaggctatttcagagtgtccactaacctcaaaaggaggtttttccacatacaaaaccctagcatctttgaggggaaagcaaaatgagaataaattatgtcatgaaaaaaattagaagttgcttccttcatttagatggactaagttattttaaactctatcttacatcagagtcctgatggtgttgggatagtcactgaccctttcacgtatgtaataagatacgtctcgttcacacactatttcatttgatctttgtaagaacccagtgtagaataggaatatttaaaatcaacattacccacctccaaggccaacccagagtagtcttgaacctgagtcagcctcagtattgcttgcaaggaagagggaaggggctcattaaaggcctggctcaaaccttagtcttccagactgactagggacgtaagaagacccagggacccaccatgttctcaaaccatctattcagtccaggcctttcagcatagacataaagagcccacccgttactcagtcatgttgccaagtgcaaactgatttatccccagatgaatccctttactgtagcagatccctaatccctaaatttcagccaatttggtagttaattataggagtttattagctaaatgtatgttctgagtaaaagttttgactctttggggaaaatttattttgctgctagcatacaacatttgctatgtatataaacttaagtcaatgccagaaattttaaaaccagctcaaatttataatctgtaatgatcaaatcaaaacatactgtaaactcagagttggaaacgcctggtaatatggttaagtcatgtttaaatatgaatgcaatttaaatgacattggcaatgcctgagatttctttcattgtgaatgattaaaaggcagtccaatatatgaatggatttcatcttacctttctcccgttaatttactaggtgtaacatcttgagtgtaaagtcattcacaggcagttgggttgtggagctagaaggagcctcaaaaaaaaactttttggccagactcctacatcatgaacagggtttttgatgaataatatttattattatgtttctaaagtaatacagtgttggagaatgaaacagtttagtcctttcctcttctgatggaaaagaatcatagcgccgttgccatgacaataacaggatgtagaaagacccatgaagaaagaaagaagaaagctatggttccgaaagcaggtaaccacagattttgaaaggaggcagagatggtgattaaactgtagtccttgttttttaaaatgttctttcatgttaggcaccaccacatagttaataactaccaacttctaaagagaagatccccttgatttatttatatcatgaaaatactaaaaatcaattctcaagtctaattaactattacattatcttgctaggtccttttccctaaatttttaattcagaaaattaaccagaattggccagatgcagtggttcacgcctataatcccagcactttgggagtccaaggcagatggatcacttgaggtcagtagttcaagaccagcctggccaacagaggaagaaagagtgaaaacaaaagaagaaagagggaaaccctgtctttactaaaaatacaaaaattagtcgggcgtggtggcgcacacctgtaattccagctacttgagaggctgaggcaggagaatcccttgaaactgcaggcagaggttgcagtgagccaagatttcactgctgcacctggggtgagactaccattaaggaaggaaatttcctttaaacagaaaaaaacaaaggtgctcatctatttcttctgaattctctctacatccttgacttaagaggaaaaccagcactcaagaaacagctttaaaagagaacagtccccattctagctaccagtcttgctttcccccatcttggcaagccccagtgaatttgccattgaaagattaccctcccctttgccctcatctgcctgagctagaggccaggctgttgttaatgttttttcagttccaaagcccctgatgggacattcttgtttctgtgctactgctttctctctcttaaattaaggtgcaaggggataaatattactataactgggatgtaaggctcagtcagtgtggctattccctcccttcgggggaaatattccatctgtctgaacggttttaggtgatcatgaggagagcggcttagtcacacagccagccacgctcatcacaaaagatttgttcagactcactgtaaagaatgacaaggcagatagctaatcctttcactgtgcctcaaagcccgccgtgcaagtcaccaaccctaccggtcctctccacgtgcgaggctaatagagtgatcagaaccaggaatgtgagctgggttccaccttaggaggggacaatgaggacagagcaagagggctccatgtttaattactccaggctctgacttctgcccacaattacagagcatgaaagcagaattggcctttagtaagtgaaaaggaagtggctcctgcagcatataattgttataatttcgtatttatggaaagagaaaaggacttcagtccactcatgttgttaagcacttgtccctcactccactggagcccccttcctatgttttgggcacagatggctgggaccgagaggaaagaggaagagcggctgccagagtgtgaatatacccctcagggatatacagcggagtttcatgataaactacccatactttcccaaaaaaggttgaggagcaatacataactttgcagattacaaacccttgttttactttttaaaccttttttccatactctgcttattggaaatcgatggctgtgatgtgaccaacacctgtgatgatagcaaagcccctcctttcacagtctcctgactgttcggggaacctccttggtcattggtagaaagctttagaaaagacttagctttttagggaagaactaaaaaatctccaaaacatactagtcccatgacttcgataactgaaaatgtcctgggtgtaaactaacccaggaatgtggatcatacatgttttttttaaaaaaaatccctgaatcaatattttcctacaacacaccctaaaattcctatttttgtaattaatggttggacagtgatcagccatttaaacataggctttctggaataaccagacactagaatagtttccaaagtgttttgcgtatcaaaatcctatatacttagaagaagaactcaggataagaaaaaatcgctaggtcccaaagggttcatgactatcatcagatgcaactgcgagtggcctacggtcattttttcaaatgagaagactggagagagagaacaacagtaatcacaaaacctctgttgcccttagtccatgacaatgtttaaggaaactttaaaaaattaagccatcttctgaattgttttctacaccaaatctaaaatattaaaatgaaattattaaatatttaaaatggggtatttagtggaaatgcaatcagtagaaaacattgctttttagtgcctgctaaacaagtaaaggagaaagaatgaagagaaaacagcagtccttcctgtgtgacactcgtgtggaaatgacaggcattcacatgtcattgagtgctaactcaaaagctaggtggcaatgctgtccaatgtttagagatcttttgaaatataattttaccaccattcagaggtaagtacttgcttaacagaagtctttaatgttagtgaatgaatgtataaaattataaactatgcattttcaaagagtagcatgtattttgtatcgaatccaagtaaatttttttcatagctacctaccacaactgcaaattattcaaaataaacttggatacatatccttatggggatatgggaagcccatctatattctcctacttgatgtttttaaagattgaaactttattctgaaacatcaggctctaaaaaattccatcattaagatgaataaatgggaaatggtttatttgttacttcgtaagcataaatgggaaatgttggctgttagaaaatgtgcccagttctttaaaggtggatgttctagtaacactggattaacaagcaaacaaaactgcatgaagtgaacgaatatttcattggataaagttagcataggttttatctgctgggtttaattctcaatcccagaaaaaaatattcttcaaggggtatcagttatagtttcaaagaacaaaatatgaaaatattgtccagcaaagcaaatcattgatcttttttcaaaattacttatattttggaaagtctatatagaatatccacaaatttcttcagccctcttgttgatttcatattttcatgaaactttttcccctaataatttgtcttcgctctttaatcagtgctttactacattactcagcctgaaaaaatatcttttccttcatctgacaatgtggaaataaagaactccatttctgtcattctggttctcttcagtgtccattgagaaagtttctcaactgtttgtaaaatacggggggaaaaaaacacgcatttctaaacctggtacttaaggttatactggattgtttgctacctaattagaagttattggggaaggggcattgtgtctttttatatgatttttagccaaatccagatgttctgatacacatttctgaatacctgtctgactgtaaatacagcctgtggaggttcaggttgataaacctttcacctgactgctccacagccatgctccttgccagcttctggcacattgtacatagatttgttgaatgtttaaatgatgttgtttttctaaatgctgttctctaaaacaattttttgaatttcttttgctttccattgttttggactttgtgtgttcgttttttaaaaaaaaaaatgtttcctaaatatttaacaccaggaaaaatatttttaaatacactggtgctaattgaaacagaaggaaattttcagatcgaagatgtacaatgttaaatgttcataccagttaaactgcactttcccaaggggacagctggcatctacttgaaatgggcatcaagagaccaccaaatgtttacagtttctgtggcccgtttaagtgtaaaatgcagaagtggctctgtccccccagagttaaggatttgctacactggtcctctggaagcatttaagtagaagaaaaggcttatagtcagaatcactttagtaatcgtcttctggtccttggacttttctgttctgtaatgcttgtaacaatgaatatggtgttgccaatctagtctgatatcattgttgacctgtacttactttgtggatggttctacctggggttgcactggcacaaacagagccagaacactggactttcaaaagaccattttgacttctacagtgtccacacacatgaatttaaatgcacttgtaactggttaattaccatgaagtaagtctaacttccacttaataaaagtttttgtgtatctgcttctaaaaaaaaaaa

SEQ ID NO: 736460 - DNA, 7780 bp, Homo sapiens
gcacgaggactcacgtaaggctttttctgaatgtaattgtgaatacaaagccttgctggtcctttttatcattacccaatggatgactgtttattagctatcagcagaattccgtaggcgaaagcaagccgtgaacgatgtacattttgctttaatagcatgttagcgaacaaacttccatggacttttgtggacaaggtgctgctttttctcatgaccctgtagaattgctatcgaccacatcttctgtagcactgacctgtgtgaactcagggaagaatttgtgcatacaaatgagtggaaacagagcaggattcatgaatatgaatgagaatgtgaatcattttggagaatgccctgggcacacgggtcaactggaaatttcatttctctaagaaagtagccctaccagcggcacggactgttcctgttcctcatacctgtggggattcctccatattggaactgtttcatgtatcttttttgcattgtaactagccaaacctgaagtcagtaaataaaatgagattagcactttttttaggtaccagttgtatcactgagtaatgcacaccaatagagcaagaaagtataaaatgtatttaagaccaactggtttgcttattatgactgactttgaaaaagcccatatccaatgatatacatgctttaaaaggtatatctatcgtaggaccaggaaccaaaatgggaattttacttctggtcctgttttgtaaatagttcctttttttgaagacaatctcatgttttataacttttgttgtgggtctgagaatcacaatggtaatatgtcttggcaaaacataacctttaaatacaaaaacaattataacttaattttccaaataaaacaagaaatacactgattaggcttctacagttctaagagacatgacactttggtaataagcgtcagtactctacttctcaagttaactggaaatattttacaagatgcagtgttttgtaatcacaaagaacgcagacattttgtgagaaatgaccttggttttatacattgtagcttattttttaaaatatagtattttaccaggcaggaagtattaatattataagtaattcttgctcaccaaacaaagggctatgtctcttttaagcaaatgttttgatgcatatctttttaattaaccctctgcagcaagggtagaaatacagatcagatggaatgggtattataggagaatcaagatagcaacagctactccttttaccattactagtgtgttttcaaagtatggaaaaagatgcctgaagagtcattttatatattttaaatctaaaaagtgttaacaggtatgcttataggccatgggagaaatattcttataaattttttagtgtaaaatgataaattctgtgtcacaaagacaagtttaccacttgacctaccagaatcacagatacttgcatttaactagcaagtatcatttggtggaaatttctaaaatcatagtagacaggcccaaagatagaattcttaggtgatcagtagtgtttaaaataattttgtcctcagcactaactatataactgtaatttctacataagaacaagtgcttccaaaatatagtggagggaaaaaataaaaaaggaaaataaaaaaacaaaacaaaaagaacaagtgcttgatttttcactgtgaagaactagcaggcacatgaggttgtgatcagaaagtgactgagttcccaagaaccaggaaacagaggggagttgtgaagagtttattaaaactgtacaaataattcagagctttgccaaaaccatttcataatgctgtacagttttttcaagcccactcactgttaaaacaagaaagcaccttttctttctaagattttagtaatccaaaagctagcctaattagccaagtatgcagataacatcaaaagcaaagctgagatagaacagccatacacccgttgggcagctcttatgaggtggtcagaaggtcactcagaccttggtttcaaataggctttagaatctgcacacttgaggactagaaatgcacagagttagggaaagccatgtacaggcttggctcctagtctttgagatgaggcgtcttgcaaatctctgttttcactccttggaatgtctccattgttagcattaaagtccccaagaagtttttattgctgtacggttttgaacccaatgagtctcatttccaaaagattcctaattctatataggagaggttgcaaatgtcagtgcctcagaaggaccaggcaagttctgtaaatgattgatgtggataaggcaaagaggaacacaagaatggtggagaccaggttgaactgcagaacacatgccctctttgaaggggtgcccacactcagctctagacaatcagaaccatgcagaaatcaggcccagggctgctagatcttctgacgtggaagtatgatattacctgacacgtaagttttgacaactaactcaaactcttggccaacactgtgcagaccaaagagaagctgtacacagacaggtgcagcctgcagcccccagtttcaactattgggaaaagtggatttcacattccacagttgtcaggtcaggttcatccatcagccccacaaactcacatgtcggcactatctgggcaactaaaataaaagaggggaaagagatcatttctccccagatatcattctcatggcagacttgaatatagatacgctgagttatccagctctctcactctgcctccttttggcatgcccaggctgtgccccgtaaagtgttgaatcactgttatcctaattttcttagtgttttctaccgtggccactgtgatgaggggctggcaaagagcagcctcgtgccttccgagaaggctgccaggagcctctgaagcttgaagcgagcacacattgcctccttgtgccaaagcccttggccagcctccccacactccttccctctccatccggcctcatgagtcttcgttaccaagtaaaattaccactgcttcacctctgatacagcagaagccttgcttcagaactggtaggcatttaggctatttcagagtgtccactaacctcaaaaggaggtttttccacatacaaaaccctagcatctttgaggggaaagcaaaatgagaataaattatgtcatgaaaaaaattagaagttgcttccttcatttagatggactaagttattttaaactctatcttacatcagagtcctgatggtgttgggatagtcactgaccctttcacgtatgtaataagatacgtctcgttcacacactatttcatttgatctttgtaagaacccagtgtagaataggaatatttaaaatcaacattacccacctccaaggccaacccagagtagtcttgaacctgagtcagcctcagtattgcttgcaaggaagagggaaggggctcattaaaggcctggctcaaaccttagtcttccagactgactagggacgtaagaagacccagggacccaccatgttctcaaaccatctattcagtccaggcctttcagcatagacataaagagcccacccgttactcagtcatgttgccaagtgcaaactgatttatccccagatgaatccctttactgtagcagatccctaatccctaaatttcagccaatttggtagttaattataggagtttattagctaaatgtatgttctgagtaaaagttttgactctttggggaaaatttattttgctgctagcatacaacatttgctatgtatataaacttaagtcaatgccagaaattttaaaaccagctcaaatttataatctgtaatgatcaaatcaaaacatactgtaaactcagagttggaaacgcctggtaatatggttaagtcatgtttaaatatgaatgcaatttaaatgacattggcaatgcctgagatttctttcattgtgaatgattaaaaggcagtccaatatatgaatggatttcatcttacctttctcccgttaatttactaggtgtaacatcttgagtgtaaagtcattcacaggcagttgggttgtggagctagaaggagcctcaaaaaaaaactttttggccagactcctacatcatgaacagggtttttgatgaataatatttattattatgtttctaaagtaatacagtgttggagaatgaaacagtttagtcctttcctcttctgatggaaaagaatcatagcgccgttgccatgacaataacaggatgtagaaagacccatgaagaaagaaagaagaaagctatggttccgaaagcaggtaaccacagattttgaaaggaggcagagatggtgattaaactgtagtccttgttttttaaaatgttctttcatgttaggcaccaccacatagttaataactaccaacttctaaagagaagatccccttgatttatttatatcatgaaaatactaaaaatcaattctcaagtctaattaactattacattatcttgctaggtccttttccctaaatttttaattcagaaaattaaccagaattggccagatgcagtggttcacgcctataatcccagcactttgggagtccaaggcagatggatcacttgaggtcagtagttcaagaccagcctggccaacagaggaagaaagagtgaaaacaaaagaagaaagagggaaaccctgtctttactaaaaatacaaaaattagtcgggcgtggtggcgcacacctgtaattccagctacttgagaggctgaggcaggagaatcccttgaaactgcaggcagaggttgcagtgagccaagatttcactgctgcacctggggtgagactaccattaaggaaggaaatttcctttaaacagaaaaaaacaaaggtgctcatctatttcttctgaattctctctacatccttgacttaagaggaaaaccagcactcaagaaacagctttaaaagagaacagtccccattctagctaccagtcttgctttcccccatcttggcaagccccagtgaatttgccattgaaagattaccctcccctttgccctcatctgcctgagctagaggccaggctgttgttaatgttttttcagttccaaagcccctgatgggacattcttgtttctgtgctactgctttctctctcttaaattaaggtgcaaggggataaatattactataactgggatgtaaggctcagtcagtgtggctattccctcccttcgggggaaatattccatctgtctgaacggttttaggtgatcatgaggagagcggcttagtcacacagccagccacgctcatcacaaaagatttgttcagactcactgtaaagaatgacaaggcagatagctaatcctttcactgtgcctcaaagcccgccgtgcaagtcaccaaccctaccggtcctctccacgtgcgaggctaatagagtgatcagaaccaggaatgtgagctgggttccaccttaggaggggacaatgaggacagagcaagagggctccatgtttaattactccaggctctgacttctgcccacaattacagagcatgaaagcagaattggcctttagtaagtgaaaaggaagtggctcctgcagcatataattgttataatttcgtatttatggaaagagaaaaggacttcagtccactcatgttgttaagcacttgtccctcactccactggagcccccttcctatgttttgggcacagatggctgggaccgagaggaaagaggaagagcggctgccagagtgtgaatatacccctcagggatatacagcggagtttcatgataaactacccatactttcccaaaaaaggttgaggagcaatacataactttgcagattacaaacccttgttttactttttaaaccttttttccatactctgcttattggaaatcgatggctgtgatgtgaccaacacctgtgatgatagcaaagcccctcctttcacagtctcctgactgttcggggaacctccttggtcattggtagaaagctttagaaaagacttagctttttagggaagaactaaaaaatctccaaaacatactagtcccatgacttcgataactgaaaatgtcctgggtgtaaactaacccaggaatgtggatcatacatgttttttttaaaaaaaatccctgaatcaatattttcctacaacacaccctaaaattcctatttttgtaattaatggttggacagtgatcagccatttaaacataggctttctggaataaccagacactagaatagtttccaaagtgttttgcgtatcaaaatcctatatacttagaagaagaactcaggataagaaaaaatcgctaggtcccaaagggttcatgactatcatcagatgcaactgcgagtggcctacggtcattttttcaaatgagaagactggagagagagaacaacagtaatcacaaaacctctgttgcccttagtccatgacaatgtttaaggaaactttaaaaaattaagccatcttctgaattgttttctacaccaaatctaaaatattaaaatgaaattattaaatatttaaaatggggtatttagtggaaatgcaatcagtagaaaacattgctttttagtgcctgctaaacaagtaaaggagaaagaatgaagagaaaacagcagtccttcctgtgtgacactcgtgtggaaatgacaggcattcacatgtcattgagtgctaactcaaaagctaggtggcaatgctgtccaatgtttagagatcttttgaaatataattttaccaccattcagaggtaagtacttgcttaacagaagtctttaatgttagtgaatgaatgtataaaattataaactatgcattttcaaagagtagcatgtattttgtatcgaatccaagtaaatttttttcatagctacctaccacaactgcaaattattcaaaataaacttggatacatatccttatggggatatgggaagcccatctatattctcctacttgatgtttttaaagattgaaactttattctgaaacatcaggctctaaaaaattccatcattaagatgaataaatgggaaatggtttatttgttacttcgtaagcataaatgggaaatgttggctgttagaaaatgtgcccagttctttaaaggtggatgttctagtaacactggattaacaagcaaacaaaactgcatgaagtgaacgaatatttcattggataaagttagcataggttttatctgctgggtttaattctcaatcccagaaaaaaatattcttcaaggggtatcagttatagtttcaaagaacaaaatatgaaaatattgtccagcaaagcaaatcattgatcttttttcaaaattacttatattttggaaagtctatatagaatatccacaaatttcttcagccctcttgttgatttcatattttcatgaaactttttcccctaataatttgtcttcgctctttaatcagtgctttactacattactcagcctgaaaaaatatcttttccttcatctgacaatgtggaaataaagaactccatttctgtcattctggttctcttcagtgtccattgagaaagtttctcaactgtttgtaaaatacggggggaaaaaaacacgcatttctaaacctggtacttaaggttatactggattgtttgctacctaattagaagttattggggaaggggcattgtgtctttttatatgatttttagccaaatccagatgttctgatacgttatgagggatcctctagacgcctcc

SEQ ID NO: 736461 - DNA, 8566 bp, Homo sapiens
gcacgaggactcacgtaaggctttttctgaatgtaattgtgaatacaaagccttgctggtcctttttatcattacccaatggatgactgtttattagctatcagcagaattccgtaggcgaaagcaagccgtgaacgatgtacattttgctttaatagcatgttagcgaacaaacttccatggacttttgtggacaaggtgctgctttttctcatgaccctgtagaattgctatcgaccacatcttctgtagcactgacctgtgtgaactcagggaagaatttgtgcatacaaatgagtggaaacagagcaggattcatgaatatgaatgagaatgtgaatcattttggagaatgccctgggcacacgggtcaactggaaatttcatttctctaagaaagtagccctaccagcggcacggactgttcctgttcctcatacctgtggggattcctccatattggaactgtttcatgtatcttttttgcattgtaactagccaaacctgaagtcagtaaataaaatgagattagcactttttttaggtaccagttgtatcactgagtaatgcacaccaatagagcaagaaagtataaaatgtatttaagaccaactggtttgcttattatgactgactttgaaaaagcccatatccaatgatatacatgctttaaaaggtatatctatcgtaggaccaggaaccaaaatgggaattttacttctggtcctgttttgtaaatagttcctttttttgaagacaatctcatgttttataacttttgttgtgggtctgagaatcacaatggtaatatgtcttggcaaaacataacctttaaatacaaaaacaattataacttaattttccaaataaaacaagaaatacactgattaggcttctacagttctaagagacatgacactttggtaataagcgtcagtactctacttctcaagttaactggaaatattttacaagatgcagtgttttgtaatcacaaagaacgcagacattttgtgagaaatgaccttggttttatacattgtagcttattttttaaaatatagtattttaccaggcaggaagtattaatattataagtaattcttgctcaccaaacaaagggctatgtctcttttaagcaaatgttttgatgcatatctttttaattaaccctctgcagcaagggtagaaatacagatcagatggaatgggtattataggagaatcaagatagcaacagctactccttttaccattactagtgtgttttcaaagtatggaaaaagatgcctgaagagtcattttatatattttaaatctaaaaagtgttaacaggtatgcttataggccatgggagaaatattcttataaattttttagtgtaaaatgataaattctgtgtcacaaagacaagtttaccacttgacctaccagaatcacagatacttgcatttaactagcaagtatcatttggtggaaatttctaaaatcatagtagacaggcccaaagatagaattcttaggtgatcagtagtgtttaaaataattttgtcctcagcactaactatataactgtaatttctacataagaacaagtgcttccaaaatatagtggagggaaaaaataaaaaaggaaaataaaaaaacaaaacaaaaagaacaagtgcttgatttttcactgtgaagaactagcaggcacatgaggttgtgatcagaaagtgactgagttcccaagaaccaggaaacagaggggagttgtgaagagtttattaaaactgtacaaataattcagagctttgccaaaaccatttcataatgctgtacagttttttcaagcccactcactgttaaaacaagaaagcaccttttctttctaagattttagtaatccaaaagctagcctaattagccaagtatgcagataacatcaaaagcaaagctgagatagaacagccatacacccgttgggcagctcttatgaggtggtcagaaggtcactcagaccttggtttcaaataggctttagaatctgcacacttgaggactagaaatgcacagagttagggaaagccatgtacaggcttggctcctagtctttgagatgaggcgtcttgcaaatctctgttttcactccttggaatgtctccattgttagcattaaagtccccaagaagtttttattgctgtacggttttgaacccaatgagtctcatttccaaaagattcctaattctatataggagaggttgcaaatgtcagtgcctcagaaggaccaggcaagttctgtaaatgattgatgtggataaggcaaagaggaacacaagaatggtggagaccaggttgaactgcagaacacatgccctctttgaaggggtgcccacactcagctctagacaatcagaaccatgcagaaatcaggcccagggctgctagatcttctgacgtggaagtatgatattacctgacacgtaagttttgacaactaactcaaactcttggccaacactgtgcagaccaaagagaagctgtacacagacaggtgcagcctgcagcccccagtttcaactattgggaaaagtggatttcacattccacagttgtcaggtcaggttcatccatcagccccacaaactcacatgtcggcactatctgggcaactaaaataaaagaggggaaagagatcatttctccccagatatcattctcatggcagacttgaatatagatacgctgagttatccagctctctcactctgcctccttttggcatgcccaggctgtgccccgtaaagtgttgaatcactgttatcctaattttcttagtgttttctaccgtggccactgtgatgaggggctggcaaagagcagcctcgtgccttccgagaaggctgccaggagcctctgaagcttgaagcgagcacacattgcctccttgtgccaaagcccttggccagcctccccacactccttccctctccatccggcctcatgagtcttcgttaccaagtaaaattaccactgcttcacctctgatacagcagaagccttgcttcagaactggtaggcatttaggctatttcagagtgtccactaacctcaaaaggaggtttttccacatacaaaaccctagcatctttgaggggaaagcaaaatgagaataaattatgtcatgaaaaaaattagaagttgcttccttcatttagatggactaagttattttaaactctatcttacatcagagtcctgatggtgttgggatagtcactgaccctttcacgtatgtaataagatacgtctcgttcacacactatttcatttgatctttgtaagaacccagtgtagaataggaatatttaaaatcaacattacccacctccaaggccaacccagagtagtcttgaacctgagtcagcctcagtattgcttgcaaggaagagggaaggggctcattaaaggcctggctcaaaccttagtcttccagactgactagggacgtaagaagacccagggacccaccatgttctcaaaccatctattcagtccaggcctttcagcatagacataaagagcccacccgttactcagtcatgttgccaagtgcaaactgatttatccccagatgaatccctttactgtagcagatccctaatccctaaatttcagccaatttggtagttaattataggagtttattagctaaatgtatgttctgagtaaaagttttgactctttggggaaaatttattttgctgctagcatacaacatttgctatgtatataaacttaagtcaatgccagaaattttaaaaccagctcaaatttataatctgtaatgatcaaatcaaaacatactgtaaactcagagttggaaacgcctggtaatatggttaagtcatgtttaaatatgaatgcaatttaaatgacattggcaatgcctgagatttctttcattgtgaatgattaaaaggcagtccaatatatgaatggatttcatcttacctttctcccgttaatttactaggtgtaacatcttgagtgtaaagtcattcacaggcagttgggttgtggagctagaaggagcctcaaaaaaaaactttttggccagactcctacatcatgaacagggtttttgatgaataatatttattattatgtttctaaagtaatacagtgttggagaatgaaacagtttagtcctttcctcttctgatggaaaagaatcatagcgccgttgccatgacaataacaggatgtagaaagacccatgaagaaagaaagaagaaagctatggttccgaaagcaggtaaccacagattttgaaaggaggcagagatggtgattaaactgtagtccttgttttttaaaatgttctttcatgttaggcaccaccacatagttaataactaccaacttctaaagagaagatccccttgatttatttatatcatgaaaatactaaaaatcaattctcaagtctaattaactattacattatcttgctaggtccttttccctaaatttttaattcagaaaattaaccagaattggccagatgcagtggttcacgcctataatcccagcactttgggagtccaaggcagatggatcacttgaggtcagtagttcaagaccagcctggccaacagaggaagaaacctgtctttactaaaaatacaaaaattagtcgggcgtggtggcgcacacctgtaattccagctacttgagaggctgaggcaggagaatcccttgaaactgcaggcagaggttgcagtgagccaagatttcactgctgcacctggggtgagactaccattaaggaaggaaatttcctttaaacagaaaaaaacaaaggtgctcatctatttcttctgaattctctctacatccttgacttaagaggaaaaccagcactcaagaaacagctttaaaagagaacagtccccattctagctaccagtcttgctttcccccatcttggcaagccccagtgaatttgccattgaaagattaccctcccctttgccctcatctgcctgagctagaggccaggctgttgttaatgttttttcagttccaaagcccctgatgggacattcttgtttctgtgctactgctttctctctcttaaattaaggtgcaaggggataaatattactataactgggatgtaaggctcagtcagtgtggctattccctcccttcgggggaaatattccatctgtctgaacggttttaggtgatcatgaggagagcggcttagtcacacagccagccacgctcatcacaaaagatttgttcagactcactgtaaagaatgacaaggcagatagctaatcctttcactgtgcctcaaagcccgccgtgcaagtcaccaaccctaccggtcctctccacgtgcgaggctaatagagtgatcagaaccaggaatgtgagctgggttccaccttaggaggggacaatgaggacagagcaagagggctccatgtttaattactccaggctctgacttctgcccacaattacagagcatgaaagcagaattggcctttagtaagtgaaaaggaagtggctcctgcagcatataattgttataatttcgtatttatggaaagagaaaaggacttcagtccactcatgttgttaagcacttgtccctcactccactggagcccccttcctatgttttgggcacagatggctgggaccgagaggaaagaggaagagcggctgccagagtgtgaatatacccctcagggatatacagcggagtttcatgataaactacccatactttcccaaaaaaggttgaggagcaatacataactttgcagattacaaacccttgttttactttttaaaccttttttccatactctgcttattggaaatcgatggctgtgatgtgaccaacacctgtgatgatagcaaagcccctcctttcacagtctcctgactgttcggggaacctccttggtcattggtagaaagctttagaaaagacttagctttttagggaagaactaaaaaatctccaaaacatactagtcccatgacttcgataactgaaaatgtcctgggtgtaaactaacccaggaatgtggatcatacatgttttttttaaaaaaaatccctgaatcaatattttcctacaacacaccctaaaattcctatttttgtaattaatggttggacagtgatcagccatttaaacataggctttctggaataaccagacactagaatagtttccaaagtgttttgcgtatcaaaatcctatatacttagaagaagaactcaggataagaaaaaatcgctaggtcccaaagggttcatgactatcatcagatgcaactgcgagtggcctacggtcattttttcaaatgagaagactggagagagagaacaacagtaatcacaaaacctctgttgcccttagtccatgacaatgtttaaggaaactttaaaaaattaagccatcttctgaattgttttctacaccaaatctaaaatattaaaatgaaattattaaatatttaaaatggggtatttagtggaaatgcaatcagtagaaaacattgctttttagtgcctgctaaacaagtaaaggagaaagaatgaagagaaaacagcagtccttcctgtgtgacactcgtgtggaaatgacaggcattcacatgtcattgagtgctaactcaaaagctaggtggcaatgctgtccaatgtttagagatcttttgaaatataattttaccaccattcagaggtaagtacttgcttaacagaagtctttaatgttagtgaatgaatgtataaaattataaactatgcattttcaaagagtagcatgtattttgtatcgaatccaagtaaatttttttcatagctacctaccacaactgcaaattattcaaaataaacttggatacatatccttatggggatatgggaagcccatctatattctcctacttgatgtttttaaagattgaaactttattctgaaacatcaggctctaaaaaattccatcattaagatgaataaatgggaaatggtttatttgttacttcgtaagcataaatgggaaatgttggctgttagaaaatgtgcccagttctttaaaggtggatgttctagtaacactggattaacaagcaaacaaaactgcatgaagtgaacgaatatttcattggataaagttagcataggttttatctgctgggtttaattctcaatcccagaaaaaaatattcttcaaggggtatcagttatagtttcaaagaacaaaatatgaaaatattgtccagcaaagcaaatcattgatcttttttcaaaattacttatattttggaaagtctatatagaatatccacaaatttcttcagccctcttgttgatttcatattttcatgaaactttttcccctaataatttgtcttcgctctttaatcagtgctttactacattactcagcctgaaaaaatatcttttccttcatctgacaatgtggaaataaagaactccatttctgtcattctggttctcttcagtgtccattgagaaagtttctcaactgtttgtaaaatacggggggaaaaaaacacgcatttctaaacctggtacttaaggttatactggattgtttgctacctaattagaagttattggggaaggggcattgtgtctttttatatgatttttagccaaatccagatgttctgatacacatttctgaatacctgtctgactgtaaatacagcctgtggaggttcaggttgataaacctttcacctgactgctccacagccatgctccttgccagcttctggcacattgtacatagatttgttgaatgtttaaatgatgttgtttttctaaatgctgttctctaaaacaattttttgaatttcttttgctttccattgttttggactttgtgtgttcgttttttaaaaaaaaaaatgtttcctaaatatttaacaccaggaaaaatatttttaaatacactggtgctaattgaaacagaaggaaattttcagatcgaagatgtacaatgttaaatgttcataccagttaaactgcactttcccaaggggacagctggcatctacttgaaatgggcatcaagagaccaccaaatgtttacagtttctgtggcccgtttaagtgtaaaatgcagaagtggctctgtccccccagagttaaggatttgctacactggtcctctggaagcatttaagtagaagaaaaggcttatagtcagaatcactttagtaatcgtcttctggtccttggacttttctgttctgtaatgcttgtaacaatgaatatggtgttgccaatctagtctgatatcattgttgacctgtacttactttgtggatggttctacctggggttgcactggcacaaacagagccagaacactggactttcaaaagaccattttgacttctacagtgtccacacacatgaatttaaatgcacttgtaactggttaattaccatgaagtaagtctaacttccacttaataaaagtttttgtgtatctgcttctaaaaaaaaaaa

SEQ ID NO: 736462 - DNA, 1642 bp, Homo sapiens
gcacgaggactcacgtaaggctttttctgaatgtaattgtgaatacaaagccttgctggtcctttttatcattacccaatggatgactgtttattagctatcagcagaattccgtaggcgaaagcaagccgtgaacgatgtacattttgctttaatagcatgttagcgaacaaacttccatggacttttgtggacaaggtgctgctttttctcatgaccctgtagaattgctatcgaccacatcttctgtagcactgacctgtgtgaactcagggaagaatttgtgcatacaaatgagtggaaacagagcaggattcatgaatatgaatgagaatgtgaatcattttggagaatgccctgggcacacgggtcaactggaaatttcatttctctaagaaagtagccctaccagcggcacggactgttcctgttcctcatacctgtggggattcctccatattggaactgtttcatgtatcttttttgcattgtaactagccaaacctgaagtcagtaaataaaatgagattagcactttttttaggtaccagttgtatcactgagtaatgcacaccaatagagcaagaaagtataaaatgtatttaagaccaactggtttgcttattatgactgactttgaaaaagcccatatccaatgatatacatgctttaaaaggtatatctatcgtaggaccaggaaccaaaatgggaattttacttctggtcctgttttgtaaatagttcctttttttgaagacaatctcatgttttataacttttgttgtgggtctgagaatcacaatggtaatatgtcttggcaaaacataacctttaaatacaaaaacaattataacttaattttccaaataaaacaagaaatacactgattaggcttctacagttctaagagacatgacactttggtaataagcgtcagtactctacttctcaagttaactggaaatattttacaagatgcagtgttttgtaatcacaaagaacgcagacattttgtgagaaatgaccttggttttatacattgtagcttattttttaaaatatagtattttaccaggcaggaagtattaatattataagtaattcttgctcaccaaacaaagggctatgtctcttttaagcaaatgttttgatgcatatctttttaattaaccctctgcagcaagggtagaaatacagatcagatggaatgggtattataggagaatcaagatagcaacagctactccttttaccattactagtgtgttttcaaagtatggaaaaagatgcctgaagagtcattttatatattttaaatctaaaaagtgttaacaggtatgcttataggccatgggagaaatattcttataaattttttagtgtaaaatgataaattctgtgtcacaaagacaagtttaccacttgacctaccagaatcacagatacttgcatttaactagcaagtatcatttggtggaaatttctaaaatcatagtagacaggcccaaagatagaattcttaggtgatcagtagtgtttaaaataattttgtcctcagcactaactatataactgtaatttctacataagaacaagtgcttccaaaatatagtggagggtcgacgcggccgcgaatttagta

SEQ ID NO: 736463 - DNA, 8465 bp, Homo sapiens
caagaattggcacctgtagccatctggcatgttagcgaacaaacttccatggacttttgtggacaaggtgctgctttttctcatgaccctgtagaattgctatcgaccacatcttctgtagcactgacctgtgtgaactcagggaagaatttgtgcatacaaatgagtggaaacagagcaggattcatgaatatgaatgagaatgtgaatcattttggagaatgccctgggcacacgggtcaactggaaatttcatttctctaagaaagtagccctaccagcggcacggactgttcctgttcctcatacctgtggggattcctccatattggaactgtttcatgtatcttttttgcattgtaactagccaaacctgaagtcagtaaataaaatgagattagcactttttttaggtaccagttgtatcactgagtaatgcacaccaatagagcaagaaagtataaaatgtatttaagaccaactggtttgcttattatgactgactttgaaaaagcccatatccaatgatatacatgctttaaaaggtatatctatcgtaggaccaggaaccaaaatgggaattttacttctggtcctgttttgtaaatagttcctttttttgaagacaatctcatgttttataacttttgttgtgggtctgagaatcacaatggtaatatgtcttggcaaaacataacctttaaatacaaaaacaattataacttaattttccaaataaaacaagaaatacactgattaggcttctacagttctaagagacatgacactttggtaataagcgtcagtactctacttctcaagttaactggaaatattttacaagatgcagtgttttgtaatcacaaagaacgcagacattttgtgagaaatgaccttggttttatacattgtagcttattttttaaaatatagtattttaccaggcaggaagtattaatattataagtaattcttgctcaccaaacaaagggctatgtctcttttaagcaaatgttttgatgcatatctttttaattaaccctctgcagcaagggtagaaatacagatcagatggaatgggtattataggagaatcaagatagcaacagctactccttttaccattactagtgtgttttcaaagtatggaaaaagatgcctgaagagtcattttatatattttaaatctaaaaagtgttaacaggtatgcttataggccatgggagaaatattcttataaattttttagtgtaaaatgataaattctgtgtcacaaagacaagtttaccacttgacctaccagaatcacagatacttgcatttaactagcaagtatcatttggtggaaatttctaaaatcatagtagacaggcccaaagatagaattcttaggtgatcagtagtgtttaaaataattttgtcctcagcactaactatataactgtaatttctacataagaacaagtgcttccaaaatatagtggagggaaaaaataaaaaaggaaaataaaaaaacaaaacaaaaagaacaagtgcttgatttttcactgtgaagaactagcaggcacatgaggttgtgatcagaaagtgactgagttcccaagaaccaggaaacagaggggagttgtgaagagtttattaaaactgtacaaataattcagagctttgccaaaaccatttcataatgctgtacagttttttcaagcccactcactgttaaaacaagaaagcaccttttctttctaagattttagtaatccaaaagctagcctaattagccaagtatgcagataacatcaaaagcaaagctgagatagaacagccatacacccgttgggcagctcttatgaggtggtcagaaggtcactcagaccttggtttcaaataggctttagaatctgcacacttgaggactagaaatgcacagagttagggaaagccatgtacaggcttggctcctagtctttgagatgaggcgtcttgcaaatctctgttttcactccttggaatgtctccattgttagcattaaagtccccaagaagtttttattgctgtacggttttgaacccaatgagtctcatttccaaaagattcctaattctatataggagaggttgcaaatgtcagtgcctcagaaggaccaggcaagttctgtaaatgattgatgtggataaggcaaagaggaacacaagaatggtggagaccaggttgaactgcagaacacatgccctctttgaaggggtgcccacactcagctctagacaatcagaaccatgcagaaatcaggcccagggctgctagatcttctgacgtggaagtatgatattacctgacacgtaagttttgacaactaactcaaactcttggccaacactgtgcagaccaaagagaagctgtacacagacaggtgcagcctgcagcccccagtttcaactattgggaaaagtggatttcacattccacagttgtcaggtcaggttcatccatcagccccacaaactcacatgtcggcactatctgggcaactaaaataaaagaggggaaagagatcatttctccccagatatcattctcatggcagacttgaatatagatacgctgagttatccagctctctcactctgcctccttttggcatgcccaggctgtgccccgtaaagtgttgaatcactgttatcctaattttcttagtgttttctaccgtggccactgtgatgaggggctggcaaagagcagcctcgtgccttccgagaaggctgccaggagcctctgaagcttgaagcgagcacacattgcctccttgtgccaaagcccttggccagcctccccacactccttccctctccatccggcctcatgagtcttcgttaccaagtaaaattaccactgcttcacctctgatacagcagaagccttgcttcagaactggtaggcatttaggctatttcagagtgtccactaacctcaaaaggaggtttttccacatacaaaaccctagcatctttgaggggaaagcaaaatgagaataaattatgtcatgaaaaaaattagaagttgcttccttcatttagatggactaagttattttaaactctatcttacatcagagtcctgatggtgttgggatagtcactgaccctttcacgtatgtaataagatacgtctcgttcacacactatttcatttgatctttgtaagaacccagtgtagaataggaatatttaaaatcaacattacccacctccaaggccaacccagagtagtcttgaacctgagtcagcctcagtattgcttgcaaggaagagggaaggggctcattaaaggcctggctcaaaccttagtcttccagactgactagggacgtaagaagacccagggacccaccatgttctcaaaccatctattcagtccaggcctttcagcatagacataaagagcccacccgttactcagtcatgttgccaagtgcaaactgatttatccccagatgaatccctttactgtagcagatccctaatccctaaatttcagccaatttggtagttaattataggagtttattagctaaatgtatgttctgagtaaaagttttgactctttggggaaaatttattttgctgctagcatacaacatttgctatgtatataaacttaagtcaatgccagaaattttaaaaccagctcaaatttataatctgtaatgatcaaatcaaaacatactgtaaactcagagttggaaacgcctggtaatatggttaagtcatgtttaaatatgaatgcaatttaaatgacattggcaatgcctgagatttctttcattgtgaatgattaaaaggcagtccaatatatgaatggatttcatcttacctttctcccgttaatttactaggtgtaacatcttgagtgtaaagtcattcacaggcagttgggttgtggagctagaaggagcctcaaaaaaaaactttttggccagactcctacatcatgaacagggtttttgatgaataatatttattattatgtttctaaagtaatacagtgttggagaatgaaacagtttagtcctttcctcttctgatggaaaagaatcatagcgccgttgccatgacaataacaggatgtagaaagacccatgaagaaagaaagaagaaagctatggttccgaaagcaggtaaccacagattttgaaaggaggcagagatggtgattaaactgtagtccttgttttttaaaatgttctttcatgttaggcaccaccacatagttaataactaccaacttctaaagagaagatccccttgatttatttatatcatgaaaatactaaaaatcaattctcaagtctaattaactattacattatcttgctaggtccttttccctaaatttttaattcagaaaattaaccagaattggccagatgcagtggttcacgcctataatcccagcactttgggagtccaaggcagatggatcacttgaggtcagtagttcaagaccagcctggccaacagaggaagaaagagtgaaaacaaaagaagaaagagggaaaccctgtctttactaaaaatacaaaaattagtcgggcgtggtggcgcacacctgtaattccagctacttgagaggctgaggcaggagaatcccttgaaactgcaggcagaggttgcagtgagccaagatttcactgctgcacctggggtgagactaccattaaggaaggaaatttcctttaaacagaaaaaaacaaaggtgctcatctatttcttctgaattctctctacatccttgacttaagaggaaaaccagcactcaagaaacagctttaaaagagaacagtccccattctagctaccagtcttgctttcccccatcttggcaagccccagtgaatttgccattgaaagattaccctcccctttgccctcatctgcctgagctagaggccaggctgttgttaatgttttttcagttccaaagcccctgatgggacattcttgtttctgtgctactgctttctctctcttaaattaaggtgcaaggggataaatattactataactgggatgtaaggctcagtcagtgtggctattccctcccttcgggggaaatattccatctgtctgaacggttttaggtgatcatgaggagagcggcttagtcacacagccagccacgctcatcacaaaagatttgttcagactcactgtaaagaatgacaaggcagatagctaatcctttcactgtgcctcaaagcccgccgtgcaagtcaccaaccctaccggtcctctccacgtgcgaggctaatagagtgatcagaaccaggaatgtgagctgggttccaccttaggaggggacaatgaggacagagcaagagggctccatgtttaattactccaggctctgacttctgcccacaattacagagcatgaaagcagaattggcctttagtaagtgaaaaggaagtggctcctgcagcatataattgttataatttcgtatttatggaaagagaaaaggacttcagtccactcatgttgttaagcacttgtccctcactccactggagcccccttcctatgttttgggcacagatggctgggaccgagaggaaagaggaagagcggctgccagagtgtgaatatacccctcagggatatacagcggagtttcatgataaactacccatactttcccaaaaaaggttgaggagcaatacataactttgcagattacaaacccttgttttactttttaaaccttttttccatactctgcttattggaaatcgatggctgtgatgtgaccaacacctgtgatgatagcaaagcccctcctttcacagtctcctgactgttcggggaacctccttggtcattggtagaaagctttagaaaagacttagctttttagggaagaactaaaaaatctccaaaacatactagtcccatgacttcgataactgaaaatgtcctgggtgtaaactaacccaggaatgtggatcatacatgttttttttaaaaaaaatccctgaatcaatattttcctacaacacaccctaaaattcctatttttgtaattaatggttggacagtgatcagccatttaaacataggctttctggaataaccagacactagaatagtttccaaagtgttttgcgtatcaaaatcctatatacttagaagaagaactcaggataagaaaaaatcgctaggtcccaaagggttcatgactatcatcagatgcaactgcgagtggcctacggtcattttttcaaatgagaagactggagagagagaacaacagtaatcacaaaacctctgttgcccttagtccatgacaatgtttaaggaaactttaaaaaattaagccatcttctgaattgttttctacaccaaatctaaaatattaaaatgaaattattaaatatttaaaatggggtatttagtggaaatgcaatcagtagaaaacattgctttttagtgcctgctaaacaagtaaaggagaaagaatgaagagaaaacagcagtccttcctgtgtgacactcgtgtggaaatgacaggcattcacatgtcattgagtgctaactcaaaagctaggtggcaatgctgtccaatgtttagagatcttttgaaatataattttaccaccattcagaggtaagtacttgcttaacagaagtctttaatgttagtgaatgaatgtataaaattataaactatgcattttcaaagagtagcatgtattttgtatcgaatccaagtaaatttttttcatagctacctaccacaactgcaaattattcaaaataaacttggatacatatccttatggggatatgggaagcccatctatattctcctacttgatgtttttaaagattgaaactttattctgaaacatcaggctctaaaaaattccatcattaagatgaataaatgggaaatggtttatttgttacttcgtaagcataaatgggaaatgttggctgttagaaaatgtgcccagttctttaaaggtggatgttctagtaacactggattaacaagcaaacaaaactgcatgaagtgaacgaatatttcattggataaagttagcataggttttatctgctgggtttaattctcaatcccagaaaaaaatattcttcaaggggtatcagttatagtttcaaagaacaaaatatgaaaatattgtccagcaaagcaaatcattgatcttttttcaaaattacttatattttggaaagtctatatagaatatccacaaatttcttcagccctcttgttgatttcatattttcatgaaactttttcccctaataatttgtcttcgctctttaatcagtgctttactacattactcagcctgaaaaaatatcttttccttcatctgacaatgtggaaataaagaactccatttctgtcattctggttctcttcagtgtccattgagaaagtttctcaactgtttgtaaaatacggggggaaaaaaacacgcatttctaaacctggtacttaaggttatactggattgtttgctacctaattagaagttattggggaaggggcattgtgtctttttatatgatttttagccaaatccagatgttctgatacacatttctgaatacctgtctgactgtaaatacagcctgtggaggttcaggttgataaacctttcacctgactgctccacagccatgctccttgccagcttctggcacattgtacatagatttgttgaatgtttaaatgatgttgtttttctaaatgctgttctctaaaacaattttttgaatttcttttgctttccattgttttggactttgtgtgttcgttttttaaaaaaaaaaatgtttcctaaatatttaacaccaggaaaaatatttttaaatacactggtgctaattgaaacagaaggaaattttcagatcgaagatgtacaatgttaaatgttcataccagttaaactgcactttcccaaggggacagctggcatctacttgaaatgggcatcaagagaccaccaaatgtttacagtttctgtggcccgtttaagtgtaaaatgcagaagtggctctgtccccccagagttaaggatttgctacactggtcctctggaagcatttaagtagaagaaaaggcttatagtcagaatcactttagtaatcgtcttctggtccttggacttttctgttctgtaatgcttgtaacaatgaatatggtgttgccaatctagtctgatatcattgttgacctgtacttactttgtggatggttctacctggggttgcactggcacaaacagagccagaacactggactttcaaaagaccattttgacttctacagtgtccacacacatgaatttaaatgcacttgtaactggttaattaccatgaagtaagtctaacttccacttaataaaagtttttgtgtatctgcttctaaaaaaaaaaa

SEQ ID NO: 736464 - DNA, 3218 bp, Homo sapiens
ccccagctatgtatacgtacgatgccgggtgttaatcaggccgcaggtgcgaggctaatagagtgatcagaaccaggaatgtgagctgggttccaccttaggaggggacaatgaggacagagcaagagggctccatgtttaattactccaggctctgacttctgcccacaattacagagcatgaaagcagaattggcctttagtaagtgaaaaggaagtggctcctgcagcatataattgttataatttcgtatttatggaaagagaaaaggacttcagtccactcatgttgttaagcacttgtccctcactccactggagcccccttcctatgttttgggcacagatggctgggaccgagaggaaagaggaagagcggctgccagagtgtgaatatacccctcagggatatacagcggagtttcatgataaactacccatactttcccaaaaaaggttgaggagcaatacataactttgcagattacaaacccttgttttactttttaaaccttttttccatactctgcttattggaaatcgatggctgtgatgtgaccaacacctgtgatgatagcaaagcccctcctttcacagtctcctgactgttcggggaacctccttggtcattggtagaaagctttagaaaagacttagctttttagggaagaactaaaaaatctccaaaacatactagtcccatgacttcgataactgaaaatgtcctgggtgtaaactaacccaggaatgtggatcatacatgttttttttaaaaaaaatccctgaatcaatattttcctacaacacaccctaaaattcctatttttgtaattaatggttggacagtgatcagccatttaaacataggctttctggaataaccagacactagaatagtttccaaagtgttttgcgtatcaaaatcctatatacttagaagaagaactcaggataagaaaaaatcgctaggtcccaaagggttcatgactatcatcagatgcaactgcgagtggcctacggtcattttttcaaatgagaagactggagagagagaacaacagtaatcacaaaacctctgttgcccttagtccatgacaatgtttaaggaaactttaaaaaattaagccatcttctgaattgttttctacaccaaatctaaaatattaaaatgaaattattaaatatttaaaatggggtatttagtggaaatgcaatcagtagaaaacattgctttttagtgcctgctaaacaagtaaaggagaaagaatgaagagaaaacagcagtccttcctgtgtgacactcgtgtggaaatgacaggcattcacatgtcattgagtgctaactcaaaagctaggtggcaatgctgtccaatgtttagagatcttttgaaatataattttaccaccattcagaggtaagtacttgcttaacagaagtctttaatgttagtgaatgaatgtataaaattataaactatgcattttcaaagagtagcatgtattttgtatcgaatccaagtaaatttttttcatagctacctaccacaactgcaaattattcaaaataaacttggatacatatccttatggggatatgggaagcccatctatattctcctacttgatgtttttaaagattgaaactttattctgaaacatcaggctctaaaaaattccatcattaagatgaataaatgggaaatggtttatttgttacttcgtaagcataaatgggaaatgttggctgttagaaaatgtgcccagttctttaaaggtggatgttctagtaacactggattaacaagcaaacaaaactgcatgaagtgaacgaatatttcattggataaagttagcataggttttatctgctgggtttaattctcaatcccagaaaaaaatattcttcaaggggtatcagttatagtttcaaagaacaaaatatgaaaatattgtccagcaaagcaaatcattgatcttttttcaaaattacttatattttggaaagtctatatagaatatccacaaatttcttcagccctcttgttgatttcatattttcatgaaactttttcccctaataatttgtcttcgctctttaatcagtgctttactacattactcagcctgaaaaaatatcttttccttcatctgacaatgtggaaataaagaactccatttctgtcattctggttctcttcagtgtccattgagaaagtttctcaactgtttgtaaaatacggggggaaaaaaacacgcatttctaaacctggtacttaaggttatactggattgtttgctacctaattagaagttattggggaaggggcattgtgtctttttatatgatttttagccaaatccagatgttctgatacacatttctgaatacctgtctgactgtaaatacagcctgtggaggttcaggttgataaacctttcacctgactgctccacagccatgctccttgccagcttctggcacattgtacatagatttgttgaatgtttaaatgatgttgtttttctaaatgctgttctctaaaacaattttttgaatttcttttgctttccattgttttggactttgtgtgttcgttttttaaaaaaaaaaatgtttcctaaatatttaacaccaggaaaaatatttttaaatacactggtgctaattgaaacagaaggaaattttcagatcgaagatgtacaatgttaaatgttcataccagttaaactgcactttcccaaggggacagctggcatctacttgaaatgggcatcaagagaccaccaaatgtttacagtttctgtggcccgtttaagtgtaaaatgcagaagtggctctgtccccccagagttaaggatttgctacactggtcctctggaagcatttaagtagaagaaaaggcttatagtcagaatcactttagtaatcgtcttctggtccttggacttttctgttctgtaatgcttgtaacaatgaatatggtgttgccaatctagtctgatatcattgttgacctgtacttactttgtggatggttctacctggggttgcactggcacaaacagagccagaacactggactttcaaaagaccattttgacttctacagtgtccacacacatgaatttaaatgcacttgtaactggttaattaccatgaagtaagtctaacttccacttaataaaagtttttgtgtatctgcttctaaaaaaaaaaa

SEQ ID NO: 736465 - DNA, 7467 bp, Homo sapiens
  misc_feature (24)..(24): n is a, c, g, or t
tactactactaaattcgcggccgngcgacctttttaattaaccctctgcagcaagggtagaaatacagatcagatggaatgggtattataggagaatcaagatagcaacagctactccttttaccattactagtgtgttttcaaagtatggaaaaagatgcctgaagagtcattttatatattttaaatctaaaaagtgttaacaggtatgcttataggccatgggagaaatattcttataaattttttagtgtaaaatgataaattctgtgtcacaaagacaagtttaccacttgacctaccagaatcacagatacttgcatttaactagcaagtatcatttggtggaaatttctaaaatcatagtagacaggcccaaagatagaattcttaggtgatcagtagtgtttaaaataattttgtcctcagcactaactatataactgtaatttctacataagaacaagtgcttccaaaatatagtggagggaaaaaataaaaaaggaaaataaaaaaacaaaacaaaaagaacaagtgcttgatttttcactgtgaagaactagcaggcacatgaggttgtgatcagaaagtgactgagttcccaagaaccaggaaacagaggggagttgtgaagagtttattaaaactgtacaaataattcagagctttgccaaaaccatttcataatgctgtacagttttttcaagcccactcactgttaaaacaagaaagcaccttttctttctaagattttagtaatccaaaagctagcctaattagccaagtatgcagataacatcaaaagcaaagctgagatagaacagccatacacccgttgggcagctcttatgaggtggtcagaaggtcactcagaccttggtttcaaataggctttagaatctgcacacttgaggactagaaatgcacagagttagggaaagccatgtacaggcttggctcctagtctttgagatgaggcgtcttgcaaatctctgttttcactccttggaatgtctccattgttagcattaaagtccccaagaagtttttattgctgtacggttttgaacccaatgagtctcatttccaaaagattcctaattctatataggagaggttgcaaatgtcagtgcctcagaaggaccaggcaagttctgtaaatgattgatgtggataaggcaaagaggaacacaagaatggtggagaccaggttgaactgcagaacacatgccctctttgaaggggtgcccacactcagctctagacaatcagaaccatgcagaaatcaggcccagggctgctagatcttctgacgtggaagtatgatattacctgacacgtaagttttgacaactaactcaaactcttggccaacactgtgcagaccaaagagaagctgtacacagacaggtgcagcctgcagcccccagtttcaactattgggaaaagtggatttcacattccacagttgtcaggtcaggttcatccatcagccccacaaactcacatgtcggcactatctgggcaactaaaataaaagaggggaaagagatcatttctccccagatatcattctcatggcagacttgaatatagatacgctgagttatccagctctctcactctgcctccttttggcatgcccaggctgtgccccgtaaagtgttgaatcactgttatcctaattttcttagtgttttctaccgtggccactgtgatgaggggctggcaaagagcagcctcgtgccttccgagaaggctgccaggagcctctgaagcttgaagcgagcacacattgcctccttgtgccaaagcccttggccagcctccccacactccttccctctccatccggcctcatgagtcttcgttaccaagtaaaattaccactgcttcacctctgatacagcagaagccttgcttcagaactggtaggcatttaggctatttcagagtgtccactaacctcaaaaggaggtttttccacatacaaaaccctagcatctttgaggggaaagcaaaatgagaataaattatgtcatgaaaaaaattagaagttgcttccttcatttagatggactaagttattttaaactctatcttacatcagagtcctgatggtgttgggatagtcactgaccctttcacgtatgtaataagatacgtctcgttcacacactatttcatttgatctttgtaagaacccagtgtagaataggaatatttaaaatcaacattacccacctccaaggccaacccagagtagtcttgaacctgagtcagcctcagtattgcttgcaaggaagagggaaggggctcattaaaggcctggctcaaaccttagtcttccagactgactagggacgtaagaagacccagggacccaccatgttctcaaaccatctattcagtccaggcctttcagcatagacataaagagcccacccgttactcagtcatgttgccaagtgcaaactgatttatccccagatgaatccctttactgtagcagatccctaatccctaaatttcagccaatttggtagttaattataggagtttattagctaaatgtatgttctgagtaaaagttttgactctttggggaaaatttattttgctgctagcatacaacatttgctatgtatataaacttaagtcaatgccagaaattttaaaaccagctcaaatttataatctgtaatgatcaaatcaaaacatactgtaaactcagagttggaaacgcctggtaatatggttaagtcatgtttaaatatgaatgcaatttaaatgacattggcaatgcctgagatttctttcattgtgaatgattaaaaggcagtccaatatatgaatggatttcatcttacctttctcccgttaatttactaggtgtaacatcttgagtgtaaagtcattcacaggcagttgggttgtggagctagaaggagcctcaaaaaaaaactttttggccagactcctacatcatgaacagggtttttgatgaataatatttattattatgtttctaaagtaatacagtgttggagaatgaaacagtttagtcctttcctcttctgatggaaaagaatcatagcgccgttgccatgacaataacaggatgtagaaagacccatgaagaaagaaagaagaaagctatggttccgaaagcaggtaaccacagattttgaaaggaggcagagatggtgattaaactgtagtccttgttttttaaaatgttctttcatgttaggcaccaccacatagttaataactaccaacttctaaagagaagatccccttgatttatttatatcatgaaaatactaaaaatcaattctcaagtctaattaactattacattatcttgctaggtccttttccctaaatttttaattcagaaaattaaccagaattggccagatgcagtggttcacgcctataatcccagcactttgggagtccaaggcagatggatcacttgaggtcagtagttcaagaccagcctggccaacagaggaagaaagagtgaaaacaaaagaagaaagagggaaaccctgtctttactaaaaatacaaaaattagtcgggcgtggtggcgcacacctgtaattccagctacttgagaggctgaggcaggagaatcccttgaaactgcaggcagaggttgcagtgagccaagatttcactgctgcacctggggtgagactaccattaaggaaggaaatttcctttaaacagaaaaaaacaaaggtgctcatctatttcttctgaattctctctacatccttgacttaagaggaaaaccagcactcaagaaacagctttaaaagagaacagtccccattctagctaccagtcttgctttcccccatcttggcaagccccagtgaatttgccattgaaagattaccctcccctttgccctcatctgcctgagctagaggccaggctgttgttaatgttttttcagttccaaagcccctgatgggacattcttgtttctgtgctactgctttctctctcttaaattaaggtgcaaggggataaatattactataactgggatgtaaggctcagtcagtgtggctattccctcccttcgggggaaatattccatctgtctgaacggttttaggtgatcatgaggagagcggcttagtcacacagccagccacgctcatcacaaaagatttgttcagactcactgtaaagaatgacaaggcagatagctaatcctttcactgtgcctcaaagcccgccgtgcaagtcaccaaccctaccggtcctctccacgtgcgaggctaatagagtgatcagaaccaggaatgtgagctgggttccaccttaggaggggacaatgaggacagagcaagagggctccatgtttaattactccaggctctgacttctgcccacaattacagagcatgaaagcagaattggcctttagtaagtgaaaaggaagtggctcctgcagcatataattgttataatttcgtatttatggaaagagaaaaggacttcagtccactcatgttgttaagcacttgtccctcactccactggagcccccttcctatgttttgggcacagatggctgggaccgagaggaaagaggaagagcggctgccagagtgtgaatatacccctcagggatatacagcggagtttcatgataaactacccatactttcccaaaaaaggttgaggagcaatacataactttgcagattacaaacccttgttttactttttaaaccttttttccatactctgcttattggaaatcgatggctgtgatgtgaccaacacctgtgatgatagcaaagcccctcctttcacagtctcctgactgttcggggaacctccttggtcattggtagaaagctttagaaaagacttagctttttagggaagaactaaaaaatctccaaaacatactagtcccatgacttcgataactgaaaatgtcctgggtgtaaactaacccaggaatgtggatcatacatgttttttttaaaaaaaatccctgaatcaatattttcctacaacacaccctaaaattcctatttttgtaattaatggttggacagtgatcagccatttaaacataggctttctggaataaccagacactagaatagtttccaaagtgttttgcgtatcaaaatcctatatacttagaagaagaactcaggataagaaaaaatcgctaggtcccaaagggttcatgactatcatcagatgcaactgcgagtggcctacggtcattttttcaaatgagaagactggagagagagaacaacagtaatcacaaaacctctgttgcccttagtccatgacaatgtttaaggaaactttaaaaaattaagccatcttctgaattgttttctacaccaaatctaaaatattaaaatgaaattattaaatatttaaaatggggtatttagtggaaatgcaatcagtagaaaacattgctttttagtgcctgctaaacaagtaaaggagaaagaatgaagagaaaacagcagtccttcctgtgtgacactcgtgtggaaatgacaggcattcacatgtcattgagtgctaactcaaaagctaggtggcaatgctgtccaatgtttagagatcttttgaaatataattttaccaccattcagaggtaagtacttgcttaacagaagtctttaatgttagtgaatgaatgtataaaattataaactatgcattttcaaagagtagcatgtattttgtatcgaatccaagtaaatttttttcatagctacctaccacaactgcaaattattcaaaataaacttggatacatatccttatggggatatgggaagcccatctatattctcctacttgatgtttttaaagattgaaactttattctgaaacatcaggctctaaaaaattccatcattaagatgaataaatgggaaatggtttatttgttacttcgtaagcataaatgggaaatgttggctgttagaaaatgtgcccagttctttaaaggtggatgttctagtaacactggattaacaagcaaacaaaactgcatgaagtgaacgaatatttcattggataaagttagcataggttttatctgctgggtttaattctcaatcccagaaaaaaatattcttcaaggggtatcagttatagtttcaaagaacaaaatatgaaaatattgtccagcaaagcaaatcattgatcttttttcaaaattacttatattttggaaagtctatatagaatatccacaaatttcttcagccctcttgttgatttcatattttcatgaaactttttcccctaataatttgtcttcgctctttaatcagtgctttactacattactcagcctgaaaaaatatcttttccttcatctgacaatgtggaaataaagaactccatttctgtcattctggttctcttcagtgtccattgagaaagtttctcaactgtttgtaaaatacggggggaaaaaaacacgcatttctaaacctggtacttaaggttatactggattgtttgctacctaattagaagttattggggaaggggcattgtgtctttttatatgatttttagccaaatccagatgttctgatacacatttctgaatacctgtctgactgtaaatacagcctgtggaggttcaggttgataaacctttcacctgactgctccacagccatgctccttgccagcttctggcacattgtacatagatttgttgaatgtttaaatgatgttgtttttctaaatgctgttctctaaaacaattttttgaatttcttttgctttccattgttttggactttgtgtgttcgttttttaaaaaaaaaaatgtttcctaaatatttaacaccaggaaaaatatttttaaatacactggtgctaattgaaacagaaggaaattttcagatcgaagatgtacaatgttaaatgttcataccagttaaactgcactttcccaaggggacagctggcatctacttgaaatgggcatcaagagaccaccaaatgtttacagtttctgtggcccgtttaagtgtaaaatgcagaagtggctctgtccccccagagttaaggatttgctacactggtcctctggaagcatttaagtagaagaaaaggcttatagtcagaatcactttagtaatcgtcttctggtccttggacttttctgttctgtaatgcttgtaacaatgaatatggtgttgccaatctagtctgatatcattgttgacctgtacttactttgtggatggttctacctggggttgcactggcacaaacagagccagaacactggactttcaaaagaccattttgacttctacagtgtccacacacatgaatttaaatgcacttgtaactggttaattaccatgaagtaagtctaacttccacttaataaaagtttttgtgtatctgcttctaaaaaaaaaaa

SEQ ID NO: 736466 - DNA, 8320 bp, Homo sapiens
  misc_feature (24)..(24): n is a, c, g, or t
tactactactaaattcgcggccgngcgacagagcaggattcatgaatatgaatgagaatgtgaatcattttggagaatgccctgggcacacgggtcaactggaaatttcatttctctaagaaagtagccctaccagcggcacggactgttcctgttcctcatacctgtggggattcctccatattggaactgtttcatgtatcttttttgcattgtaactagccaaacctgaagtcagtaaataaaatgagattagcactttttttaggtaccagttgtatcactgagtaatgcacaccaatagagcaagaaagtataaaatgtatttaagaccaactggtttgcttattatgactgactttgaaaaagcccatatccaatgatatacatgctttaaaaggtatatctatcgtaggaccaggaaccaaaatgggaattttacttctggtcctgttttgtaaatagttcctttttttgaagacaatctcatgttttataacttttgttgtgggtctgagaatcacaatggtaatatgtcttggcaaaacataacctttaaatacaaaaacaattataacttaattttccaaataaaacaagaaatacactgattaggcttctacagttctaagagacatgacactttggtaataagcgtcagtactctacttctcaagttaactggaaatattttacaagatgcagtgttttgtaatcacaaagaacgcagacattttgtgagaaatgaccttggttttatacattgtagcttattttttaaaatatagtattttaccaggcaggaagtattaatattataagtaattcttgctcaccaaacaaagggctatgtctcttttaagcaaatgttttgatgcatatctttttaattaaccctctgcagcaagggtagaaatacagatcagatggaatgggtattataggagaatcaagatagcaacagctactccttttaccattactagtgtgttttcaaagtatggaaaaagatgcctgaagagtcattttatatattttaaatctaaaaagtgttaacaggtatgcttataggccatgggagaaatattcttataaattttttagtgtaaaatgataaattctgtgtcacaaagacaagtttaccacttgacctaccagaatcacagatacttgcatttaactagcaagtatcatttggtggaaatttctaaaatcatagtagacaggcccaaagatagaattcttaggtgatcagtagtgtttaaaataattttgtcctcagcactaactatataactgtaatttctacataagaacaagtgcttccaaaatatagtggagggaaaaaataaaaaaggaaaataaaaaaacaaaacaaaaagaacaagtgcttgatttttcactgtgaagaactagcaggcacatgaggttgtgatcagaaagtgactgagttcccaagaaccaggaaacagaggggagttgtgaagagtttattaaaactgtacaaataattcagagctttgccaaaaccatttcataatgctgtacagttttttcaagcccactcactgttaaaacaagaaagcaccttttctttctaagattttagtaatccaaaagctagcctaattagccaagtatgcagataacatcaaaagcaaagctgagatagaacagccatacacccgttgggcagctcttatgaggtggtcagaaggtcactcagaccttggtttcaaataggctttagaatctgcacacttgaggactagaaatgcacagagttagggaaagccatgtacaggcttggctcctagtctttgagatgaggcgtcttgcaaatctctgttttcactccttggaatgtctccattgttagcattaaagtccccaagaagtttttattgctgtacggttttgaacccaatgagtctcatttccaaaagattcctaattctatataggagaggttgcaaatgtcagtgcctcagaaggaccaggcaagttctgtaaatgattgatgtggataaggcaaagaggaacacaagaatggtggagaccaggttgaactgcagaacacatgccctctttgaaggggtgcccacactcagctctagacaatcagaaccatgcagaaatcaggcccagggctgctagatcttctgacgtggaagtatgatattacctgacacgtaagttttgacaactaactcaaactcttggccaacactgtgcagaccaaagagaagctgtacacagacaggtgcagcctgcagcccccagtttcaactattgggaaaagtggatttcacattccacagttgtcaggtcaggttcatccatcagccccacaaactcacatgtcggcactatctgggcaactaaaataaaagaggggaaagagatcatttctccccagatatcattctcatggcagacttgaatatagatacgctgagttatccagctctctcactctgcctccttttggcatgcccaggctgtgccccgtaaagtgttgaatcactgttatcctaattttcttagtgttttctaccgtggccactgtgatgaggggctggcaaagagcagcctcgtgccttccgagaaggctgccaggagcctctgaagcttgaagcgagcacacattgcctccttgtgccaaagcccttggccagcctccccacactccttccctctccatccggcctcatgagtcttcgttaccaagtaaaattaccactgcttcacctctgatacagcagaagccttgcttcagaactggtaggcatttaggctatttcagagtgtccactaacctcaaaaggaggtttttccacatacaaaaccctagcatctttgaggggaaagcaaaatgagaataaattatgtcatgaaaaaaattagaagttgcttccttcatttagatggactaagttattttaaactctatcttacatcagagtcctgatggtgttgggatagtcactgaccctttcacgtatgtaataagatacgtctcgttcacacactatttcatttgatctttgtaagaacccagtgtagaataggaatatttaaaatcaacattacccacctccaaggccaacccagagtagtcttgaacctgagtcagcctcagtattgcttgcaaggaagagggaaggggctcattaaaggcctggctcaaaccttagtcttccagactgactagggacgtaagaagacccagggacccaccatgttctcaaaccatctattcagtccaggcctttcagcatagacataaagagcccacccgttactcagtcatgttgccaagtgcaaactgatttatccccagatgaatccctttactgtagcagatccctaatccctaaatttcagccaatttggtagttaattataggagtttattagctaaatgtatgttctgagtaaaagttttgactctttggggaaaatttattttgctgctagcatacaacatttgctatgtatataaacttaagtcaatgccagaaattttaaaaccagctcaaatttataatctgtaatgatcaaatcaaaacatactgtaaactcagagttggaaacgcctggtaatatggttaagtcatgtttaaatatgaatgcaatttaaatgacattggcaatgcctgagatttctttcattgtgaatgattaaaaggcagtccaatatatgaatggatttcatcttacctttctcccgttaatttactaggtgtaacatcttgagtgtaaagtcattcacaggcagttgggttgtggagctagaaggagcctcaaaaaaaaactttttggccagactcctacatcatgaacagggtttttgatgaataatatttattattatgtttctaaagtaatacagtgttggagaatgaaacagtttagtcctttcctcttctgatggaaaagaatcatagcgccgttgccatgacaataacaggatgtagaaagacccatgaagaaagaaagaagaaagctatggttccgaaagcaggtaaccacagattttgaaaggaggcagagatggtgattaaactgtagtccttgttttttaaaatgttctttcatgttaggcaccaccacatagttaataactaccaacttctaaagagaagatccccttgatttatttatatcatgaaaatactaaaaatcaattctcaagtctaattaactattacattatcttgctaggtccttttccctaaatttttaattcagaaaattaaccagaattggccagatgcagtggttcacgcctataatcccagcactttgggagtccaaggcagatggatcacttgaggtcagtagttcaagaccagcctggccaacagaggaagaaagagtgaaaacaaaagaagaaagagggaaaccctgtctttactaaaaatacaaaaattagtcgggcgtggtggcgcacacctgtaattccagctacttgagaggctgaggcaggagaatcccttgaaactgcaggcagaggttgcagtgagccaagatttcactgctgcacctggggtgagactaccattaaggaaggaaatttcctttaaacagaaaaaaacaaaggtgctcatctatttcttctgaattctctctacatccttgacttaagaggaaaaccagcactcaagaaacagctttaaaagagaacagtccccattctagctaccagtcttgctttcccccatcttggcaagccccagtgaatttgccattgaaagattaccctcccctttgccctcatctgcctgagctagaggccaggctgttgttaatgttttttcagttccaaagcccctgatgggacattcttgtttctgtgctactgctttctctctcttaaattaaggtgcaaggggataaatattactataactgggatgtaaggctcagtcagtgtggctattccctcccttcgggggaaatattccatctgtctgaacggttttaggtgatcatgaggagagcggcttagtcacacagccagccacgctcatcacaaaagatttgttcagactcactgtaaagaatgacaaggcagatagctaatcctttcactgtgcctcaaagcccgccgtgcaagtcaccaaccctaccggtcctctccacgtgcgaggctaatagagtgatcagaaccaggaatgtgagctgggttccaccttaggaggggacaatgaggacagagcaagagggctccatgtttaattactccaggctctgacttctgcccacaattacagagcatgaaagcagaattggcctttagtaagtgaaaaggaagtggctcctgcagcatataattgttataatttcgtatttatggaaagagaaaaggacttcagtccactcatgttgttaagcacttgtccctcactccactggagcccccttcctatgttttgggcacagatggctgggaccgagaggaaagaggaagagcggctgccagagtgtgaatatacccctcagggatatacagcggagtttcatgataaactacccatactttcccaaaaaaggttgaggagcaatacataactttgcagattacaaacccttgttttactttttaaaccttttttccatactctgcttattggaaatcgatggctgtgatgtgaccaacacctgtgatgatagcaaagcccctcctttcacagtctcctgactgttcggggaacctccttggtcattggtagaaagctttagaaaagacttagctttttagggaagaactaaaaaatctccaaaacatactagtcccatgacttcgataactgaaaatgtcctgggtgtaaactaacccaggaatgtggatcatacatgttttttttaaaaaaaatccctgaatcaatattttcctacaacacaccctaaaattcctatttttgtaattaatggttggacagtgatcagccatttaaacataggctttctggaataaccagacactagaatagtttccaaagtgttttgcgtatcaaaatcctatatacttagaagaagaactcaggataagaaaaaatcgctaggtcccaaagggttcatgactatcatcagatgcaactgcgagtggcctacggtcattttttcaaatgagaagactggagagagagaacaacagtaatcacaaaacctctgttgcccttagtccatgacaatgtttaaggaaactttaaaaaattaagccatcttctgaattgttttctacaccaaatctaaaatattaaaatgaaattattaaatatttaaaatggggtatttagtggaaatgcaatcagtagaaaacattgctttttagtgcctgctaaacaagtaaaggagaaagaatgaagagaaaacagcagtccttcctgtgtgacactcgtgtggaaatgacaggcattcacatgtcattgagtgctaactcaaaagctaggtggcaatgctgtccaatgtttagagatcttttgaaatataattttaccaccattcagaggtaagtacttgcttaacagaagtctttaatgttagtgaatgaatgtataaaattataaactatgcattttcaaagagtagcatgtattttgtatcgaatccaagtaaatttttttcatagctacctaccacaactgcaaattattcaaaataaacttggatacatatccttatggggatatgggaagcccatctatattctcctacttgatgtttttaaagattgaaactttattctgaaacatcaggctctaaaaaattccatcattaagatgaataaatgggaaatggtttatttgttacttcgtaagcataaatgggaaatgttggctgttagaaaatgtgcccagttctttaaaggtggatgttctagtaacactggattaacaagcaaacaaaactgcatgaagtgaacgaatatttcattggataaagttagcataggttttatctgctgggtttaattctcaatcccagaaaaaaatattcttcaaggggtatcagttatagtttcaaagaacaaaatatgaaaatattgtccagcaaagcaaatcattgatcttttttcaaaattacttatattttggaaagtctatatagaatatccacaaatttcttcagccctcttgttgatttcatattttcatgaaactttttcccctaataatttgtcttcgctctttaatcagtgctttactacattactcagcctgaaaaaatatcttttccttcatctgacaatgtggaaataaagaactccatttctgtcattctggttctcttcagtgtccattgagaaagtttctcaactgtttgtaaaatacggggggaaaaaaacacgcatttctaaacctggtacttaaggttatactggattgtttgctacctaattagaagttattggggaaggggcattgtgtctttttatatgatttttagccaaatccagatgttctgatacacatttctgaatacctgtctgactgtaaatacagcctgtggaggttcaggttgataaacctttcacctgactgctccacagccatgctccttgccagcttctggcacattgtacatagatttgttgaatgtttaaatgatgttgtttttctaaatgctgttctctaaaacaattttttgaatttcttttgctttccattgttttggactttgtgtgttcgttttttaaaaaaaaaaatgtttcctaaatatttaacaccaggaaaaatatttttaaatacactggtgctaattgaaacagaaggaaattttcagatcgaagatgtacaatgttaaatgttcataccagttaaactgcactttcccaaggggacagctggcatctacttgaaatgggcatcaagagaccaccaaatgtttacagtttctgtggcccgtttaagtgtaaaatgcagaagtggctctgtccccccagagttaaggatttgctacactggtcctctggaagcatttaagtagaagaaaaggcttatagtcagaatcactttagtaatcgtcttctggtccttggacttttctgttctgtaatgcttgtaacaatgaatatggtgttgccaatctagtctgatatcattgttgacctgtacttactttgtggatggttctacctggggttgcactggcacaaacagagccagaacactggactttcaaaagaccattttgacttctacagtgtccacacacatgaatttaaatgcacttgtaactggttaattaccatgaagtaagtctaacttccacttaataaaagtttttgtgtatctgcttctaaaaaaaaaaa

SEQ ID NO: 736467 - DNA, 8778 bp, Homo sapiens
ctcctggtgtcctgtcaccaggaggagaaaggacgtgttagagtagaggaaacaaacacgtcctttctcctcctggtgtcctgtcaccccccatgcagcaccactgatgcgagatgatgctctggcctggtccaggaagccctgagccatgggcagattgcccagtggccttgggcggccagagcttgtcacctgtttaaacaagttcaccatgtgtttaaatgacagggtacagtcctggaccagaggtttttctcttcagcaaagctccctggcccttgatcgttggactgttactaatagaaaaagattcaagtcatgaagtataaaatccatcccccatcccagaactttgaaacacaaggagggagagatctttgctatggagcagtcctggagcaaagccccgtggcttccacccccagatatataccccataagtagtgctgagctccagcttagctgagccaagctcagtccttatctggtgttcagccagtgcacaggtataagcagaactacagagctgaatgtagcttccctgggatctcttctcctttctaaagcatttttcacacagttctgtacctcctacggcacggactgttcctgttcctcatacctgtggggattcctccatattggaactgtttcatgtatcttttttgcattgtaactagccaaacctgaagtcagtaaataaaatgagattagcactttttttaggtaccagttgtatcactgagtaatgcacaccaatagagcaagaaagtataaaatgtatttaagaccaactggtttgcttattatgactgactttgaaaaagcccatatccaatgatatacatgctttaaaaggtatatctatcgtaggaccaggaaccaaaatgggaattttacttctggtcctgttttgtaaatagttcctttttttgaagacaatctcatgttttataacttttgttgtgggtctgagaatcacaatggtaatatgtcttggcaaaacataacctttaaatacaaaaacaattataacttaattttccaaataaaacaagaaatacactgattaggcttctacagttctaagagacatgacactttggtaataagcgtcagtactctacttctcaagttaactggaaatattttacaagatgcagtgttttgtaatcacaaagaacgcagacattttgtgagaaatgaccttggttttatacattgtagcttattttttaaaatatagtattttaccaggcaggaagtattaatattataagtaattcttgctcaccaaacaaagggctatgtctcttttaagcaaatgttttgatgcatatctttttaattaaccctctgcagcaagggtagaaatacagatcagatggaatgggtattataggagaatcaagatagcaacagctactccttttaccattactagtgtgttttcaaagtatggaaaaagatgcctgaagagtcattttatatattttaaatctaaaaagtgttaacaggtatgcttataggccatgggagaaatattcttataaattttttagtgtaaaatgataaattctgtgtcacaaagacaagtttaccacttgacctaccagaatcacagatacttgcatttaactagcaagtatcatttggtggaaatttctaaaatcatagtagacaggcccaaagatagaattcttaggtgatcagtagtgtttaaaataattttgtcctcagcactaactatataactgtaatttctacataagaacaagtgcttccaaaatatagtggagggaaaaaataaaaaaggaaaataaaaaaacaaaacaaaaagaacaagtgcttgatttttcactgtgaagaactagcaggcacatgaggttgtgatcagaaagtgactgagttcccaagaaccaggaaacagaggggagttgtgaagagtttattaaaactgtacaaataattcagagctttgccaaaaccatttcataatgctgtacagttttttcaagcccactcactgttaaaacaagaaagcaccttttctttctaagattttagtaatccaaaagctagcctaattagccaagtatgcagataacatcaaaagcaaagctgagatagaacagccatacacccgttgggcagctcttatgaggtggtcagaaggtcactcagaccttggtttcaaataggctttagaatctgcacacttgaggactagaaatgcacagagttagggaaagccatgtacaggcttggctcctagtctttgagatgaggcgtcttgcaaatctctgttttcactccttggaatgtctccattgttagcattaaagtccccaagaagtttttattgctgtacggttttgaacccaatgagtctcatttccaaaagattcctaattctatataggagaggttgcaaatgtcagtgcctcagaaggaccaggcaagttctgtaaatgattgatgtggataaggcaaagaggaacacaagaatggtggagaccaggttgaactgcagaacacatgccctctttgaaggggtgcccacactcagctctagacaatcagaaccatgcagaaatcaggcccagggctgctagatcttctgacgtggaagtatgatattacctgacacgtaagttttgacaactaactcaaactcttggccaacactgtgcagaccaaagagaagctgtacacagacaggtgcagcctgcagcccccagtttcaactattgggaaaagtggatttcacattccacagttgtcaggtcaggttcatccatcagccccacaaactcacatgtcggcactatctgggcaactaaaataaaagaggggaaagagatcatttctccccagatatcattctcatggcagacttgaatatagatacgctgagttatccagctctctcactctgcctccttttggcatgcccaggctgtgccccgtaaagtgttgaatcactgttatcctaattttcttagtgttttctaccgtggccactgtgatgaggggctggcaaagagcagcctcgtgccttccgagaaggctgccaggagcctctgaagcttgaagcgagcacacattgcctccttgtgccaaagcccttggccagcctccccacactccttccctctccatccggcctcatgagtcttcgttaccaagtaaaattaccactgcttcacctctgatacagcagaagccttgcttcagaactggtaggcatttaggctatttcagagtgtccactaacctcaaaaggaggtttttccacatacaaaaccctagcatctttgaggggaaagcaaaatgagaataaattatgtcatgaaaaaaattagaagttgcttccttcatttagatggactaagttattttaaactctatcttacatcagagtcctgatggtgttgggatagtcactgaccctttcacgtatgtaataagatacgtctcgttcacacactatttcatttgatctttgtaagaacccagtgtagaataggaatatttaaaatcaacattacccacctccaaggccaacccagagtagtcttgaacctgagtcagcctcagtattgcttgcaaggaagagggaaggggctcattaaaggcctggctcaaaccttagtcttccagactgactagggacgtaagaagacccagggacccaccatgttctcaaaccatctattcagtccaggcctttcagcatagacataaagagcccacccgttactcagtcatgttgccaagtgcaaactgatttatccccagatgaatccctttactgtagcagatccctaatccctaaatttcagccaatttggtagttaattataggagtttattagctaaatgtatgttctgagtaaaagttttgactctttggggaaaatttattttgctgctagcatacaacatttgctatgtatataaacttaagtcaatgccagaaattttaaaaccagctcaaatttataatctgtaatgatcaaatcaaaacatactgtaaactcagagttggaaacgcctggtaatatggttaagtcatgtttaaatatgaatgcaatttaaatgacattggcaatgcctgagatttctttcattgtgaatgattaaaaggcagtccaatatatgaatggatttcatcttacctttctcccgttaatttactaggtgtaacatcttgagtgtaaagtcattcacaggcagttgggttgtggagctagaaggagcctcaaaaaaaaactttttggccagactcctacatcatgaacagggtttttgatgaataatatttattattatgtttctaaagtaatacagtgttggagaatgaaacagtttagtcctttcctcttctgatggaaaagaatcatagcgccgttgccatgacaataacaggatgtagaaagacccatgaagaaagaaagaagaaagctatggttccgaaagcaggtaaccacagattttgaaaggaggcagagatggtgattaaactgtagtccttgttttttaaaatgttctttcatgttaggcaccaccacatagttaataactaccaacttctaaagagaagatccccttgatttatttatatcatgaaaatactaaaaatcaattctcaagtctaattaactattacattatcttgctaggtccttttccctaaatttttaattcagaaaattaaccagaattggccagatgcagtggttcacgcctataatcccagcactttgggagtccaaggcagatggatcacttgaggtcagtagttcaagaccagcctggccaacagaggaagaaagagtgaaaacaaaagaagaaagagggaaaccctgtctttactaaaaatacaaaaattagtcgggcgtggtggcgcacacctgtaattccagctacttgagaggctgaggcaggagaatcccttgaaactgcaggcagaggttgcagtgagccaagatttcactgctgcacctggggtgagactaccattaaggaaggaaatttcctttaaacagaaaaaaacaaaggtgctcatctatttcttctgaattctctctacatccttgacttaagaggaaaaccagcactcaagaaacagctttaaaagagaacagtccccattctagctaccagtcttgctttcccccatcttggcaagccccagtgaatttgccattgaaagattaccctcccctttgccctcatctgcctgagctagaggccaggctgttgttaatgttttttcagttccaaagcccctgatgggacattcttgtttctgtgctactgctttctctctcttaaattaaggtgcaaggggataaatattactataactgggatgtaaggctcagtcagtgtggctattccctcccttcgggggaaatattccatctgtctgaacggttttaggtgatcatgaggagagcggcttagtcacacagccagccacgctcatcacaaaagatttgttcagactcactgtaaagaatgacaaggcagatagctaatcctttcactgtgcctcaaagcccgccgtgcaagtcaccaaccctaccggtcctctccacgtgcgaggctaatagagtgatcagaaccaggaatgtgagctgggttccaccttaggaggggacaatgaggacagagcaagagggctccatgtttaattactccaggctctgacttctgcccacaattacagagcatgaaagcagaattggcctttagtaagtgaaaaggaagtggctcctgcagcatataattgttataatttcgtatttatggaaagagaaaaggacttcagtccactcatgttgttaagcacttgtccctcactccactggagcccccttcctatgttttgggcacagatggctgggaccgagaggaaagaggaagagcggctgccagagtgtgaatatacccctcagggatatacagcggagtttcatgataaactacccatactttcccaaaaaaggttgaggagcaatacataactttgcagattacaaacccttgttttactttttaaaccttttttccatactctgcttattggaaatcgatggctgtgatgtgaccaacacctgtgatgatagcaaagcccctcctttcacagtctcctgactgttcggggaacctccttggtcattggtagaaagctttagaaaagacttagctttttagggaagaactaaaaaatctccaaaacatactagtcccatgacttcgataactgaaaatgtcctgggtgtaaactaacccaggaatgtggatcatacatgttttttttaaaaaaaatccctgaatcaatattttcctacaacacaccctaaaattcctatttttgtaattaatggttggacagtgatcagccatttaaacataggctttctggaataaccagacactagaatagtttccaaagtgttttgcgtatcaaaatcctatatacttagaagaagaactcaggataagaaaaaatcgctaggtcccaaagggttcatgactatcatcagatgcaactgcgagtggcctacggtcattttttcaaatgagaagactggagagagagaacaacagtaatcacaaaacctctgttgcccttagtccatgacaatgtttaaggaaactttaaaaaattaagccatcttctgaattgttttctacaccaaatctaaaatattaaaatgaaattattaaatatttaaaatggggtatttagtggaaatgcaatcagtagaaaacattgctttttagtgcctgctaaacaagtaaaggagaaagaatgaagagaaaacagcagtccttcctgtgtgacactcgtgtggaaatgacaggcattcacatgtcattgagtgctaactcaaaagctaggtggcaatgctgtccaatgtttagagatcttttgaaatataattttaccaccattcagaggtaagtacttgcttaacagaagtctttaatgttagtgaatgaatgtataaaattataaactatgcattttcaaagagtagcatgtattttgtatcgaatccaagtaaatttttttcatagctacctaccacaactgcaaattattcaaaataaacttggatacatatccttatggggatatgggaagcccatctatattctcctacttgatgtttttaaagattgaaactttattctgaaacatcaggctctaaaaaattccatcattaagatgaataaatgggaaatggtttatttgttacttcgtaagcataaatgggaaatgttggctgttagaaaatgtgcccagttctttaaaggtggatgttctagtaacactggattaacaagcaaacaaaactgcatgaagtgaacgaatatttcattggataaagttagcataggttttatctgctgggtttaattctcaatcccagaaaaaaatattcttcaaggggtatcagttatagtttcaaagaacaaaatatgaaaatattgtccagcaaagcaaatcattgatcttttttcaaaattacttatattttggaaagtctatatagaatatccacaaatttcttcagccctcttgttgatttcatattttcatgaaactttttcccctaataatttgtcttcgctctttaatcagtgctttactacattactcagcctgaaaaaatatcttttccttcatctgacaatgtggaaataaagaactccatttctgtcattctggttctcttcagtgtccattgagaaagtttctcaactgtttgtaaaatacggggggaaaaaaacacgcatttctaaacctggtacttaaggttatactggattgtttgctacctaattagaagttattggggaaggggcattgtgtctttttatatgatttttagccaaatccagatgttctgatacacatttctgaatacctgtctgactgtaaatacagcctgtggaggttcaggttgataaacctttcacctgactgctccacagccatgctccttgccagcttctggcacattgtacatagatttgttgaatgtttaaatgatgttgtttttctaaatgctgttctctaaaacaattttttgaatttcttttgctttccattgttttggactttgtgtgttcgttttttaaaaaaaaaaatgtttcctaaatatttaacaccaggaaaaatatttttaaatacactggtgctaattgaaacagaaggaaattttcagatcgaagatgtacaatgttaaatgttcataccagttaaactgcactttcccaaggggacagctggcatctacttgaaatgggcatcaagagaccaccaaatgtttacagtttctgtggcccgtttaagtgtaaaatgcagaagtggctctgtccccccagagttaaggatttgctacactggtcctctggaagcatttaagtagaagaaaaggcttatagtcagaatcactttagtaatcgtcttctggtccttggacttttctgttctgtaatgcttgtaacaatgaatatggtgttgccaatctagtctgatatcattgttgacctgtacttactttgtggatggttctacctggggttgcactggcacaaacagagccagaacactggactttcaaaagaccattttgacttctacagtgtccacacacatgaatttaaatgcacttgtaactggttaattaccatgaagtaagtctaacttccacttaataaaagtttttgtgtatctgcttctaaaaaaaaaaa

SEQ ID NO: 736468 - DNA, 2780 bp, Homo sapiens
  misc_feature (986)..(986): n is a, c, g, or t
aagatagcaaatacacccccttcctcttgtaacccggtcaggcctagggttcctccctgagttccagaataggccacccagttggggcggacccttaaggcattctgggcccacgcctgcctataaaccctcatagtgtgacctttgacccctggtgtgatcttgggcccgggctgggaccagcccctagtgtgggttgtgggggcggccatggagctgggcagctgcttcaagacctatgaggacttcaaggagtgcttcagcgcctacaaaagggagaacaggtgctccttcattctcagggactgcgtctccgtccgcttccacaacctcaaccatggcacctccatccgcgaagacatcctgtatgtgcaggtgaaatttgtctgcattcggacccaatcaaacaggaagagaacgcgggaggcagacatgtgcccagcgtacttgctcctaaggtacaacgagagactagatagactatttatcagtgaactaaacacacagcacatacatggtgactctaaagtggctagtcctggaggagacaccactggcaaatctcaaaagacaatgtgcctgcagagactccagcctgtgcagcccacaaccaaaaaagaccttgacactgccgagaagtccctggttgagccatcgttttgcctagataaggtacaagtgtcctcaaagccagagcaggaaggcatcactccttctgacctggccaagatagcaaaagtgatgaagaactttcttaaggtagatgagggttccatggcttccttcagtgtgggtgacagccagcacctggaccggctcagcttccagagcagtaagatgaccgacctgttcatccgcttcccagagaatctcttgctacaccgggtggagaacacccagggccacatcctctatgctttcttggtggagaacaaggaacgagaaagtcgagtggtgcactttgctgtgctcaaggcggagacagncacctctgtggccaagatgctgagcatcttcacagagttcaactccgattggcccaaggtcaaggtggtctttgtggacccttcattccattaccgggctatcctgcaggagatctttcctgctgcccgcatcctcctttccatctaccacacaacccgactcttggagaagaagttgcatcgtagttcagcaaatccatcctttaaaaggctcatgaaggaagccctgcgggaggccgtgtttgtcacttctgaagccagcctgaaaaatctctgccagatgtcccaggccgtactggatgaggatctcttcaacttcctgcaggcccactggttcacctgtgaactgctgtggtacatgcatgttaggaagggcctgcttgcgtgtaacacctacatggacagcctagacattgtcaccagcaaggtgtcaagcctctttcgggaacagcagtcgctgctggactgcatcctctgctttgtggattacatagacttctttaataccaaaggcttgaagaacttgcccacacctcctcccaaattaaagagagctcggccggcaagcatgccactgaagtccaagaaggcttttggaatctgtggagagagccttaccagcctccctgcagaagagaccaagccagacgcacagcaggtacaggtacagcagcagtcacaagtgccgccctcgcaggttggcatgctggacaccttgcaccagagtggctctgaactagcctacaagctgtgccacaatgagtgggaggtggtacagaactccacccacctggtggacatggctggctcttcagtggacgttcagctgctagaggactctcaccaggttagcaaagatggctgtagctgcagctgttcctttcaacaatggtaccacctgccatgccgacacattttggctctgctgcacaccagccagcagccggttggtgaagccatggtgtgccgccggtggcagaagaagtaccagtacctccttgggcccaatggggagctccaggatcgtggtatggtcccaaacacaggccagcctgagaagcaaggacggaacgacatgattcaggacctaagcagggagttagcaaacctgctcatgcagaccgaggggccagagctggaggaacgctactccaccctgcgcaagattgtggatatctgggctggcccctcccagccatctgagctctttcagcagccaggagactttaaggacgtgggccgcctccctttcctctggggaaagcaagaagaaggggagggattccctcctgctacagctgtgatgcattattgaagcactttagctgaagcattggaccacaaacacttctccttggaagtgtgagagtttaaagtgggcaggacatactagggtttagcattttagccaatgtcttcctaggtggggctaggaatattgttacagtagagaggaagggaactccactgtgtgacagtcctttcaatctgccccttttcagccctacttttggcattccttgggagcctcagttgttgttcaaggccaaagttatctccgtgctgcaaggtcaccctcttcctcccccagcccctgagatcagatcttatttgctctgcaaagatgaatccctgcctcaggttagggtgagacaaaatcggtctggtaaaagggcctgttttcagggacaaagggaatgaggatgatctttggctgttgctgctctttatgaagaatcttatttgtaactttttattcatattaaagttgtttttaataaaattaaacaaggg

SEQ ID NO: 736469 - DNA, 681 bp, Homo sapiens
aagatagcaaatacacccccttcctcttgtaacccggtcaggcctagggttcctccctgagttccagaataggccacccagttggggcggacccttaaggcattctgggcccacgcctgcctataaaccctcatagtgtgacctttgacccctggtgtgatcttgggcccgggctgggaccagcccctagtgtgggttgtgggggcggccatggagctgggcagctgcttcaagacctatgaggacttcaaggagtgcttcagcgcctacaaaagggagaacaggtgctccttcattctcagggactgcgtctccgtccgcttccacaacctcaaccatggcacctccatccgcgaagacatcctgtaagggcgggcggggcggggcgggccaagagggtggggaggaggctggacctccggagggctgcctggaggaggaggggtgcataggcacgcattgggctgcgtggccattcattcaacaggcactcattgagcacctgctgtgtgccttgtgaagagagctaagcctccacggccattggtttttgaccacccactccactttcactccattcacaggcttttctggaatttataactgcagtttctcccattgttttgagcagctgcagcaacccaaatacaaagtatggctttcataaacggataaaaacac

SEQ ID NO: 736470 - DNA, 554 bp, Homo sapiens
cgctgtgatcgctctagagatccccctgtatcctgggagggattccctcctgctacagctgtgatgcattattgaagcactttagctgaagcattggaccacaaacacttctccttggaagtgtgagagtttaaagtgggcaggacatactagggtttagcattttagccaatgtcttcctaggtggggctaggaatattgttacagtagagaggaagggaactccactgtgtgacagtcctttcaatctgccccttttcagccctacttttggcattccttgggagcctcagttgttgttcaaggccaaagttatctccgtgctgcaaggtcaccctcttcctcccccagcccctgagatcagatcttatttgctctgcaaagatgaatccctgcctcaggttagggtgagacaaaatcggtctggtaaaagggcctgttttcagggacaaagggaatgaggatgatctttggctgttgctgctctttatgaagaatcttatttgtaactttttattcatattaaagttgtttttaataaaattaaacaaggg

SEQ ID NO: 736471 - DNA, 1650 bp, Homo sapiens
ggcttaggttatcctcccacctcagcctcccaagttgctgctgggactacaggtgtacgccatcacacctgtctaattttttgtaattttaattgagacaggggttcgccatgttgtccaggctgatcttgaactcctgggttcgagcgatctgcccgccttggcctcccaaagtgctgggattacaggcatgaaccacctaacctggctaggatcgcactttgagacttttctcttttttcttttttttcaaaggaagcaaatcagaaatgagatggagtatcatgattagcatctcagagctaatttaaggaaaattgggagagggtgtttgatcatgtcagatctaatctctttcagtaaagtctctttcctcccccataccttcattgtctagagccaagagttggttggatataatgttggctctttttaatccaagttgccatcgctaaaagtagcatcatgacacctgtctggtgctttcaagtctcaagtaaatttctggcagtttgaaaatgatgttaaaaagcacttgggttttaaaaaaaggcacttgaaggagatggtttattctcctcctgtacacacatatgtacataccttgtcaaatgttacttctcttccttattctccctgtgctagaaacgttctccaggtaattgctttttgaaaccgaggttgagcattgcccagcctaaatatgaatatctctaccagtagggaatgaatacttcttgatagccagttttaaaagtaagttgttaatagaaaatactgagcatggcataattctttgtctagagccaggaggacataactctgtgttattctagttgaaacttttcctctaacctaacagtgatcaacagccttctatcctagtgttcagcttacagtttatctgtcttgtgtgcaaagatatcccatataaggtcatccgatcacttgtaaatgtttgcgaaagtattgtgtagaatcctagtcttagatgtgatttatagtaaattaggcattagaccagggaaacaaatctgtggatgttctgggtactagcttgatgcctctctagatgccatccctcttctctagcgcataaatccacagtgtgcttttatatatttatttttccaaatggagaaccccactgtgagaaagggaccagagaatatctttttctctggcaagattccatctgtggattattttattagacatgccttctgaaagattaggggtggaggatcaaaagaaatattctttatctgaaggctctttgatcttcagggttgatagaatctgttaaagtgttagataatacagtacctaatgatttctttttaggcttaaatagcctcactgaatgagattatttacttaactgtgattgccctttctgtttcggaattgaccttgctaatttttgaatcaggagcactgaaacagatctctaaattttgaaggtctggctctaggaagcacaagtgtggaagattttaggtcttaggttttaatgttcagagcgtttcttccaattcaaaacgtaatcactggaaaataaacttctaaatgaaaatgtgctttggtcagctgcctctgaattatcattgtgcaacattacttaaataaatttgtgtttgaaagaccttg

SEQ ID NO: 736472 - DNA, 1153 bp, Homo sapiens
ttcctttaaagtctcaaatatctatcagtgtagaagagtgggaagacaccaaagactccaaagaacaagggcaccaccgcagcaaccaccgcaactcaacatccagtgatcagtcggaccatcccttgctgcggagaaaaagcatgcagtgggcccgaagactgagcagaaaaggcccaaaacactctggtaaaacagctgaaaaaataacccagcagcgactgaacctctacaggaggtcagaaagacaagagcttgctgaacttgtgaaaaatagaatgaaacacttgggtctttctacagtgggatatgatgaaatgaatgatcatcaaagtaccctctcctacatcctgattaacccatctccagataccagaatagagctgaatgatgttgtatacttaattcgaccagatccactggcctaccttccaaacagtgagcccagtcgaagaaacagcatctgcaatgtcactggtcaagattctcgggaggaaactcaactttgataaaaataaaatgagaaacttttttcctacaaagaccttgcttgaaaccacaaaagttttgctggcacgaaagaaactagatggaaatatatgtaattctctcatatttaaaaacgtaatctcttctcttagaagtatagatcattttgaaacttaatgtactacttactggtactctccctattaatatttgaaggacctcaatggaataaatttgaaaagctaaattaaaatacaaaaatttaaatctgacatttaattgttttataataatccaaactctatgaaagcaattttaaaaattattaaggttttatgaagttgacaaaatctaactatatttggtgcatcacaatggacacagaatgctgctgctcctcttaaaaattaaatgtgtcatattatattctttaaacttactgttttacaaaattgagctcatcgtaaatgtctagtcttctcacatagagattaaccaacaaacttgtgtggctgacttttgtgtaagaatcatagtttgctttagaatacaaatctttaagtcattttaacttttttttctgccttacgatataaaaatatttatcttagaatttgagatgttcatagcatgttttattacattgaagaaactaaaacataaa

SEQ ID NO: 736473 - DNA, 414 bp, Homo sapiens; identical to SEQ ID NO: 273758

SEQ ID NO: 736474 - DNA, 919 bp, Homo sapiens
  misc_feature (913)..(913): n is a, c, g, or t
gtatatgtatgtgtagaaagccttctcacctttctgagaatgggtgaggataaatatgacaaaatactgcagaagtaacctcagtgaacactgaaactatgtggaaattgctttgactggaaaatgaagggagtttgtattgtggatcattaaaagataagatggggtagaaaaaataggatcagatcatgaagcacatgaaaggttaagtacatgattttagttaactttgatccaaagagtgtggaagtgctgctacttgtggtttctgagtgaagggagatataataaatgtgataattttggaaaattaatttagttgtagtatataaatgtgattgaaggtaaatggagcttggagatagaaaaaccaattaggagtctgttgtagtaattcataagattgaaagccttgattaaagtcaatagagagataaacttggagaatactttaaagggagattcttttttaaaaccagcccccaccgttttataattttacaagttgaagaagaattaagatgtggttgcaaaattttaggaagcgaaattaaataaatggtggtggtagtcatttaagtggcaaggttacaaaagggagctattttgtgagaaagaataatgtttatgttcttttacgttgaatgtaactggtggttggacatccagtagacagttttttgtttattggagaatttgtttacagtcatttctctgtgggggggaaatcctcaggtaacactgagtttcttcattattattagttaggaaattcagactacgtaacatattacctaatccagaagtaaaattgtttaagcatttctaagaaattagaaattactgtaaaataggaccaataaatgtataaaagtccacctatttccactaagttttaccatcttaactgccnggcatt

SEQ ID NO: 736475 - DNA, 1084 bp, Homo sapiens
attcactcagaaaaaaaaataaccaacaaagagttatatgttaaacagcaaaaagaaaataatacagactagagccaaatatttattgactgagtaaggaagatgatttagaccattatttacatcatttcagaaaaacctacatcacaaaggagaggtaacacgaccaaatcattaacagggaagcgaaagcaactgcaccaggaacctggagtcttatcaggagaataaatatgtatgtgaaatctcatactggattttcctgttcctttcctataaaagacgtggtttccgatgttgacctggggcaaaatcaaagctcacctgggctaagtcagcacacagttcctaatccttaggtaaaaagatacacttgtgaacagtaacgctcagtcaagctcacagcctctccacatcatcagggagttaacgtgcaatttataagcaggctaggatgtttgaagaatcccattccattcactaaaaacccagggatctcattcccaccctaagtgcagggcaagccctcggtattgtttcagttaacattcctgggcctcagtttcctcgtctgaaaaaggaagggactttggaatgggaaatctctacgatccctctcatgattcagataggctatttttcttttccaccaatagaggaagagactttctgacagccaacatttccattcctactattttggaacaaccagaacactgaaaatttggtacgaaaagcttttcttacgataaagagataacatttccttaagaacagttgctgaaacttcagctggggaacttatcaaataaagaaaccacctcatttcagactatgggctgaatccaataaagtcaaacccaacgcctcccaggaatttagaattacacagttgttgatcaagtggagagaaaagaatgtgaatttgttttttcaagattctctaacaccatatgaactgtggctgccttttctttaaatcatataatggaaaaaaacaaacttctagaaaaagatatgtatcatctcctccaagtggtgactggtccctgctcaatgtgttgtggtttaccttgccttgaac

SEQ ID NO: 736476 - DNA, 1173 bp, Homo sapiens
gctccccaggttgcactcgtaattctcactatccatggccttgttgataactgaggatctgatactggcttcctgatgtttcttttttttttggagacagagtctcgatctgttgcccaggctggagtgcaatggcaagatcaatctcagctcagtgcaaccttcacctcccgggttcaagcaatcctcctgcctcagactcccaagttgctgggattacagaaaaacctacatcacaaaggagaggtaacacgaccaaatcattaacagggaagcgaaagcaactgcaccaggaacctggagtcttatcaggagaataaatatgtatgtgaaatctcatactggattttcctgttcctttcctataaaagacgtggtttccgatgttgacctggggcaaaatcaaagctcacctgggctaagtcagcacacagttcctaatccttaggtaaaaagatacacttgtgaacagtaacgctcagtcaagctcacagcctctccacatcatcagggagttaacgtgcaatttataagcaggctaggatgtttgaagaatcccattccattcactaaaaacccagggatctcattcccaccctaagtgcagggcaagccctcggtattgtttcagttaacattcctgggcctcagtttcctcgtctgaaaaaggaagggactttggaatgggaaatctctacgatccctctcatgattcagataggctatttttcttttccaccaatagaggaagagactttctgacagccaacatttccattcctactattttggaacaaccagaacactgaaaatttggtacgaaaagcttttcttacgataaagagataacatttccttaagaacagttgctgaaacttcagctggggaacttatcaaataaagaaaccacctcatttcagactatgggctgaatccaataaagtcaaacccaacgcctcccaggaatttagaattacacagttgttgatcaagtggagagaaaagaatgtgaatttgttttttcaagattctctaacaccatatgaactgtggctgccttttctttaaatcatataatggaaaaaaacaaacttctagaaaaagatatgtatcatctcctccaagtggtgactggtccctgctcaatgtgttgtggtttaccttgccttgaac

SEQ ID NO: 736477 - DNA, 2666 bp, Homo sapiens
acttcggagagagaatgtagaatggaggaggtgaggaatttaactaatagagatgctttttctaacaggcagaaattagagaaatggatcaaaagatttaaacattgattacatataaacgagtttcctttttttctacatagcacacaggtgctcaacatttaatgaataatataacagatactgtcttaaaagtttaaaaacaggatttgtacttaatcctaaattcctcttatcacacaccagaaaataatttggattttatttacaaactacatccaaatactcttaaggaaagagtgtcatttagcttggagtagggactgactggggtctaagtgttggaaattaaattctgccattcagtccaacctcaaaggtgttccaggcaaggagttttgcaaggactagaaaccctttcacacttgaagtgcaggtgttggctgaaagaatagagggacatttcacaaacacagaacacggctcccctacaggaaagggatggagacagctacctttgctcttgctctcacattctctgtcctcatggactttcttctctgtttccctctgcctatctatctgcctggttctcttgcttctcctggccaaccagctttctcattagtgcatatgtagctgaaaaatccacccctcaagaacccactccacacaacctttccttttcagtacccaccacgctctgactagcatctctgtgatgcctaaggcaaatttttgaggatctgattggtttagttcatctgcctatgggtgagccaccctggggtcaggtgcctgtccaatcacctgttaccaaggaggcagggccgtgtcatttaagcatggccccatggactgaccctttcagcagggacttttattgggggctggtacccagaagaaggagcatgagtgggcaagaccttcaaaaagaacctactacacactggaactgactagtactcctgggatgccatgccacgcagcagccagcactcggagagcagtcccctggatactaccacacagagaaaaggggcatcttcacttgcacatcaggtgagggtgcacacacttgaaactctgctagactggccagagctgccccagccacttctcaccccaccaccagttattgatacagccgctgggtctaggaagcgatttctgaacaaggcccagttagcacaatgtcttgctcagcagacaataaatacttgtaaattgaattgcatgatcttagctcaggtgctactaatgtggctcacggccacacacttgcatggataagaaaaccaatgagcccctcaacagagtcttttgaaacaaaattggtttcaagtgaaacttacattattttttggctgtgaccttctgaatataataacttagtgtcctgagaattgaaaggcctcttgatttcttaggtgaactgttacagaatcctagcctgtggtaaatgctaaaatgtaaggtgtttctgagaaggaatatttaggaaatataattgtgccacacacacattactttagaagatatgcagttgctctgattctgcaggtttaaaaaaaatgggaagtttgtgatatggcagaatctgtctccattggtcaaaccatacttcagtgagagccattataagtgaaatctaaaaattgatcgttttcattctctgactttggtcagacttttgcaaattatggagagaggccatcaacatattttacataaattactgtggccccatcttatttctcctcatttcttccttatgtttaaacacgcccccatctcacacacaaactgagaaaagatttgtatcaaacagaatcagaggcatatgaatggactggaaattgtgaaaaaggtataaatatcctagaccttgatcaactcactttaaactggtctctgattcctcatctgtcaaatgagtataagaccctctgtacttcccatggtgattttgaggagcacatgcataatgtatctgaaaatggcttgacaagcacttgaagccattcttactaaattattagttttgtaattcggttttatccaggaaaatattttagctcctcctatctgctgaattaatttatacagtcacatgttccatgacaccatgttttgccaaggaaaaataaagaaattcctaaatttgaaattgcccacaagatctagcctcatctggagttgctgttattgtccttgttgtctatgatttggaggatatgtaagtacttgtacatgtgctttaactctgggtgaaaaaccccaaccggtgagtctttaaaaccatattagacacattgggcaaagtactgagcagaagctttgaatgtagctgttgttattttaatgcttcgctttctaatgaactttgtacgtccttagcctctgccgggaacagagtgttcatatgctgttagaattttttattgtaaaataaaatgacaaaggctttcataccccaaaaaaaaaaaaaaaaaacaaaaaaaagggggggcccaaatatcccggggcgccttgccccctttttaaagggccccaaggggcatataacgggcgggggcgtacaccggcggaaactcccggttctgacccctctggggtatgacccccaagcggcatacttgttggccctcccggtctcgtaaacc

SEQ ID NO: 736478 - DNA, 904 bp, Homo sapiens
ttcagagccaggcctggctctgaacttaggatctcacacacaaactgagaaaagatttgtatcaaacagaatcagaggcatatgaatggactggaaattgtgaaaaaggtataaatatcctagaccttgatcaactcactttaaactggtctctgattcctcatctgtcaaatgagtataagaccctctgtacttcccatggtgattttgaggagcacatgcataatgtatctgaaaatggcttgacaagcacttgaagccattcttactaaattattagttttgtaattcggttttatccaggaaaatattttagctcctcctatctgctgaattaatttatacagtcacatgttccatgacaccatgttttgccaaggaaaaataaagaaattcctaaatttgaaattgcccacaagatctagcctcatctggagttgctgttattgtccttgttgtctatgatttggaggatatgtaagtacttgtacatgtgctttaactctgggtgaaaaaccccaaccggtgagtctttaaaaccatattagacacattgggcaaagtactgagcagaagctttgaatgtagctgttgttattttaatgcttcgctttctaatgaactttgtacgtccttagcctctgccgggaacagagtgttcatatgctgttagaattttttattgtaaaataaaatgacaaaggctttcataccccaaaaaaaaaaaaaaaaaacaaaaaaaagggggggcccaaatatcccggggcgccttgccccctttttaaagggccccaaggggcatataacgggcgggggcgtacaccggcggaaactcccggttctgacccctctggggtatgacccccaagcggcatacttgttggccctcccggtctcgtaaacc

SEQ ID NO: 736479 - DNA, 834 bp, Homo sapiens
ttgcctgctgagtagacataaacacctgctaaagaaatgtgaaaagagtggaaacgtgctatttggaggttattttcctagtcgacatccaggagatctccagagatctatttcagccccacctgttgatttcatcatgaaaaggaggaagctcaaactgaagtgagttaaaaacttcatctcctagagaggactgtggctcggcctgagttgagtttttttatgtttatgtgcaagcgcaatgaagaagaacaccagcaagactaccatgaggatcaataagcaagatgctctctgcaccccacactcccatgatccgagagatcttcaaaatatgttggatggaggagagtatgccccttttgtatctcctcccatgttagagagcaattttatccagctgctcagctgatttcacagaggggtgacaagggaggacaacagacacttcaaaaggcaagaagaggatggcaggagctcttttgccatggctaccaggccgatctccgagcggaaccaggatgccactgtgtacgtggggggcctgaatgagaagttgcagcaattgaagccatgaatgggcagtacctctgtaaccaccctatcaccgtatcttatgccttcgagaaggactccaagggtgagcgccatggcttagcagctggacgacttctggcagctcagaacccgctctcccagcctgaccgccctcatcagctgtttgcagatgcacctccttcaccctctgcccccaatcctgtggtatcatcattggggtctgggcttcctccaccaggcatgcctcctcctggctccttcccacccccagtgctg

SEQ ID NO: 736480 - DNA, 733 bp, Homo sapiens
ttgcctgctgagtagacataaacacctgctaaagaaatgtgaaaagagtggaaacgtgctatttggaggttattttcctagtcgacatccaggagatctccagagatctatttcagccccacctgttgatttcatcatgaaaaggaggaagctcaaactgaagtgagttaaaaacttcatctcctagagaggactgtggctcggcctgagttgagtttttttatgtttatgtgcaagcgcaatgaagaagaacaccagcaagactaccatgaggatcaataagcaagatgctctctgcaccccacactcccatgatccgagagatcttcaaaatatgttggatggaggagagtatgccccttttgtatctcctcccatgttagagagcaattttatccaggtaaatcatattcaaggcctgagttaagttccaataacttcagtaattttctcaaagaaaactgaaaaggatggtaggagaattgttttaaatgtgccgagggaatgtgtgatactacaaaagagaacagtttgggaactttaaaaaacctgaaataattacaatgttaaaggacatttacttcaaatgtccccaaaactcttgtgaaggacttctgtcttaactctaccataattgccattccatcataatcttcccaaaattacatgaagccgtttttggcatttcccgccacagggaaacatacagataacttctttcttaggcgtagaa

SEQ ID NO: 736481 - DNA, 455 bp, Homo sapiens
atgtaggggccaacattttcaatgggaacctggaccctgagattgatgagaagttgctttatgatactttcagcgcctttggggtcatcttacaaacccccaagattatgtgggaccctgacacaggcaactccaaaggttatgcctttattaattttgcttcatttgatgcttcagttgcagcaattgaagccatgaatgggcagtacctctgtaaccaccctatcaccgtatcttatgccttcgagaaggactccaagggtgagcgccatggcttagcagctggacgacttctggcagctcagaacccgctctcccagcctgaccgccctcatcagctgtttgcagatgcacctccttcaccctctgcccccaatcctgtggtatcatcattggggtctgggcttcctccaccaggcatgcctcctcctggctccttcccacccccagtgctg

SEQ ID NO: 736482 - DNA, 353 bp, Homo sapiens; identical to SEQ ID NO: 461151

SEQ ID NO: 736483 - DNA, 1373 bp, Homo sapiens
ttgcctgctgagtagacataaacacctgctaaagaaatgtgaaaagagtggaaacgtgctatttggaggttattttcctagtcgacatccaggagatctccagagatctatttcagccccacctgttgatttcatcatgaaaaggaggaagctcaaactgaagtgagttaaaaacttcatctcctagagaggactgtggctcggcctgagttgagtttttttatgtttatgtgcaagcgcaatgaagaagaacaccagcaagactaccatgaggatcaataagcaagatgctctctgcaccccacactcccatgatccgagagatcttcaaaatatgttggatggaggagagtatgccccttttgtatctcctcccatgttagagagcaattttatccaggtcaacagaagaggtgaatccatttaccttcataaccgagccaactgggtgaccgtaggcatctgtttttccagctccacccacaagatccccaatgtgatgctactggcccatctgacacctggtgcccaaaaagatacagaaaccctgtttaaaagtctcctgacatctcctcctgcagagaaactagtgctcaccaggtttctccctctgcagtttgtgactctttctgtgcatgatgcggagaacatgagcctgaaagtaaagctggtgagtggtcgagcctactacttacagctctgcacctctgcatataaacaggacaccttgttttctcaatgggtggccctcatctccctcttgaatcaggagaaagccaaagtttccaaagtgtcggaggtttcaagtctctcaggaattacgaatagcacagacatcacaggctccatggatgtgacggatgtcaccacgttcacagccatcctgaccccgtacatgtatgcaggtacaggccctgaacatgtcagggacagcatagatttcccagaattcacagacatcaccgacatcacagatgtcacagatcttccagaaaatgaggtcccagaggtcccggatgtaagaattgtcacagaagtcatagaagtcagagaagccacggaagtcacagacagctctgatattacaaactgctcgggagtcacagtggtgtttgaaaacaatgacttaatcagggccaagcaagaggagaaggagcttgagaactgaatcaaacacttcaggcttgtatagtttttcagtttttcccctgattagcatttctttccccattttcactctcctctaaatcacctgttccccttccatacacttttactctcacttaacaccctgtaccccaagaaaagcaaagactggctgaatcttaatacctcattttattaaatgtaattggagtacaaattaaaaatga

SEQ ID NO: 736484 - DNA, 1299 bp, Homo sapiens
ttgcctgctgagtagacataaacacctgctaaagaaatgtgaaaagagtggaaacgtgctatttggaggttattttcctagtcgacatccaggagatctccagagatctatttcagccccacctgttgatttcatcatgaaaaggaggaagctcaaactgaagtgagttaaaaacttcatctcctagagaggactgtggctcggcctgagttgagtttttttatgtttatgtgcaagcgcaatgaagaagaacaccagcaagactaccatgaggatcaataagcaagatgctctctgcaccccacactcccatgatccgagagatcttcaaaatatgttggatggaggagagtatgccccttttgtatctcctcccatgttagagagcaattttatccagctccacccacaagatccccaatgtgatgctactggcccatctgacacctggtgcccaaaaagatacagaaaccctgtttaaaagtctcctgacatctcctcctgcagagaaactagtgctcaccaggtttctccctctgcagtttgtgactctttctgtgcatgatgcggagaacatgagcctgaaagtaaagctggtgagtggtcgagcctactacttacagctctgcacctctgcatataaacaggacaccttgttttctcaatgggtggccctcatctccctcttgaatcaggagaaagccaaagtttccaaagtgtcggaggtttcaagtctctcaggaattacgaatagcacagacatcacaggctccatggatgtgacggatgtcaccacgttcacagccatcctgaccccgtacatgtatgcaggtacaggccctgaacatgtcagggacagcatagatttcccagaattcacagacatcaccgacatcacagatgtcacagatcttccagaaaatgaggtcccagaggtcccggatgtaagaattgtcacagaagtcatagaagtcagagaagccacggaagtcacagacagctctgatattacaaactgctcgggagtcacagtggtgtttgaaaacaatgacttaatcagggccaagcaagaggagaaggagcttgagaactgaatcaaacacttcaggcttgtatagtttttcagtttttcccctgattagcatttctttccccattttcactctcctctaaatcacctgttccccttccatacacttttactctcacttaacaccctgtaccccaagaaaagcaaagactggctgaatcttaatacctcattttattaaatgtaattggagtacaaattaaaaatga

SEQ ID NO: 736485 - DNA, 618 bp, Homo sapiens
  misc_feature (370)..(370): n is a, c, g, or t
  misc_feature (600)..(600): n is a, c, g, or t
  misc_feature (611)..(611): n is a, c, g, or t
ggttcctcggatatggcgagggcaagcactcccatattataacaacctgtgcagtcagtgagtccagagcagaggccttgtctcctcctttgctcaccttcactcactgccctggactgtcaggccccagttctcatccccatgtgtgatgaagccatgcagtcccagagagggagccatcagcgcttggtagtctcatgctttagtgtcagagttgcaccttacctttgtatccaagaaatgcatgcagctcaactttcccttaaaaggcttctaggaaaaaactaccccagcattttttttcccccagaagaatatattagcttaataataaaaggtatagtaacaaactttccatttaaaatagtgncctaagccacaaatttacctttcctgcccgtatgtgcaaaattttcattgaaatgaaaaaatacacactaagaatcaatccagtgtgatgttggaaaagagagaaggttaccattttcaaatatgacaggtgtttctggaggtcacaaggcaaatggtactgggttgttggaatccctgagctaaataatggctgtgaaaatgccagatgagattggttatctcagcagngcctgggctgnaccccta

SEQ ID NO: 736486 - DNA, 1804 bp, Homo sapiens
tgtagagatgggtgtctcactatgttgcccaggctggtctcaaactcctggcctttagtgatcctctcaccttggcctcccaaagtgttgggattacaggcgtgagccactgcactcagccccgttactttccagcatttaatgttatttgacactttagttgacactctgattcttagtcttttatagattgcctatttggttgtgctctcttgctctctttccccagagactttaccaaggtatgtctcagtccatccccaattcttgcttaacactgtttagagaaaactccctctaaccgcacttttcctctactctcacacaacaatcatcaacacagaagacttctgtgatcaaatatgggttaattccccatacacccatcagcagacaccagctgcatgtcctctaattcaattccaacactatttacctagagatggtgtcagatcccacaggctgaggggtcagtccccaagactgcccctccacaccagtcgccaagtccgggccttcagaacttctgaccaaccagcttcaaagttcccatgaccccttctttgggttcaataaatttgcagaagcagttcatacaactcagggaaacacttagttcaccagtttattgctctatactggaaaaaatacagacgaagaaacgctagggcaaggtatgggggaagaggcttgaagcttccatgccctacctgggcacaccactctcccggaacctccacatgttcagctattgggaagctctctgaaccctgtcctcttggaattttgagtcttaagacccacaatcagaaaggtgggagaatattagagtggaaggagggcagaacaccagaggcctacctgaggcctaacacatccaacattataacaagactgtgtaagggctgtgggagttatgagccaaagaaccctggatgaaaaacctacatatatatataacaccacacactcagtagatgcttttgatatgaactatgtatttcactcagaagaattatctgctctcaataatgcaattatcatctacctctctcctttttactttctatagattccccattatatggatattagttacctggaatctgtcatactacttaactcctcactctagctctgtctgctgaagattgtaaaataattccacagcttattcttccttttaactatcttgtttcagccctttccattttaaaaattcagttcttccactaagatttttattttaaccattagaattcttgtttcctgggcctttatttcacagctgtgatagattctgaagcaggctccatgatccctacctcctggtagttgtcatttttaatacccttccctaagagtgggaaggacctgtgtcttgctctcaccctacagaatacagcaaagatgacaaagtgttgcctgtgtgattacattacagaagatagtaacatctgtgctacttggaaaggcgtctctcccctgccggctttgaggaagcaagcagccacactggaatgcctacatggcaaggaactgagggcaacctccagccaacagatggcaagaactgaggccctctgtccagccatctgtaagaaactgaatgttgcccaaccaccatgtgagctgagaagtggatccttccccaacaagcctcagatgagaccacagtcctgaccaacaccttcattgcagccctgtgggtccctgaagcagaggacccagctaagcctgaaagaaactacaaggtcattaatgtgtgttgtttaaagtcactaagtttgtggtgatattgtta

SEQ ID NO: 736487 - DNA, 716 bp, Homo sapiens
  misc_feature (654)..(654): n is a, c, g, or t
  misc_feature (660)..(660): n is a, c, g, or t
ttttttttttgctcaacagtcctttaaggtatgtgtccttaaggttaacttgctacataatatctgtctatgaaaaggttgtgaaccgtgaaccaaaggactttcatgattagtcatatgacacctgaggggacagtaccaggtacccaggtaccaacctggttgaactccaaattattttcaccaaaaaggatgaaacccattttcaaattagtgatatctgactcaagacattaatgtatgtgaaagaaataaacacaaaacttggcttttctaggctcaaagacttctagaagaaacgacttaaaaaatgccactaagagaggagcaagcttgagataaattgttaataattattgttgtccagtggggattcagaaataccaatcccactccttcgtgagtgttttccttacggtctatttactctggccacaccctgctgctagacaaatttcactttattggattggaaatacaattagcatagatttttttcccattaagtaaaatattataaagccatgcttataaatatctacatcactcaggcttgcaaatagacaagacaaaaacttttcttagccttatttgctaaattgaacctgatagcaaaatttctaatgtaaatcaaatgatggatgtgctgacagntaatgncacaaagtagtcattctacaagaatacatacataactactaaaatttaaaatggcc

SEQ ID NO: 736488 - DNA, 693 bp, Homo sapiens
  misc_feature (2)..(2): n is a, c, g, or t
  misc_feature (4)..(4): n is a, c, g, or t
  misc_feature (38)..(38): n is a, c, g, or t
gncntcgggcaaattactctctgtgccttatatgtaanctggggacaataatggtatctagctcataggaggattatgttataaagattaaataagttagtatttataaagcacatagaatagtgcctgacacatggtaagaactttacaaaaagtgtttgttgttgttgctgttatttttacatgccaaggcacacatattgactcaaacttagatatttaaatcaaacttcagaactcagctttaaagcagttccataccatatggtaataaattcatctgcccgttatgtggttatcagagttagttagatcactgcagatttcttctgagaaccaggtaaagaggttaagaaagaggagctatgtaagaaggaaaatgttgtggacagccagaagaaatgtcttataactggtattgtaagtaagaaattttccagccaaactttttcaaaaaaatgatactgaattacttgataaatcatgttctggggtttctctaacttctccaggtggattggagtaggtgtgtgtctatacaccaccagtatcaagtgctttcagctttcctccaagatgtagaaacatcaaacaagtgcatcaaaacttttcaatctatttttaaaaatctagtcatgtgagattatgaagtgtgaactctcattcatttaaagtaattaccaatttttacat

SEQ ID NO: 736489 - DNA, 702 bp, Homo sapiens
  misc_feature (45)..(45): n is a, c, g, or t
  misc_feature (693)..(694): n is a, c, g, or t
  misc_feature (696)..(696): n is a, c, g, or t
  misc_feature (698)..(701): n is a, c, g, or t
tgagacagagtcttgctctgtcgcccacgctggagtgcagtagcnaaatctcagctcactgcaagctccgcctcccgggtttacaccattctcctgcctcagccttgggaggttgagactgcaatgagctgtgattgggccactgcactctagtatgggcggcagagtgagtccctatctcaaaaaataagtaaataataaagttttccaggtgattctaaatgggcagccatatttgaaaattcccattctagactgctaagttgaactgcctaaacaaaagatctaaagggagaaaaaggccaggcatggtagctcacgcctgtaatcctagcactttaggaggctgaggcacacagatcacttgaagtcaggagttcgaaaccagcctggctgacatggtgaaaccccatctctactaaaaatacaaaataattagctgggcgtggtggcgtgcacctgtaatcccagctacttgggaggctgaagcaggagaattgcttgaaccctgcaggaggaggttgcagcgagctgaggtcacaccactgtactccagcctgggcaatagagcgagactccatctcaaaaataaataaatacataaataaaataaaatgaaaacaaaaggaaaaaagtggtcttggtagagattgctagcttagcacatcatcttcttttactctatcctaaacnntngnnnng

SEQ ID NO: 736490 - DNA, 813 bp, Homo sapiens; identical to SEQ ID NO: 74646

SEQ ID NO: 736491 - DNA, 640 bp, Homo sapiens
tcaaatctccaaaaaaaaaagtttatttataaaatactgacagtttgacaggacacgggacttcttgtggtatatatttcaaatcaatttctttcttacctttcatttaaaaaataaacctgctaacacgctatatgacatagagatatatatttttttcttacagacagacacctgccataatgaatactctccccataattttttgttatatcttttaaatcaaaaaataaagatttgtgttgatttttgtttctggagtctagatggatggagaaaggtaacacgtttaaatgcttttggttattctgatggaaacaaagagaaggggggtggtcccgagggggcacctgtgctcaggtggtggtcaggattgccatgtgcgcatgcccatgggtgtccctggatagggccatacagaggcactggggagcgggtggcggctgctcagatggtctcccctttaccttcctgcccaccagcccctcacccagggtaggcaccttcagatgtgcactctgggaagctgagggaagcccctgcccagccagagtggcactgtggtgaggctctggcacctttagaagcactgcccagggaggcgtgggcagcaacagaaggccttgaggcagcgtgcacc

SEQ ID NO: 736492 - DNA, 1971 bp, Homo sapiens
ttttttttctttttttaaacaaataccattccttgtactttgtccctctgggaaattcctattcatccaacaagtctcattcaaatgctactttttacaatgaagctgccagatagttgtaggtacagtcaagcaccacataatgatgttttgatcaataacgaatgaacctgcatatacaacagtggtcccataagactatacaaccatatactctgtaactaacttttctatgtttaaatatgtatagatacatgaatatcattgtgttacaatttcctacagtattcagtacactaacatgctatacaggctcatagcctagatgtgtagtgggctataccatctaggtctgtgtaagtactctctatgatgttcacacatgaagaaattgcctaagggcacgtttctcagaactcaactctgttatgtgatgcatgacagtatttttcctgtgcctctgctgttcttgacacactccaccatcatccttttgtaatcctctgtttacccatctgtcttttaaagtataggcttattgatggcaagaatctggaatcattccttgtaattctagtcccagcacagtgcactcaagaaatatttattaaataatataggtaaaaatctaattacagtgattgtaacaacattctgcctaagttattgcacatctaccaaatacagtatggtacaggagaaaaaaacaagttttaatgtcagataaacataaagtaatccccccttatctgtagggaatatattctaagaccctaactttacttaataatggctctgacgtataagagtagtgatgctggtaatttgaatacgccaaagggaagctgcaaagtgcttcctttaagtgaaaaggtgaatgttcttgatttaataagaaaacaaaagaaatcatacgctgaggttgctaaagcatacaataagaagggaggatagtctatccatgaaattgtgaagaagaaaaaataaattcatgttagttttgctgtcacacctcaaactgcagaagttatgcttcagtgcatgaaacatgcttagttaagattggaaaggcatgaaatgtatgggtagaagacatgaacagaaacatgttctaattgatggtaatcaggttctgtactatccatggttttaggcatccactgggggtcttggaactatgttctaaggataagggggtactgttgtacaagatggcagggaacaaggccaaagacagatcctgcagctcaggccaaactggaggatgtgggcctggttttcagtttgagtgggcaagcccaagtgactgttcagagatccaaacctgataggggctaaggccaagggatggtccaggcaaatggattggagagtcctggtagcttgcactgatacacttcatatgactgagcttaggatgagttccttgtgtctcactaccttttatagcagttttcctggcagataaggactaataggtatatgctcctccccagactggggatggctttggtaacaactggagagcatgcctgagtttcccaagtaacccccaaagtcctttttagggatctaatactcagtgatctaaacaataaaaggttgttttagtacacggaggataaattatccttgacattcattagcagcttaacattaacattaggcaaatacttaatacccctttacctcttatccactttctacttgacactctatctaccagacaaagctaggatgattctgagtgttggggaaacatgaatgggggctgactctgtgtgtgacactttcttctacaaagttggaatcaatttcagtgagttgttgattcggaattgtttgtcatcaccagccctggaagaatggaaatgtgatttcaagcactgtatccacttataaaattatactataactaaaaccttattttagttagcaaaaacaatagggttttcatttacttaagagagg

SEQ ID NO: 736493 - DNA, 540 bp, Homo sapiens
ggcagatctcagaaaggaagcggggcaggaatcaaggcatttcgaaacaggagagtgttttatcacaaacttcatcagtggccgaaaactcattcacgtcaactgctcaaacctccctcagatggggataacaaactttgaggacatgaaggcaatttctcggcatacgcaggagctcctggaaattgaagagccattattcaaacgctccatcagccttccctatagggatattatcggcttatatttagagcaaaaaggtcatactgggataaaatctgattccttgactttatctgaatttgtcaaagcagcaggattacaggattatgctccagaaataactgcccctgaagagaatgaggaattaccttgcactgaaccataggggaaatccacttcacagagcagaagaatcatttgaacccaggaaacagaggttatagtgagctgagatggtgccactggactccagcctgggtgacagagtgagactctgtctaaaacaaacaaacaaaacaaagcaaaacaaaattcctg

SEQ ID NO: 736494 - DNA, 1965 bp, Homo sapiens
gcggccgcttgaaaagctagctgacccaggggcggccacaggagctctggcccgctgaggctggcgatgaggccgcagggagggttactgcgtgcttgtgacagacgatttttaaagtcagggcttgaaagaacaaacaaaacctggggaagagtcaggaagacactgccggaaatcgtggtatccatagagacgctatcggaagttggggttgctaggaagccgcggcgcgtctgctaagctgcaaatggctgaagtcccggaggattatgattccggcccagatgaagatggagagctggagcctgagaggcctgaactgcctggacttcataaattgtatgaaaatgccgaaccagacaccatggcaaaggcagactcgaagctaccagcagagatttaccaagagccacagccagagaccgaggaagaggacttcaaagagggggagccagacagtgctaagaacgtgcagctgaaacctggcgggacgtcccaggaaggaattgccaaggagtccaagagagacgtaccaagcgaaactgaaccagggatacaccaagaggtaaagtcggaaacatccagagagatgggagagtttttcaaagatttggaggcccctatggatgaaacgcataaagagtcagacctagagccaccagaggaggctaaaccaaatgttacagaggatgtgttcctagagtcagctatggaaacagatccagatccagtgccaccaacggaaaccatgtctgaggtttcgggggccacagtcagagagagaaatttagaattactagaggaggagactgaaccgggggttccagaggaatcacttagagtgcaacatgaagagacaggtctagagcctccagagcagaccaaacaagattttccaagtgagaaactaggagaatcacttgaagagacagatcttcagccaccaaagatgaccaaaccagagactccagaggagacacaaagagagtcaactgagaagaaaaggacagagccacccgagcaggctagactggaatttctggagaaggaaccaagaaagtctagtgaggaggcaggtctagagcctccagaagagactcaaccagaggttccagaggagatgcaaagaaaggcaactgaggagaaagggacagaactacctgagcggactaaaccagactttccagaccacaagccaagaaagtctactgatgagaacgttcctgagccactagaagagatcaaattagagtttcctgaggaagaatcaagaaaaacaaatgaggaaacaattctagaacaatcagaaatgatgaaaccagaaagtccagaagagataagaaagtcaaatgagaaaaaaaatccacagccaccagaggagactggtccagtgctaccacaggagatcaacccacaagttgaagagaaaacacaaacaaagccaactgagaaaattctagagttaccagatgaaaccaaaccaagggagacacatgtagaattttccaaggaagacaggccagaaccaataaagtctaagtattctgtaggaaacgatgagctagagcaccgtgagcctaaaagaggaaagttgtcactaagtgacaaatttagaaaagaatattacgcattaggatctctcagagaaagtgaagaatcaattggtacacattatgagtttttgcaaccactccaaaaattgcttaatgtcagtgaagaatgctcatactcagatccctcagagtctcagacagaattaagtgagttcgttcatgaaaaggaagttgtagatttgtcccaagagttgaaggaacgggtctctgaagatgacgaaacccagccagaaaaagggactgagttacaatttgagcatcttaattgggatccagaggaagttgcagagtggattagccagctaggcttccctcaatacaaggtatacaaaaataagatgttttgaaatca

SEQ ID NO: 736495 - DNA, 438 bp, Homo sapiens
gggcgatctagaggatcccagcgcgagcttcatcaatacaaggagtgttttatcacaaacttcatcagtggccgaaaactcattcacgtcaactgctcaaacctccctcagatggggataacaaactttgaggacatgaaggcaatttctcggcatacgcaggagctcctggaaattgaagagccattattcaaacgctccatcagccttccctatagggatattatcggcttatatttagagcaaaaaggtcatactgggataaaatctgattccttgactttatctgaatttgtcaaagcagcaggattacaggattatgctccagaaataactgcccctgaagagaatgaggaattaccttgcactgaaccataggggaaatccacttcacagagcttgaaagatcaaactaaattacttgatggaagacggtat

SEQ ID NO: 736496 - DNA, 2332 bp, Homo sapiens
gcggccgcttgaaaagctagctgacccaggggcggccacaggagctctggcccgctgaggctggcgatgaggccgcagggagggttactgcgtgcttgtgacagacgatttttaaagtcagggcttgaaagaacaaacaaaacctggggaagagtcaggaagacactgccggaaatcgtggtatccatagagacgctatcggaagttggggttgctaggaagccgcggcgcgtctgctaagctgcaaatggctgaagtcccggaggattatgattccggcccagatgaagatggagagctggagcctgagaggcctgaactgcctggacttcataaattgtatgaaaatgccgaaccagacaccatggcaaaggcagactcgaagctaccagcagagatttaccaagagccacagccagagaccgaggaagaggacttcaaagagggggagccagacagtgctaagaacgtgcagctgaaacctggcgggacgtcccaggaaggaattgccaaggagtccaagagagacgtaccaagcgaaactgaaccagggatacaccaagaggtaaagtcggaaacatccagagagatgggagagtttttcaaagatttggaggcccctatggatgaaacgcataaagagtcagacctagagccaccagaggaggctaaaccaaatgttacagaggatgtgttcctagagtcagctatggaaacagatccagatccagtgccaccaacggaaaccatgtctgaggtttcgggggccacagtcagagagagaaatttagaattactagaggaggagactgaaccgggggttccagaggaatcacttagagtgcaacatgaagagacaggtctagagcctccagagcagaccaaacaagattttccaagtgagaaactaggagaatcacttgaagagacagatcttcagccaccaaagatgaccaaaccagagactccagaggagacacaaagagagtcaactgagaagaaaaggacagagccacccgagcaggctagactggaatttctggagaaggaaccaagaaagtctagtgaggaggcaggtctagagcctccagaagagactcaaccagaggttccagaggagatgcaaagaaaggcaactgaggagaaagggacagaactacctgagcggactaaaccagactttccagaccacaagccaagaaagtctactgatgagaacgttcctgagccactagaagagatcaaattagagtttcctgaggaagaatcaagaaaaacaaatgaggaaacaattctagaacaatcagaaatgatgaaaccagaaagtccagaagagataagaaagtcaaatgagaaaaaaaatccacagccaccagaggagactggtccagtgctaccacaggagatcaacccacaagttgaagagaaaacacaaacaaagccaactgagaaaattctagagttaccagatgaaaccaaaccaagggagacacatgtagaattttccaaggaagacaggccagaaccaataaagtctaagtattctgtaggaaacgatgagctagagcaccgtgagcctaaaagaggaaagttgtcactaagtgacaaatttagaaaagaatattacgcattaggatctctcagagaaagtgaagaatcaattggtacacattatgagtttttgcaaccactccaaaaattgcttaatgtcagtgaagaatgctcatactcagatccctcagagtctcagacagaattaagtgagttcgttcatgaaaaggaagttgtagatttgtcccaagagttgaaggaacgggtctctgaagatgacgaaacccagccagaaaaagggactgagttacaatttgagcatcttaattgggatccagaggaagttgcagagtggattagccagctaggcttccctcaatacaaggagtgttttatcacaaacttcatcagtggccgaaaactcattcacgtcaactgctcaaacctccctcagatggggataacaaactttgaggacatgaaggcaatttctcggcatacgcaggagctcctggaaattgaagagccattattcaaacgctccatcagccttccctatagggatattatcggcttatatttagagcaaaaaggtcatactgggataaaatctgattccttgactttatctgaatttgtcaaagcagcaggattacaggattatgctccagaaataactgcccctgaagagaatgaggaattaccttgcactgaaccataggggaaatccacttcacagagcttgaaagatcaaactaaattacttgatggaagacggtat

SEQ ID NO: 736497 - DNA, 1111 bp, Homo sapiens
gtagcaggatcagtatgaagataatacagtatctcttaaaacaggcagccagcaaatgaactttctgcattggtcagaatttccatcatttcactgttaatgaggaaagtacagttctttagctaccatgaaagtcaaacatatcctaagccttttggaaaaagacatacatgttagaaaatctcaaatggatgagtcagcctgactgaccccacattgactccattttatatgctggccaaatcctgtttctgactttcctggcacagccctggacatgcttctgtatcataggacttgttccccagcgcctttgctacttccttcaggcacattcctaggaaagattggcagtggggtttgctctttgccagcactcctgccggtttgggggttatggatgccaggttgggctccaggcactctgctctccatttgtggaggcagggacggtaacagcacctgacaagtagggatgatcacattgtattcagaagcctggtggagctctataaacccaaatttctaacagtctccaatgtaatgccctgtaatagaagctgtccttaaccctcaatcatctgtattcagctagtataaaaatgcaaatctgctcttatgcctaaacagttaggagtagaggagacttggcttcctttggaaagtcaggatgatagcttcatcccattctggtttttgtgattaattgtgacctacaaaggggtttactactctagcaggaactttgaatttcctatatacatctctttctggttagcaggcagaggaaatatcgttgacttttggcttcctggcaaatgtctcatttgccttgtcatttgttgattccttttccctgatctctgtttggtgtgataatgtacagcaaagctgaaaaccgcagggctacatgtacacttgtaggtacctatgttgtgattgccaaaaggctcagaaagccagttttctagtgaaaatggctaacattctaagaaatgctttcactgagaaagagaacgggtcaggggaaggtggaacttaaaggaagatggagtgttcctgaattcagattcctgaattagccatttatagtttcatgggaagacaatga

SEQ ID NO: 736498 - DNA, 705 bp, Homo sapiens
tacacaaatgttcatagcagctttatttttaatagcccaaaactagaaacaacccaatgtcctacaatagatgagtgagcagtcagacaaactggtacatccacagcaatctgttaaaaaacgaaaaactatcggtacatataataaaacttggatggaattcaagagcatcatactgtggaggggaaacccattctcaaaaagttaacatatgctatgtttgtatcacatatattatgccattcataacttcttgaaatgacaaaattacagtgaagattagtgatttccaggggttagggaaggtggtgaaaggatgggtgataaggtgtgacaataagtgggtagtacaagggttcctttgtggcaacggaacaattctgtatattatggtggtggttaaagtgcacaactacacacatacacacacacacacacgaactggtgaaatctgaataagacctggagtttagttaatagtaatgtgccagtcagtgttggtttcttagttttgacaaagttaccatgttaacattaagatattaacataagggggaaactggatgaagggtatataaggaactctgtactgtctttgtaacttttctgtaaatctaacattccaacataaaaacatttattttataaaagcaaagaaaaaatgctaatatgacactattacacatcaaccagaatagatgaaat

SEQ ID NO: 736499 - DNA, 848 bp, Homo sapiens
gaagagaaacatcacattatttatttccaaagaaaatagccaaatgcagcgccatgtacacaaaagcctttggagggaaaaggaatcacagatttaatatcatttacatttatatatttacaagatcaagccatggctttcaactttgttgttcattcaacaatcactttcagtcaaacaacttttattttcaagttagttcataatttaactgacactaaagagacagatgataaatcacaaacagtgtgggtagagagggtacaaatagtctaaagatttcagccaggcttttgtgtatatgtgaattatgattacaaaatgtttgcctgtctgtataattcacattcattgcaattattacattttctcataaattagcaatataaacaaacatatggagaccttcagttaacaaataaaatcaatatcaggaagaacattttgcagcaactataataacagcatgggttacagcttggaaaaacttctttacaagccatttattcagcacacacagagtagggggaccagcacatccttatttatttaaaccacctttaaaaccaccacaggagttttggggaaacctgaactgggtgaaagtttctttgctgggcacaatataaaatgaacaacttcacacgtgaatgaagggaaggatgggcatttacatgcattttcgatcactgtgttgtagaccaaaccttctaaacttcaattgccaagattctgaaggaaacaggaaattaataaaatatctctctccttcagctattctccttcttattaacggcagaaagggcttgttgattgctgctagtgagaagaaacacacaatgggtcta

SEQ ID NO: 736500 - DNA, 1474 bp, Homo sapiens
aaaaggtggggccggaggcggcgagctgagcggctctgacaggacgggtcgcagggggtcgcctggccggagctgggctccgagaatcccgggtgccagcaccagagcagcggctctccgcactaactctcctctcctggtcagctgtaacccctgccgcagagcccggcaactttcagctgtcgcccgcggagccccgagggccactcgcctcacctgtgcgtgcagcgcctcgcgcgccctgtccggctgcggagatgagcgagcttaataccaaaacatccccagcaaccaaccaggcagctggccaagaggaaaaaggaaaagctggcaatgtcaagaaggcggaggaggaggaggagattgacattgatctgacagcaccagaaacagagaaggctgcccttgctattcagggcaagttccggcgatttcagaaaaggaaaaaggatcccagctcctgaatggccaggcttgcccttcaccttcaccttcatgctggtcccttctctccccttctccacacccatgtatctttatcccttgtccctctagcctttccttgaggcaagttcaacctttatatactcttgtatctggccccctcaagccatcacagaagtagaggcacaagagaggtggagaagatgaagacttcaatcagcagtcactagtctaagggtggaacaatttcttcttggtataaggttctttgatcagtagctatgcctgccctgtagggctaaacaagaggcttcgaggctgagagatctccccaaagaacaatgtgggaaggaggggaaggctttcagagtagggtgcctgagggtgggacatatgcactgttctgctagttacggcattcacactttaggtaacattttttttccccttcagatccttctgcaccaactccaacttcccctcccaggatctaagccacagtggggactggagcctcgttttccccctaggcagacctaaatcaagcagcttaccacaatagtgcatgctgagtagattagttccaaggaagggagactggaatgctggtgtcaaggaaaagcctccctcatcatctagtctaagaccataacgggcagaagcataagaggttccagggccataggagaatgagaagtagggcacatatagggaggaaagaaaagtgaagaagggggaaatctctgaatttttttactgctgggaaaagtgtactacatgaaggatgcttggggctttgctaacctgctcaccgctaaccctccaagtctaaccatccccagaggccacacaaaccaagtgactcctgtagttcccatttgccccactatggagtcagggcaaaagtggaatagccactccatgtgattttagcatgtttaatcattttaacaataaaccaccccacaaatggggtcatttaacctctaaaaaaaaaaaaaaaaaaaaaaaaaaaaaaaaaaaaaaaaaa

SEQ ID NO: 736501 - DNA, 1273 bp, Homo sapiens
  misc_feature (1)..(2): n is a, c, g, or t
nntttacagtagtccattcctagggggaatgggccccaaggttttgtttttttatttcgtttttggggtacaggtggtgtttggttacatggatgagttctttagtgatttctgcgactttagcgcacccatcacccgagcagtgtacactgtacccaatatgtagtctttcatccctcaccccactccaagatttagttctgccagacgatacatgttgccttcacttctttttagtttatttgcctggacccatctaagtcatacttaaaactctataaagcattttttttctttgaaatggtctcagctccttcttgatcctctccattttccacccaatctcctctatccctctccctttactgcctgaaatcggctgtagatgtagcagtttctggaggaaatgaagatttgtggtggttctttccagtcaccaggttgtgaaagtcttaggggtgaggggaaggaaatcccctcaaggacaagatactactaccacattaaggtcaggagttcttaaagggcgaagatttcattttattccactgccttcaggggcctgctagaggaggcccagttggtacagtaatacttattcaccaagctggtcatcgacgaaattgaggatgtcctagacggagcaagaataggcagaggctgaaggtagaggttttctttttatatatacaagacacattaatccattaaatttgaggacacagtacaaaaaaaaaaaaaaaacaaaaaaaaaaccacttcaactaattcatctgacaatgctgttcatattcatgacgccatttttttgtttgttgttgttgttgttttcctaataataaagaaggagacttagggctgttgggctgatatatgtttgggggtcccacctccccgcctcatccgtacaccaccagggtgaacaggaggaagcaaaggaagtgcagggcccatagcaaagtttcataatcttgaatgcaagaggggagaaggaatggaagggggaaaaaaaaggagaaaatacaaatcctataatacatacaacagggtggggatggtataggaatgggacagacatgaagctgaggcatggggtgggccgctgggggtggggggcagcggaaaccccccacattcctttctctttgatgctgtttccatagtttccaggctgagaagccctctcagaagatgggaccgggagaagagggtcagggcctcagttggccccccagctgtagctgttgttgttttcctaataataaagaaggag

SEQ ID NO: 736502 - DNA, 570 bp, Homo sapiens
tggatcactcaaatgcttcattaggttactaggtctctcctttcccactcccactgttatagatttactcaaagaatggaatgaactagtttcctgtcactctcatacttattctcttgaaaagttatgaaaaaggttggggagtaggtaggaaaaggggccaggagagttgcacagtaaattacatgacacgttaaacaatttgccacgctttaccttcctattacgtttctcgttttttttctcagagggctaaattttaacttcttagaggaagtgaagtctagagaagacctttcatttagaaaaagtaggatgggtttcctgccacctctcctagggttcttcttgtccactgttatttctaccattgcaactccacctcctctatgtctatctcttttccacttttatccagagccaggcacctacctgggttttggagtacacagaacccgagatatctggcacgcccgtgttactggaggtgactgaaacacctgggggaggaggaaacagacaggaggattagctcagctagctacctggcccttattcctgagatgaggt

SEQ ID NO: 736503 - DNA, 297 bp, Homo sapiens
gtcctttcccccactgcttatgtaagaggcaaaggaaagatctaaatggaaaaatgaagcaacataagcatggagaatcaggtatttctacaaatagtttcctttaccaactaatcaacaggtgggaaactgaggctgtttcccctccccccaccttcataaaaccaccatactgaaaaattaatagttctttggctatgctggggtttgattaaaaaggccaccctccacccttcatccacagcacagcattggttcctaggtccacaaagacagcacggaaagaacgccagagtt

SEQ ID NO: 736504 - DNA, 810 bp, Homo sapiens
  misc_feature (27)..(27): n is a, c, g, or t
tttttttttgtgtgtgtttttttttcnttagctaaagaaataccacagtttattgaagactacaaatatttttgttacaagttgaaactacatgccttccagaaatcaaaagcaacagcaggtgtgtgcattgatgcttcgaaggtgctgcaccgcttgaacttgaaatgggtaagacagggtcagacacatgggggagagggaaatgggggaggggcaagttcaaaagcccagaaggtatccaccaactcatttccccaagccacgcaggccatggcctcagctcagcaggctctcctcagtggtctggtttctgaaacaagacttcagtgcaaatttatacacacacacaaaacacagcccccagccttgggccaaattagctctcagccgtccagaaatgcttgtaagggggtggatattttcttcctaaaaggaatcaaatacataaaaataaatgaatggaatgacaaaagccctttgtggggttgggaactgggggttctcaagggctgatataatacgtttctgaattctgaagggaggcaagaaggtgggatttctagaatcaggtatgccaattctcttatattatccatcacctacctcttaaaattcgtgaacctggtccaactaagacttcaacctaatgtcctcagaaaggggccaccactccaagtcaaaaggcttataatcctccccaccaagatttagggtgaaccttgctcaatgacaggggtggccacaaggagtctatgtattaaatctcaatggggcttctcaggatttgtttaatttaactcatgaccc

SEQ ID NO: 736505 - DNA, 593 bp, Homo sapiens
  misc_feature (27)..(27): n is a, c, g, or t
tttttttttgtgtgtgtttttttttcnttagctaaagaaataccacagtttattgaagactacaaatatttttgttacaagttgaaactacatgccttccagaaatcaaaagcaacagcaggtgtgtgcattgatgcttcgaaggtgctgcaccgcttgaacttgaaatgggtaagacagggtcagacacatgggggagagggaaatgggggaggggcaagttcaaaagcccagaaggtatccaccaactcatttccccaagccacgcaggccatggcctcagctcagcaggctctcctcagtggtctggtttctgaaacaagacttcagtgcaaatttatacacacacacaaaacacagcccccagccttgggccaaattagctctcagccgtccagaaatgcttgtaagggggtggatattttcttccagtgttgtatccatgagacccatatccactcggctgttggaaaggggtggccgatgcattcacactgacattcacaccatgctgcttggaagaggtaggagccacgttcacactcaagctctctttttctcttcccaaaaatatttttcaattcattctttta

SEQ ID NO: 736506 - DNA, 1048 bp, Homo sapiens
  misc_feature (27)..(27): n is a, c, g, or t
tttttttttgtgtgtgtttttttttcnttagctaaagaaataccacagtttattgaagactacaaatatttttgttacaagttgaaactacatgccttccagaaatcaaaagcaacagcaggtgtgtgcattgatgcttcgaaggtgctgcaccgcttgaacttgaaatgggtaagacagggtcagacacatgggggagagggaaatgggggaggggcaagttcaaaagcccagaaggtatccaccaactcatttccccaagccacgcaggccatggcctcagctcagcaggctctcctcagtggtctggtttctgaaacaagacttcagtgcaaatttatacacacacacaaaacacagcccccagccttgggccaaattagctctcagccgtccagaaatgcttgtaagggggtggatattttcttccagtgttgtatccatgagacccatatccactcggctgttggaaaggggtggccgatgcattcacactgacattcacaccatgctgcttggaagaggtaggagccacagggaacacagcaggcccatactggaaggtgctggggaggcccgggacccctgtatagtatggcaggctggtgtaactgtagccaggaggcagcgccgggttcaggaatgtctgctgcgtggtatggtgagtctgcgtctggttctgttggggttgggccaaggttgtggccggggctggggaggaggcatccccacggccgaactttgtgaggtcaccagaataagggttgctggccaggctaccatccctcccagtcagcggagtagtgggtgtgggaaatgggatgctgtagtaatcctagaaaagaggggaaaaaagagcagagattcaatgtcactcattccccagcatgagtactatttccacggaggaaaaaacagaagaatgtgagagttgtgcaatttatccagtcactaattaagctggctagagttagcacaaactccacattactcttgcatacactgtcccccctgcctggccatgagcacagtcagacaaggtctacgg

SEQ ID NO: 736507 - DNA, 1266 bp, Homo sapiens
tggatcactcaaatgcttcattaggttactaggtctctcctttcccactcccactgttatagatttactcaaagaatggaatgaactagtttcctgtcactctcatacttattctcttgaaaagttatgaaaaaggttggggagtaggtaggaaaaggggccaggagagttgcacagtaaattacatgacacgttaaacaatttgccacgctttaccttcctattacgtttctcgttttttttctcagagggctaaattttaacttcttagaggaagtgaagtctagagaagacctttcatttagaaaaagtaggatgggtttcctgccacctctcctagggttcttcttgtccactgttatttctaccattgcaactccacctcctctatgtctatctcttttccacttttatccagagccaggcacctacctgggttttggagtacacagaacccgagatatctggcacgcccgtgttactggaggtgactgaaacaccagtgttgtatccatgagacccatatccactcggctgttggaaaggggtggccgatgcattcacactgacattcacaccatgctgcttggaagaggtaggagccacagggaacacagcaggcccatactggaaggtgctggggaggcccgggacccctgtatagtatggcaggctggtgtaactgtagccaggaggcagcgccgggttcaggaatgtctgctgcgtggtatggtgagtctgcgtctggttctgttggggttgggccaaggttgtggccggggctggggaggaggcatccccacggccgaactttgtgaggtcaccagaataagggttgctggccaggctaccatccctcccagtcagcggagtagtgggtgtgggaaatgggatgctgtagtaatccaatggaaatcttgtctgaagcatctgcaagtcatcataaccatatacttgtggcgggtaggcatgtaacagccctggagccataatatacggattaggcaacaacggcgggaccccaggagggaggttgggaggagcttttcctgaagtcgtagcaactgagcttcgagtcgaggctgtgacagtggagttgctgcctaggctgaggcccaggctactgccactattgagactggaggagacactgaccactgggggaggtgcagagactgtgctggatgtggtggaaaaagtgctggaggaagaatggagattcgcctcactctccacacttgtgtgcttcaaaagggggagcagtgg

SEQ ID NO: 736508 - DNA, 462 bp, Homo sapiens
  misc_feature (455)..(455): n is a, c, g, or t
caggaccttatagcaaatacttaaatgcaccaagtagtcatgtaccaccagcagctgttactcaatgcactacctgcctaactccacttctggtgccctacccaaccaccaatctcttcctgggataaatccgacaatcagatattggacttacacaagtgcacttgccctttccatagtgtggttccacagagtcctgttcatgcccagtctccttcatataacatatgtgaaatgttctggctcagaacactattttggatgtaaaagttttgggtcagaatcttaagggtgaattttgaggggtagaaacatacccattttctatccctaaacaacacttagggatagaaggcattagtgaggaatgacctgggaatacctacatcttcattccaatcttcagtcccccactcctctgttgcagtcctccatgcactcgtcccatatctggntcaagtt

SEQ ID NO: 736509 - DNA, 1174 bp, Homo sapiens
  misc_feature (1137)..(1137): n is a, c, g, or t
  misc_feature (1146)..(1146): n is a, c, g, or t
  misc_feature (1156)..(1156): n is a, c, g, or t
caccaccgcactcagctaattgaaaacaatttttttagaaatggagtcttgatatgttgctcaggctgttcttgaactcctaaggctcaggctgtcctcccacttcaacctcccaaagtgctaggattacaggtgtaagctaccatgcccagcctctaaatgtgatgagaaatacatagcctcaaattttattattccccaacttcttgaattcagcttatttgattaggggaaatacatgtgggaaggtaaccaactagctgccccttttcttcacttcaggacacattctccaccccctccccctgctagcctcttgacagtaatgctccaatgctttaaagattcaagtcactttccatcttctcaccatactgcaccagtgatggggattgtgtcgtcgagcccatgtcccaagaggaggtggtggtgcttccagactgagaatgctgagctgccaactgagccagggcttgggcagtcttgaattgctccaagaactgggagcctgtagtactgccgcctttagcttcaccgacatcaccaaatcctttccctaacatgctcaccatactgtgatgagaaaatgtgttccctgaagcaggctgtgatatggcagtctgcttcgaattactgaacaccagaggctgggccagagaaggagcctgagacggatccagattagatgaatcattctccattgtagatggtgtcttccccagcagaacagcaaggtcaattctctgaccagcagtgattgtcacattctccgcaggcagaggcactgaagacacattagaggcagtgaagatcttggtctcagaaagatcttcattccaatcttcagtcccccactcctctgttgcagtcctccatgcactcgtcccatcatctggttcaaagtggccagtgttgttccacgtattgccgctgctattgccatagttatcatcagtattggctggctctgcataatcagctgggttaaaggttcccattccttgagcagaaaaccttcctcctcgcctaccagagccacctctgcctcggccacggccccttctgcctctttctgttcctcttccagaaggccctccactcttggtgccatccaatccattttcctgacctcgaaancggacgcgnggtcgacgantccggaaattccggaccc

SEQ ID NO: 736510 - DNA, 406 bp, Homo sapiens
atcgagaccgggacagagactatagtcggcgacgtggtgggccaccaagacgggggagaggtgccagtcgtggacgagagtttcgaggtcaggaaaatggattccgtctggccaccatccttctggcctgagactcccttcttcttcccgaccatctcccaggaatgcgtgtctgggtttccttccagaagaacattgatagctctgttgacatctccattgcagtcatgcaaagcaatcacacattcatcctggttcttgcctgtaatatcaatcaattgtttcaccttctcctcaaagtcagcatcattatggtccgaaatcatctgtgcaagtctaatttgttctgcagtggcctgtgccctgcttgtgctgtgtctgttttgtttgagtgggagagtgaagg

SEQ ID NO: 736511 - DNA, 697 bp, Homo sapiens
gcagtgcacgctgattcctgctagtctgatctagagttatccccctctgcctcggccacggccccttctgcctctttctgttcctcttccagaaggccctccactcttggtgccatccaatccattttcctgacctcgaaactctcgtccacggctggcacctctcccccgtcttggtggcccaccacgtcgccgactatagtctctgtcccggtctcgattttctttgccttcctcattggattccgtctggccaccatccttctggcctgagactcccttcttcttcccgaccatctcccaggaatgcgtgtctgggtttccttccagaagaacattgatagctctgttgacatctccattgcagtcatgcaaagcaatcacacattcatcctggttcttgcctgtaatatcaatcaattgtttcaccttctcctcaaagtcagcatcattatggtccgaaatcatctgtgcaagtctaatttgttctgcagtggcctgtggccgctgcttgtgctgtgtctggttttggttttgaggttgttcccagtttccccgggctcggttagtgcccaccgatgtcatcatttacagtatatacaaataacagtatttacaaggtagaatactcaggcaaggcccaggcctcgctcgctcgcgctctttctcgctctcccctctcaggctctagccgcat

SEQ ID NO: 736512 - DNA, 4592 bp, Homo sapiens
  misc_feature (1)..(2): n is a, c, g, or t
nntttacagtagtccattcctagggggaatgggccccaaggttttgtttttttatttcgtttttggggtacaggtggtgtttggttacatggatgagttctttagtgatttctgcgactttagcgcacccatcacccgagcagtgtacactgtacccaatatgtagtctttcatccctcaccccactccaagatttagttctgccagacgatacatgttgccttcacttctttttagtttatttgcctggacccatctaagtcatacttaaaactctataaagcattttttttctttgaaatggtctcagctccttcttgatcctctccattttccacccaatctcctctatccctctccctttactgcctgaaatcggctgtagatgtagcagtttctggaggaaatgaagatttgtggtggttctttccagtcaccaggttgtgaaagtcttaggggtgaggggaaggaaatcccctcaaggacaagatactactaccacattaaggtcaggagttcttaaagggcgaagatttcattttattccactgccttcaggggcctgctagaggaggcccagttggtacagtaatacttattcaccaagctggtcatcgacgaaattgaggatgtcctagacggagcaagaataggcagaggctgaaggtagaggttttctttttatatatacaagacacattaatccattaaatttgaggacacagtacaaaaaaaaaaaaaaaacaaaaaaaaaaccacttcaactaattcatctgacaatgctgttcatattcatgacgccatttttttgtttgttgttgttgttgttttcctaataataaagaaggagacttagggctgttgggctgatatatgtttgggggtcccacctccccgcctcatccgtacaccaccagggtgaacaggaggaagcaaaggaagtgcagggcccatagcaaagtttcataatcttgaatgcaagaggggagaaggaatggaagggggaaaaaaaaggagaaaatacaaatcctataatacatacaacagggtggggatggtataggaatgggacagacatgaagctgaggcatggggtgggccgctgggggtggggggcagcggaaaccccccacattcctttctctttgatgctgtttccatagtttccaggctgagaagccctctcagaagatgggaccgggagaagagggtcagggcctcagttggccccccagctgtagctgttgtaggcagacttgttggtctggggcttctgcgggatggagctggtctggctacgttgcccgctgcccgtctggccatcctgctgcaggtgatggtgaaggatctgagaatgcggctgctgatggggggtcagaatgtgcataaagggggcaggtgggtaggcagcagctgtggccggattgatggggcccccacttcctagggctgaaggcaagttgaaggaagcagcaggagtaccggaatgaaaaccttgtttctcaaaggactgctgggttttggagtacacagaacccgagatatctggcacgcccgtgttactggaggtgactgaaacaccagtgttgtatccatgagacccatatccactcggctgttggaaaggggtggccgatgcattcacactgacattcacaccatgctgcttggaagaggtaggagccacagggaacacagcaggcccatactggaaggtgctggggaggcccgggacccctgtatagtatggcaggctggtgtaactgtagccaggaggcagcgccgggttcaggaatgtctgctgcgtggtatggtgagtctgcgtctggttctgttggggttgggccaaggttgtggccggggctggggaggaggcatccccacggccgaactttgtgaggtcaccagaataagggttgctggccaggctaccatccctcccagtcagcggagtagtgggtgtgggaaatgggatgctgtagtaatccaatggaaatcttgtctgaagcatctgcaagtcatcataaccatatacttgtggcgggtaggcatgtaacagccctggagccataatatacggattaggcaacaacggcgggaccccaggagggaggttgggaggagcttttcctgaagtcgtagcaactgagcttcgagtcgaggctgtgacagtggagttgctgcctaggctgaggcccaggctactgccactattgagactggaggagacactgaccactgggggaggtgcagagactgtgctggatgtggtggaaaaagtgctggaggaagaatggagattcgcctcactctccacacttgtgtgcaaaagagtggatgtcgaagtgcgcccagaagatgttgatgatgaaagggtattctgctgcgtagataacgtgctgctgtgttgtgtggtggtagtatttggaatctcctcactgtggctcaagccacccaaggaggatgaatgctgattggttgtcgtcagtaaggaagctgcagataccgtttcattgagaggggggatgctagaagtggaaggtgaatcagatttcactgcagagcctgtagcaccttcaacagattgtgtggtctgtaactgcgtggcctgcacagaactgaagccattctttgcctgagtcaggtccttttggggtgatgaagagatggagctggggtaccgccgagtctgtgtggatctctgttcataaagagggccctgagcattattttgggaggtataggttgtcgactgaattgggccgctctgataaccagactcctgactctggttagatgaaattgtagaggatgattcactggccgtgctggtatacaggctacttggagcctggcttgaagaggcgctcgtggtgggggtggactcataatcagaaaggacaggctctgacccaaactgcaatgccccaaactgcaggtttagccctgagatatctgctgagccaggcatctccacagccagagcaggaatcttagaagtcaaggaggcttttttcttctgctgtttcagtttctgctgagccggctgagggctagaggactggttgtctgaagatccaggcgacatctgtggagccgatgtggatttgcttggcagaggagaagacggaggtggaggtgcagctgtggaggtagccactgcaggtgacttctcctgaaggaacacctccatcatggttgaagatggggtaaaagcctggcgctttgtaaaggggctgtgcactgctgaatcacttgggttcttcaaatcatactgcaccagtgatggggattgtgtcgtcgagcccatgtcccaagaggaggtggtggtgcttccagactgagaatgctgagctgccaactgagccagggcttgggcagtcttgaattgctccaagaactgggagcctgtagtactgccgcctttagcttcaccgacatcaccaaatcctttccctaacatgctcaccatactgtgatgagaaaatgtgttccctgaagcaggctgtgatatggcagtctgcttcgaattactgaacaccagaggctgggccagagaaggagcctgagacggatccagattagatgaatcattctccattgtagatggtgtcttccccagcagaacagcaaggtcaattctctgaccagcagtgattgtcacattctccgcaggcagaggcactgaagacacattagaggcagtgaagatcttggtctcagaaagatcttcattccaatcttcagtcccccactcctctgttgcagtcctccatgcactcgtcccatcatctggttcaaagtggccagtgttgttccacgtattgccgctgctattgccatagttatcatcagtattggctggctctgcataatcagctgggttaaaggttcccattccttgagcagaaaaccttcctcctcgcctaccagagccacctctgcctcggccacggccccttctgcctctttctgttcctcttccagaaggccctccactcttggtgccatccaatccattttcctgacctcgaaactctcgtccacggctggcacctctcccccgtcttggtggcccaccacgtcgccgactatagtctctgtcccggtctcgattttctttgccttcctcattggattccgtctggccaccatccttctggcctgagactcccttcttcttcccgaccatctcccaggaatgcgtgtctgggtttccttccagaagaacattgatagctctgttgacatctccattgcagtcatgcaaagcaatcacacattcatcctggttcttgcctgtaatatcaatcaattgtttcaccttctcctcaaagtcagcatcattatggtccgaaatcatctgtgcaagtctaatttgttctgcagtggcctgtggccgctgcttgtgctgtgtctggttttggttttgaggttgttcccagtttccccgggctcggttagtgcccaccgatgtcatcatttacagtatatacaaataacagtatttacaaggtagaatactcaggcaaggcccaggcctcgctcgctcgcgctctttctcgctctcccctctcaggctctagccgcat

SEQ ID NO: 736513 - DNA, 3619 bp, Homo sapiens
  misc_feature (27)..(27): n is a, c, g, or t
tttttttttgtgtgtgtttttttttcnttagctaaagaaataccacagtttattgaagactacaaatatttttgttacaagttgaaactacatgccttccagaaatcaaaagcaacagcaggtgtgtgcattgatgcttcgaaggtgctgcaccgcttgaacttgaaatgggtaagacagggtcagacacatgggggagagggaaatgggggaggggcaagttcaaaagcccagaaggtatccaccaactcatttccccaagccacgcaggccatggcctcagctcagcaggctctcctcagtggtctggtttctgaaacaagacttcagtgcaaatttatacacacacacaaaacacagcccccagccttgggccaaattagctctcagccgtccagaaatgcttgtaagggggtggatattttcttccagtgttgtatccatgagacccatatccactcggctgttggaaaggggtggccgatgcattcacactgacattcacaccatgctgcttggaagaggtaggagccacagggaacacagcaggcccatactggaaggtgctggggaggcccgggacccctgtatagtatggcaggctggtgtaactgtagccaggaggcagcgccgggttcaggaatgtctgctgcgtggtatggtgagtctgcgtctggttctgttggggttgggccaaggttgtggccggggctggggaggaggcatccccacggccgaactttgtgaggtcaccagaataagggttgctggccaggctaccatccctcccagtcagcggagtagtgggtgtgggaaatgggatgctgtagtaatccaatggaaatcttgtctgaagcatctgcaagtcatcataaccatatacttgtggcgggtaggcatgtaacagccctggagccataatatacggattaggcaacaacggcgggaccccaggagggaggttgggaggagcttttcctgaagtcgtagcaactgagcttcgagtcgaggctgtgacagtggagttgctgcctaggctgaggcccaggctactgccactattgagactggaggagacactgaccactgggggaggtgcagagactgtgctggatgtggtggaaaaagtgctggaggaagaatggagattcgcctcactctccacacttgtgtgcaaaagagtggatgtcgaagtgcgcccagaagatgttgatgatgaaagggtattctgctgcgtagataacgtgctgctgtgttgtgtggtggtagtatttggaatctcctcactgtggctcaagccacccaaggaggatgaatgctgattggttgtcgtcagtaaggaagctgcagataccgtttcattgagaggggggatgctagaagtggaaggtgaatcagatttcactgcagagcctgtagcaccttcaacagattgtgtggtctgtaactgcgtggcctgcacagaactgaagccattctttgcctgagtcaggtccttttggggtgatgaagagatggagctggggtaccgccgagtctgtgtggatctctgttcataaagagggccctgagcattattttgggaggtataggttgtcgactgaattgggccgctctgataaccagactcctgactctggttagatgaaattgtagaggatgattcactggccgtgctggtatacaggctacttggagcctggcttgaagaggcgctcgtggtgggggtggactcataatcagaaaggacaggctctgacccaaactgcaatgccccaaactgcaggtttagccctgagatatctgctgagccaggcatctccacagccagagcaggaatcttagaagtcaaggaggcttttttcttctgctgtttcagtttctgctgagccggctgagggctagaggactggttgtctgaagatccaggcgacatctgtggagccgatgtggatttgcttggcagaggagaagacggaggtggaggtgcagctgtggaggtagccactgcaggtgacttctcctgaaggaacacctccatcatggttgaagatggggtaaaagcctggcgctttgtaaaggggctgtgcactgctgaatcacttgggttcttcaaatcatactgcaccagtgatggggattgtgtcgtcgagcccatgtcccaagaggaggtggtggtgcttccagactgagaatgctgagctgccaactgagccagggcttgggcagtcttgaattgctccaagaactgggagcctgtagtactgccgcctttagcttcaccgacatcaccaaatcctttccctaacatgctcaccatactgtgatgagaaaatgtgttccctgaagcaggctgtgatatggcagtctgcttcgaattactgaacaccagaggctgggccagagaaggagcctgagacggatccagattagatgaatcattctccattgtagatggtgtcttccccagcagaacagcaaggtcaattctctgaccagcagtgattgtcacattctccgcaggcagaggcactgaagacacattagaggcagtgaagatcttggtctcagaaagatcttcattccaatcttcagtcccccactcctctgttgcagtcctccatgcactcgtcccatcatctggttcaaagtggccagtgttgttccacgtattgccgctgctattgccatagttatcatcagtattggctggctctgcataatcagctgggttaaaggttcccattccttgagcagaaaaccttcctcctcgcctaccagagccacctctgcctcggccacggccccttctgcctctttctgttcctcttccagaaggccctccactcttggtgccatccaatccattttcctgacctcgaaactctcgtccacggctggcacctctcccccgtcttggtggcccaccacgtcgccgactatagtctctgtcccggtctcgattttctttgccttcctcattggattccgtctggccaccatccttctggcctgagactcccttcttcttcccgaccatctcccaggaatgcgtgtctgggtttccttccagaagaacattgatagctctgttgacatctccattgcagtcatgcaaagcaatcacacattcatcctggttcttgcctgtaatatcaatcaattgtttcaccttctcctcaaagtcagcatcattatggtccgaaatcatctgtgcaagtctaatttgttctgcagtggcctgtggccgctgcttgtgctgtgtctggttttggttttgaggttgttcccagtttccccgggctcggttagtgcccaccgatgtcatcatttacagtatatacaaataacagtatttacaaggtagaatactgcgcctatccgggctttgactccttattccaggagtaggtgggagtttaagtcacttagtcgggccgacccgccctcgttagtctagaaccctccctttaacgctagagcacagaccccacgcctccctgctgctggcttcttagatccacccccatcataacggccttgctttgccccaagttttaccctgaaacattcctgagagccggaatctggggatttggaatgaaggcatgctttttta

SEQ ID NO: 736514 - DNA, 639 bp, Homo sapiens
ccgcccgcgttttttttttttggggggaagctggaaggcgtcgttctcctttcccagctctcctgcctgtccgccatgttttcaggccgggtctggcttggtcttcccccgtaaggaaatggccggggagctccaggggacccaggcgccgtcgcttcggcggagcctgggctgaccagccaggacagcggggtaaacccgaacaattctgcgcgaggtagggaggccatggcgtccggcagtaactggctctccggggtgaatgtcgtgctggtgatggcctacgggagcctggtgaggagattaccccaccccattcctgctgtcgcatcttacccagtagagaccctccttttgagctgtaccccgtctgcattctccacccactcacctgcgcctatccgggctttgactccttattccaggagtaggtgggagtttaagtcacttagtcgggccgacccgccctcgttagtctagaaccctccctttaacgctagagcacagaccccacgcctccctgctgctggcttcttagatccacccccatcataacggccttgctttgccccaagttttaccctgaaacattcctgagagccggaatctggggatttggaatgaaggcatgctttttta

SEQ ID NO: 736515 - DNA, 1038 bp, Homo sapiens
  misc_feature (3)..(3): n is a, c, g, or t
  misc_feature (11)..(11): n is a, c, g, or t
tanggctagtncgaggctggtgttgaatcggccgaggatgttttcaggccgggtctggcttggtcttcccccgtaaggaaatggccggggagctccaggggacccaggcgccgtcgcttcggcggagcctgggctgaccagccaggacagcggggtaaacccgaacaattctgcgcgaggtagggaggccatggcgtccggcagtaactggctctccggggtgaatgtcgtgctggtgatggcctacgggagcctggacttgaaagaggagattgatattcgactctccagggttcaggatatcaagtatgagccccagctccttgcagatgatgatgctagactactacaactggaaacccagggaaatcaaagttgctacaactatctgtataggatgaaagctctggatgccattcgtacctctgagatcccatttcattctgaaggccggcatccccgttccttaatgggcaagaatttccgctcctacctgctggatctgcgaaacactagtacgcctttcaagggtgtacgcaaagcactcattgatacccttttggatggctatgaaacagcccgctatgggacaggggtctttggccagaatgagtacctacgctatcaggaggccctgagtgagctggccactgcggttaaagcacgaattgggagctctcagcgacatcaccagtcagcagccaaagacctaactcagtcccctgaggtctccccaacaaccatccaggtgacatacctcccctccagtcagaagagtaaacgtgccaagcacttccttgaattgaagagctttaaggataactataacacattggagagtactctgtgacggagctgaaggggctctgcgtgattagcagtcgtgctgtgcgaccggtgttgcggcctcgaattgccaggccagttcccagccggtcgcgttacgggtggggtccccccttgttgattggaattcccgtggtgggggggtggagaatggaccccccttggagtcttgggggggggggggcgcttgct

SEQ ID NO: 736516 - DNA, 934 bp, Homo sapiens
  misc_feature (3)..(3): n is a, c, g, or t
  misc_feature (11)..(11): n is a, c, g, or t
  misc_feature (849)..(849): n is a, c, g, or t
  misc_feature (853)..(853): n is a, c, g, or t
tanggctagtncgaggctggtgttgaatcggccgaggatgttttcaggccgggtctggcttggtcttcccccgtaaggaaatggccggggagctccaggggacccaggcgccgtcgcttcggcggagcctgggctgaccagccaggacagcggggtaaacccgaacaattctgcgcgaggtagggaggccatggcgtccggcagtaactggctctccggggtgaatgtcgtgctggtgatggcctacgggagcctggtgtttgtactgctatttatttttgtgaagaggcaaatcatgcgctttgcaatgaaatctcgaaggggacctcatgtccctgtgggacacaatgcccccaaggttgctacaactatctgtataggatgaaagctctggatgccattcgtacctctgagatcccatttcattctgaaggccggcatccccgttccttaatgggcaagaatttccgctcctacctgctggatctgcgaaacactagtacgcctttcaagggtgtacgcaaagcactcattgatacccttttggatggctatgaaacagcccgctatgggacaggggtctttggccagaatgagtacctacgctatcaggaggccctgagtgagctggccactgcggttaaagcacgaattgggagctctcagcgacatcaccagtcagcagccaaagacctaactcagtcccctgaggtctccccaacaaccatccaggtgacatacctcccctccagtcagaagagtaaacgtgccaagcacttccttgaattgaagagctttaaggataactataacacattggagagtactctgtgacggagctgaagggcnggantaagcccgcctggcattggcaaaggttgtggcgcggccctcgaaattggccaggccaatggttcaccatccggtccacgta

SEQ ID NO: 736517 - DNA, 576 bp, Homo sapiens
tcgaccggccgtggggatgcctcctccccagccccgaactttgtgaggtcaccagaataagggttgctggccaggctaccatccctcccagtcagcggagtagtgggtgtgggaaatgggatgctgtagtaatccaatggaaatcttgtctgaagcatctgcaagtcatcataaccatatacttgtggcgggtaggcatgtaacagccctggagccataatatacggattaggcaacaacggcgggaccccaggagggaggttgggaggagcttttcctgaagtcgtagcaactgagcttcgagtcgaggctgtgacagtggagttgctgcctaggctgaggcccaggctactgccactattgagactggaggagacactgaccactgggggaggtgcagagactgtgctggatgtggtggaaaaagtgctggaggaagaatggagattcgcctcactctccacacttgtgtgcaaaagagtggatgtcgaagtgcgcccagaagatgttgatgatgaaagggtattctgctgcgtagataacgtgctgctgtgttgtgtgtggagcatgtgaccg

SEQ ID NO: 736518 - DNA, 3197 bp, Homo sapiens
  misc_feature (1)..(2): n is a, c, g, or t
nntttacagtagtccattcctagggggaatgggccccaaggttttgtttttttatttcgtttttggggtacaggtggtgtttggttacatggatgagttctttagtgatttctgcgactttagcgcacccatcacccgagcagtgtacactgtacccaatatgtagtctttcatccctcaccccactccaagatttagttctgccagacgatacatgttgccttcacttctttttagtttatttgcctggacccatctaagtcatacttaaaactctataaagcattttttttctttgaaatggtctcagctccttcttgatcctctccattttccacccaatctcctctatccctctccctttactgcctgaaatcggctgtagatgtagcagtttctggaggaaatgaagatttgtggtggttctttccagtcaccaggttgtgaaagtcttaggggtgaggggaaggaaatcccctcaaggacaagatactactaccacattaaggtcaggagttcttaaagggcgaagatttcattttattccactgccttcaggggcctgctagaggaggcccagttggtacagtaatacttattcaccaagctggtcatcgacgaaattgaggatgtcctagacggagcaagaataggcagaggctgaaggtagaggttttctttttatatatacaagacacattaatccattaaatttgaggacacagtacaaaaaaaaaaaaaaaacaaaaaaaaaaccacttcaactaattcatctgacaatgctgttcatattcatgacgccatttttttgtttgttgttgttgttgttttcctaataataaagaaggagacttagggctgttgggctgatatatgtttgggggtcccacctccccgcctcatccgtacaccaccagggtgaacaggaggaagcaaaggaagtgcagggcccatagcaaagtttcataatcttgaatgcaagaggggagaaggaatggaagggggaaaaaaaaggagaaaatacaaatcctataatacatacaacagggtggggatggtataggaatgggacagacatgaagctgaggcatggggtgggccgctgggggtggggggcagcggaaaccccccacattcctttctctttgatgctgtttccatagtttccaggctgagaagccctctcagaagatgggaccgggagaagagggtcagggcctcagttggccccccagctgtagctgttgtaggcagacttgttggtctggggcttctgcgggatggagctggtctggctacgttgcccgctgcccgtctggccatcctgctgcaggtgatggtgaaggatctgagaatgcggctgctgatggggggtcagaatgtgcataaagggggcaggtgggtaggcagcagctgtggccggattgatggggcccccacttcctagggctgaaggcaagttgaaggaagcagcaggagtaccggaatgaaaaccttgtttctcaaaggactgctatccaggaggccaggaggagacagagtaaaagggatcagcaaactagtcttgggatttttcctgagctcaagctccctgaccctcagaaagcagcatggtgtcacagaaggcacagtacacttgaagtcacatattcaggtctcagtctcagctctgctcttatttaagaactgtgtgaacctgggcatactactcaatctcttagcctcagtttcctcagatataaaacagggatgctacaaacctgttgtaaagaccaaataggctgggcatggtggctcacatctgtaatcccagcactttgggaggccaagatgggtggatcacacaaggtcaggagtttaagaccagtctggccaatatggtgaaaccccgtctctactaaaaatacaaaaattagccgggcatggtggcgggcgcctgtaatccagctacttgggagtctgaggcaggagaatcacttgaacctgggaggtggaggttgcagtgagtcaagactgtgccactgcactccagcctgggagacagagggagactccatctcaaaaaaaaaagactaaagaatgagaagagatatcattgtgctgttttctccacagagatcccatttcattctgaaggccggcatccccgttccttaatgggcaagaatttccgctcctacctgctggatctgcgaaacactagtacgcctttcaagggtgtacgcaaagcactcattgatacccttttggatggctatgaaacagcccgctatgggacaggggtctttggccagaatgagtacctacgctatcaggaggccctgagtgagctggccactgccgtgagtttggaggggaacgtgtcagagggagctggtacagtagtgttggactgttgccacagtgcagtgaccttcataaagcatataaacaaaatccatgataccataagagttgtcaggttctagactattagatcagtctcttacattagaaagcagatgcggccgggcacagtggttcacgcctataatcccagcactttgggaggccgaggcgggaggatcatctgaggttgggaatccgagaccagcctgaccaacatggagaaaccccgttctctactaaaaatacaaaattagccgggcgtggtggcgcatgcctgtaatcctagcttctggggaggctgaggcaggagaatctcttgaacccgggaggcggaggttgcggtgagccaagatcgtgccattatactccagcctgggcaacaaaagtgaaactctgtctcaaaaaaaaaaaagaagaaaagaaagcagatgcaactatacaagctagtaaaagaagtttttactagcatttttcttgtgtgcatttttcttgtcttttgtttagcccaataaaatgtcaaaattggtgtagcctagcaaagggaatagtttttcagcacacacagggattccttctcttcagagtctcagcgtcccttttgtgtcttggcccaataaaagtaagaattaaataacattgggccgggcgcggtggctcacgcctgtaatcccagcactttgggaggccgaggcaggcgaatcatgaggtcaagagatcaagaccatcctagccaacaaggtgaaaccctgtctctactaaaaatacaaaaattagctgggcatggtggtgcgtgcctgtaatctcagcta

SEQ ID NO: 736519 - DNA, 3949 bp, Homo sapiens
  misc_feature (1)..(2): n is a, c, g, or t
  misc_feature (3294)..(3294): n is a, c, g, or t
  misc_feature (3313)..(3313): n is a, c, g, or t
  misc_feature (3316)..(3316): n is a, c, g, or t
  misc_feature (3320)..(3320): n is a, c, g, or t
  misc_feature (3323)..(3323): n is a, c, g, or t
  misc_feature (3325)..(3325): n is a, c, g, or t
  misc_feature (3331)..(3331): n is a, c, g, or t
  misc_feature (3431)..(3431): n is a, c, g, or t
nntttacagtagtccattcctagggggaatgggccccaaggttttgtttttttatttcgtttttggggtacaggtggtgtttggttacatggatgagttctttagtgatttctgcgactttagcgcacccatcacccgagcagtgtacactgtacccaatatgtagtctttcatccctcaccccactccaagatttagttctgccagacgatacatgttgccttcacttctttttagtttatttgcctggacccatctaagtcatacttaaaactctataaagcattttttttctttgaaatggtctcagctccttcttgatcctctccattttccacccaatctcctctatccctctccctttactgcctgaaatcggctgtagatgtagcagtttctggaggaaatgaagatttgtggtggttctttccagtcaccaggttgtgaaagtcttaggggtgaggggaaggaaatcccctcaaggacaagatactactaccacattaaggtcaggagttcttaaagggcgaagatttcattttattccactgccttcaggggcctgctagaggaggcccagttggtacagtaatacttattcaccaagctggtcatcgacgaaattgaggatgtcctagacggagcaagaataggcagaggctgaaggtagaggttttctttttatatatacaagacacattaatccattaaatttgaggacacagtacaaaaaaaaaaaaaaaacaaaaaaaaaaccacttcaactaattcatctgacaatgctgttcatattcatgacgccatttttttgtttgttgttgttgttgttttcctaataataaagaaggagacttagggctgttgggctgatatatgtttgggggtcccacctccccgcctcatccgtacaccaccagggtgaacaggaggaagcaaaggaagtgcagggcccatagcaaagtttcataatcttgaatgcaagaggggagaaggaatggaagggggaaaaaaaaggagaaaatacaaatcctataatacatacaacagggtggggatggtataggaatgggacagacatgaagctgaggcatggggtgggccgctgggggtggggggcagcggaaaccccccacattcctttctctttgatgctgtttccatagtttccaggctgagaagccctctcagaagatgggaccgggagaagagggtcagggcctcagttggccccccagctgtagctgttgtaggcagacttgttggtctggggcttctgcgggatggagctggtctggctacgttgcccgctgcccgtctggccatcctgctgcaggtgatggtgaaggatctgagaatgcggctgctgatggggggtcagaatgtgcataaagggggcaggtgggtaggcagcagctgtggccggattgatggggcccccacttcctagggctgaaggcaagttgaaggaagcagcaggagtaccggaatgaaaaccttgtttctcaaaggactgctatccaggaggccaggaggagacagagtaaaagggatcagcaaactagtcttgggatttttcctgagctcaagctccctgaccctcagaaagcagcatggtgtcacagaaggcacagtacacttgaagtcacatattcaggtctcagtctcagctctgctcttatttaagaactgtgtgaacctgggcatactactcaatctcttagcctcagtttcctcagatataaaacagggatgctacaaacctgttgtaaagaccaaataggctgggcatggtggctcacatctgtaatcccagcactttgggaggccaagatgggtggatcacacaaggtcaggagtttaagaccagtctggccaatatggtgaaaccccgtctctactaaaaatacaaaaattagccgggcatggtggcgggcgcctgtaatccagctacttgggagtctgaggcaggagaatcacttgaacctgggaggtggaggttgcagtgagtcaagactgtgccactgcactccagcctgggagacagagggagactccatctcaaaaaaaaaagactaaagaatgagaagagatatcattgtgctgttttctccacagagatcccatttcattctgaaggccggcatccccgttccttaatgggcaagaatttccgctcctacctgctggatctgcgaaacactagtacgcctttcaagggtgtacgcaaagcactcattgatacccttttggatggctatgaaacagcccgctatgggacaggggtctttggccagaatgagtacctacgctatcaggaggccctgagtgagctggccactgcggttaaagcacgaattgggagctctcagcgacatcaccagtcagcagccaaagacctaactcagtcccctgaggtctccccaacaaccatccaggtgacatacctcccctccagtcagaagagtaaacgtgccaagcacttccttgaattgaagagctttaaggataactataacacattggagagtactctgtgacggagctgaaggactcttgccgtagattaagccagtcagttgcaatgtgcaagacaggctgcttgccgggccgccctcggaacatctggcccagcaggcccagactgtatccatccaagttcccgttgtatccagagttcttagagcttgtgtctaaagggtaattccccaacccttccttatgagcatttttagaacattggctaagactattttcccccagtagcgcttttttctggatttgcattcgggtgttattcttaatgtttctgtcaaagcttcttaaaaatcttcacttggtttcagccatagttcaccttccctgttccaggtttatttaattccaaaggtgagagttggagtgagatgtcttccatatctatacctttgtgcacagttgaatgggaactgtttgggtttagggcatcttagagttgattgatggaaaaagcagacaggaactggtgggaggtcaagtggggaagttggtgaatgtggaataacttacctttgtgctccacttaaaccagatgtgttgcagctttcctgacatgcaaggatctactttaattccacactctcattaataaattgaataaaagggaatgttttggcacctgatataatctgccaggctatgtgacagtaggaaggaatggtttcccctaacaagcccaatgcactggtctgactttataaattatttaataaaatgaactattatcaaataaaacgtatgaatcagtaaaaaaaaaanaaaaaaaaaaaaaaaaaanaanaaanaananaaaaanaaaaaaaaaaaaaaaaaaaaaaaaaacaaaagtaaacaaaagaaaaaagaaaaaaggagagaggaggagcggcgccgaccgacaacaaataaccaaattncaccagcgaggagaagcaagacagtaagacgacgctgcgcaggctcgacgtgccttggagacgagggggaggcgccggcgcgacgagcgacgagtgcgtccacaaacccagtagacgagagcgaggcgcagacgagcaccgacatatcacacgaagagtcggctggggggagaagcaatgataacagtctaacgcagagatctaattgtgggttctcgtctgatgaattacggggacgacacccgtataaaagagtagcgggccgtgggagttcacaatctgttctgtgagaaggacaagaacaagccaatacaaaacataaaggacgacgtcgatgtatagatcctattacgttacgatcgagtataaagaaattaagttagctgtctagtgcagatacgtctgttgaggtggagtgagccgaaaaaagaactgcaggtgtacgattagttgtcgcagaggaggtaagtgacaactcatgcggtcttctaacgtgtcggatgcatcgtgcgagccaa

SEQ ID NO: 736520 - DNA, 1651 bp, Homo sapiens
  misc_feature (1)..(2): n is a, c, g, or t
nntttacagtagtccattcctagggggaatgggccccaaggttttgtttttttatttcgtttttggggtacaggtggtgtttggttacatggatgagttctttagtgatttctgcgactttagcgcacccatcacccgagcagtgtacactgtacccaatatgtagtctttcatccctcaccccactccaagatttagttctgccagacgatacatgttgccttcacttctttttagtttatttgcctggacccatctaagtcatacttaaaactctataaagcattttttttctttgaaatggtctcagctccttcttgatcctctccattttccacccaatctcctctatccctctccctttactgcctgaaatcggctgtagatgtagcagtttctggaggaaatgaagatttgtggtggttctttccagtcaccaggttgtgaaagtcttaggggtgaggggaaggaaatcccctcaaggacaagatactactaccacattaaggtcaggagttcttaaagggcgaagatttcattttattccactgccttcaggggcctgctagaggaggcccagttggtacagtaatacttattcaccaagctggtcatcgacgaaattgaggatgtcctagacggagcaagaataggcagaggctgaaggtagaggttttctttttatatatacaagacacattaatccattaaatttgaggacacagtacaaaaaaaaaaaaaaaacaaaaaaaaaaccacttcaactaattcatctgacaatgctgttcatattcatgacgccatttttttgtttgttgttgttgttgttttcctaataataaagaaggagacttagggctgttgggctgatatatgtttgggggtcccacctccccgcctcatccgtacaccaccagggtgaacaggaggaagcaaaggaagtgcagggcccatagcaaagtttcataatcttgaatgcaagaggggagaaggaatggaagggggaaaaaaaaggagaaaatacaaatcctataatacatacaacagggtggggatggtataggaatgggacagacatgaagctgaggcatggggtgggccgctgggggtggggggcagcggaaaccccccacattcctttctctttgatgctgtttccatagtttccaggctgagaagccctctcagaagatgggaccgggagaagagggtcagggcctcagttggccccccagctgtagctgttgtaggcagacttgttggtctggggcttctgcgggatggagctggtctggctacgttgcccgctgcccgtctggccatcctgctgcaggtgatggtgaaggatctgagaatgcggctgctgatggggggtcagaatgtgcataaagggggcaggtgggtaggcagcagctgtggccggattgatggggcccccacttcctagggctgaaggcaagttgaaggaagcagcaggagtaccggaatgaaaaccttgtttctcaaaggactgctgggttttggagtacacagaacccgagatatctggcacgcccgtgttactggaggtgactgaaacacctgggggaggaggaaacagacaggaggattagctcagctagctacctggcccttattcctgagatgaggt

SEQ ID NO: 736521 - DNA, 2387 bp, Homo sapiens
  misc_feature (1)..(2): n is a, c, g, or t
nntttacagtagtccattcctagggggaatgggccccaaggttttgtttttttatttcgtttttggggtacaggtggtgtttggttacatggatgagttctttagtgatttctgcgactttagcgcacccatcacccgagcagtgtacactgtacccaatatgtagtctttcatccctcaccccactccaagatttagttctgccagacgatacatgttgccttcacttctttttagtttatttgcctggacccatctaagtcatacttaaaactctataaagcattttttttctttgaaatggtctcagctccttcttgatcctctccattttccacccaatctcctctatccctctccctttactgcctgaaatcggctgtagatgtagcagtttctggaggaaatgaagatttgtggtggttctttccagtcaccaggttgtgaaagtcttaggggtgaggggaaggaaatcccctcaaggacaagatactactaccacattaaggtcaggagttcttaaagggcgaagatttcattttattccactgccttcaggggcctgctagaggaggcccagttggtacagtaatacttattcaccaagctggtcatcgacgaaattgaggatgtcctagacggagcaagaataggcagaggctgaaggtagaggttttctttttatatatacaagacacattaatccattaaatttgaggacacagtacaaaaaaaaaaaaaaaacaaaaaaaaaaccacttcaactaattcatctgacaatgctgttcatattcatgacgccatttttttgtttgttgttgttgttgttttcctaataataaagaaggagacttagggctgttgggctgatatatgtttgggggtcccacctccccgcctcatccgtacaccaccagggtgaacaggaggaagcaaaggaagtgcagggcccatagcaaagtttcataatcttgaatgcaagaggggagaaggaatggaagggggaaaaaaaaggagaaaatacaaatcctataatacatacaacagggtggggatggtataggaatgggacagacatgaagctgaggcatggggtgggccgctgggggtggggggcagcggaaaccccccacattcctttctctttgatgctgtttccatagtttccaggctgagaagccctctcagaagatgggaccgggagaagagggtcagggcctcagttggccccccagctgtagctgttgtaggcagacttgttggtctggggcttctgcgggatggagctggtctggctacgttgcccgctgcccgtctggccatcctgctgcaggtgatggtgaaggatctgagaatgcggctgctgatggggggtcagaatgtgcataaagggggcaggtgggtaggcagcagctgtggccggattgatggggcccccacttcctagggctgaaggcaagttgaaggaagcagcaggagtaccggaatgaaaaccttgtttctcaaaggactgctgggttttggagtacacagaacccgagatatctggcacgcccgtgttactggaggtgactgaaacaccagtgttgtatccatgagacccatatccactcggctgttggaaaggggtggccgatgcattcacactgacattcacaccatgctgcttggaagaggtaggagccacagggaacacagcaggcccatactggaaggtgctggggaggcccgggacccctgtatagtatggcaggctggtgtaactgtagccaggaggcagcgccgggttcaggaatgtctgctgcgtggtatggtgagtctgcgtctggttctgttggggttgggccaaggttgtggccggggctggggaggaggcatccccacggccgaactttgtgaggtcaccagaataagggttgctggccaggctaccatccctcccagtcagcggagtagtgggtgtgggaaatgggatgctgtagtaatccaatggaaatcttgtctgaagcatctgcaagtcatcataaccatatacttgtggctgaaagatacagacatatagcaataacaggaactggtcatgatgttagcaaaacaaggagccaagagacaagctaattcaacagaacattcatcctcattctgggttagaacaggacacggattatttccttcaattttatttaaggaaaaagcagtaaagtacacagagattaaatgattcatgaaaggtcttgaagctttccttgagctaaatactactgattctagtaggctggcttcttgataccaatagagtagacacaaaacatacacgaacaaccagttttactctctattctacaagtctctgtctcttatactcttcaaaatctggcttaaaaata

SEQ ID NO: 736522 - DNA, 4368 bp, Homo sapiens
  misc_feature (1)..(2): n is a, c, g, or t
nntttacagtagtccattcctagggggaatgggccccaaggttttgtttttttatttcgtttttggggtacaggtggtgtttggttacatggatgagttctttagtgatttctgcgactttagcgcacccatcacccgagcagtgtacactgtacccaatatgtagtctttcatccctcaccccactccaagatttagttctgccagacgatacatgttgccttcacttctttttagtttatttgcctggacccatctaagtcatacttaaaactctataaagcattttttttctttgaaatggtctcagctccttcttgatcctctccattttccacccaatctcctctatccctctccctttactgcctgaaatcggctgtagatgtagcagtttctggaggaaatgaagatttgtggtggttctttccagtcaccaggttgtgaaagtcttaggggtgaggggaaggaaatcccctcaaggacaagatactactaccacattaaggtcaggagttcttaaagggcgaagatttcattttattccactgccttcaggggcctgctagaggaggcccagttggtacagtaatacttattcaccaagctggtcatcgacgaaattgaggatgtcctagacggagcaagaataggcagaggctgaaggtagaggttttctttttatatatacaagacacattaatccattaaatttgaggacacagtacaaaaaaaaaaaaaaaacaaaaaaaaaaccacttcaactaattcatctgacaatgctgttcatattcatgacgccatttttttgtttgttgttgttgttgttttcctaataataaagaaggagacttagggctgttgggctgatatatgtttgggggtcccacctccccgcctcatccgtacaccaccagggtgaacaggaggaagcaaaggaagtgcagggcccatagcaaagtttcataatcttgaatgcaagaggggagaaggaatggaagggggaaaaaaaaggagaaaatacaaatcctataatacatacaacagggtggggatggtataggaatgggacagacatgaagctgaggcatggggtgggccgctgggggtggggggcagcggaaaccccccacattcctttctctttgatgctgtttccatagtttccaggctgagaagccctctcagaagatgggaccgggagaagagggtcagggcctcagttggccccccagctgtagctgttgtaggcagacttgttggtctggggcttctgcgggatggagctggtctggctacgttgcccgctgcccgtctggccatcctgctgcaggtgatggtgaaggatctgagaatgcggctgctgatggggggtcagaatgtgcataaagggggcaggtgggtaggcagcagctgtggccggattgatggggcccccacttcctagggctgaaggcaagttgaaggaagcagcaggagtaccggaatgaaaaccttgtttctcaaaggactgctgggttttggagtacacagaacccgagatatctggcacgcccgtgttactggaggtgactgaaacaccagtgttgtatccatgagacccatatccactcggctgttggaaaggggtggccgatgcattcacactgacattcacaccatgctgcttggaagaggtaggagccacagggaacacagcaggcccatactggaaggtgctggggaggcccgggacccctgtatagtatggcaggctggtgtaactgtagccaggaggcagcgccgggttcaggaatgtctgctgcgtggtatggtgagtctgcgtctggttctgttggggttgggccaaggttgtggccggggctggggaggaggcatccccacggccgaactttgtgaggtcaccagaataagggttgctggccaggctaccatccctcccagtcagcggagtagtgggtgtgggaaatgggatgctgtagtaatccaatggaaatcttgtctgaagcatctgcaagtcatcataaccatatacttgtggctgaaagatacagacatatagcaataacaggaactggtcatgatgttagcaaaacaaggagccaagagacaagctaattcaacagaacattcatcctcattcttttgaagaagatcctttagtcccacttaccgggtaggcatgtaacagccctggagccataatatacggattaggcaacaacggcgggaccccaggagggaggttgggaggagcttttcctgaagtcgtagcaactgagcttcgagtcgaggctgtgacagtggagttgctgcctaggctgaggcccaggctactgccactattgagactggaggagacactgaccactgggggaggtgcagagactgtgctggatgtggtggaaaaagtgctggaggaagaatggagattcgcctcactctccacacttgtgtgcaaaagagtggatgtcgaagtgcgcccagaagatgttgatgatgaaagggtattctgctgcgtagataacgtgctgctgtgttgtgtggtggtagtatttggaatctcctcactgtggctcaagccacccaaggaggatgaatgctgattggttgtcgtcagtaaggaagctgcagataccgtttcattgagaggggggatgctagaagtggaaggtgaatcagatttcactgcagagcctgtagcaccttcaacagattgtgtggtctgtaactgcgtggcctgcacagaactgaagccattctttgcctgagtcaggtccttttggggtgatgaagagatggagctggggtaccgccgagtctgtgtggatctctgttcataaagagggccctgagcattattttgggaggtataggttgtcgactgaattgggccgctctgataaccagactcctgactctggttagatgaaattgtagaggatgattcactggccgtgctggtatacaggctacttggagcctggcttgaagaggcgctcgtggtgggggtggactcataatcagaaaggacaggctctgacccaaactgcaatgccccaaactgcaggtttagccctgagatatctgctgagccaggcatctccacagccagagcaggaatcttagaagtcaaggaggcttttttcttctgctgtttcagtttctgctgagccggctgagggctagaggactggttgtctgaagatccaggcgacatctgtggagccgatgtggatttgcttggcagaggagaagacggaggtggaggtgcagctgtggaggtagccactgcaggtgacttctcctgaaggaacacctccatcatggttgaagatggggtaaaagcctggcgctttgtaaaggggctgtgcactgctgaatcacttgggttcttcaaatcatactgcaccagtgatggggattgtgtcgtcgagcccatgtcccaagaggaggtggtggtgcttccagactgagaatgctgagctgccaactgagccagggcttgggcagtcttgaattgctccaagaactgggagcctgtagtactgccgcctttagcttcaccgacatcaccaaatcctttccctaacatgctcaccatactgtgatgagaaaatgtgttccctgaagcaggctgtgatatggcagtctgcttcgaattactgaacaccagaggctgggccagagaaggagcctgagacggatccagattagatgaatcattctccattgtagatggtgtcttccccagcagaacagcaaggtcaattctctgaccagcagtgattgtcacattctccgcaggcagaggcactgaagacacattagaggcagtgaagatcttggtctcagaaagatcttcattccaatcttcagtcccccactcctctgttgcagtcctccatgcactcgtcccatcatctggttcaaagtggccagtgttgttccacgtattgccgctgctattgccatagttatcatcagtattggctggctctgcataatcagctgggttaaaggttcccattccttgagcagaaaaccttcctcctcgcctaccagagccacctctgcctcggccacggccccttctgcctctttctgttcctcttccagaaggccctccactcttggtgccatccaatccattttcctgacctcgaactgaaataaaaataaaaattaaaacaacaacaacaacaaaaaaaccaaaccacagatggccagagcacagtcaacaggatatatacaaatatataaatggtatgtaatatggtattgggaattaaaaaaacaacgaagagaaaatgagctggaaggatgggaacatgtttctcagggaatggtaatgtgccttaatggaga

SEQ ID NO: 736523 - DNA, 4710 bp, Homo sapiens
  misc_feature (1)..(2): n is a, c, g, or t
nntttacagtagtccattcctagggggaatgggccccaaggttttgtttttttatttcgtttttggggtacaggtggtgtttggttacatggatgagttctttagtgatttctgcgactttagcgcacccatcacccgagcagtgtacactgtacccaatatgtagtctttcatccctcaccccactccaagatttagttctgccagacgatacatgttgccttcacttctttttagtttatttgcctggacccatctaagtcatacttaaaactctataaagcattttttttctttgaaatggtctcagctccttcttgatcctctccattttccacccaatctcctctatccctctccctttactgcctgaaatcggctgtagatgtagcagtttctggaggaaatgaagatttgtggtggttctttccagtcaccaggttgtgaaagtcttaggggtgaggggaaggaaatcccctcaaggacaagatactactaccacattaaggtcaggagttcttaaagggcgaagatttcattttattccactgccttcaggggcctgctagaggaggcccagttggtacagtaatacttattcaccaagctggtcatcgacgaaattgaggatgtcctagacggagcaagaataggcagaggctgaaggtagaggttttctttttatatatacaagacacattaatccattaaatttgaggacacagtacaaaaaaaaaaaaaaaacaaaaaaaaaaccacttcaactaattcatctgacaatgctgttcatattcatgacgccatttttttgtttgttgttgttgttgttttcctaataataaagaaggagacttagggctgttgggctgatatatgtttgggggtcccacctccccgcctcatccgtacaccaccagggtgaacaggaggaagcaaaggaagtgcagggcccatagcaaagtttcataatcttgaatgcaagaggggagaaggaatggaagggggaaaaaaaaggagaaaatacaaatcctataatacatacaacagggtggggatggtataggaatgggacagacatgaagctgaggcatggggtgggccgctgggggtggggggcagcggaaaccccccacattcctttctctttgatgctgtttccatagtttccaggctgagaagccctctcagaagatgggaccgggagaagagggtcagggcctcagttggccccccagctgtagctgttgtaggcagacttgttggtctggggcttctgcgggatggagctggtctggctacgttgcccgctgcccgtctggccatcctgctgcaggtgatggtgaaggatctgagaatgcggctgctgatggggggtcagaatgtgcataaagggggcaggtgggtaggcagcagctgtggccggattgatggggcccccacttcctagggctgaaggcaagttgaaggaagcagcaggagtaccggaatgaaaaccttgtttctcaaaggactgctgggttttggagtacacagaacccgagatatctggcacgcccgtgttactggaggtgactgaaacaccagtgttgtatccatgagacccatatccactcggctgttggaaaggggtggccgatgcattcacactgacattcacaccatgctgcttggaagaggtaggagccacagggaacacagcaggcccatactggaaggtgctggggaggcccgggacccctgtatagtatggcaggctggtgtaactgtagccaggaggcagcgccgggttcaggaatgtctgctgcgtggtatggtgagtctgcgtctggttctgttggggttgggccaaggttgtggccggggctggggaggaggcatccccacggccgaactttgtgaggtcaccagaataagggttgctggccaggctaccatccctcccagtcagcggagtagtgggtgtgggaaatgggatgctgtagtaatccaatggaaatcttgtctgaagcatctgcaagtcatcataaccatatacttgtggctgaaagatacagacatatagcaataacaggaactggtcatgatgttagcaaaacaaggagccaagagacaagctaattcaacagaacattcatcctcattcttttgaagaagatcctttagtcccacttaccgggtaggcatgtaacagccctggagccataatatacggattaggcaacaacggcgggaccccaggagggaggttgggaggagcttttcctgaagtcgtagcaactgagcttcgagtcgaggctgtgacagtggagttgctgcctaggctgaggcccaggctactgccactattgagactggaggagacactgaccactgggggaggtgcagagactgtgctggatgtggtggaaaaagtgctggaggaagaatggagattcgcctcactctccacacttgtgtgcaaaagagtggatgtcgaagtgcgcccagaagatgttgatgatgaaagggtattctgctgcgtagataacgtgctgctgtgttgtgtggtggtagtatttggaatctcctcactgtggctcaagccacccaaggaggatgaatgctgattggttgtcgtcagtaaggaagctgcagataccgtttcattgagaggggggatgctagaagtggaaggtgaatcagatttcactgcagagcctgtagcaccttcaacagattgtgtggtctgtaactgcgtggcctgcacagaactgaagccattctttgcctgagtcaggtccttttggggtgatgaagagatggagctggggtaccgccgagtctgtgtggatctctgttcataaagagggccctgagcattattttgggaggtataggttgtcgactgaattgggccgctctgataaccagactcctgactctggttagatgaaattgtagaggatgattcactggccgtgctggtatacaggctacttggagcctggcttgaagaggcgctcgtggtgggggtggactcataatcagaaaggacaggctctgacccaaactgcaatgccccaaactgcaggtttagccctgagatatctgctgagccaggcatctccacagccagagcaggaatcttagaagtcaaggaggcttttttcttctgctgtttcagtttctgctgagccggctgagggctagaggactggttgtctgaagatccaggcgacatctgtggagccgatgtggatttgcttggcagaggagaagacggaggtggaggtgcagctgtggaggtagccactgcaggtgacttctcctgaaggaacacctccatcatggttgaagatggggtaaaagcctggcgctttgtaaaggggctgtgcactgctgaatcacttgggttcttcaaatcatactgcaccagtgatggggattgtgtcgtcgagcccatgtcccaagaggaggtggtggtgcttccagactgagaatgctgagctgccaactgagccagggcttgggcagtcttgaattgctccaagaactgggagcctgtagtactgccgcctttagcttcaccgacatcaccaaatcctttccctaacatgctcaccatactgtgatgagaaaatgtgttccctgaagcaggctgtgatatggcagtctgcttcgaattactgaacaccagaggctgggccagagaaggagcctgagacggatccagattagatgaatcattctccattgtagatggtgtcttccccagcagaacagcaaggtcaattctctgaccagcagtgattgtcacattctccgcaggcagaggcactgaagacacattagaggcagtgaagatcttggtctcagaaagatcttcattccaatcttcagtcccccactcctctgttgcagtcctccatgcactcgtcccatcatctggttcaaagtggccagtgttgttccacgtattgccgctgctattgccatagttatcatcagtattggctggctctgcataatcagctgggttaaaggttcccattccttgagcagaaaaccttcctcctcgcctaccagagccacctctgcctcggccacggccccttctgcctctttctgttcctcttccagaaggccctccactcttggtgccatccaatccattttcctgacctcgaaactctcgtccacggctggcacctctcccccgtcttggtggcccaccacgtcgccgactatagtctctgtcccggtctcgattttctttgccttcctcattggattccgtctggccaccatccttctggcctgagactcccttcttcttcccgaccatctcccaggaatgcgtgtctgggtttccttccagaagaacattgatagctctgttgacatctccattgcagtcatgcaaagcaatcacacattcatcctggttcttgcctgtaatatcaatcaattgtttcaccttctcctcaaagtcagcatcattatggtccgaaatcatctgtgcaagtctaatttgttctgcagtggcctgtggccgctgcttgtgctgtgtctggttttggttttgaggttgttcccagtttccccgggctcggttagtgcccaccgatgtcatcatttacagtatatacaaataacagtatttacaaggtagaatactcagtctcctccacactgacaccccgggccgcgccgcccctgtcacgtgatata

SEQ ID NO: 736524 - DNA, 4775 bp, Homo sapiens
  misc_feature (1)..(2): n is a, c, g, or t
nntttacagtagtccattcctagggggaatgggccccaaggttttgtttttttatttcgtttttggggtacaggtggtgtttggttacatggatgagttctttagtgatttctgcgactttagcgcacccatcacccgagcagtgtacactgtacccaatatgtagtctttcatccctcaccccactccaagatttagttctgccagacgatacatgttgccttcacttctttttagtttatttgcctggacccatctaagtcatacttaaaactctataaagcattttttttctttgaaatggtctcagctccttcttgatcctctccattttccacccaatctcctctatccctctccctttactgcctgaaatcggctgtagatgtagcagtttctggaggaaatgaagatttgtggtggttctttccagtcaccaggttgtgaaagtcttaggggtgaggggaaggaaatcccctcaaggacaagatactactaccacattaaggtcaggagttcttaaagggcgaagatttcattttattccactgccttcaggggcctgctagaggaggcccagttggtacagtaatacttattcaccaagctggtcatcgacgaaattgaggatgtcctagacggagcaagaataggcagaggctgaaggtagaggttttctttttatatatacaagacacattaatccattaaatttgaggacacagtacaaaaaaaaaaaaaaaacaaaaaaaaaaccacttcaactaattcatctgacaatgctgttcatattcatgacgccatttttttgtttgttgttgttgttgttttcctaataataaagaaggagacttagggctgttgggctgatatatgtttgggggtcccacctccccgcctcatccgtacaccaccagggtgaacaggaggaagcaaaggaagtgcagggcccatagcaaagtttcataatcttgaatgcaagaggggagaaggaatggaagggggaaaaaaaaggagaaaatacaaatcctataatacatacaacagggtggggatggtataggaatgggacagacatgaagctgaggcatggggtgggccgctgggggtggggggcagcggaaaccccccacattcctttctctttgatgctgtttccatagtttccaggctgagaagccctctcagaagatgggaccgggagaagagggtcagggcctcagttggccccccagctgtagctgttgtaggcagacttgttggtctggggcttctgcgggatggagctggtctggctacgttgcccgctgcccgtctggccatcctgctgcaggtgatggtgaaggatctgagaatgcggctgctgatggggggtcagaatgtgcataaagggggcaggtgggtaggcagcagctgtggccggattgatggggcccccacttcctagggctgaaggcaagttgaaggaagcagcaggagtaccggaatgaaaaccttgtttctcaaaggactgctgggttttggagtacacagaacccgagatatctggcacgcccgtgttactggaggtgactgaaacaccagtgttgtatccatgagacccatatccactcggctgttggaaaggggtggccgatgcattcacactgacattcacaccatgctgcttggaagaggtaggagccacagggaacacagcaggcccatactggaaggtgctggggaggcccgggacccctgtatagtatggcaggctggtgtaactgtagccaggaggcagcgccgggttcaggaatgtctgctgcgtggtatggtgagtctgcgtctggttctgttggggttgggccaaggttgtggccggggctggggaggaggcatccccacggccgaactttgtgaggtcaccagaataagggttgctggccaggctaccatccctcccagtcagcggagtagtgggtgtgggaaatgggatgctgtagtaatccaatggaaatcttgtctgaagcatctgcaagtcatcataaccatatacttgtggctgaaagatacagacatatagcaataacaggaactggtcatgatgttagcaaaacaaggagccaagagacaagctaattcaacagaacattcatcctcattcttttgaagaagatcctttagtcccacttaccgggtaggcatgtaacagccctggagccataatatacggattaggcaacaacggcgggaccccaggagggaggttgggaggagcttttcctgaagtcgtagcaactgagcttcgagtcgaggctgtgacagtggagttgctgcctaggctgaggcccaggctactgccactattgagactggaggagacactgaccactgggggaggtgcagagactgtgctggatgtggtggaaaaagtgctggaggaagaatggagattcgcctcactctccacacttgtgtgcaaaagagtggatgtcgaagtgcgcccagaagatgttgatgatgaaagggtattctgctgcgtagataacgtgctgctgtgttgtgtggtggtagtatttggaatctcctcactgtggctcaagccacccaaggaggatgaatgctgattggttgtcgtcagtaaggaagctgcagataccgtttcattgagaggggggatgctagaagtggaaggtgaatcagatttcactgcagagcctgtagcaccttcaacagattgtgtggtctgtaactgcgtggcctgcacagaactgaagccattctttgcctgagtcaggtccttttggggtgatgaagagatggagctggggtaccgccgagtctgtgtggatctctgttcataaagagggccctgagcattattttgggaggtataggttgtcgactgaattgggccgctctgataaccagactcctgactctggttagatgaaattgtagaggatgattcactggccgtgctggtatacaggctacttggagcctggcttgaagaggcgctcgtggtgggggtggactcataatcagaaaggacaggctctgacccaaactgcaatgccccaaactgcaggtttagccctgagatatctgctgagccaggcatctccacagccagagcaggaatcttagaagtcaaggaggcttttttcttctgctgtttcagtttctgctgagccggctgagggctagaggactggttgtctgaagatccaggcgacatctgtggagccgatgtggatttgcttggcagaggagaagacggaggtggaggtgcagctgtggaggtagccactgcaggtgacttctcctgaaggaacacctccatcatggttgaagatggggtaaaagcctggcgctttgtaaaggggctgtgcactgctgaatcacttgggttcttcaaatcatactgcaccagtgatggggattgtgtcgtcgagcccatgtcccaagaggaggtggtggtgcttccagactgagaatgctgagctgccaactgagccagggcttgggcagtcttgaattgctccaagaactgggagcctgtagtactgccgcctttagcttcaccgacatcaccaaatcctttccctaacatgctcaccatactgtgatgagaaaatgtgttccctgaagcaggctgtgatatggcagtctgcttcgaattactgaacaccagaggctgggccagagaaggagcctgagacggatccagattagatgaatcattctccattgtagatggtgtcttccccagcagaacagcaaggtcaattctctgaccagcagtgattgtcacattctccgcaggcagaggcactgaagacacattagaggcagtgaagatcttggtctcagaaagatcttcattccaatcttcagtcccccactcctctgttgcagtcctccatgcactcgtcccatcatctggttcaaagtggccagtgttgttccacgtattgccgctgctattgccatagttatcatcagtattggctggctctgcataatcagctgggttaaaggttcccattccttgagcagaaaaccttcctcctcgcctaccagagccacctctgcctcggccacggccccttctgcctctttctgttcctcttccagaaggccctccactcttggtgccatccaatccattttcctgacctcgaaactctcgtccacggctggcacctctcccccgtcttggtggcccaccacgtcgccgactatagtctctgtcccggtctcgattttctttgccttcctcattggattccgtctggccaccatccttctggcctgagactcccttcttcttcccgaccatctcccaggaatgcgtgtctgggtttccttccagaagaacattgatagctctgttgacatctccattgcagtcatgcaaagcaatcacacattcatcctggttcttgcctgtaatatcaatcaattgtttcaccttctcctcaaagtcagcatcattatggtccgaaatcatctgtgcaagtctaatttgttctgcagtggcctgtggccgctgcttgtgctgtgtctggttttggttttgaggttgttcccagtttccccgggctcggttagtgcccaccgatgtcatcatttacagtatatacaaataacagtatttacaaggtagaataccggccccgccgcgctgccgctgccgccgccgccgccgccaacgccgctgcgctcccaactttacctcagtctcctccacactgacaccccgggccgcgccgcccctgtcacgtgatata

SEQ ID NO: 736525 - DNA, 5505 bp, Homo sapiens
  misc_feature (1)..(2): n is a, c, g, or t
nntttacagtagtccattcctagggggaatgggccccaaggttttgtttttttatttcgtttttggggtacaggtggtgtttggttacatggatgagttctttagtgatttctgcgactttagcgcacccatcacccgagcagtgtacactgtacccaatatgtagtctttcatccctcaccccactccaagatttagttctgccagacgatacatgttgccttcacttctttttagtttatttgcctggacccatctaagtcatacttaaaactctataaagcattttttttctttgaaatggtctcagctccttcttgatcctctccattttccacccaatctcctctatccctctccctttactgcctgaaatcggctgtagatgtagcagtttctggaggaaatgaagatttgtggtggttctttccagtcaccaggttgtgaaagtcttaggggtgaggggaaggaaatcccctcaaggacaagatactactaccacattaaggtcaggagttcttaaagggcgaagatttcattttattccactgccttcaggggcctgctagaggaggcccagttggtacagtaatacttattcaccaagctggtcatcgacgaaattgaggatgtcctagacggagcaagaataggcagaggctgaaggtagaggttttctttttatatatacaagacacattaatccattaaatttgaggacacagtacaaaaaaaaaaaaaaaacaaaaaaaaaaccacttcaactaattcatctgacaatgctgttcatattcatgacgccatttttttgtttgttgttgttgttgttttcctaataataaagaaggagacttagggctgttgggctgatatatgtttgggggtcccacctccccgcctcatccgtacaccaccagggtgaacaggaggaagcaaaggaagtgcagggcccatagcaaagtttcataatcttgaatgcaagaggggagaaggaatggaagggggaaaaaaaaggagaaaatacaaatcctataatacatacaacagggtggggatggtataggaatgggacagacatgaagctgaggcatggggtgggccgctgggggtggggggcagcggaaaccccccacattcctttctctttgatgctgtttccatagtttccaggctgagaagccctctcagaagatgggaccgggagaagagggtcagggcctcagttggccccccagctgtagctgttgtaggcagacttgttggtctggggcttctgcgggatggagctggtctggctacgttgcccgctgcccgtctggccatcctgctgcaggtgatggtgaaggatctgagaatgcggctgctgatggggggtcagaatgtgcataaagggggcaggtgggtaggcagcagctgtggccggattgatggggcccccacttcctagggctgaaggcaagttgaaggaagcagcaggagtaccggaatgaaaaccttgtttctcaaaggactgctgggttttggagtacacagaacccgagatatctggcacgcccgtgttactggaggtgactgaaacaccagtgttgtatccatgagacccatatccactcggctgttggaaaggggtggccgatgcattcacactgacattcacaccatgctgcttggaagaggtaggagccacagggaacacagcaggcccatactggaaggtgctggggaggcccgggacccctgtatagtatggcaggctggtgtaactgtagccaggaggcagcgccgggttcaggaatgtctgctgcgtggtatggtgagtctgcgtctggttctgttggggttgggccaaggttgtggccggggctggggaggaggcatccccacggccgaactttgtgaggtcaccagaataagggttgctggccaggctaccatccctcccagtcagcggagtagtgggtgtgggaaatgggatgctgtagtaatccaatggaaatcttgtctgaagcatctgcaagtcatcataaccatatacttgtggctgaaagatacagacatatagcaataacaggaactggtcatgatgttagcaaaacaaggagccaagagacaagctaattcaacagaacattcatcctcattcttttgaagaagatcctttagtcccacttaccgggtaggcatgtaacagccctggagccataatatacggattaggcaacaacggcgggaccccaggagggaggttgggaggagcttttcctgaagtcgtagcaactgagcttcgagtcgaggctgtgacagtggagttgctgcctaggctgaggcccaggctactgccactattgagactggaggagacactgaccactgggggaggtgcagagactgtgctggatgtggtggaaaaagtgctggaggaagaatggagattcgcctcactctccacacttgtgtgcaaaagagtggatgtcgaagtgcgcccagaagatgttgatgatgaaagggtattctgctgcgtagataacgtgctgctgtgttgtgtggtggtagtatttggaatctcctcactgtggctcaagccacccaaggaggatgaatgctgattggttgtcgtcagtaaggaagctgcagataccgtttcattgagaggggggatgctagaagtggaaggtgaatcagatttcactgcagagcctgtagcaccttcaacagattgtgtggtctgtaactgcgtggcctgcacagaactgaagccattctttgcctgagtcaggtccttttggggtgatgaagagatggagctggggtaccgccgagtctgtgtggatctctgttcataaagagggccctgagcattattttgggaggtataggttgtcgactgaattgggccgctctgataaccagactcctgactctggttagatgaaattgtagaggatgattcactggccgtgctggtatacaggctacttggagcctggcttgaagaggcgctcgtggtgggggtggactcataatcagaaaggacaggctctgacccaaactgcaatgccccaaactgcaggtttagccctgagatatctgctgagccaggcatctccacagccagagcaggaatcttagaagtcaaggaggcttttttcttctgctgtttcagtttctgctgagccggctgagggctagaggactggttgtctgaagatccaggcgacatctgtggagccgatgtggatttgcttggcagaggagaagacggaggtggaggtgcagctgtggaggtagccactgcaggtgacttctcctgaaggaacacctccatcatggttgaagatggggtaaaagcctggcgctttgtaaaggggctgtgcactgctgaatcacttgggttcttcaaatcatactgcaccagtgatggggattgtgtcgtcgagcccatgtcccaagaggaggtggtggtgcttccagactgagaatgctgagctgccaactgagccagggcttgggcagtcttgaattgctccaagaactgggagcctgtagtactgccgcctttagcttcaccgacatcaccaaatcctttccctaacatgctcaccatactgtgatgagaaaatgtgttccctgaagcaggctgtgatatggcagtctgcttcgaattactgaacaccagaggctgggccagagaaggagcctgagacggatccagattagatgaatcattctccattgtagatggtgtcttccccagcagaacagcaaggtcaattctctgaccagcagtgattgtcacattctccgcaggcagaggcactgaagacacattagaggcagtgaagatcttggtctcagaaagatcttcattccaatcttcagtcccccactcctctgttgcagtcctccatgcactcgtcccatcatctggttcaaagtggccagtgttgttccacgtattgccgctgctattgccatagttatcatcagtattggctggctctgcataatcagctgggttaaaggttcccattccttgagcagaaaaccttcctcctcgcctaccagagccacctctgcctcggccacggccccttctgcctctttctgttcctcttccagaaggccctccactcttggtgccatccaatccattttcctgacctcgaaactctcgtccacggctggcacctctcccccgtcttggtggcccaccacgtcgccgactatagtctctgtcccggtctcgattttctttgccttcctcattggattccgtctggccaccatccttctggcctgagactcccttcttcttcccgaccatctcccaggaatgcgtgtctgggtttccttccagaagaacattgatagctctgttgacatctccattgcagtcatgcaaagcaatcacacattcatcctggttcttgcctgtaatatcaatcaattgtttcaccttctcctcaaagtcagcatcattatggtccgaaatcatctgtgcaagtctaatttgttctgcagtggcctgtggccgctgcttgtgctgtgtctggttttggttttgaggttgttcccagtttccccgggctcggttagtgcccaccgatgtcatcatttacagtatatacaaataacagtatttacaaggtagaatacttcctgcgtccctcagcgcgtgacgctaaaaggggcgcgcacgcaagcgtgcgcgtgccgcctcgccacgagacacctctttccggctccgcgagtccaccccgcctccttcacggcggccctgcctccaccacgtgacgcacggatggccgccgcttcctcttactgtcgtagttccgcgtctgagcgctcgacgctcctgggtgccattgcctgcctgagtcacgtgtcagggggaagctggaaggcgtcgttctcctttcccagctctcctgcctgtccgccatgttttcaggccgggtctggcttggtcttcccccgtaaggaaatggccggggagctccaggggacccaggcgccgtcgcttcggcggagcctgggctgaccagccaggacagcggggtaaacccgaacaattctgcgcgaggtagggaggccatggcgtccggcagtaactggctctccggggtgaatgtcgtgctggtgatggcctacgggagcctggtgaggagattaccccaccccattcctgctgtcgcatcttacccagtagagaccctccttttgagctgtaccccgtctgcattctccacccactcacctgcgcctatccgggctttgactccttattccaggagtaggtgggagtttaagtcacttagtcgggccgacccgccctcgttagtctagaaccctccctttaacgctagagcacagaccccacgcctccctgctgctggcttcttagatccacccccatcataacggccttgctttgccccaagttttaccctgaaacattcctgagagccggaatctggggatttggaatgaaggcatgctttttta

SEQ ID NO: 736526 - DNA, 6516 bp, Homo sapiens
  misc_feature (1)..(2): n is a, c, g, or t
nntttacagtagtccattcctagggggaatgggccccaaggttttgtttttttatttcgtttttggggtacaggtggtgtttggttacatggatgagttctttagtgatttctgcgactttagcgcacccatcacccgagcagtgtacactgtacccaatatgtagtctttcatccctcaccccactccaagatttagttctgccagacgatacatgttgccttcacttctttttagtttatttgcctggacccatctaagtcatacttaaaactctataaagcattttttttctttgaaatggtctcagctccttcttgatcctctccattttccacccaatctcctctatccctctccctttactgcctgaaatcggctgtagatgtagcagtttctggaggaaatgaagatttgtggtggttctttccagtcaccaggttgtgaaagtcttaggggtgaggggaaggaaatcccctcaaggacaagatactactaccacattaaggtcaggagttcttaaagggcgaagatttcattttattccactgccttcaggggcctgctagaggaggcccagttggtacagtaatacttattcaccaagctggtcatcgacgaaattgaggatgtcctagacggagcaagaataggcagaggctgaaggtagaggttttctttttatatatacaagacacattaatccattaaatttgaggacacagtacaaaaaaaaaaaaaaaacaaaaaaaaaaccacttcaactaattcatctgacaatgctgttcatattcatgacgccatttttttgtttgttgttgttgttgttttcctaataataaagaaggagacttagggctgttgggctgatatatgtttgggggtcccacctccccgcctcatccgtacaccaccagggtgaacaggaggaagcaaaggaagtgcagggcccatagcaaagtttcataatcttgaatgcaagaggggagaaggaatggaagggggaaaaaaaaggagaaaatacaaatcctataatacatacaacagggtggggatggtataggaatgggacagacatgaagctgaggcatggggtgggccgctgggggtggggggcagcggaaaccccccacattcctttctctttgatgctgtttccatagtttccaggctgagaagccctctcagaagatgggaccgggagaagagggtcagggcctcagttggccccccagctgtagctgttgtaggcagacttgttggtctggggcttctgcgggatggagctggtctggctacgttgcccgctgcccgtctggccatcctgctgcaggtgatggtgaaggatctgagaatgcggctgctgatggggggtcagaatgtgcataaagggggcaggtgggtaggcagcagctgtggccggattgatggggcccccacttcctagggctgaaggcaagttgaaggaagcagcaggagtaccggaatgaaaaccttgtttctcaaaggactgctgggttttggagtacacagaacccgagatatctggcacgcccgtgttactggaggtgactgaaacaccagtgttgtatccatgagacccatatccactcggctgttggaaaggggtggccgatgcattcacactgacattcacaccatgctgcttggaagaggtaggagccacagggaacacagcaggcccatactggaaggtgctggggaggcccgggacccctgtatagtatggcaggctggtgtaactgtagccaggaggcagcgccgggttcaggaatgtctgctgcgtggtatggtgagtctgcgtctggttctgttggggttgggccaaggttgtggccggggctggggaggaggcatccccacggccgaactttgtgaggtcaccagaataagggttgctggccaggctaccatccctcccagtcagcggagtagtgggtgtgggaaatgggatgctgtagtaatccaatggaaatcttgtctgaagcatctgcaagtcatcataaccatatacttgtggctgaaagatacagacatatagcaataacaggaactggtcatgatgttagcaaaacaaggagccaagagacaagctaattcaacagaacattcatcctcattcttttgaagaagatcctttagtcccacttaccgggtaggcatgtaacagccctggagccataatatacggattaggcaacaacggcgggaccccaggagggaggttgggaggagcttttcctgaagtcgtagcaactgagcttcgagtcgaggctgtgacagtggagttgctgcctaggctgaggcccaggctactgccactattgagactggaggagacactgaccactgggggaggtgcagagactgtgctggatgtggtggaaaaagtgctggaggaagaatggagattcgcctcactctccacacttgtgtgcaaaagagtggatgtcgaagtgcgcccagaagatgttgatgatgaaagggtattctgctgcgtagataacgtgctgctgtgttgtgtggtggtagtatttggaatctcctcactgtggctcaagccacccaaggaggatgaatgctgattggttgtcgtcagtaaggaagctgcagataccgtttcattgagaggggggatgctagaagtggaaggtgaatcagatttcactgcagagcctgtagcaccttcaacagattgtgtggtctgtaactgcgtggcctgcacagaactgaagccattctttgcctgagtcaggtccttttggggtgatgaagagatggagctggggtaccgccgagtctgtgtggatctctgttcataaagagggccctgagcattattttgggaggtataggttgtcgactgaattgggccgctctgataaccagactcctgactctggttagatgaaattgtagaggatgattcactggccgtgctggtatacaggctacttggagcctggcttgaagaggcgctcgtggtgggggtggactcataatcagaaaggacaggctctgacccaaactgcaatgccccaaactgcaggtttagccctgagatatctgctgagccaggcatctccacagccagagcaggaatcttagaagtcaaggaggcttttttcttctgctgtttcagtttctgctgagccggctgagggctagaggactggttgtctgaagatccaggcgacatctgtggagccgatgtggatttgcttggcagaggagaagacggaggtggaggtgcagctgtggaggtagccactgcaggtgacttctcctgaaggaacacctccatcatggttgaagatggggtaaaagcctggcgctttgtaaaggggctgtgcactgctgaatcacttgggttcttcaaatcatactgcaccagtgatggggattgtgtcgtcgagcccatgtcccaagaggaggtggtggtgcttccagactgagaatgctgagctgccaactgagccagggcttgggcagtcttgaattgctccaagaactgggagcctgtagtactgccgcctttagcttcaccgacatcaccaaatcctttccctaacatgctcaccatactgtgatgagaaaatgtgttccctgaagcaggctgtgatatggcagtctgcttcgaattactgaacaccagaggctgggccagagaaggagcctgagacggatccagattagatgaatcattctccattgtagatggtgtcttccccagcagaacagcaaggtcaattctctgaccagcagtgattgtcacattctccgcaggcagaggcactgaagacacattagaggcagtgaagatcttggtctcagaaagatcttcattccaatcttcagtcccccactcctctgttgcagtcctccatgcactcgtcccatcatctggttcaaagtggccagtgttgttccacgtattgccgctgctattgccatagttatcatcagtattggctggctctgcataatcagctgggttaaaggttcccattccttgagcagaaaaccttcctcctcgcctaccagagccacctctgcctcggccacggccccttctgcctctttctgttcctcttccagaaggccctccactcttggtgccatccaatccattttcctgacctcgaaactctcgtccacggctggcacctctcccccgtcttggtggcccaccacgtcgccgactatagtctctgtcccggtctcgattttctttgccttcctcattggattccgtctggccaccatccttctggcctgagactcccttcttcttcccgaccatctcccaggaatgcgtgtctgggtttccttccagaagaacattgatagctctgttgacatctccattgcagtcatgcaaagcaatcacacattcatcctggttcttgcctgtaatatcaatcaattgtttcaccttctcctcaaagtcagcatcattatggtccgaaatcatctgtgcaagtctaatttgttctgcagtggcctgtggccgctgcttgtgctgtgtctggttttggttttgaggttgttcccagtttccccgggctcggttagtgcccaccgatgtcatcatttacagtatatacaaataacagtatttacaaggtagaatacttcctgcgtccctcagcgcgtgacgctaaaaggggcgcgcacgcaagcgtgcgcgtgccgcctcgccacgagacacctctttccggctccgcgagtccaccccgcctccttcacggcggccctgcctccaccacgtgacgcacggatggccgccgcttcctcttactgtcgtagttccgcgtctgagcgctcgacgctcctgggtgccattgcctgcctgagtcacgtgtcagggggaagctggaaggcgtcgttctcctttcccagctctcctgcctgtccgccatgttttcaggccgggtctggcttggtcttcccccgtaaggaaatggccggggagctccaggggacccaggcgccgtcgcttcggcggagcctgggctgaccagccaggacagcggggtaaacccgaacaattctgcgcgaggtagggaggccatggcgtccggcagtaactggctctccggggtgaatgtcgtgctggtgatggcctacgggagcctggtgtttgtactgctatttatttttgtgaagaggcaaatcatgcgctttgcaatgaaatctcgaaggggacctcatgtccctgtgggacacaatgcccccaaggacttgaaagaggagattgatattcgactctccagggttcaggatatcaagtatgagccccagctccttgcagatgatgatgctagactactacaactggaaacccagggaaatcaaagttgctacaactatctgtataggatgaaagctctggatgccattcgtacctctgagatcccatttcattctgaaggccggcatccccgttccttaatgggcaagaatttccgctcctacctgctggatctgcgaaacactagtacgcctttcaagggtgtacgcaaagcactcattgatacccttttggatggctatgaaacagcccgctatgggacaggggtctttggccagaatgagtacctacgctatcaggaggccctgagtgagctggccactgccgtgagtttggaggggaacgtgtcagagggagctggtacagtagtgttggactgttgccacagtgcagtgaccttcataaagcatataaacaaaatccatgataccataagagttgtcaggttctagactattagatcagtctcttacattagaaagcagatgcggccgggcacagtggttcacgcctataatcccagcactttgggaggccgaggcgggaggatcatctgaggttgggaatccgagaccagcctgaccaacatggagaaaccccgttctctactaaaaatacaaaattagccgggcgtggtggcgcatgcctgtaatcctagcttctggggaggctgaggcaggagaatctcttgaacccgggaggcggaggttgcggtgagccaagatcgtgccattatactccagcctgggcaacaaaagtgaaactctgtctcaaaaaaaaaaaagaagaaaagaaagcagatgcaactatacaagctagtaaaagaagtttttactagcatttttcttgtgtgcatttttcttgtcttttgtttagcccaataaaatgtcaaaattggtgtagcctagcaaagggaatagtttttcagcacacacagggattccttctcttcagagtctcagcgtcccttttgtgtcttggcccaataaaagtaagaattaaataacattgggccgggcgcggtggctcacgcctgtaatcccagcactttgggaggccgaggcaggcgaatcatgaggtcaagagatcaagaccatcctagccaacaaggtgaaaccctgtctctactaaaaatacaaaaattagctgggcatggtggtgcgtgcctgtaatctcagcta

SEQ ID NO: 736527 - DNA, 6287 bp, Homo sapiens
  misc_feature (1)..(2): n is a, c, g, or t
nntttacagtagtccattcctagggggaatgggccccaaggttttgtttttttatttcgtttttggggtacaggtggtgtttggttacatggatgagttctttagtgatttctgcgactttagcgcacccatcacccgagcagtgtacactgtacccaatatgtagtctttcatccctcaccccactccaagatttagttctgccagacgatacatgttgccttcacttctttttagtttatttgcctggacccatctaagtcatacttaaaactctataaagcattttttttctttgaaatggtctcagctccttcttgatcctctccattttccacccaatctcctctatccctctccctttactgcctgaaatcggctgtagatgtagcagtttctggaggaaatgaagatttgtggtggttctttccagtcaccaggttgtgaaagtcttaggggtgaggggaaggaaatcccctcaaggacaagatactactaccacattaaggtcaggagttcttaaagggcgaagatttcattttattccactgccttcaggggcctgctagaggaggcccagttggtacagtaatacttattcaccaagctggtcatcgacgaaattgaggatgtcctagacggagcaagaataggcagaggctgaaggtagaggttttctttttatatatacaagacacattaatccattaaatttgaggacacagtacaaaaaaaaaaaaaaaacaaaaaaaaaaccacttcaactaattcatctgacaatgctgttcatattcatgacgccatttttttgtttgttgttgttgttgttttcctaataataaagaaggagacttagggctgttgggctgatatatgtttgggggtcccacctccccgcctcatccgtacaccaccagggtgaacaggaggaagcaaaggaagtgcagggcccatagcaaagtttcataatcttgaatgcaagaggggagaaggaatggaagggggaaaaaaaaggagaaaatacaaatcctataatacatacaacagggtggggatggtataggaatgggacagacatgaagctgaggcatggggtgggccgctgggggtggggggcagcggaaaccccccacattcctttctctttgatgctgtttccatagtttccaggctgagaagccctctcagaagatgggaccgggagaagagggtcagggcctcagttggccccccagctgtagctgttgtaggcagacttgttggtctggggcttctgcgggatggagctggtctggctacgttgcccgctgcccgtctggccatcctgctgcaggtgatggtgaaggatctgagaatgcggctgctgatggggggtcagaatgtgcataaagggggcaggtgggtaggcagcagctgtggccggattgatggggcccccacttcctagggctgaaggcaagttgaaggaagcagcaggagtaccggaatgaaaaccttgtttctcaaaggactgctgggttttggagtacacagaacccgagatatctggcacgcccgtgttactggaggtgactgaaacaccagtgttgtatccatgagacccatatccactcggctgttggaaaggggtggccgatgcattcacactgacattcacaccatgctgcttggaagaggtaggagccacagggaacacagcaggcccatactggaaggtgctggggaggcccgggacccctgtatagtatggcaggctggtgtaactgtagccaggaggcagcgccgggttcaggaatgtctgctgcgtggtatggtgagtctgcgtctggttctgttggggttgggccaaggttgtggccggggctggggaggaggcatccccacggccgaactttgtgaggtcaccagaataagggttgctggccaggctaccatccctcccagtcagcggagtagtgggtgtgggaaatgggatgctgtagtaatccaatggaaatcttgtctgaagcatctgcaagtcatcataaccatatacttgtggctgaaagatacagacatatagcaataacaggaactggtcatgatgttagcaaaacaaggagccaagagacaagctaattcaacagaacattcatcctcattcttttgaagaagatcctttagtcccacttaccgggtaggcatgtaacagccctggagccataatatacggattaggcaacaacggcgggaccccaggagggaggttgggaggagcttttcctgaagtcgtagcaactgagcttcgagtcgaggctgtgacagtggagttgctgcctaggctgaggcccaggctactgccactattgagactggaggagacactgaccactgggggaggtgcagagactgtgctggatgtggtggaaaaagtgctggaggaagaatggagattcgcctcactctccacacttgtgtgcaaaagagtggatgtcgaagtgcgcccagaagatgttgatgatgaaagggtattctgctgcgtagataacgtgctgctgtgttgtgtggtggtagtatttggaatctcctcactgtggctcaagccacccaaggaggatgaatgctgattggttgtcgtcagtaaggaagctgcagataccgtttcattgagaggggggatgctagaagtggaaggtgaatcagatttcactgcagagcctgtagcaccttcaacagattgtgtggtctgtaactgcgtggcctgcacagaactgaagccattctttgcctgagtcaggtccttttggggtgatgaagagatggagctggggtaccgccgagtctgtgtggatctctgttcataaagagggccctgagcattattttgggaggtataggttgtcgactgaattgggccgctctgataaccagactcctgactctggttagatgaaattgtagaggatgattcactggccgtgctggtatacaggctacttggagcctggcttgaagaggcgctcgtggtgggggtggactcataatcagaaaggacaggctctgacccaaactgcaatgccccaaactgcaggtttagccctgagatatctgctgagccaggcatctccacagccagagcaggaatcttagaagtcaaggaggcttttttcttctgctgtttcagtttctgctgagccggctgagggctagaggactggttgtctgaagatccaggcgacatctgtggagccgatgtggatttgcttggcagaggagaagacggaggtggaggtgcagctgtggaggtagccactgcaggtgacttctcctgaaggaacacctccatcatggttgaagatggggtaaaagcctggcgctttgtaaaggggctgtgcactgctgaatcacttgggttcttcaaatcatactgcaccagtgatggggattgtgtcgtcgagcccatgtcccaagaggaggtggtggtgcttccagactgagaatgctgagctgccaactgagccagggcttgggcagtcttgaattgctccaagaactgggagcctgtagtactgccgcctttagcttcaccgacatcaccaaatcctttccctaacatgctcaccatactgtgatgagaaaatgtgttccctgaagcaggctgtgatatggcagtctgcttcgaattactgaacaccagaggctgggccagagaaggagcctgagacggatccagattagatgaatcattctccattgtagatggtgtcttccccagcagaacagcaaggtcaattctctgaccagcagtgattgtcacattctccgcaggcagaggcactgaagacacattagaggcagtgaagatcttggtctcagaaagatcttcattccaatcttcagtcccccactcctctgttgcagtcctccatgcactcgtcccatcatctggttcaaagtggccagtgttgttccacgtattgccgctgctattgccatagttatcatcagtattggctggctctgcataatcagctgggttaaaggttcccattccttgagcagaaaaccttcctcctcgcctaccagagccacctctgcctcggccacggccccttctgcctctttctgttcctcttccagaaggccctccactcttggtgccatccaatccattttcctgacctcgaaactctcgtccacggctggcacctctcccccgtcttggtggcccaccacgtcgccgactatagtctctgtcccggtctcgattttctttgccttcctcattggattccgtctggccaccatccttctggcctgagactcccttcttcttcccgaccatctcccaggaatgcgtgtctgggtttccttccagaagaacattgatagctctgttgacatctccattgcagtcatgcaaagcaatcacacattcatcctggttcttgcctgtaatatcaatcaattgtttcaccttctcctcaaagtcagcatcattatggtccgaaatcatctgtgcaagtctaatttgttctgcagtggcctgtggccgctgcttgtgctgtgtctggttttggttttgaggttgttcccagtttccccgggctcggttagtgcccaccgatgtcatcatttacagtatatacaaataacagtatttacaaggtagaatacttcctgcgtccctcagcgcgtgacgctaaaaggggcgcgcacgcaagcgtgcgcgtgccgcctcgccacgagacacctctttccggctccgcgagtccaccccgcctccttcacggcggccctgcctccaccacgtgacgcacggatggccgccgcttcctcttactgtcgtagttccgcgtctgagcgctcgacgctcctgggtgccattgcctgcctgagtcacgtgtcagggggaagctggaaggcgtcgttctcctttcccagctctcctgcctgtccgccatgttttcaggccgggtctggcttggtcttcccccgtaaggaaatggccggggagctccaggggacccaggcgccgtcgcttcggcggagcctgggctgaccagccaggacagcggggtaaacccgaacaattctgcgcgaggtagggaggccatggcgtccggcagtaactggctctccggggtgaatgtcgtgctggtgatggcctacgggagcctggtgtttgtactgctatttatttttgtgaagaggcaaatcatgcgctttgcaatgaaatctcgaaggggacctcatgtccctgtgggacacaatgcccccaaggacttgaaagaggagattgatattcgactctccagggttcaggatatcaagtatgagccccagctccttgcagatgatgatgctagactactacaactggaaacccagggaaatcaaagttgctacaactatctgtataggatgaaagctctggatgccattcgtacctctgagatcccatttcattctgaaggccggcatccccgttccttaatgggcaagaatttccgctcctacctgctggatctgcgaaacactagtacgcctttcaagggtgtacgcaaagcactcattgatacccttttggatggctatgaaacagcccgctatgggacaggggtctttggccagaatgagtacctacgctatcaggaggccctgagtgagctggccactgccgtgagtttggaggggaacgtgtcagagggagctggtacagtagtgttggactgttgccacagtgcagtgaccttcataaagcatataaacaaaatccatgataccataagagttgtcaggttctagactattagatcagtctcttacattagaaagcagatgcggccgggcacagtggttcacgcctataatcccagcactttgggaggccgaggcgggaggatcatctgaggttgggaatccgagaccagcctgaccaacatggagaaaccccgttctctactaaaaatacaaaattagccgggcgtggtggcgcatgcctgtaatcctagcttctggggaggctgaggcaggagaatctcttgaacccgggaggcggaggttgcggtgagccaagatcgtgccattatactccagcctgggcaacaaaagtgaaactctgtctcaaaaaaaaaaaataaaatataaaaagaaaaaaaaaatggggggggttttttgtgggggggggaaacaagaggtttataaaaggggaaggggtataggggttctgggaccatttttttttaaaagggggaaataggggggggccaaaaaggggggggataattgaaaagggggtaacctgt

SEQ ID NO: 736528 - DNA, 7157 bp, Homo sapiens
  misc_feature (1)..(2): n is a, c, g, or t
  misc_feature (6613)..(6613): n is a, c, g, or t
  misc_feature (6632)..(6632): n is a, c, g, or t
  misc_feature (6635)..(6635): n is a, c, g, or t
  misc_feature (6639)..(6639): n is a, c, g, or t
  misc_feature (6642)..(6642): n is a, c, g, or t
  misc_feature (6644)..(6644): n is a, c, g, or t
  misc_feature (6650)..(6650): n is a, c, g, or t
nntttacagtagtccattcctagggggaatgggccccaaggttttgtttttttatttcgtttttggggtacaggtggtgtttggttacatggatgagttctttagtgatttctgcgactttagcgcacccatcacccgagcagtgtacactgtacccaatatgtagtctttcatccctcaccccactccaagatttagttctgccagacgatacatgttgccttcacttctttttagtttatttgcctggacccatctaagtcatacttaaaactctataaagcattttttttctttgaaatggtctcagctccttcttgatcctctccattttccacccaatctcctctatccctctccctttactgcctgaaatcggctgtagatgtagcagtttctggaggaaatgaagatttgtggtggttctttccagtcaccaggttgtgaaagtcttaggggtgaggggaaggaaatcccctcaaggacaagatactactaccacattaaggtcaggagttcttaaagggcgaagatttcattttattccactgccttcaggggcctgctagaggaggcccagttggtacagtaatacttattcaccaagctggtcatcgacgaaattgaggatgtcctagacggagcaagaataggcagaggctgaaggtagaggttttctttttatatatacaagacacattaatccattaaatttgaggacacagtacaaaaaaaaaaaaaaaacaaaaaaaaaaccacttcaactaattcatctgacaatgctgttcatattcatgacgccatttttttgtttgttgttgttgttgttttcctaataataaagaaggagacttagggctgttgggctgatatatgtttgggggtcccacctccccgcctcatccgtacaccaccagggtgaacaggaggaagcaaaggaagtgcagggcccatagcaaagtttcataatcttgaatgcaagaggggagaaggaatggaagggggaaaaaaaaggagaaaatacaaatcctataatacatacaacagggtggggatggtataggaatgggacagacatgaagctgaggcatggggtgggccgctgggggtggggggcagcggaaaccccccacattcctttctctttgatgctgtttccatagtttccaggctgagaagccctctcagaagatgggaccgggagaagagggtcagggcctcagttggccccccagctgtagctgttgtaggcagacttgttggtctggggcttctgcgggatggagctggtctggctacgttgcccgctgcccgtctggccatcctgctgcaggtgatggtgaaggatctgagaatgcggctgctgatggggggtcagaatgtgcataaagggggcaggtgggtaggcagcagctgtggccggattgatggggcccccacttcctagggctgaaggcaagttgaaggaagcagcaggagtaccggaatgaaaaccttgtttctcaaaggactgctgggttttggagtacacagaacccgagatatctggcacgcccgtgttactggaggtgactgaaacaccagtgttgtatccatgagacccatatccactcggctgttggaaaggggtggccgatgcattcacactgacattcacaccatgctgcttggaagaggtaggagccacagggaacacagcaggcccatactggaaggtgctggggaggcccgggacccctgtatagtatggcaggctggtgtaactgtagccaggaggcagcgccgggttcaggaatgtctgctgcgtggtatggtgagtctgcgtctggttctgttggggttgggccaaggttgtggccggggctggggaggaggcatccccacggccgaactttgtgaggtcaccagaataagggttgctggccaggctaccatccctcccagtcagcggagtagtgggtgtgggaaatgggatgctgtagtaatccaatggaaatcttgtctgaagcatctgcaagtcatcataaccatatacttgtggctgaaagatacagacatatagcaataacaggaactggtcatgatgttagcaaaacaaggagccaagagacaagctaattcaacagaacattcatcctcattcttttgaagaagatcctttagtcccacttaccgggtaggcatgtaacagccctggagccataatatacggattaggcaacaacggcgggaccccaggagggaggttgggaggagcttttcctgaagtcgtagcaactgagcttcgagtcgaggctgtgacagtggagttgctgcctaggctgaggcccaggctactgccactattgagactggaggagacactgaccactgggggaggtgcagagactgtgctggatgtggtggaaaaagtgctggaggaagaatggagattcgcctcactctccacacttgtgtgcaaaagagtggatgtcgaagtgcgcccagaagatgttgatgatgaaagggtattctgctgcgtagataacgtgctgctgtgttgtgtggtggtagtatttggaatctcctcactgtggctcaagccacccaaggaggatgaatgctgattggttgtcgtcagtaaggaagctgcagataccgtttcattgagaggggggatgctagaagtggaaggtgaatcagatttcactgcagagcctgtagcaccttcaacagattgtgtggtctgtaactgcgtggcctgcacagaactgaagccattctttgcctgagtcaggtccttttggggtgatgaagagatggagctggggtaccgccgagtctgtgtggatctctgttcataaagagggccctgagcattattttgggaggtataggttgtcgactgaattgggccgctctgataaccagactcctgactctggttagatgaaattgtagaggatgattcactggccgtgctggtatacaggctacttggagcctggcttgaagaggcgctcgtggtgggggtggactcataatcagaaaggacaggctctgacccaaactgcaatgccccaaactgcaggtttagccctgagatatctgctgagccaggcatctccacagccagagcaggaatcttagaagtcaaggaggcttttttcttctgctgtttcagtttctgctgagccggctgagggctagaggactggttgtctgaagatccaggcgacatctgtggagccgatgtggatttgcttggcagaggagaagacggaggtggaggtgcagctgtggaggtagccactgcaggtgacttctcctgaaggaacacctccatcatggttgaagatggggtaaaagcctggcgctttgtaaaggggctgtgcactgctgaatcacttgggttcttcaaatcatactgcaccagtgatggggattgtgtcgtcgagcccatgtcccaagaggaggtggtggtgcttccagactgagaatgctgagctgccaactgagccagggcttgggcagtcttgaattgctccaagaactgggagcctgtagtactgccgcctttagcttcaccgacatcaccaaatcctttccctaacatgctcaccatactgtgatgagaaaatgtgttccctgaagcaggctgtgatatggcagtctgcttcgaattactgaacaccagaggctgggccagagaaggagcctgagacggatccagattagatgaatcattctccattgtagatggtgtcttccccagcagaacagcaaggtcaattctctgaccagcagtgattgtcacattctccgcaggcagaggcactgaagacacattagaggcagtgaagatcttggtctcagaaagatcttcattccaatcttcagtcccccactcctctgttgcagtcctccatgcactcgtcccatcatctggttcaaagtggccagtgttgttccacgtattgccgctgctattgccatagttatcatcagtattggctggctctgcataatcagctgggttaaaggttcccattccttgagcagaaaaccttcctcctcgcctaccagagccacctctgcctcggccacggccccttctgcctctttctgttcctcttccagaaggccctccactcttggtgccatccaatccattttcctgacctcgaaactctcgtccacggctggcacctctcccccgtcttggtggcccaccacgtcgccgactatagtctctgtcccggtctcgattttctttgccttcctcattggattccgtctggccaccatccttctggcctgagactcccttcttcttcccgaccatctcccaggaatgcgtgtctgggtttccttccagaagaacattgatagctctgttgacatctccattgcagtcatgcaaagcaatcacacattcatcctggttcttgcctgtaatatcaatcaattgtttcaccttctcctcaaagtcagcatcattatggtccgaaatcatctgtgcaagtctaatttgttctgcagtggcctgtggccgctgcttgtgctgtgtctggttttggttttgaggttgttcccagtttccccgggctcggttagtgcccaccgatgtcatcatttacagtatatacaaataacagtatttacaaggtagaatacttcctgcgtccctcagcgcgtgacgctaaaaggggcgcgcacgcaagcgtgcgcgtgccgcctcgccacgagacacctctttccggctccgcgagtccaccccgcctccttcacggcggccctgcctccaccacgtgacgcacggatggccgccgcttcctcttactgtcgtagttccgcgtctgagcgctcgacgctcctgggtgccattgcctgcctgagtcacgtgtcagggggaagctggaaggcgtcgttctcctttcccagctctcctgcctgtccgccatgttttcaggccgggtctggcttggtcttcccccgtaaggaaatggccggggagctccaggggacccaggcgccgtcgcttcggcggagcctgggctgaccagccaggacagcggggtaaacccgaacaattctgcgcgaggtagggaggccatggcgtccggcagtaactggctctccggggtgaatgtcgtgctggtgatggcctacgggagcctggtgtttgtactgctatttatttttgtgaagaggcaaatcatgcgctttgcaatgaaatctcgaaggggacctcatgtccctgtgggacacaatgcccccaaggacttgaaagaggagattgatattcgactctccagggttcaggatatcaagtatgagccccagctccttgcagatgatgatgctagactactacaactggaaacccagggaaatcaaagttgctacaactatctgtataggatgaaagctctggatgccattcgtacctctgagatcccatttcattctgaaggccggcatccccgttccttaatgggcaagaatttccgctcctacctgctggatctgcgaaacactagtacgcctttcaagggtgtacgcaaagcactcattgatacccttttggatggctatgaaacagcccgctatgggacaggggtctttggccagaatgagtacctacgctatcaggaggccctgagtgagctggccactgcggttaaagcacgaattgggagctctcagcgacatcaccagtcagcagccaaagacctaactcagtcccctgaggtctccccaacaaccatccaggtgacatacctcccctccagtcagaagagtaaacgtgccaagcacttccttgaattgaagagctttaaggataactataacacattggagagtactctgtgacggagctgaaggactcttgccgtagattaagccagtcagttgcaatgtgcaagacaggctgcttgccgggccgccctcggaacatctggcccagcaggcccagactgtatccatccaagttcccgttgtatccagagttcttagagcttgtgtctaaagggtaattccccaacccttccttatgagcatttttagaacattggctaagactattttcccccagtagcgcttttttctggatttgcattcgggtgttattcttaatgtttctgtcaaagcttcttaaaaatcttcacttggtttcagccatagttcaccttccctgttccaggtttatttaattccaaaggtgagagttggagtgagatgtcttccatatctatacctttgtgcacagttgaatgggaactgtttgggtttagggcatcttagagttgattgatggaaaaagcagacaggaactggtgggaggtcaagtggggaagttggtgaatgtggaataacttacctttgtgctccacttaaaccagatgtgttgcagctttcctgacatgcaaggatctactttaattccacactctcattaataaattgaataaaagggaatgttttggcacctgatataatctgccaggctatgtgacagtaggaaggaatggtttcccctaacaagcccaatgcactggtctgactttataaattatttaataaaatgaactattatcaaataaaacgtatgaatcagtaaaaaaaaaanaaaaaaaaaaaaaaaaaanaanaaanaananaaaaanaaaaaaaaagagggggggggccgggaaaaaagaaatatcccccggggggcccaccccccgcaacacggccccgcccccgtccttcttgtgagcacaaggggggccccaattagggagggggaataaaaaaggacgggaggcagggggggggggttaacaccaggggtgggcgggggagaacaccgggcccgcggggaacccttgggggagggccccccattcttcgcggcgggcggcgaccactctgtcgcggcccaaccccccacggagtgtttaaagccgtctccggggacaattaaacccttcaacgcggtaatgtgggggcaacccccggcaatatgtccgcgggcgaagagttcgctccgggttgtttataggactacgagaggatatatatatatataagacgcaaccacgacgccaccacgccgctataatactgcgatccctccactgccgcgtctgataccctccacactccgacacccaaactacaccatgcgcgcg

SEQ ID NO: 736529 - DNA, 7268 bp, Homo sapiens
  misc_feature (1)..(2): n is a, c, g, or t
  misc_feature (6613)..(6613): n is a, c, g, or t
  misc_feature (6632)..(6632): n is a, c, g, or t
  misc_feature (6635)..(6635): n is a, c, g, or t
  misc_feature (6639)..(6639): n is a, c, g, or t
  misc_feature (6642)..(6642): n is a, c, g, or t
  misc_feature (6644)..(6644): n is a, c, g, or t
  misc_feature (6650)..(6650): n is a, c, g, or t
  misc_feature (6750)..(6750): n is a, c, g, or t
nntttacagtagtccattcctagggggaatgggccccaaggttttgtttttttatttcgtttttggggtacaggtggtgtttggttacatggatgagttctttagtgatttctgcgactttagcgcacccatcacccgagcagtgtacactgtacccaatatgtagtctttcatccctcaccccactccaagatttagttctgccagacgatacatgttgccttcacttctttttagtttatttgcctggacccatctaagtcatacttaaaactctataaagcattttttttctttgaaatggtctcagctccttcttgatcctctccattttccacccaatctcctctatccctctccctttactgcctgaaatcggctgtagatgtagcagtttctggaggaaatgaagatttgtggtggttctttccagtcaccaggttgtgaaagtcttaggggtgaggggaaggaaatcccctcaaggacaagatactactaccacattaaggtcaggagttcttaaagggcgaagatttcattttattccactgccttcaggggcctgctagaggaggcccagttggtacagtaatacttattcaccaagctggtcatcgacgaaattgaggatgtcctagacggagcaagaataggcagaggctgaaggtagaggttttctttttatatatacaagacacattaatccattaaatttgaggacacagtacaaaaaaaaaaaaaaaacaaaaaaaaaaccacttcaactaattcatctgacaatgctgttcatattcatgacgccatttttttgtttgttgttgttgttgttttcctaataataaagaaggagacttagggctgttgggctgatatatgtttgggggtcccacctccccgcctcatccgtacaccaccagggtgaacaggaggaagcaaaggaagtgcagggcccatagcaaagtttcataatcttgaatgcaagaggggagaaggaatggaagggggaaaaaaaaggagaaaatacaaatcctataatacatacaacagggtggggatggtataggaatgggacagacatgaagctgaggcatggggtgggccgctgggggtggggggcagcggaaaccccccacattcctttctctttgatgctgtttccatagtttccaggctgagaagccctctcagaagatgggaccgggagaagagggtcagggcctcagttggccccccagctgtagctgttgtaggcagacttgttggtctggggcttctgcgggatggagctggtctggctacgttgcccgctgcccgtctggccatcctgctgcaggtgatggtgaaggatctgagaatgcggctgctgatggggggtcagaatgtgcataaagggggcaggtgggtaggcagcagctgtggccggattgatggggcccccacttcctagggctgaaggcaagttgaaggaagcagcaggagtaccggaatgaaaaccttgtttctcaaaggactgctgggttttggagtacacagaacccgagatatctggcacgcccgtgttactggaggtgactgaaacaccagtgttgtatccatgagacccatatccactcggctgttggaaaggggtggccgatgcattcacactgacattcacaccatgctgcttggaagaggtaggagccacagggaacacagcaggcccatactggaaggtgctggggaggcccgggacccctgtatagtatggcaggctggtgtaactgtagccaggaggcagcgccgggttcaggaatgtctgctgcgtggtatggtgagtctgcgtctggttctgttggggttgggccaaggttgtggccggggctggggaggaggcatccccacggccgaactttgtgaggtcaccagaataagggttgctggccaggctaccatccctcccagtcagcggagtagtgggtgtgggaaatgggatgctgtagtaatccaatggaaatcttgtctgaagcatctgcaagtcatcataaccatatacttgtggctgaaagatacagacatatagcaataacaggaactggtcatgatgttagcaaaacaaggagccaagagacaagctaattcaacagaacattcatcctcattcttttgaagaagatcctttagtcccacttaccgggtaggcatgtaacagccctggagccataatatacggattaggcaacaacggcgggaccccaggagggaggttgggaggagcttttcctgaagtcgtagcaactgagcttcgagtcgaggctgtgacagtggagttgctgcctaggctgaggcccaggctactgccactattgagactggaggagacactgaccactgggggaggtgcagagactgtgctggatgtggtggaaaaagtgctggaggaagaatggagattcgcctcactctccacacttgtgtgcaaaagagtggatgtcgaagtgcgcccagaagatgttgatgatgaaagggtattctgctgcgtagataacgtgctgctgtgttgtgtggtggtagtatttggaatctcctcactgtggctcaagccacccaaggaggatgaatgctgattggttgtcgtcagtaaggaagctgcagataccgtttcattgagaggggggatgctagaagtggaaggtgaatcagatttcactgcagagcctgtagcaccttcaacagattgtgtggtctgtaactgcgtggcctgcacagaactgaagccattctttgcctgagtcaggtccttttggggtgatgaagagatggagctggggtaccgccgagtctgtgtggatctctgttcataaagagggccctgagcattattttgggaggtataggttgtcgactgaattgggccgctctgataaccagactcctgactctggttagatgaaattgtagaggatgattcactggccgtgctggtatacaggctacttggagcctggcttgaagaggcgctcgtggtgggggtggactcataatcagaaaggacaggctctgacccaaactgcaatgccccaaactgcaggtttagccctgagatatctgctgagccaggcatctccacagccagagcaggaatcttagaagtcaaggaggcttttttcttctgctgtttcagtttctgctgagccggctgagggctagaggactggttgtctgaagatccaggcgacatctgtggagccgatgtggatttgcttggcagaggagaagacggaggtggaggtgcagctgtggaggtagccactgcaggtgacttctcctgaaggaacacctccatcatggttgaagatggggtaaaagcctggcgctttgtaaaggggctgtgcactgctgaatcacttgggttcttcaaatcatactgcaccagtgatggggattgtgtcgtcgagcccatgtcccaagaggaggtggtggtgcttccagactgagaatgctgagctgccaactgagccagggcttgggcagtcttgaattgctccaagaactgggagcctgtagtactgccgcctttagcttcaccgacatcaccaaatcctttccctaacatgctcaccatactgtgatgagaaaatgtgttccctgaagcaggctgtgatatggcagtctgcttcgaattactgaacaccagaggctgggccagagaaggagcctgagacggatccagattagatgaatcattctccattgtagatggtgtcttccccagcagaacagcaaggtcaattctctgaccagcagtgattgtcacattctccgcaggcagaggcactgaagacacattagaggcagtgaagatcttggtctcagaaagatcttcattccaatcttcagtcccccactcctctgttgcagtcctccatgcactcgtcccatcatctggttcaaagtggccagtgttgttccacgtattgccgctgctattgccatagttatcatcagtattggctggctctgcataatcagctgggttaaaggttcccattccttgagcagaaaaccttcctcctcgcctaccagagccacctctgcctcggccacggccccttctgcctctttctgttcctcttccagaaggccctccactcttggtgccatccaatccattttcctgacctcgaaactctcgtccacggctggcacctctcccccgtcttggtggcccaccacgtcgccgactatagtctctgtcccggtctcgattttctttgccttcctcattggattccgtctggccaccatccttctggcctgagactcccttcttcttcccgaccatctcccaggaatgcgtgtctgggtttccttccagaagaacattgatagctctgttgacatctccattgcagtcatgcaaagcaatcacacattcatcctggttcttgcctgtaatatcaatcaattgtttcaccttctcctcaaagtcagcatcattatggtccgaaatcatctgtgcaagtctaatttgttctgcagtggcctgtggccgctgcttgtgctgtgtctggttttggttttgaggttgttcccagtttccccgggctcggttagtgcccaccgatgtcatcatttacagtatatacaaataacagtatttacaaggtagaatacttcctgcgtccctcagcgcgtgacgctaaaaggggcgcgcacgcaagcgtgcgcgtgccgcctcgccacgagacacctctttccggctccgcgagtccaccccgcctccttcacggcggccctgcctccaccacgtgacgcacggatggccgccgcttcctcttactgtcgtagttccgcgtctgagcgctcgacgctcctgggtgccattgcctgcctgagtcacgtgtcagggggaagctggaaggcgtcgttctcctttcccagctctcctgcctgtccgccatgttttcaggccgggtctggcttggtcttcccccgtaaggaaatggccggggagctccaggggacccaggcgccgtcgcttcggcggagcctgggctgaccagccaggacagcggggtaaacccgaacaattctgcgcgaggtagggaggccatggcgtccggcagtaactggctctccggggtgaatgtcgtgctggtgatggcctacgggagcctggtgtttgtactgctatttatttttgtgaagaggcaaatcatgcgctttgcaatgaaatctcgaaggggacctcatgtccctgtgggacacaatgcccccaaggacttgaaagaggagattgatattcgactctccagggttcaggatatcaagtatgagccccagctccttgcagatgatgatgctagactactacaactggaaacccagggaaatcaaagttgctacaactatctgtataggatgaaagctctggatgccattcgtacctctgagatcccatttcattctgaaggccggcatccccgttccttaatgggcaagaatttccgctcctacctgctggatctgcgaaacactagtacgcctttcaagggtgtacgcaaagcactcattgatacccttttggatggctatgaaacagcccgctatgggacaggggtctttggccagaatgagtacctacgctatcaggaggccctgagtgagctggccactgcggttaaagcacgaattgggagctctcagcgacatcaccagtcagcagccaaagacctaactcagtcccctgaggtctccccaacaaccatccaggtgacatacctcccctccagtcagaagagtaaacgtgccaagcacttccttgaattgaagagctttaaggataactataacacattggagagtactctgtgacggagctgaaggactcttgccgtagattaagccagtcagttgcaatgtgcaagacaggctgcttgccgggccgccctcggaacatctggcccagcaggcccagactgtatccatccaagttcccgttgtatccagagttcttagagcttgtgtctaaagggtaattccccaacccttccttatgagcatttttagaacattggctaagactattttcccccagtagcgcttttttctggatttgcattcgggtgttattcttaatgtttctgtcaaagcttcttaaaaatcttcacttggtttcagccatagttcaccttccctgttccaggtttatttaattccaaaggtgagagttggagtgagatgtcttccatatctatacctttgtgcacagttgaatgggaactgtttgggtttagggcatcttagagttgattgatggaaaaagcagacaggaactggtgggaggtcaagtggggaagttggtgaatgtggaataacttacctttgtgctccacttaaaccagatgtgttgcagctttcctgacatgcaaggatctactttaattccacactctcattaataaattgaataaaagggaatgttttggcacctgatataatctgccaggctatgtgacagtaggaaggaatggtttcccctaacaagcccaatgcactggtctgactttataaattatttaataaaatgaactattatcaaataaaacgtatgaatcagtaaaaaaaaaanaaaaaaaaaaaaaaaaaanaanaaanaananaaaaanaaaaaaaaaaaaaaaaaaaaaaaaaacaaaagtaaacaaaagaaaaaagaaaaaaggagagaggaggagcggcgccgaccgacaacaaataaccaaattncaccagcgaggagaagcaagacagtaagacgacgctgcgcaggctcgacgtgccttggagacgagggggaggcgccggcgcgacgagcgacgagtgcgtccacaaacccagtagacgagagcgaggcgcagacgagcaccgacatatcacacgaagagtcggctggggggagaagcaatgataacagtctaacgcagagatctaattgtgggttctcgtctgatgaattacggggacgacacccgtataaaagagtagcgggccgtgggagttcacaatctgttctgtgagaaggacaagaacaagccaatacaaaacataaaggacgacgtcgatgtatagatcctattacgttacgatcgagtataaagaaattaagttagctgtctagtgcagatacgtctgttgaggtggagtgagccgaaaaaagaactgcaggtgtacgattagttgtcgcagaggaggtaagtgacaactcatgcggtcttctaacgtgtcggatgcatcgtgcgagccaa

SEQ ID NO: 736530 - DNA, 7273 bp, Homo sapiens
  misc_feature (1)..(2): n is a, c, g, or t
nntttacagtagtccattcctagggggaatgggccccaaggttttgtttttttatttcgtttttggggtacaggtggtgtttggttacatggatgagttctttagtgatttctgcgactttagcgcacccatcacccgagcagtgtacactgtacccaatatgtagtctttcatccctcaccccactccaagatttagttctgccagacgatacatgttgccttcacttctttttagtttatttgcctggacccatctaagtcatacttaaaactctataaagcattttttttctttgaaatggtctcagctccttcttgatcctctccattttccacccaatctcctctatccctctccctttactgcctgaaatcggctgtagatgtagcagtttctggaggaaatgaagatttgtggtggttctttccagtcaccaggttgtgaaagtcttaggggtgaggggaaggaaatcccctcaaggacaagatactactaccacattaaggtcaggagttcttaaagggcgaagatttcattttattccactgccttcaggggcctgctagaggaggcccagttggtacagtaatacttattcaccaagctggtcatcgacgaaattgaggatgtcctagacggagcaagaataggcagaggctgaaggtagaggttttctttttatatatacaagacacattaatccattaaatttgaggacacagtacaaaaaaaaaaaaaaaacaaaaaaaaaaccacttcaactaattcatctgacaatgctgttcatattcatgacgccatttttttgtttgttgttgttgttgttttcctaataataaagaaggagacttagggctgttgggctgatatatgtttgggggtcccacctccccgcctcatccgtacaccaccagggtgaacaggaggaagcaaaggaagtgcagggcccatagcaaagtttcataatcttgaatgcaagaggggagaaggaatggaagggggaaaaaaaaggagaaaatacaaatcctataatacatacaacagggtggggatggtataggaatgggacagacatgaagctgaggcatggggtgggccgctgggggtggggggcagcggaaaccccccacattcctttctctttgatgctgtttccatagtttccaggctgagaagccctctcagaagatgggaccgggagaagagggtcagggcctcagttggccccccagctgtagctgttgtaggcagacttgttggtctggggcttctgcgggatggagctggtctggctacgttgcccgctgcccgtctggccatcctgctgcaggtgatggtgaaggatctgagaatgcggctgctgatggggggtcagaatgtgcataaagggggcaggtgggtaggcagcagctgtggccggattgatggggcccccacttcctagggctgaaggcaagttgaaggaagcagcaggagtaccggaatgaaaaccttgtttctcaaaggactgctgggttttggagtacacagaacccgagatatctggcacgcccgtgttactggaggtgactgaaacaccagtgttgtatccatgagacccatatccactcggctgttggaaaggggtggccgatgcattcacactgacattcacaccatgctgcttggaagaggtaggagccacagggaacacagcaggcccatactggaaggtgctggggaggcccgggacccctgtatagtatggcaggctggtgtaactgtagccaggaggcagcgccgggttcaggaatgtctgctgcgtggtatggtgagtctgcgtctggttctgttggggttgggccaaggttgtggccggggctggggaggaggcatccccacggccgaactttgtgaggtcaccagaataagggttgctggccaggctaccatccctcccagtcagcggagtagtgggtgtgggaaatgggatgctgtagtaatccaatggaaatcttgtctgaagcatctgcaagtcatcataaccatatacttgtggctgaaagatacagacatatagcaataacaggaactggtcatgatgttagcaaaacaaggagccaagagacaagctaattcaacagaacattcatcctcattcttttgaagaagatcctttagtcccacttaccgggtaggcatgtaacagccctggagccataatatacggattaggcaacaacggcgggaccccaggagggaggttgggaggagcttttcctgaagtcgtagcaactgagcttcgagtcgaggctgtgacagtggagttgctgcctaggctgaggcccaggctactgccactattgagactggaggagacactgaccactgggggaggtgcagagactgtgctggatgtggtggaaaaagtgctggaggaagaatggagattcgcctcactctccacacttgtgtgcaaaagagtggatgtcgaagtgcgcccagaagatgttgatgatgaaagggtattctgctgcgtagataacgtgctgctgtgttgtgtggtggtagtatttggaatctcctcactgtggctcaagccacccaaggaggatgaatgctgattggttgtcgtcagtaaggaagctgcagataccgtttcattgagaggggggatgctagaagtggaaggtgaatcagatttcactgcagagcctgtagcaccttcaacagattgtgtggtctgtaactgcgtggcctgcacagaactgaagccattctttgcctgagtcaggtccttttggggtgatgaagagatggagctggggtaccgccgagtctgtgtggatctctgttcataaagagggccctgagcattattttgggaggtataggttgtcgactgaattgggccgctctgataaccagactcctgactctggttagatgaaattgtagaggatgattcactggccgtgctggtatacaggctacttggagcctggcttgaagaggcgctcgtggtgggggtggactcataatcagaaaggacaggctctgacccaaactgcaatgccccaaactgcaggtttagccctgagatatctgctgagccaggcatctccacagccagagcaggaatcttagaagtcaaggaggcttttttcttctgctgtttcagtttctgctgagccggctgagggctagaggactggttgtctgaagatccaggcgacatctgtggagccgatgtggatttgcttggcagaggagaagacggaggtggaggtgcagctgtggaggtagccactgcaggtgacttctcctgaaggaacacctccatcatggttgaagatggggtaaaagcctggcgctttgtaaaggggctgtgcactgctgaatcacttgggttcttcaaatcatactgcaccagtgatggggattgtgtcgtcgagcccatgtcccaagaggaggtggtggtgcttccagactgagaatgctgagctgccaactgagccagggcttgggcagtcttgaattgctccaagaactgggagcctgtagtactgccgcctttagcttcaccgacatcaccaaatcctttccctaacatgctcaccatactgtgatgagaaaatgtgttccctgaagcaggctgtgatatggcagtctgcttcgaattactgaacaccagaggctgggccagagaaggagcctgagacggatccagattagatgaatcattctccattgtagatggtgtcttccccagcagaacagcaaggtcaattctctgaccagcagtgattgtcacattctccgcaggcagaggcactgaagacacattagaggcagtgaagatcttggtctcagaaagatcttcattccaatcttcagtcccccactcctctgttgcagtcctccatgcactcgtcccatcatctggttcaaagtggccagtgttgttccacgtattgccgctgctattgccatagttatcatcagtattggctggctctgcataatcagctgggttaaaggttcccattccttgagcagaaaaccttcctcctcgcctaccagagccacctctgcctcggccacggccccttctgcctctttctgttcctcttccagaaggccctccactcttggtgccatccaatccattttcctgacctcgaaactctcgtccacggctggcacctctcccccgtcttggtggcccaccacgtcgccgactatagtctctgtcccggtctcgattttctttgccttcctcattggattccgtctggccaccatccttctggcctgagactcccttcttcttcccgaccatctcccaggaatgcgtgtctgggtttccttccagaagaacattgatagctctgttgacatctccattgcagtcatgcaaagcaatcacacattcatcctggttcttgcctgtaatatcaatcaattgtttcaccttctcctcaaagtcagcatcattatggtccgaaatcatctgtgcaagtctaatttgttctgcagtggcctgtggccgctgcttgtgctgtgtctggttttggttttgaggttgttcccagtttccccgggctcggttagtgcccaccgatgtcatcatttacagtatatacaaataacagtatttacaaggtagaatacttcctgcgtccctcagcgcgtgacgctaaaaggggcgcgcacgcaagcgtgcgcgtgccgcctcgccacgagacacctctttccggctccgcgagtccaccccgcctccttcacggcggccctgcctccaccacgtgacgcacggatggccgccgcttcctcttactgtcgtagttccgcgtctgagcgctcgacgctcctgggtgccattgcctgcctgagtcacgtgtcagggggaagctggaaggcgtcgttctcctttcccagctctcctgcctgtccgccatgttttcaggccgggtctggcttggtcttcccccgtaaggaaatggccggggagctccaggggacccaggcgccgtcgcttcggcggagcctgggctgaccagccaggacagcggggtaaacccgaacaattctgcgcgaggtagggaggccatggcgtccggcagtaactggctctccggggtgaatgtcgtgctggtgatggcctacgggagcctggtgtttgtactgctatttatttttgtgaagaggcaaatcatgcgctttgcaatgaaatctcgaaggggacctcatgtccctgtgggacacaatgcccccaaggacttgaaagaggagattgatattcgactctccagggttcaggatatcaagtatgagccccagctccttgcagatgatgatgctagactactacaactggaaacccagggaaatcaaagttgctacaactatctgtataggatgaaagctctggatgccattcgtacctctgagatcccatttcattctgaaggccggcatccccgttccttaatgggcaagaatttccgctcctacctgctggatctgcgaaacactagtacgcctttcaagggtgtacgcaaagcactcattgatacccttttggatggctatgaaacagcccgctatgggacaggggtctttggccagaatgagtacctacgctatcaggaggccctgagtgagctggccactgcggttaaagcacgaattgggagctctcagcgacatcaccagtcagcagccaaagacctaactcagtcccctgaggtctccccaacaaccatccaggtgacatacctcccctccagtcagaagagtaaacgtgccaagcacttccttgaattgaagagctttaaggataactataacacattggagagtactctgtgacggagctgaaggactcttgccgtagattaagccagtcagttgcaatgtgcaagacaggctgcttgccgggccgccctcggaacatctggcccagcaggcccagactgtatccatccaagttcccgttgtatccagagttcttagagcttgtgtctaaagggtaattccccaacccttccttatgagcatttttagaacattggctaagactattttcccccagtagcgcttttttctggatttgcattcgggtgttattcttaatgtttctgtcaaagcttcttaaaaatcttcacttggtttcagccatagttcaccttccctgttccaggtttatttaattccaaaggtgagagttggagtgagatgtcttccatatctatacctttgtgcacagttgaatgggaactgtttgggtttagggcatcttagagttgattgatggaaaaagcagacaggaactggtgggaggtcaagtggggaagttggtgaatgtggaataacttacctttgtgctccacttaaaccagatgtgttgcagctttcctgacatgcaaggatctactttaattccacactctcattaataaattgaataaaagggaatgttttggcacctgatataatctgccaggctatgtgacagtaggaaggaatggtttcccctaacaagcccaatgcactggtctgactttataaattatttaataaaatgaactattatcaaaaaaccaacaacaaagagaggcgcgcgggcgcgcctcagagagagtttctccccgtgcgagagcggcgcccccaagagcttctctgcgcgcgccgtttccccccgaagtgactatgtccacgtggctcataaccaaatgcgggtgggttctgccccaattagatgagaggcgagacgacctgcaggcctcacctcatcactattagacggccccctgagggcgcacacagacgctgcgcccagcggctgcgcaggtctttattcaataccacaagacgaagttccagcggggctcgcaccacgcggggggcgtacaacaaacaaccggccgtggtgcacagccaaccgccacatgttgaggcagcactaaccctcttgatgccgaggctgatcgacagcagagccgacaaacacccccttctaaagcccctacctcctcgcctgtgcagacggcgaccgtggcggacgcacacccacactattcaatcctccggtcggggcggcaccacaaacaacgaaccactaaactctgcatactaacacaaacagacgacagactactttctctcacagcagcgcgcacctcactcatatctgcgcgcgcatcaccacatcccatgatagcacaagacgctacctcccacaacagcacggccagacgagcacaccatactaaacgagcggctggct

SEQ ID NO: 736531 - DNA, 6522 bp, Homo sapiens
  misc_feature (1)..(2): n is a, c, g, or t
nntttacagtagtccattcctagggggaatgggccccaaggttttgtttttttatttcgtttttggggtacaggtggtgtttggttacatggatgagttctttagtgatttctgcgactttagcgcacccatcacccgagcagtgtacactgtacccaatatgtagtctttcatccctcaccccactccaagatttagttctgccagacgatacatgttgccttcacttctttttagtttatttgcctggacccatctaagtcatacttaaaactctataaagcattttttttctttgaaatggtctcagctccttcttgatcctctccattttccacccaatctcctctatccctctccctttactgcctgaaatcggctgtagatgtagcagtttctggaggaaatgaagatttgtggtggttctttccagtcaccaggttgtgaaagtcttaggggtgaggggaaggaaatcccctcaaggacaagatactactaccacattaaggtcaggagttcttaaagggcgaagatttcattttattccactgccttcaggggcctgctagaggaggcccagttggtacagtaatacttattcaccaagctggtcatcgacgaaattgaggatgtcctagacggagcaagaataggcagaggctgaaggtagaggttttctttttatatatacaagacacattaatccattaaatttgaggacacagtacaaaaaaaaaaaaaaaacaaaaaaaaaaccacttcaactaattcatctgacaatgctgttcatattcatgacgccatttttttgtttgttgttgttgttgttttcctaataataaagaaggagacttagggctgttgggctgatatatgtttgggggtcccacctccccgcctcatccgtacaccaccagggtgaacaggaggaagcaaaggaagtgcagggcccatagcaaagtttcataatcttgaatgcaagaggggagaaggaatggaagggggaaaaaaaaggagaaaatacaaatcctataatacatacaacagggtggggatggtataggaatgggacagacatgaagctgaggcatggggtgggccgctgggggtggggggcagcggaaaccccccacattcctttctctttgatgctgtttccatagtttccaggctgagaagccctctcagaagatgggaccgggagaagagggtcagggcctcagttggccccccagctgtagctgttgtaggcagacttgttggtctggggcttctgcgggatggagctggtctggctacgttgcccgctgcccgtctggccatcctgctgcaggtgatggtgaaggatctgagaatgcggctgctgatggggggtcagaatgtgcataaagggggcaggtgggtaggcagcagctgtggccggattgatggggcccccacttcctagggctgaaggcaagttgaaggaagcagcaggagtaccggaatgaaaaccttgtttctcaaaggactgctgggttttggagtacacagaacccgagatatctggcacgcccgtgttactggaggtgactgaaacaccagtgttgtatccatgagacccatatccactcggctgttggaaaggggtggccgatgcattcacactgacattcacaccatgctgcttggaagaggtaggagccacagggaacacagcaggcccatactggaaggtgctggggaggcccgggacccctgtatagtatggcaggctggtgtaactgtagccaggaggcagcgccgggttcaggaatgtctgctgcgtggtatggtgagtctgcgtctggttctgttggggttgggccaaggttgtggccggggctggggaggaggcatccccacggccgaactttgtgaggtcaccagaataagggttgctggccaggctaccatccctcccagtcagcggagtagtgggtgtgggaaatgggatgctgtagtaatccaatggaaatcttgtctgaagcatctgcaagtcatcataaccatatacttgtggctgaaagatacagacatatagcaataacaggaactggtcatgatgttagcaaaacaaggagccaagagacaagctaattcaacagaacattcatcctcattcttttgaagaagatcctttagtcccacttaccgggtaggcatgtaacagccctggagccataatatacggattaggcaacaacggcgggaccccaggagggaggttgggaggagcttttcctgaagtcgtagcaactgagcttcgagtcgaggctgtgacagtggagttgctgcctaggctgaggcccaggctactgccactattgagactggaggagacactgaccactgggggaggtgcagagactgtgctggatgtggtggaaaaagtgctggaggaagaatggagattcgcctcactctccacacttgtgtgcaaaagagtggatgtcgaagtgcgcccagaagatgttgatgatgaaagggtattctgctgcgtagataacgtgctgctgtgttgtgtggtggtagtatttggaatctcctcactgtggctcaagccacccaaggaggatgaatgctgattggttgtcgtcagtaaggaagctgcagataccgtttcattgagaggggggatgctagaagtggaaggtgaatcagatttcactgcagagcctgtagcaccttcaacagattgtgtggtctgtaactgcgtggcctgcacagaactgaagccattctttgcctgagtcaggtccttttggggtgatgaagagatggagctggggtaccgccgagtctgtgtggatctctgttcataaagagggccctgagcattattttgggaggtataggttgtcgactgaattgggccgctctgataaccagactcctgactctggttagatgaaattgtagaggatgattcactggccgtgctggtatacaggctacttggagcctggcttgaagaggcgctcgtggtgggggtggactcataatcagaaaggacaggctctgacccaaactgcaatgccccaaactgcaggtttagccctgagatatctgctgagccaggcatctccacagccagagcaggaatcttagaagtcaaggaggcttttttcttctgctgtttcagtttctgctgagccggctgagggctagaggactggttgtctgaagatccaggcgacatctgtggagccgatgtggatttgcttggcagaggagaagacggaggtggaggtgcagctgtggaggtagccactgcaggtgacttctcctgaaggaacacctccatcatggttgaagatggggtaaaagcctggcgctttgtaaaggggctgtgcactgctgaatcacttgggttcttcaaatcatactgcaccagtgatggggattgtgtcgtcgagcccatgtcccaagaggaggtggtggtgcttccagactgagaatgctgagctgccaactgagccagggcttgggcagtcttgaattgctccaagaactgggagcctgtagtactgccgcctttagcttcaccgacatcaccaaatcctttccctaacatgctcaccatactgtgatgagaaaatgtgttccctgaagcaggctgtgatatggcagtctgcttcgaattactgaacaccagaggctgggccagagaaggagcctgagacggatccagattagatgaatcattctccattgtagatggtgtcttccccagcagaacagcaaggtcaattctctgaccagcagtgattgtcacattctccgcaggcagaggcactgaagacacattagaggcagtgaagatcttggtctcagaaagatcttcattccaatcttcagtcccccactcctctgttgcagtcctccatgcactcgtcccatcatctggttcaaagtggccagtgttgttccacgtattgccgctgctattgccatagttatcatcagtattggctggctctgcataatcagctgggttaaaggttcccattccttgagcagaaaaccttcctcctcgcctaccagagccacctctgcctcggccacggccccttctgcctctttctgttcctcttccagaaggccctccactcttggtgccatccaatccattttcctgacctcgaaactctcgtccacggctggcacctctcccccgtcttggtggcccaccacgtcgccgactatagtctctgtcccggtctcgattttctttgccttcctcattggattccgtctggccaccatccttctggcctgagactcccttcttcttcccgaccatctcccaggaatgcgtgtctgggtttccttccagaagaacattgatagctctgttgacatctccattgcagtcatgcaaagcaatcacacattcatcctggttcttgcctgtaatatcaatcaattgtttcaccttctcctcaaagtcagcatcattatggtccgaaatcatctgtgcaagtctaatttgttctgcagtggcctgtggccgctgcttgtgctgtgtctggttttggttttgaggttgttcccagtttccccgggctcggttagtgcccaccgatgtcatcatttacagtatatacaaataacagtatttacaaggtagaatacttcctgcgtccctcagcgcgtgacgctaaaaggggcgcgcacgcaagcgtgcgcgtgccgcctcgccacgagacacctctttccggctccgcgagtccaccccgcctccttcacggcggccctgcctccaccacgtgacgcacggatggccgccgcttcctcttactgtcgtagttccgcgtctgagcgctcgacgctcctgggtgccattgcctgcctgagtcacgtgtcagggggaagctggaaggcgtcgttctcctttcccagctctcctgcctgtccgccatgttttcaggccgggtctggcttggtcttcccccgtaaggaaatggccggggagctccaggggacccaggcgccgtcgcttcggcggagcctgggctgaccagccaggacagcggggtaaacccgaacaattctgcgcgaggtagggaggccatggcgtccggcagtaactggctctccggggtgaatgtcgtgctggtgatggcctacgggagcctggtgtttgtactgctatttatttttgtgaagaggcaaatcatgcgctttgcaatgaaatctcgaaggggacctcatgtccctgtgggacacaatgcccccaaggacttgaaagaggagattgatattcgactctccagggttcaggatatcaagtatgagccccagctccttgcagatgatgatgctagactactacaactggaaacccagggaaatcaaagttgctacaactatctgtataggatgaaagctctggatgccattcgtacctctgagatcccatttcattctgaaggccggcatccccgttccttaatgggcaagaatttccgctcctacctgctggatctgcgaaacactagtacgcctttcaagggtgtacgcaaagcactcattgatacccttttggatggctatgaaacagcccgctatgggacaggggtctttggccagaatgagtacctacgctatcaggaggccctgagtgagctggccactgcggttaaagcacgaattgggagctctcagcgacatcaccagtcagcagccaaagacctaactcagtcccctgaggtctccccaacaaccatccaggtgacatacctcccctccagtcagaagagtaaacgtgccaagcacttccttgaattgaagagctttaaggataactataacacattggagagtactctgtgacggagctgaaggactcttgccgtagattaagccagtcagttgcaatgtgcaagacaggctgcttgccgggccgccctcggaacatctggcccagcaggcccagactgtatccatccaagttcccgttgtatccagagttcttagagcttgtgtctaaagggtaattccccaacccttccttatgagcatttttagaacattggctaagactattttcccccagtagcgcttttttctggatttgcattcgggtgttattcttaatgtttctgtcaaagcttcttaaaaatcttcacttggtttcagccatagttcaccttccctgttccaggtttatttaattccaaaggtgagagttggagtgagatgtcttccatatctatacctttgtgcacagttgaatgggaactgtttgggtttagggcatcttagagttgattgatggaaaaagcagacaggaactggtgggaggtcaagtggggaagttggtgaatgtggaataacttacctttgtgctccacttaaaccagatgtgttgcagctttcctgacatgcaaggatctactttaattccacactctcattaataaattgaataaaagggaatgttttggcactgtttggactctgggcactgtttggactctgggcactgtttggactctg

SEQ ID NO: 736532 - DNA, 6418 bp, Homo sapiens
  misc_feature (1)..(2): n is a, c, g, or t
nntttacagtagtccattcctagggggaatgggccccaaggttttgtttttttatttcgtttttggggtacaggtggtgtttggttacatggatgagttctttagtgatttctgcgactttagcgcacccatcacccgagcagtgtacactgtacccaatatgtagtctttcatccctcaccccactccaagatttagttctgccagacgatacatgttgccttcacttctttttagtttatttgcctggacccatctaagtcatacttaaaactctataaagcattttttttctttgaaatggtctcagctccttcttgatcctctccattttccacccaatctcctctatccctctccctttactgcctgaaatcggctgtagatgtagcagtttctggaggaaatgaagatttgtggtggttctttccagtcaccaggttgtgaaagtcttaggggtgaggggaaggaaatcccctcaaggacaagatactactaccacattaaggtcaggagttcttaaagggcgaagatttcattttattccactgccttcaggggcctgctagaggaggcccagttggtacagtaatacttattcaccaagctggtcatcgacgaaattgaggatgtcctagacggagcaagaataggcagaggctgaaggtagaggttttctttttatatatacaagacacattaatccattaaatttgaggacacagtacaaaaaaaaaaaaaaaacaaaaaaaaaaccacttcaactaattcatctgacaatgctgttcatattcatgacgccatttttttgtttgttgttgttgttgttttcctaataataaagaaggagacttagggctgttgggctgatatatgtttgggggtcccacctccccgcctcatccgtacaccaccagggtgaacaggaggaagcaaaggaagtgcagggcccatagcaaagtttcataatcttgaatgcaagaggggagaaggaatggaagggggaaaaaaaaggagaaaatacaaatcctataatacatacaacagggtggggatggtataggaatgggacagacatgaagctgaggcatggggtgggccgctgggggtggggggcagcggaaaccccccacattcctttctctttgatgctgtttccatagtttccaggctgagaagccctctcagaagatgggaccgggagaagagggtcagggcctcagttggccccccagctgtagctgttgtaggcagacttgttggtctggggcttctgcgggatggagctggtctggctacgttgcccgctgcccgtctggccatcctgctgcaggtgatggtgaaggatctgagaatgcggctgctgatggggggtcagaatgtgcataaagggggcaggtgggtaggcagcagctgtggccggattgatggggcccccacttcctagggctgaaggcaagttgaaggaagcagcaggagtaccggaatgaaaaccttgtttctcaaaggactgctgggttttggagtacacagaacccgagatatctggcacgcccgtgttactggaggtgactgaaacaccagtgttgtatccatgagacccatatccactcggctgttggaaaggggtggccgatgcattcacactgacattcacaccatgctgcttggaagaggtaggagccacagggaacacagcaggcccatactggaaggtgctggggaggcccgggacccctgtatagtatggcaggctggtgtaactgtagccaggaggcagcgccgggttcaggaatgtctgctgcgtggtatggtgagtctgcgtctggttctgttggggttgggccaaggttgtggccggggctggggaggaggcatccccacggccgaactttgtgaggtcaccagaataagggttgctggccaggctaccatccctcccagtcagcggagtagtgggtgtgggaaatgggatgctgtagtaatccaatggaaatcttgtctgaagcatctgcaagtcatcataaccatatacttgtggctgaaagatacagacatatagcaataacaggaactggtcatgatgttagcaaaacaaggagccaagagacaagctaattcaacagaacattcatcctcattcttttgaagaagatcctttagtcccacttaccgggtaggcatgtaacagccctggagccataatatacggattaggcaacaacggcgggaccccaggagggaggttgggaggagcttttcctgaagtcgtagcaactgagcttcgagtcgaggctgtgacagtggagttgctgcctaggctgaggcccaggctactgccactattgagactggaggagacactgaccactgggggaggtgcagagactgtgctggatgtggtggaaaaagtgctggaggaagaatggagattcgcctcactctccacacttgtgtgcaaaagagtggatgtcgaagtgcgcccagaagatgttgatgatgaaagggtattctgctgcgtagataacgtgctgctgtgttgtgtggtggtagtatttggaatctcctcactgtggctcaagccacccaaggaggatgaatgctgattggttgtcgtcagtaaggaagctgcagataccgtttcattgagaggggggatgctagaagtggaaggtgaatcagatttcactgcagagcctgtagcaccttcaacagattgtgtggtctgtaactgcgtggcctgcacagaactgaagccattctttgcctgagtcaggtccttttggggtgatgaagagatggagctggggtaccgccgagtctgtgtggatctctgttcataaagagggccctgagcattattttgggaggtataggttgtcgactgaattgggccgctctgataaccagactcctgactctggttagatgaaattgtagaggatgattcactggccgtgctggtatacaggctacttggagcctggcttgaagaggcgctcgtggtgggggtggactcataatcagaaaggacaggctctgacccaaactgcaatgccccaaactgcaggtttagccctgagatatctgctgagccaggcatctccacagccagagcaggaatcttagaagtcaaggaggcttttttcttctgctgtttcagtttctgctgagccggctgagggctagaggactggttgtctgaagatccaggcgacatctgtggagccgatgtggatttgcttggcagaggagaagacggaggtggaggtgcagctgtggaggtagccactgcaggtgacttctcctgaaggaacacctccatcatggttgaagatggggtaaaagcctggcgctttgtaaaggggctgtgcactgctgaatcacttgggttcttcaaatcatactgcaccagtgatggggattgtgtcgtcgagcccatgtcccaagaggaggtggtggtgcttccagactgagaatgctgagctgccaactgagccagggcttgggcagtcttgaattgctccaagaactgggagcctgtagtactgccgcctttagcttcaccgacatcaccaaatcctttccctaacatgctcaccatactgtgatgagaaaatgtgttccctgaagcaggctgtgatatggcagtctgcttcgaattactgaacaccagaggctgggccagagaaggagcctgagacggatccagattagatgaatcattctccattgtagatggtgtcttccccagcagaacagcaaggtcaattctctgaccagcagtgattgtcacattctccgcaggcagaggcactgaagacacattagaggcagtgaagatcttggtctcagaaagatcttcattccaatcttcagtcccccactcctctgttgcagtcctccatgcactcgtcccatcatctggttcaaagtggccagtgttgttccacgtattgccgctgctattgccatagttatcatcagtattggctggctctgcataatcagctgggttaaaggttcccattccttgagcagaaaaccttcctcctcgcctaccagagccacctctgcctcggccacggccccttctgcctctttctgttcctcttccagaaggccctccactcttggtgccatccaatccattttcctgacctcgaaactctcgtccacggctggcacctctcccccgtcttggtggcccaccacgtcgccgactatagtctctgtcccggtctcgattttctttgccttcctcattggattccgtctggccaccatccttctggcctgagactcccttcttcttcccgaccatctcccaggaatgcgtgtctgggtttccttccagaagaacattgatagctctgttgacatctccattgcagtcatgcaaagcaatcacacattcatcctggttcttgcctgtaatatcaatcaattgtttcaccttctcctcaaagtcagcatcattatggtccgaaatcatctgtgcaagtctaatttgttctgcagtggcctgtggccgctgcttgtgctgtgtctggttttggttttgaggttgttcccagtttccccgggctcggttagtgcccaccgatgtcatcatttacagtatatacaaataacagtatttacaaggtagaatacttcctgcgtccctcagcgcgtgacgctaaaaggggcgcgcacgcaagcgtgcgcgtgccgcctcgccacgagacacctctttccggctccgcgagtccaccccgcctccttcacggcggccctgcctccaccacgtgacgcacggatggccgccgcttcctcttactgtcgtagttccgcgtctgagcgctcgacgctcctgggtgccattgcctgcctgagtcacgtgtcagggggaagctggaaggcgtcgttctcctttcccagctctcctgcctgtccgccatgttttcaggccgggtctggcttggtcttcccccgtaaggaaatggccggggagctccaggggacccaggcgccgtcgcttcggcggagcctgggctgaccagccaggacagcggggtaaacccgaacaattctgcgcgaggtagggaggccatggcgtccggcagtaactggctctccggggtgaatgtcgtgctggtgatggcctacgggagcctggtgtttgtactgctatttatttttgtgaagaggcaaatcatgcgctttgcaatgaaatctcgaaggggacctcatgtccctgtgggacacaatgcccccaaggacttgaaagaggagattgatattcgactctccagggttcaggatatcaagtatgagccccagctccttgcagatgatgatgctagactactacaactggaaacccagggaaatcaaagttgctacaactatctgtataggatgaaagctctggatgccattcgtacctctgagatcccatttcattctgaaggccggcatccccgttccttaatgggcaagaatttccgctcctacctgctggatctgcgaaacactagtacgcctttcaagggtgtacgcaaagcactcattgatacccttttggatggctatgaaacagcccgctatgggacaggggtctttggccagaatgagtacctacgctatcaggaggccctgagtgagctggccactgcggttaaagcacgaattgggagctctcagcgacatcaccagtcagcagccaaagacctaactcagtcccctgaggtctccccaacaaccatccaggtgacatacctcccctccagtcagaagagtaaacgtgccaagcacttccttgaattgaagagctttaaggataactataacacattggagagtactctgtgacggagctgaaggactcttgccgtagattaagccagtcagttgcaatgtgcaagacaggctgcttgccgggccgccctcggaacatctggcccagcaggcccagactgtatccatccaagttcccgttgtatccagagttcttagagcttgtgtctaaagggtaattccccaacccttccttatgagcatttttagaacattggctaagactattttcccccagtagcgcttttttctggatttgcattcgggtgttattcttaatgtttctgtcaaagcttcttaaaaatcttcacttggtttcagccatagttcaccttccctgttccaggtttatttaattccaaaggtgagagttggagtgagatgtcttccatatctatacctttgtgcacagttgaatgggaactgtttgggtttagggcatcttagagttgattgatggaaaaagcagacaggaactggtgggaggtcaagtggggaagttggtgaatgtggaataacttacctttgtgctccacttaaaccagaagccagctagggtgggatcctctagatacgt

SEQ ID NO: 736533 - DNA, 7224 bp, Homo sapiens
  misc_feature (1)..(2): n is a, c, g, or t
  misc_feature (6569)..(6569): n is a, c, g, or t
  misc_feature (6588)..(6588): n is a, c, g, or t
  misc_feature (6591)..(6591): n is a, c, g, or t
  misc_feature (6595)..(6595): n is a, c, g, or t
  misc_feature (6598)..(6598): n is a, c, g, or t
  misc_feature (6600)..(6600): n is a, c, g, or t
  misc_feature (6606)..(6606): n is a, c, g, or t
  misc_feature (6706)..(6706): n is a, c, g, or t
nntttacagtagtccattcctagggggaatgggccccaaggttttgtttttttatttcgtttttggggtacaggtggtgtttggttacatggatgagttctttagtgatttctgcgactttagcgcacccatcacccgagcagtgtacactgtacccaatatgtagtctttcatccctcaccccactccaagatttagttctgccagacgatacatgttgccttcacttctttttagtttatttgcctggacccatctaagtcatacttaaaactctataaagcattttttttctttgaaatggtctcagctccttcttgatcctctccattttccacccaatctcctctatccctctccctttactgcctgaaatcggctgtagatgtagcagtttctggaggaaatgaagatttgtggtggttctttccagtcaccaggttgtgaaagtcttaggggtgaggggaaggaaatcccctcaaggacaagatactactaccacattaaggtcaggagttcttaaagggcgaagatttcattttattccactgccttcaggggcctgctagaggaggcccagttggtacagtaatacttattcaccaagctggtcatcgacgaaattgaggatgtcctagacggagcaagaataggcagaggctgaaggtagaggttttctttttatatatacaagacacattaatccattaaatttgaggacacagtacaaaaaaaaaaaaaaaacaaaaaaaaaaccacttcaactaattcatctgacaatgctgttcatattcatgacgccatttttttgtttgttgttgttgttgttttcctaataataaagaaggagacttagggctgttgggctgatatatgtttgggggtcccacctccccgcctcatccgtacaccaccagggtgaacaggaggaagcaaaggaagtgcagggcccatagcaaagtttcataatcttgaatgcaagaggggagaaggaatggaagggggaaaaaaaaggagaaaatacaaatcctataatacatacaacagggtggggatggtataggaatgggacagacatgaagctgaggcatggggtgggccgctgggggtggggggcagcggaaaccccccacattcctttctctttgatgctgtttccatagtttccaggctgagaagccctctcagaagatgggaccgggagaagagggtcagggcctcagttggccccccagctgtagctgttgtaggcagacttgttggtctggggcttctgcgggatggagctggtctggctacgttgcccgctgcccgtctggccatcctgctgcaggtgatggtgaaggatctgagaatgcggctgctgatggggggtcagaatgtgcataaagggggcaggtgggtaggcagcagctgtggccggattgatggggcccccacttcctagggctgaaggcaagttgaaggaagcagcaggagtaccggaatgaaaaccttgtttctcaaaggactgctgggttttggagtacacagaacccgagatatctggcacgcccgtgttactggaggtgactgaaacaccagtgttgtatccatgagacccatatccactcggctgttggaaaggggtggccgatgcattcacactgacattcacaccatgctgcttggaagaggtaggagccacagggaacacagcaggcccatactggaaggtgctggggaggcccgggacccctgtatagtatggcaggctggtgtaactgtagccaggaggcagcgccgggttcaggaatgtctgctgcgtggtatggtgagtctgcgtctggttctgttggggttgggccaaggttgtggccggggctggggaggaggcatccccacggccgaactttgtgaggtcaccagaataagggttgctggccaggctaccatccctcccagtcagcggagtagtgggtgtgggaaatgggatgctgtagtaatccaatggaaatcttgtctgaagcatctgcaagtcatcataaccatatacttgtggctgaaagatacagacatatagcaataacaggaactggtcatgatgttagcaaaacaaggagccaagagacaagctaattcaacagaacattcatcctcattcttttgaagaagatcctttagtcccacttaccgggtaggcatgtaacagccctggagccataatatacggattaggcaacaacggcgggaccccaggagggaggttgggaggagcttttcctgaagtcgtagcaactgagcttcgagtcgaggctgtgacagtggagttgctgcctaggctgaggcccaggctactgccactattgagactggaggagacactgaccactgggggaggtgcagagactgtgctggatgtggtggaaaaagtgctggaggaagaatggagattcgcctcactctccacacttgtgtgcaaaagagtggatgtcgaagtgcgcccagaagatgttgatgatgaaagggtattctgctgcgtagataacgtgctgctgtgttgtgtggtggtagtatttggaatctcctcactgtggctcaagccacccaaggaggatgaatgctgattggttgtcgtcagtaaggaagctgcagataccgtttcattgagaggggggatgctagaagtggaaggtgaatcagatttcactgcagagcctgtagcaccttcaacagattgtgtggtctgtaactgcgtggcctgcacagaactgaagccattctttgcctgagtcaggtccttttggggtgatgaagagatggagctggggtaccgccgagtctgtgtggatctctgttcataaagagggccctgagcattattttgggaggtataggttgtcgactgaattgggccgctctgataaccagactcctgactctggttagatgaaattgtagaggatgattcactggccgtgctggtatacaggctacttggagcctggcttgaagaggcgctcgtggtgggggtggactcataatcagaaaggacaggctctgacccaaactgcaatgccccaaactgcaggtttagccctgagatatctgctgagccaggcatctccacagccagagcaggaatcttagaagtcaaggaggcttttttcttctgctgtttcagtttctgctgagccggctgagggctagaggactggttgtctgaagatccaggcgacatctgtggagccgatgtggatttgcttggcagaggagaagacggaggtggaggtgcagctgtggaggtagccactgcaggtgacttctcctgaaggaacacctccatcatggttgaagatggggtaaaagcctggcgctttgtaaaggggctgtgcactgctgaatcacttgggttcttcaaatcatactgcaccagtgatggggattgtgtcgtcgagcccatgtcccaagaggaggtggtggtgcttccagactgagaatgctgagctgccaactgagccagggcttgggcagtcttgaattgctccaagaactgggagcctgtagtactgccgcctttagcttcaccgacatcaccaaatcctttccctaacatgctcaccatactgtgatgagaaaatgtgttccctgaagcaggctgtgatatggcagtctgcttcgaattactgaacaccagaggctgggccagagaaggagcctgagacggatccagattagatgaatcattctccattgtagatggtgtcttccccagcagaacagcaaggtcaattctctgaccagcagtgattgtcacattctccgcaggcagaggcactgaagacacattagaggcagtgaagatcttggtctcagaaagatcttcattccaatcttcagtcccccactcctctgttgcagtcctccatgcactcgtcccatcatctggttcaaagtggccagtgttgttccacgtattgccgctgctattgccatagttatcatcagtattggctggctctgcataatcagctgggttaaaggttcccattccttgagcagaaaaccttcctcctcgcctaccagagccacctctgcctcggccacggccccttctgcctctttctgttcctcttccagaaggccctccactcttggtgccatccaatccattttcctgacctcgaaactctcgtccacggctggcacctctcccccgtcttggtggcccaccacgtcgccgactatagtctctgtcccggtctcgattttctttgccttcctcattggattccgtctggccaccatccttctggcctgagactcccttcttcttcccgaccatctcccaggaatgcgtgtctgggtttccttccagaagaacattgatagctctgttgacatctccattgcagtcatgcaaagcaatcacacattcatcctggttcttgcctgtaatatcaatcaattgtttcaccttctcctcaaagtcagcatcattatggtccgaaatcatctgtgcaagtctaatttgttctgcagtggcctgtggccgctgcttgtgctgtgtctggttttggttttgaggttgttcccagtttccccgggctcggttagtgcccaccgatgtcatcatttacagtatatacaaataacagtatttacaaggtagaatacttcctgcgtccctcagcgcgtgacgctaaaaggggcgcgcacgcaagcgtgcgcgtgccgcctcgccacgagacacctctttccggctccgcgagtccaccccgcctccttcacggcggccctgcctccaccacgtgacgcacggatggccgccgcttcctcttactgtcgtagttccgcgtctgagcgctcgacgctcctgggtgccattgcctgcctgagtcacgtgtcagggggaagctggaaggcgtcgttctcctttcccagctctcctgcctgtccgccatgttttcaggccgggtctggcttggtcttcccccgtaaggaaatggccggggagctccaggggacccaggcgccgtcgcttcggcggagcctgggctgaccagccaggacagcggggtaaacccgaacaattctgcgcgaggtagggaggccatggcgtccggcagtaactggctctccggggtgaatgtcgtgctggtgatggcctacgggagcctggtgtttgtactgctatttatttttgtgaagaggcaaatcatgcgctttgcaatgaaatctcgaaggggacctcatgtccctgtgggacacaatgcccccaaggacttgaaagaggagattgatattcgactctccagggttcaggatatcaagtatgagccccagctccttgcagatgatgatgctagactactacaactggaaacccagggaaatcaaagttgctacaactatctgtataggatgaaagctctggatgccattcgtacctctgagatcccatttcattctgaaggccggcatccccgttccttaatgggcaagaatttccgctcctacctgctggatctgcgaaacactagtacgcctttcaagggtgtacgcaaagcactcattgatacccttttggatggctatgaaacagcccgctatgggacaggggtctttggccagaatgagtacctacgctatcaggaggccctgagtgagctggccactgcggttaaagcacgaattgggagctctcagcgacatcaccagtcagcagccaaagacctaactcagtcccctgaggtctccccaacaaccatccaggtgacatacctcccctccagtcagaagagtaaacgtgccaagcacttccttgaattgaagagctttaaggataactataacacattggagagtactctgtgacggagctgaaggactcttgccgtagattaagccagtcagttgcaatgtgcaagacaggctgcttgccgggccgccctcggaacatctggcccagcaggcccagactgtatccatccaagttcccgttgtatccagagttcttagagcttgtgtctaaagggtaattccccaacccttccttatgagcatttttagaacattggctaagactattttcccccagtagcgcttttttctggatttgcattcgggtgttattcttaatgtttctgtcaaagcttcttaaaaatcttcacttggtttcagccatagttcaccttccctgttccaggtttatttaattccaaaggtgagagttggagtgagatgtcttccatatctatacctttgtgcacagttgaatgggaaagacaggaactggtgggaggtcaagtggggaagttggtgaatgtggaataacttacctttgtgctccacttaaaccagatgtgttgcagctttcctgacatgcaaggatctactttaattccacactctcattaataaattgaataaaagggaatgttttggcacctgatataatctgccaggctatgtgacagtaggaaggaatggtttcccctaacaagcccaatgcactggtctgactttataaattatttaataaaatgaactattatcaaataaaacgtatgaatcagtaaaaaaaaaanaaaaaaaaaaaaaaaaaanaanaaanaananaaaaanaaaaaaaaaaaaaaaaaaaaaaaaaacaaaagtaaacaaaagaaaaaagaaaaaaggagagaggaggagcggcgccgaccgacaacaaataaccaaattncaccagcgaggagaagcaagacagtaagacgacgctgcgcaggctcgacgtgccttggagacgagggggaggcgccggcgcgacgagcgacgagtgcgtccacaaacccagtagacgagagcgaggcgcagacgagcaccgacatatcacacgaagagtcggctggggggagaagcaatgataacagtctaacgcagagatctaattgtgggttctcgtctgatgaattacggggacgacacccgtataaaagagtagcgggccgtgggagttcacaatctgttctgtgagaaggacaagaacaagccaatacaaaacataaaggacgacgtcgatgtatagatcctattacgttacgatcgagtataaagaaattaagttagctgtctagtgcagatacgtctgttgaggtggagtgagccgaaaaaagaactgcaggtgtacgattagttgtcgcagaggaggtaagtgacaactcatgcggtcttctaacgtgtcggatgcatcgtgcgagccaa

SEQ ID NO: 736534 - DNA, 6926 bp, Homo sapiens
  misc_feature (1)..(2): n is a, c, g, or t
  misc_feature (6382)..(6382): n is a, c, g, or t
  misc_feature (6401)..(6401): n is a, c, g, or t
  misc_feature (6404)..(6404): n is a, c, g, or t
  misc_feature (6408)..(6408): n is a, c, g, or t
  misc_feature (6411)..(6411): n is a, c, g, or t
  misc_feature (6413)..(6413): n is a, c, g, or t
  misc_feature (6419)..(6419): n is a, c, g, or t
nntttacagtagtccattcctagggggaatgggccccaaggttttgtttttttatttcgtttttggggtacaggtggtgtttggttacatggatgagttctttagtgatttctgcgactttagcgcacccatcacccgagcagtgtacactgtacccaatatgtagtctttcatccctcaccccactccaagatttagttctgccagacgatacatgttgccttcacttctttttagtttatttgcctggacccatctaagtcatacttaaaactctataaagcattttttttctttgaaatggtctcagctccttcttgatcctctccattttccacccaatctcctctatccctctccctttactgcctgaaatcggctgtagatgtagcagtttctggaggaaatgaagatttgtggtggttctttccagtcaccaggttgtgaaagtcttaggggtgaggggaaggaaatcccctcaaggacaagatactactaccacattaaggtcaggagttcttaaagggcgaagatttcattttattccactgccttcaggggcctgctagaggaggcccagttggtacagtaatacttattcaccaagctggtcatcgacgaaattgaggatgtcctagacggagcaagaataggcagaggctgaaggtagaggttttctttttatatatacaagacacattaatccattaaatttgaggacacagtacaaaaaaaaaaaaaaaacaaaaaaaaaaccacttcaactaattcatctgacaatgctgttcatattcatgacgccatttttttgtttgttgttgttgttgttttcctaataataaagaaggagacttagggctgttgggctgatatatgtttgggggtcccacctccccgcctcatccgtacaccaccagggtgaacaggaggaagcaaaggaagtgcagggcccatagcaaagtttcataatcttgaatgcaagaggggagaaggaatggaagggggaaaaaaaaggagaaaatacaaatcctataatacatacaacagggtggggatggtataggaatgggacagacatgaagctgaggcatggggtgggccgctgggggtggggggcagcggaaaccccccacattcctttctctttgatgctgtttccatagtttccaggctgagaagccctctcagaagatgggaccgggagaagagggtcagggcctcagttggccccccagctgtagctgttgtaggcagacttgttggtctggggcttctgcgggatggagctggtctggctacgttgcccgctgcccgtctggccatcctgctgcaggtgatggtgaaggatctgagaatgcggctgctgatggggggtcagaatgtgcataaagggggcaggtgggtaggcagcagctgtggccggattgatggggcccccacttcctagggctgaaggcaagttgaaggaagcagcaggagtaccggaatgaaaaccttgtttctcaaaggactgctgggttttggagtacacagaacccgagatatctggcacgcccgtgttactggaggtgactgaaacaccagtgttgtatccatgagacccatatccactcggctgttggaaaggggtggccgatgcattcacactgacattcacaccatgctgcttggaagaggtaggagccacagggaacacagcaggcccatactggaaggtgctggggaggcccgggacccctgtatagtatggcaggctggtgtaactgtagccaggaggcagcgccgggttcaggaatgtctgctgcgtggtatggtgagtctgcgtctggttctgttggggttgggccaaggttgtggccggggctggggaggaggcatccccacggccgaactttgtgaggtcaccagaataagggttgctggccaggctaccatccctcccagtcagcggagtagtgggtgtgggaaatgggatgctgtagtaatccaatggaaatcttgtctgaagcatctgcaagtcatcataaccatatacttgtggctgaaagatacagacatatagcaataacaggaactggtcatgatgttagcaaaacaaggagccaagagacaagctaattcaacagaacattcatcctcattcttttgaagaagatcctttagtcccacttaccgggtaggcatgtaacagccctggagccataatatacggattaggcaacaacggcgggaccccaggagggaggttgggaggagcttttcctgaagtcgtagcaactgagcttcgagtcgaggctgtgacagtggagttgctgcctaggctgaggcccaggctactgccactattgagactggaggagacactgaccactgggggaggtgcagagactgtgctggatgtggtggaaaaagtgctggaggaagaatggagattcgcctcactctccacacttgtgtgcaaaagagtggatgtcgaagtgcgcccagaagatgttgatgatgaaagggtattctgctgcgtagataacgtgctgctgtgttgtgtggtggtagtatttggaatctcctcactgtggctcaagccacccaaggaggatgaatgctgattggttgtcgtcagtaaggaagctgcagataccgtttcattgagaggggggatgctagaagtggaaggtgaatcagatttcactgcagagcctgtagcaccttcaacagattgtgtggtctgtaactgcgtggcctgcacagaactgaagccattctttgcctgagtcaggtccttttggggtgatgaagagatggagctggggtaccgccgagtctgtgtggatctctgttcataaagagggccctgagcattattttgggaggtataggttgtcgactgaattgggccgctctgataaccagactcctgactctggttagatgaaattgtagaggatgattcactggccgtgctggtatacaggctacttggagcctggcttgaagaggcgctcgtggtgggggtggactcataatcagaaaggacaggctctgacccaaactgcaatgccccaaactgcaggtttagccctgagatatctgctgagccaggcatctccacagccagagcaggaatcttagaagtcaaggaggcttttttcttctgctgtttcagtttctgctgagccggctgagggctagaggactggttgtctgaagatccaggcgacatctgtggagccgatgtggatttgcttggcagaggagaagacggaggtggaggtgcagctgtggaggtagccactgcaggtgacttctcctgaaggaacacctccatcatggttgaagatggggtaaaagcctggcgctttgtaaaggggctgtgcactgctgaatcacttgggttcttcaaatcatactgcaccagtgatggggattgtgtcgtcgagcccatgtcccaagaggaggtggtggtgcttccagactgagaatgctgagctgccaactgagccagggcttgggcagtcttgaattgctccaagaactgggagcctgtagtactgccgcctttagcttcaccgacatcaccaaatcctttccctaacatgctcaccatactgtgatgagaaaatgtgttccctgaagcaggctgtgatatggcagtctgcttcgaattactgaacaccagaggctgggccagagaaggagcctgagacggatccagattagatgaatcattctccattgtagatggtgtcttccccagcagaacagcaaggtcaattctctgaccagcagtgattgtcacattctccgcaggcagaggcactgaagacacattagaggcagtgaagatcttggtctcagaaagatcttcattccaatcttcagtcccccactcctctgttgcagtcctccatgcactcgtcccatcatctggttcaaagtggccagtgttgttccacgtattgccgctgctattgccatagttatcatcagtattggctggctctgcataatcagctgggttaaaggttcccattccttgagcagaaaaccttcctcctcgcctaccagagccacctctgcctcggccacggccccttctgcctctttctgttcctcttccagaaggccctccactcttggtgccatccaatccattttcctgacctcgaaactctcgtccacggctggcacctctcccccgtcttggtggcccaccacgtcgccgactatagtctctgtcccggtctcgattttctttgccttcctcattggattccgtctggccaccatccttctggcctgagactcccttcttcttcccgaccatctcccaggaatgcgtgtctgggtttccttccagaagaacattgatagctctgttgacatctccattgcagtcatgcaaagcaatcacacattcatcctggttcttgcctgtaatatcaatcaattgtttcaccttctcctcaaagtcagcatcattatggtccgaaatcatctgtgcaagtctaatttgttctgcagtggcctgtggccgctgcttgtgctgtgtctggttttggttttgaggttgttcccagtttccccgggctcggttagtgcccaccgatgtcatcatttacagtatatacaaataacagtatttacaaggtagaatacttcctgcgtccctcagcgcgtgacgctaaaaggggcgcgcacgcaagcgtgcgcgtgccgcctcgccacgagacacctctttccggctccgcgagtccaccccgcctccttcacggcggccctgcctccaccacgtgacgcacggatggccgccgcttcctcttactgtcgtagttccgcgtctgagcgctcgacgctcctgggtgccattgcctgcctgagtcacgtgtcagggggaagctggaaggcgtcgttctcctttcccagctctcctgcctgtccgccatgttttcaggccgggtctggcttggtcttcccccgtaaggaaatggccggggagctccaggggacccaggcgccgtcgcttcggcggagcctgggctgaccagccaggacagcggggtaaacccgaacaattctgcgcgaggtagggaggccatggcgtccggcagtaactggctctccggggtgaatgtcgtgctggtgatggcctacgggagcctggtgtttgtactgctatttatttttgtgaagaggcaaatcatgcgctttgcaatgaaatctcgaaggggacctcatgtccctgtgggacacaatgcccccaaggacttgaaagaggagattgatattcgactctccagggttcaggatatcaagtatgagccccagctccttgcagatgatgatgctagactactacaactggaaacccagggaaatcaaagttgctacaactatctgtataggatgaaagctctggatgccattcgtacctctgagatcccatttcattctgaaggccggcatccccgttccttaatgggcaagaatttccgctcctacctgctggatctgcgaaacactagtacgcctttcaagggtgtacgcaaagcactcattgatacccttttggatggctatgaaacagcccgctatgggacaggggtctttggccagaatgagtacctacgctatcaggaggccctgagtgagctggccactgcggttaaagcacgaattgggagctctcagcgacatcaccagtcagcagccaaagacctaactcagtcccctgaggtctccccaacaaccatccaggtgacatacctcccctccagtcagaagagtaaacgtgccaagcacttccttgaattgaagagctttaaggataactataacacattggagagtactctgtgacggagctgaaggactcttgccgtagattaagccagtcagttgcaatgtgcaagacaggctgcttgccgggccgccctcggaacatctggcccagcaggcccagactgtatccatccaagttcccgttgtatccagagttcttagagcttgtgtctaaagggtaattccccaacccttccttatgagcatttttagaacattggctaagactattttcccccagtagcgcttttttctggatttgcattcgggtgttattcttaatgtttctgtcaaagcttcttaaaaatcttcacttggtttcagccatagttcaccttccctgttccaggtttatttaattccaatctcattaataaattgaataaaagggaatgttttggcacctgatataatctgccaggctatgtgacagtaggaaggaatggtttcccctaacaagcccaatgcactggtctgactttataaattatttaataaaatgaactattatcaaataaaacgtatgaatcagtaaaaaaaaaanaaaaaaaaaaaaaaaaaanaanaaanaananaaaaanaaaaaaaaagagggggggggccgggaaaaaagaaatatcccccggggggcccaccccccgcaacacggccccgcccccgtccttcttgtgagcacaaggggggccccaattagggagggggaataaaaaaggacgggaggcagggggggggggttaacaccaggggtgggcgggggagaacaccgggcccgcggggaacccttgggggagggccccccattcttcgcggcgggcggcgaccactctgtcgcggcccaaccccccacggagtgtttaaagccgtctccggggacaattaaacccttcaacgcggtaatgtgggggcaacccccggcaatatgtccgcgggcgaagagttcgctccgggttgtttataggactacgagaggatatatatatatataagacgcaaccacgacgccaccacgccgctataatactgcgatccctccactgccgcgtctgataccctccacactccgacacccaaactacaccatgcgcgcg

SEQ ID NO: 736535 - DNA, 1287 bp, Homo sapiens
tgcgcgctgctcttccccgcggagcccgcgcagtccgcgcagccctcatcgcaactgggcccgcgcgcagatccaccaaagagaaagcagccctgtgccagttgctctgccagcctttcacaggagaagtgtcactagaatactacagcccccacaggctctgctccacagaaacttaaggctgaaagagtgtccgccatcagggacatcctctgtcactacggtgggaaaagaacatggccttacataggaagtccttctaaagagctgcctgccagctgcccttccccagatcccgaatatcctcctggccaggtggagcagagaacagttcctcagctggtcatgctgagctcataccctgatggctgctccatgaggtcaagactgggtctcctccctcctcccccttcaccaatgcctggtctcacggggctagttttgacccccacgctatggcatcatcgacctccctcccagctcctggctctcggcctaagaagcctctaggcaagatggctgactggttcaggcagaccctgctgaagaagcccaagaagaggcccaactccccagaaagcacctccagcgatgcttcacagcctacctcacaggacagcccactacccccaagcctcagctcagtcacgtctcccagcctgccacccacacatgcgagtgacagtggcagtagtcgctggagcaaagactatgacgtctgcgtgtgccacagtgaggaagacctggtggccgcccaggacctggtctcctacttggaaggcagcactgccagcctgcgctgcttcctgcaactccgggatgcaaccccaggcggcgctatagtgtccgagctgtgccaggcactgagcagtagtcactgccgggtgctgctcatcacgccgggcttccttcaggacccctggtgcaagtaccagatgctgcaggccctgaccgaggctccaggggccgagggctgcaccatccccctgctgtcgggcctcagcagagctgcctacccacctgagctccgattcatgtactacgtcgatggcaggggccctgatggtggctttcgtcaagtcaaagaagctgtcatgcgttgtaagctactacaggagggagaaggggaacgggattcagctacagtatctgatctactttgacttttaggagacagccctgtagcctagtagttcaaagcgcagcttctggaaaaggctgtcggggtttgtatcctggctcctgcacttattaacccataaaaagtaacttggtcaagttactcac

SEQ ID NO: 736536 - DNA, 796 bp, Homo sapiens
tttcctttacatcagtttctgcacataatattggaaaagcattctagaaagcactaaaggtattgtgctacttcttttctgaagaaattctttactaattttcttttctttatttttttgagatcgagtctcgctctgtcacccaggctggagcacagtggtgcaatctcggctcactgcaacctctgcctcccaggttcaagggattatccagcctcagccacccaagtagctaggattacaggtgtgcgacaccatgcctggctaatttttgtatttttagtagagacagggtttcgacctgtcggccaggctggtcttgaactcctgagctcacatgatctgcccacctcggcctcccaaagtgctgggattacaggggagcaccagcacacccggctaaattttgtatttttagtagagaaggggttttgacaggctggtctggaactcctgagctcacatgatctgcccacctcggcctcccaaagtgctgggattacaggcatgagccactgagcccgttccctttactaattttctatcaagtcatagttcttacaaagtgggtatttttggtatgattctactttatgaattgttttcaaagcacaaagaaagcgactgcgtattagaccacacagcaaatcagagaataggcagagctagtgagtagagcttccagttggagatttgggttcattaccttacctacttgtcaaccacatctcaagatatgatgacagttaccaggtcttggaaagatgcgtgttataagatcctctagagtaccttg

SEQ ID NO: 736537 - DNA, 768 bp, Homo sapiens; identical to SEQ ID NO: 283654

SEQ ID NO: 736538 - DNA, 463 bp, Homo sapiens
ccagataattttttgtatttttagtagcgatagggtttcaccgtgttagccaggagggtctcgatctcctgacctcacgatccacccacctcgggctcccaaagtgctggaattacagtcatgtgcctaccacccagcctttttttaattattatttgaagaatttaagattggaattaattgctccttgaatgtttggtagactcatctgtaataccatttgagcctagaatattctggtttttttgagacggagtcttgccctattgcccaggccggagtgcagtgggattacacgcgtgagccaccatgcctggccagaatattctttattgtaaaatttaaagctgtaatttcaatgtcttgaagagttatagatctaattagattttccatttctcctggagtcaatttggtacaaacagtcaataaagactacaagaccagtttaagtaaaaaaaaa

SEQ ID NO: 736539 - DNA, 2237 bp, Homo sapiens
tgcgcgctgctcttccccgcggagcccgcgcagtccgcgcagccctcatcgcaactgggcccgcgcgcagatccaccaaagagaaagcagccctgtgccagttgctctgccagcctttcacaggagaagtgtcactagaatactacagcccccacaggctctgctccacagaaacttaaggctgaaagagtgtccgccatcagggacatcctctgtcactacggtgggaaaagaacatggccttacataggaagtccttctaaagagctgcctgccagctgcccttccccagatcccgaatatcctcctggccaggtggagcagagaacagttcctcagctggtcatgctgagctcataccctgatggctgctccatgaggtcaagactgggtctcctccctcctcccccttcaccaatgcctggtctcacggggctagttttgacccccacgctatggcatcatcgacctccctcccagctcctggctctcggcctaagaagcctctaggcaagatggctgactggttcaggcagaccctgctgaagaagcccaagaagaggcccaactccccagaaagcacctccagcgatgcttcacagcctacctcacaggacagcccactacccccaagcctcagctcagtcacgtctcccagcctgccacccacacatgcgagtgacagtggcagtagtcgctggagcaaagactatgacgtctgcgtgtgccacagtgaggaagacctggtggccgcccaggacctggtctcctacttggaaggcagcactgccagcctgcgctgcttcctgcaactccgggatgcaaccccaggcggcgctatagtgtccgagctgtgccaggcactgagcagtagtcactgccgggtgctgctcatcacgccgggcttccttcaggacccctggtgcaagtaccagatgctgcaggccctgaccgaggctccaggggccgagggctgcaccatccccctgctgtcgggcctcagcagagctgcctacccacctgagctccgattcatgtactacgtcgatggcaggggccctgatggtggctttcgtcaagtcaaagaagctgtcatgcgttatctgcagacactcagttgacacttgttatatcatgggaccccggaaattggagtgaagctagaaacagaaaacccatgcagggcctcggattcccacaaataaggccatgaggaagccagaaattggaggtggtaggaagtggtactgatcaatgatggccagcaggactcatctcctgcctaactggacaggaagcctggcacccacttctgtcttcccctggaactgggcactggcgtacactggtatccctcctaaagaagtgactcacctgactgatcagcaagaagcctagattgcaggcctcaccatggatggtcttcctagttgcctggggaaaccctggaatgggcatcaggagaaagcaacaagaatccagtccttcacactcacactactctgttcctcttcccagagacatcgattcaccccaaagatgctgggattacaggcgtgaagcaccacgcccagcctgaaataatattttaccttttactttgtgctttttgtgttttactcaggaagtcctcccctacatctgttttcttctgtatttcttttcatatttaggtctttaatccacctggattttttgtttgggtttttgttgttctttagtcaaagatccaattcttttttctatttaaataaccatcattgactgactagtccatccttaccccacccctactgattatgatgtcactgctgtcacatattgtcatacgtggggggctgttactgggttctccagtctcctcccctttatctgtttgtgtatccctgtgctggtgccacactgcctcgttcactgatgtttttaataagcctgcaccatttgtatgtcaattcttcctgctcttcttatccatcaaaaatcactttaacttttcttgttcctttactcttccatataaattgtttattcaaccatcaggttccaggaaaaagcctgttagtattttcattggacttacatggaatttgtagattttgaaaaaacagatatttttatgagtcttcctattcataaaaatagtatgtctccatttacttatgtctttaagtgtatttcagtaaagctttctatcttttccacattggtcagctcctctttttattagaattattccc

SEQ ID NO: 736540 - DNA, 2247 bp, Homo sapiens
tgcgcgctgctcttccccgcggagcccgcgcagtccgcgcagccctcatcgcaactgggcccgcgcgcagatccaccaaagagaaagcagccctgtgccagttgctctgccagcctttcacaggagaagtgtcactagaatactacagcccccacaggctctgctccacagaaacttaaggctgaaagagtgtccgccatcagggacatcctctgtcactacggtgggaaaagaacatggccttacataggaagtccttctaaagagctgcctgccagctgcccttccccagatcccgaatatcctcctggccaggtggagcagagaacagttcctcagctggtcatgctgagctcataccctgatggctgctccatgaggtcaagactgggtctcctccctcctcccccttcaccaatgcctggtctcacggggctagttttgacccccacgctatggcatcatcgacctccctcccagctcctggctctcggcctaagaagcctctaggcaagatggctgactggttcaggcagaccctgctgaagaagcccaagaagaggcccaactccccagaaagcacctccagcgatgcttcacagcctacctcacaggacagcccactacccccaagcctcagctcagtcacgtctcccagcctgccacccacacatgcgagtgacagtggcagtagtcgctggagcaaagactatgacgtctgcgtgtgccacagtgaggaagacctggtggccgcccaggacctggtctcctacttggaaggcagcactgccagcctgcgctgcttcctgcaactccgggatgcaaccccaggcggcgctatagtgtccgagctgtgccaggcactgagcagtagtcactgccgggtgctgctcatcacgccgggcttccttcaggacccctggtgcaagtaccagatgctgcaggccctgaccgaggctccaggggccgagggctgcaccatccccctgctgtcgggcctcagcagagctgcctacccacctgagctccgattcatgtactacgtcgatggcaggggccctgatggtggctttcgtcaagtcaaagaagctgtcatgcgttatctgcagacactcagttgacacttgttatatcatgggaccccggaaattggagtgaagctagaaacagaaaacccatgcagggcctcggattcccacaaataaggccatgaggaagccagaaattggaggtggtaggaagtggtactgatcaatgatggccagcaggactcatctcctgcctaactggacaggaagcctggcacccacttctgtcttcccctggaactgggcactggcgtacactggtatccctcctaaagaagtgactcacctgactgatcagcaagaagcctagattgcaggcctcaccatggatggtcttcctagttgcctggggaaaccctggaatgggcatcaggagaaagcaacaagaatccagtccttcacactcacactactctgttcctcttcccagagacatcgattcaccccaaagatgctgggattacaggcgtgaagcaccacgcccagcctgaaataatattttaccttttactttgtgctttttgtgttttactcaggaagtcctcccctacatctgttttcttctgtatttcttttcatatttaggtctttaatccacctggattttttgtttgggtttttgttgttctttagtcaaagatccaattcttttttctatttaaataaccatcattgactgactagtccatccttaccccacccctactgattatgatgtcactgctgtcacatattgtcatacgtggggggctgttactgggttctccagtctcctcccctttatctgtttgtgtatccctgtgctggtgccacactgcctcgttcactgatgtttttaataagcctgcaccatttgtatgtcaattcttcctgctcttcttatccatcaaaaatcactttaacttttcttgttcctttactcttccatataaattgtttattcaaccatcaggttccaggaaaaagcctgttagtattttcattggacttacatggaatttgtagattttgaaaaaacagatatttttatgagtcttcctattcataaaaatagtatgtctccatttacttatgtctttaagtgtatttcagtaaagctttctatcttttcacaaaataaaaaaaaaaactttagggggggcccggaccaaattcccct

SEQ ID NO: 736541 - DNA, 2877 bp, Homo sapiens
tgcgcgctgctcttccccgcggagcccgcgcagtccgcgcagccctcatcgcaactgggcccgcgcgcaggccttacataggaagtccttctaaagagctgcctgccagctgcccttccccagatcccgaatatcctcctggccaggtggagcagagaacagttcctcagctggtcatgctgagctcataccctgatggctgctccatgaggtcaagactgggtctcctccctcctcccccttcaccaatgcctggtctcacggggctagttttgacccccacgctatggcatcatcgacctccctcccagctcctggctctcggcctaagaagcctctaggcaagatggctgactggttcaggcagaccctgctgaagaagcccaagaagaggcccaactccccagaaagcacctccagcgatgcttcacagcctacctcacaggacagcccactacccccaagcctcagctcagtcacgtctcccagcctgccacccacacatgcgagtgacagtggcagtagtcgctggagcaaagactatgacgtctgcgtgtgccacagtgaggaagacctggtggccgcccaggacctggtctcctacttggaaggcagcactgccagcctgcgctgcttcctgcaactccgggatgcaaccccaggcggcgctatagtgtccgagctgtgccaggcactgagcagtagtcactgccgggtgctgctcatcacgccgggcttccttcaggacccctggtgcaagtaccagatgctgcaggccctgaccgaggctccaggggccgagggctgcaccatccccctgctgtcgggcctcagcagagctgcctacccacctgagctccgattcatgtactacgtcgatggcaggggccctgatggtggctttcgtcaagtcaaagaagctgtcatgcgttatctgcagacactcagttgacacttgttatatcatgggaccccggaaattggagtgaagctagaaacagaaaacccatgcagggcctcggattcccacaaatgtgacaagaggtatagggagtgagtcgcagcgctttgctcgtgaccctgggatcagagcacccatcaggcttccattactgtgggctccctaagaagaccatggagagcttggggactcccccaggaaggccgtgaagctggggattccccctaggaaagccatgaggaagctggggactccccaagaaggccatgaggaagccagaaattggaggtggtaggaagtggtactgatcaatgatggccagcaggactcatctcctgcctaactggacaggaagcctggcacccacttctgtcttcccctggaactgggcactggcgtacactggtatccctcctaaagaagtgactcacctgactgatcagcaagaagcctagattgcaggcctcaccatggatggtcttcctagttgcctggggaaaccctggaatgggcatcaggagaaagcaacaagaatccagtccttcacactcacactactctgttcctcttcccagagacatcgattcaccccaaagagctgtagggaagatgcagtcagcactgcactgtattttttatttattgcctaggtgccattaaagacacaaacctagaagcctagaggccattctgaatatgggggtggggtggtggagggagcaagtgaagagatgggaatccagggctcagggttcaacgccttcacctgagatcacaagcccatggatgctgtgacatctgggagcttcatcagtggtctggctaaagctgatactttcacagtcaccatcttcacctttggactgggaagaatcaccatttttcttctggcagatgactgtattccttataggacaggcaaggtttcattcatctgttctcagtaagtttgttgttgaactgaaatgaatttcattatttcctccaatgtgtacttttgtgcccccctctcacttctccctatcatgacccctcttttgctgaaaaaaatttttattattttttctatctctagttctagaaagagaaaatttattttttaaattataaactattttgccaggcgccatggctcacacctgtaatctcagcactttgggaggccgaggcaggtggatcacctgaggtcaggagttcaagactagcctggccaatatggtgaaaccctgtctctactaaaaaaacaaaaaaaatcagctgggtgtggtggcgggggcctgtagtctcaactactcgggaggttgaggcaggagaattgcttgaacctgggaggtggagattgcagtgagctgaaatcacgccactgcactcgagcctgggcaactgagcgagactctgtctcaaaaaaaaaaggccaggcatggtggctcatgcctgtaatcctagtactttgggaggctgaggtgggcagaatacaaggtcaagagatcaagaccatcctggccaacatggtgaaaccccatctctataaaaatacaaaaattagccaggcatggtggtgcacgcctgtaatcccagctacttgggaggctgaggcaggagaattgcttgagcctgggaggcagaggttgcagtgagctgagatattgcaccactgcactctagcctgggtgacagagcgagactccatctcaaaaaaaaaaaaaaaaaaagaatatacatactatttttctagaagatgccacagtttcttccaaattggctgtaccaatttaagttcctacaatttgtgtttaagagttcccactttttcatgttcttgctaacgttcagagttatcatatttttaaatgtttgctaatctggtggatgaaaactggtaaactattgttattttttttccttttcatcatttt

SEQ ID NO: 736542 - DNA, 3060 bp, Homo sapiens
tgcgcgctgctcttccccgcggagcccgcgcagtccgcgcagccctcatcgcaactgggcccgcgcgcaggccttacataggaagtccttctaaagagctgcctgccagctgcccttccccagatcccgaatatcctcctggccaggtggagcagagaacagttcctcagctggtcatgctgagctcataccctgatggctgctccatgaggtcaagactgggtctcctccctcctcccccttcaccaatgcctggtctcacggggctagttttgacccccacgctatggcatcatcgacctccctcccagctcctggctctcggcctaagaagcctctaggcaagatggctgactggttcaggcagaccctgctgaagaagcccaagaagaggcccaactccccagaaagcacctccagcgatgcttcacagcctacctcacaggacagcccactacccccaagcctcagctcagtcacgtctcccagcctgccacccacacatgcgagtgacagtggcagtagtcgctggagcaaagactatgacgtctgcgtgtgccacagtgaggaagacctggtggccgcccaggacctggtctcctacttggaaggcagcactgccagcctgcgctgcttcctgcaactccgggatgcaaccccaggcggcgctatagtgtccgagctgtgccaggcactgagcagtagtcactgccgggtgctgctcatcacgccgggcttccttcaggacccctggtgcaagtaccagatgctgcaggccctgaccgaggctccaggggccgagggctgcaccatccccctgctgtcgggcctcagcagagctgcctacccacctgagctccgattcatgtactacgtcgatggcaggggccctgatggtggctttcgtcaagtcaaagaagctgtcatgcgttatctgcagacactcagttgacacttgttatatcatgggaccccggaaattggagtgaagctagaaacagaaaacccatgcagggcctcggattcccacaaatgtgacaagaggtatagggagtgagtcgcagcgctttgctcgtgaccctgggatcagagcacccatcaggcttccattactgtgggctccctaagaagaccatggagagcttggggactcccccaggaaggccgtgaagctggggattccccctaggaaagccatgaggaagctggggactccccaagaaggccatgaggaagccagaaattggaggtggtaggaagtggtactgatcaatgatggccagcaggactcatctcctgcctaactggacaggaagcctggcacccacttctgtcttcccctggaactgggcactggcgtacactggtatccctcctaaagaagtgactcacctgactgatcagcaagaagcctagattgcaggcctcaccatggatggtcttcctagttgcctggggaaaccctggaatgggcatcaggagaaagcaacaagaatccagtccttcacactcacactactctgttcctcttcccagagacatcgattcaccccaaagagctgtagggaagatgcagtcagcactgcactgtattttttatttattgcctaggtgccattaaagacacaaacctagaagcctagaggccattctgaatatgggggtggggtggtggagggagcaagtgaagagatgggaatccagggctcagggttcaacgccttcacctgagatcacaagcccatggatgctgtgacatctgggagcttcatcagtggtctggctaaagctgatactttcacagtcaccatcttcacctttggactgggaagaatcaccatttttcttctggcagatgactgtattccttataggacaggcaaggtttcattcatctgttctcagtaagtttgttgttgaactgaaatgaatttcattatttcctccaatgtgtacttttgtgcccccctctcacttctccctatcatgacccctcttttgctgaaaaaaatttttattattttttctatctctagttctagaaagagaaaatttattttttaaattataaactattttgccaggcgccatggctcacacctgtaatctcagcactttgggaggccgaggcaggtggatcacctgaggtcaggagttcaagactagcctggccaatatggtgaaaccctgtctctactaaaaaaacaaaaaaaatcagctgggtgtggtggcgggggcctgtagtctcaactactcgggaggttgaggcaggagaattgcttgaacctgggaggtggagattgcagtgagctgaaatcacgccactgcactcgagcctgggcaactgagcgagactctgtctcaaaaaaaaaaggccaggcatggtggctcatgcctgtaatcctagtactttgggaggctgaggtgggcagaatacaaggtcaagagatcaagaccatcctggccaacatggtgaaaccccatctctataaaaatacaaaaattagccaggcatggtggtgcacgcctgtaatcccagctacttgggaggctgaggcaggagaattgcttgagcctgggaggcagaggttgcagtgagctgagatattgcaccactgcactctagcctgggtgacagagcgagactccatctcaaaaaaaaaaaaaaaaaattattttattatgcacaaaaggattaacaaataatatgtccactcatgtgcctaccacccagcctttttttaattattatttgaagaatttaagattggaattaattgctccttgaatgtttggtagactcatctgtaataccatttgagcctagaatattctggtttttttgagacggagtcttgccctattgcccaggccggagtgcagtgggattacacgcgtgagccaccatgcctggccagaatattctttattgtaaaatttaaagctgtaatttcaatgtcttgaagagttatagatctaattagattttccatttctcctggagtcaatttggtacaaacagtcaataaagactacaagaccagtttaagtaaaaaaaaa

SEQ ID NO: 736543 - DNA, 2828 bp, Homo sapiens
tgcgcgctgctcttccccgcggagcccgcgcagtccgcgcagccctcatcgcaactgggcccgcgcgcaggccttacataggaagtccttctaaagagctgcctgccagctgcccttccccagatcccgaatatcctcctggccaggtggagcagagaacagttcctcagctggtcatgctgagctcataccctgatggctgctccatgaggtcaagactgggtctcctccctcctcccccttcaccaatgcctggtctcacggggctagttttgacccccacgctatggcatcatcgacctccctcccagctcctggctctcggcctaagaagcctctaggcaagatggctgactggttcaggcagaccctgctgaagaagcccaagaagaggcccaactccccagaaagcacctccagcgatgcttcacagcctacctcacaggacagcccactacccccaagcctcagctcagtcacgtctcccagcctgccacccacacatgcgagtgacagtggcagtagtcgctggagcaaagactatgacgtctgcgtgtgccacagtgaggaagacctggtggccgcccaggacctggtctcctacttggaaggcagcactgccagcctgcgctgcttcctgcaactccgggatgcaaccccaggcggcgctatagtgtccgagctgtgccaggcactgagcagtagtcactgccgggtgctgctcatcacgccgggcttccttcaggacccctggtgcaagtaccagatgctgcaggccctgaccgaggctccaggggccgagggctgcaccatccccctgctgtcgggcctcagcagagctgcctacccacctgagctccgattcatgtactacgtcgatggcaggggccctgatggtggctttcgtcaagtcaaagaagctgtcatgcgttatctgcagacactcagttgacacttgttatatcatgggaccccggaaattggagtgaagctagaaacagaaaacccatgcagggcctcggattcccacaaatgtgacaagaggtatagggagtgagtcgcagcgctttgctcgtgaccctgggatcagagcacccatcaggcttccattactgtgggctccctaagaagaccatggagagcttggggactcccccaggaaggccgtgaagctggggattccccctaggaaagccatgaggaagctggggactccccaagaaggccatgaggaagccagaaattggaggtggtaggaagtggtactgatcaatgatggccagcaggactcatctcctgcctaactggacaggaagcctggcacccacttctgtcttcccctggaactgggcactggcgtacactggtatccctcctaaagaagtgactcacctgactgatcagcaagaagcctagattgcaggcctcaccatggatggtcttcctagttgcctggggaaaccctggaatgggcatcaggagaaagcaacaagaatccagtccttcacactcacactactctgttcctcttcccagagacatcgattcaccccaaagagctgtagggaagatgcagtcagcactgcactgtattttttatttattgcctaggtgccattaaagacacaaacctagaagcctagaggccattctgaatatgggggtggggtggtggagggagcaagtgaagagatgggaatccagggctcagggttcaacgccttcacctgagatcacaagcccatggatgctgtgacatctgggagcttcatcagtggtctggctaaagctgatactttcacagtcaccatcttcacctttggactgggaagaatcaccatttttcttctggcagatgactgtattccttataggacaggcaaggtttcattcatctgttctcagtaagtttgttgttgaactgaaatgaatttcattatttcctccaatgtgtacttttgtgcccccctctcacttctccctatcatgacccctcttttgctgaaaaaaatttttattattttttctatctctagttctagaaagagaaaatttattttttaaattataaactattttgccaggcgccatggctcacacctctgcctcggcctcccaaagtgctgggattacaggcgtgaagcaccacgcccagcctgaaataatattttaccttttactttgtgctttttgtgttttactcaggaagtcctcccctacatctgttttcttctgtatttcttttcatatttaggtctttaatccacctggattttttgtttgggtttttgttgttctttagtcaaagatccaattcttttttctatttaaataaccatcattgactgactagtccatccttaccccacccctactgattatgatgtcactgctgtcacatattgtcatacgtggggggctgttactgggttctccagtctcctcccctttatctgtttgtgtatccctgtgctggtgccacactgcctcgttcactgatgtttttaataagcctgcaccatttgtatgtcaattcttcctgctcttcttatccatcaaaaatcactttaacttttcttgttcctttactcttccatataaattgtttattcaaccatcaggttccaggaaaaagcctgttagtattttcattggacttacatggaatttgtagattttgaaaaaacagatatttttatgagtcttcctattcataaaaatagtatgtctccatttacttatgtctttaagtgtatttcagtaaagctttctatcttttcacaaaataaaaaaaaaaactttagggggggcccggaccaaattcccct

SEQ ID NO: 736544 - DNA, 2564 bp, Homo sapiens
tgcgcgctgctcttccccgcggagcccgcgcagtccgcgcagccctcatcgcaactgggcccgcgcgcaggccttacataggaagtccttctaaagagctgcctgccagctgcccttccccagatcccgaatatcctcctggccaggtggagcagagaacagttcctcagctggtcatgctgagctcataccctgatggctgctccatgaggtcaagactgggtctcctccctcctcccccttcaccaatgcctggtctcacggggctagttttgacccccacgctatggcatcatcgacctccctcccagctcctggctctcggcctaagaagcctctaggcaagatggctgactggttcaggcagaccctgctgaagaagcccaagaagaggcccaactccccagaaagcacctccagcgatgcttcacagcctacctcacaggacagcccactacccccaagcctcagctcagtcacgtctcccagcctgccacccacacatgcgagtgacagtggcagtagtcgctggagcaaagactatgacgtctgcgtgtgccacagtgaggaagacctggtggccgcccaggacctggtctcctacttggaaggcagcactgccagcctgcgctgcttcctgcaactccgggatgcaaccccaggcggcgctatagtgtccgagctgtgccaggcactgagcagtagtcactgccgggtgctgctcatcacgccgggcttccttcaggacccctggtgcaagtaccagatgctgcaggccctgaccgaggctccaggggccgagggctgcaccatccccctgctgtcgggcctcagcagagctgcctacccacctgagctccgattcatgtactacgtcgatggcaggggccctgatggtggctttcgtcaagtcaaagaagctgtcatgcgttatctgcagacactcagttgacacttgttatatcatgggaccccggaaattggagtgaagctagaaacagaaaacccatgcagggcctcggattcccacaaatgtgacaagaggtatagggagtgagtcgcagcgctttgctcgtgaccctgggatcagagcacccatcaggcttccattactgtgggctccctaagaagaccatggagagcttggggactcccccaggaaggccgtgaagctggggattccccctaggaaagccatgaggaagctggggactccccaagaaggccatgaggaagccagaaattggaggtggtaggaagtggtactgatcaatgatggccagcaggactcatctcctgcctaactggacaggaagcctggcacccacttctgtcttcccctggaactgggcactggcgtacactggtatccctcctaaagaagtgactcacctgactgatcagcaagaagcctagattgcaggcctcaccatggatggtcttcctagttgcctggggaaaccctggaatgggcatcaggagaaagcaacaagaatccagtccttcacactcacactactctgttcctcttcccagagacatcgattcaccccaaagagctgtagggaagatgcagtcagcactgcactgtattttttatttattgcctaggtgccattaaagacacaaacctagaagcctagaggccattctgaatatgggggtggggtggtggagggagcaagtgaagagatgggaatccagggctcagggttcaacgccttcacctgagatcacaagcccatggatgctgtgacatctgggagcttcatcagtggtctggctaaagctgatactttcacagtcaccatcttcacctttggactgggaagaatcaccatttttcttctggcagatgactgtattccttataggacaggcaaggtttcattcatctgttctcagtaagtttgttgttgaactgaaatgaatttcattatttcctccaatgtgtacttttgtgcccccctctcacttctccctatcatgacccctcttttgctgaaaaaaatttttattattttttctatctctagttctagaaagagaaaatttattttttaaattataaactattttgccaggcgccatggctcacacctctgcctcggcctcccaaagtgctgggattacaggcgtgaagcaccacgcccagcctgaaataatattttaccttttactttgtgctttttgtgttttactcaggaagtcctcccctacatctgttttcttctgtatttcttttcatatttaggtctttaatccacctggattttttgtttgggtttttgttgttctttagtcaaagatccaattcttttttctatttaaataaccatcattgactgactagtccatccttaccccacccctactgattatgatgtcactgctgtcacatattgtcatacgtggggggctgttactgggttctccagtctcctcccctttatctgtttgtgtatccctgtgctggtgccacactgcctcgttcactgatgtttttaataagcctgcaccttactacacaatcaagacgcctcggttattctcttcctctctct

SEQ ID NO: 736545 - DNA, 1978 bp, Homo sapiens
tgcgcgctgctcttccccgcggagcccgcgcagtccgcgcagccctcatcgcaactgggcccgcgcgcaggccttacataggaagtccttctaaagagctgcctgccagctgcccttccccagatcccgaatatcctcctggccaggtggagcagagaacagttcctcagctggtcatgctgagctcataccctgatggctgctccatgaggtcaagactgggtctcctccctcctcccccttcaccaatgcctggtctcacggggctagttttgacccccacgctatggcatcatcgacctccctcccagctcctggctctcggcctaagaagcctctaggcaagatggctgactggttcaggcagaccctgctgaagaagcccaagaagaggcccaactccccagaaagcacctccagcgatgcttcacagcctacctcacaggacagcccactacccccaagcctcagctcagtcacgtctcccagcctgccacccacacatgcgagtgacagtggcagtagtcgctggagcaaagactatgacgtctgcgtgtgccacagtgaggaagacctggtggccgcccaggacctggtctcctacttggaaggcagcactgccagcctgcgctgcttcctgcaactccgggatgcaaccccaggcggcgctatagtgtccgagctgtgccaggcactgagcagtagtcactgccgggtgctgctcatcacgccgggcttccttcaggacccctggtgcaagtaccagatgctgcaggccctgaccgaggctccaggggccgagggctgcaccatccccctgctgtcgggcctcagcagagctgcctacccacctgagctccgattcatgtactacgtcgatggcaggggccctgatggtggctttcgtcaagtcaaagaagctgtcatgcgttatctgcagacactcagttgacacttgttatatcatgggaccccggaaattggagtgaagctagaaacagaaaacccatgcagggcctcggattcccacaaatgtgacaagaggtatagggagtgagtcgcagcgctttgctcgtgaccctgggatcagagcacccatcaggcttccattactgtgggctccctaagaagaccatggagagcttggggactcccccaggaaggccgtgaagctggggattccccctaggaaagccatgaggaagctggggactccccaagaaggccatgaggaagccagaaattggaggtggtaggaagtggtactgatcaatgatggccagcaggactcatctcctgcctaactggacaggaagcctggcacccacttctgtcttcccctggaactgggcactggcgtacactggtatccctcctaaagaagtgactcacctgactgatcagcaagaagcctagattgcaggcctcaccatggatggtcttcctagttgcctggggaaaccctggaatgggcatcaggagaaagcaacaagaatccagtccttcacactcacactactctgttcctcttcccagagacatcgattcaccccaaagagctgtagggaagatgcagtcagcactgcactgtattttttatttattgcctaggtgccattaaagacacaaacctagaagcctagaggccattctgaatatgggggtggggtggtggagggagcaagtgaagagatgggaatccagggctcagggttcaacgccttcacctgagatcacaagcccatggatgctgtgacatctgggagcttcatcagtggtctggctaaagctgatactttcacagtcaccatcttcacctttggactgggaagaatcaccatttttcttctggcagatgactgtattccgttctccggcttcagactgcagaaggtgctgagggagtctgcgcgggacaaaatcattttcctacacgggaaggtaccaggaggcaaccctgaggtgggatgcgggaagc

SEQ ID NO: 736546 - DNA, 3323 bp, Homo sapiens
tgcgcgctgctcttccccgcggagcccgcgcagtccgcgcagccctcatcgcaactgggcccgcgcgcaggccttacataggaagtccttctaaagagctgcctgccagctgcccttccccagatcccgaatatcctcctggccaggtggagcagagaacagttcctcagctggtcatgctgagctcataccctgatggctgctccatgaggtcaagactgggtctcctccctcctcccccttcaccaatgcctggtctcacggggctagttttgacccccacgctatggcatcatcgacctccctcccagctcctggctctcggcctaagaagcctctaggcaagatggctgactggttcaggcagaccctgctgaagaagcccaagaagaggcccaactccccagaaagcacctccagcgatgcttcacagcctacctcacaggacagcccactacccccaagcctcagctcagtcacgtctcccagcctgccacccacacatgcgagtgacagtggcagtagtcgctggagcaaagactatgacgtctgcgtgtgccacagtgaggaagacctggtggccgcccaggacctggtctcctacttggaaggcagcactgccagcctgcgctgcttcctgcaactccgggatgcaaccccaggcggcgctatagtgtccgagctgtgccaggcactgagcagtagtcactgccgggtgctgctcatcacgccgggcttccttcaggacccctggtgcaagtaccagatgctgcaggccctgaccgaggctccaggggccgagggctgcaccatccccctgctgtcgggcctcagcagagctgcctacccacctgagctccgattcatgtactacgtcgatggcaggggccctgatggtggctttcgtcaagtcaaagaagctgtcatgcgttatctgcagacactcagttgacacttgttatatcatgggaccccggaaattggagtgaagctagaaacagaaaacccatgcagggcctcggattcccacaaatgtgacaagaggtatagggagtgagtcgcagcgctttgctcgtgaccctgggatcagagcacccatcaggcttccattactgtgggctccctaagaagaccatggagagcttggggactcccccaggaaggccgtgaagctggggattccccctaggaaagccatgaggaagctggggactccccaagaaggccatgaggaagccagaaattggaggtggtaggaagtggtactgatcaatgatggccagcaggactcatctcctgcctaactggacaggaagcctggcacccacttctgtcttcccctggaactgggcactggcgtacactggtatccctcctaaagaagtgactcacctgactgatcagcaagaagcctagattgcaggcctcaccatggatggtcttcctagttgcctggggaaaccctggaatgggcatcaggagaaagcaacaagaatccagtccttcacactcacactactctgttcctcttcccagagacatcgattcaccccaaagagctgtagggaagatgcagtcagcactgcactgtattttttatttattgcctaggtgccattaaagacacaaacctagaagcctagaggccattctgaatatgggggtggggtggtggagggagcaagtgaagagatgggaatccagggctcagggttcaacgccttcacctgagatcacaagcccatggatgctgtgacatctgggagcttcatcagtggtctggctaaagctgatactttcacagtcaccatcttcacctttggactgggaagaatcaccatttttcttctggcagatgactgtattccgttctccggcttcagactgcagaaggtgctgagggagtctgcgcgggacaaaatcattttcctacacgggaaggtgaatgaggcctctggggatggggatggagaggatgccgttgtgatcctggagaagacgccatttcaggtggaacaggtggctcagctcctgacgggcagccctgagctccaattgcagttctccaatgatatctacagcacctatcacttgttccctccaagacaactgaatgatgtaaagacgaccgtggtttaccctgccacagagaaacacctgcagaagtacctgcgccaggacctccgcctgatccgagagacgggagatgactacaggaatattactttaccccacctggagtcccagagcctcagcatccagtgggtgtataacattctcgacaagaaggctgaagcggaccggattgttttcgagaacccagatccctctgatggttttgtcctcatccctgacctcaagtggaaccaacagcagctcgatgacttgtacttgatcgccatctgccatcgccggggcatcagatccctacgcgaccttactccggagcacttgccgctgctcaggaacatcctccaccaggggcaggaggccatcctgcagcgctaccggatgaagggagaccatctgcgagtatacctgcactacctgccctcctactaccacctgcatgtgcacttcaccgccctgggcttcgaggcccccggctcaggcgtggagcgggcccacctgctggctgaggtgatcgagaacttggagtgtgaccctaggcactaccagcagcgcacgctcaccttcgccctcagggctgacgaccccctgctcaagctcttgcaggaggctcagcaaagctgaattaactcaggcagaagagcacagatgtgtgggattgggggaggagtggggacaagattttttatctccaagtgaattttctaaaaatgtattttataccggcttattcctagtattgaataaactagcgggctcactcaaaaaaaaaaaagaaaaaaagaagacgaaagcactaagagaggggcggcggccgccacctcagaggaagtctcccccgcgggggggggccaccaaccatgatgagacatctgacaccccaacgattcgtgtagagcacacgaagcggcgggcccccacacaaaatgaggaagggctgcgtaaataaatagaacacacggacatcccgagccgcgcgacgatataacagaaaccgagcccggcagacagggcggacaaccgcacgcgtgcacagcagggagagacagaacctggcggtggaaagcagcacacaaccaaacaaatgagctgggggggcgggggcgaaacaaccaaatcgtggggcgcaaacactcacctcacgagcagagaatgacatcagacagccgatcgcagcaggacgacgccaatac

SEQ ID NO: 736547 - DNA, 2878 bp, Homo sapiens
tgcgcgctgctcttccccgcggagcccgcgcagtccgcgcagccctcatcgcaactgggcccgcgcgcaggccttacataggaagtccttctaaagagctgcctgccagctgcccttccccagatcccgaatatcctcctggccaggtggagcagagaacagttcctcagctggtcatgctgagctcataccctgatggctgctccatgaggtcaagactgggtctcctccctcctcccccttcaccaatgcctggtctcacggggctagttttgacccccacgctatggcatcatcgacctccctcccagctcctggctctcggcctaagaagcctctaggcaagatggctgactggttcaggcagaccctgctgaagaagcccaagaagaggcccaactccccagaaagcacctccagcgatgcttcacagcctacctcacaggacagcccactacccccaagcctcagctcagtcacgtctcccagcctgccacccacacatgcgagtgacagtggcagtagtcgctggagcaaagactatgacgtctgcgtgtgccacagtgaggaagacctggtggccgcccaggacctggtctcctacttggaaggcagcactgccagcctgcgctgcttcctgcaactccgggatgcaaccccaggcggcgctatagtgtccgagctgtgccaggcactgagcagtagtcactgccgggtgctgctcatcacgccgggcttccttcaggacccctggtgcaagtaccagatgctgcaggccctgaccgaggctccaggggccgagggctgcaccatccccctgctgtcgggcctcagcagagctgcctacccacctgagctccgattcatgtactacgtcgatggcaggggccctgatggtggctttcgtcaagtcaaagaagctgtcatgcgttatctgcagacactcagttgacacttgttatatcatgggaccccggaaattggagtgaagctagaaacagaaaacccatgcagggcctcggattcccacaaatgtgacaagaggtatagggagtgagtcgcagcgctttgctcgtgaccctgggatcagagcacccatcaggcttccattactgtgggctccctaagaagaccatggagagcttggggactcccccaggaaggccgtgaagctggggattccccctaggaaagccatgaggaagctggggactccccaagaaggccatgaggaagccagaaattggaggtggtaggaagtggtactgatcaatgatggccagcaggactcatctcctgcctaactggacaggaagcctggcacccacttctgtcttcccctggaactgggcactggcgtacactggtatccctcctaaagaagtgactcacctgactgatcagcaagaagcctagattgcaggcctcaccatggatggtcttcctagttgcctggggaaaccctggaatgggcatcaggagaaagcaacaagaatccagtccttcacactcacactactctgttcctcttcccagagacatcgattcaccccaaagagctgtagggaagatgcagtcagcactgcactgtattttttatttattgcctaggtgccattaaagacacaaacctagaagcctagaggccattctgaatatgggggtggggtggtggagggagcaagtgaagagatgggaatccagggctcagggttcaacgccttcacctgagatcacaagcccatggatgctgtgacatctgggagcttcatcagtggtctggctaaagctgatactttcacagtcaccatcttcacctttggactgggaagaatcaccatttttcttctggcagatgactgtattccgttctccggcttcagactgcagaaggtgctgagggagtctgcgcgggacaaaatcattttcctacacgggaaggtgaatgaggcctctggggatggggatggagaggatgccgttgtgatcctggagaagacgccatttcaggtggaacaggtggctcagctcctgacgggcagccctgagctccaattgcagttctccaatgatatctacagcacctatcacttgttccctccaagacaactgaatgatgtaaagacgaccgtggtttaccctgccacagagaaacacctgcagaagtacctgcgccaggacctccgcctgatccgagagacgggagatgactacaggaatattactttaccccacctggagtcccagagcctcagcatccagtgggtgtataacattctcgacaagaaggctgaagcggaccggattgttttcgagaacccagatccctctgatggttttgtcctcatccctgacctcaagtggaaccaacagcagctcgatgacttgtacttgatcgccatctgccatcgccggggcatcagatccctacgcgaccttactccggagcacttgccgctgctcaggaacatcctccaccaggggcaggaggccatcctgcagcgctaccggatgaagggagaccatctgcgagtatacctgcactacctgccctcctactaccacctgcatgtgcacttcaccgccctgggcttcgaggcccccggctcaggcgtggagcgggcccacctgctggctgaggtgatcgagaacttggagtgtgaccctaggcactaccagcagcgcacgctcaccttcgccctcagggctgacgaccccctgctcaagctcttgcaggaggctcagcaaagctgaattaactcaggcagaagagcacagatgtgtgggattgggggaggagtggggacaagattttttatctccaagtgaattttgtagcggggaacaatcacttatgttactttttcattattaaagt

SEQ ID NO: 736548 - DNA, 2800 bp, Homo sapiens
tgcgcgctgctcttccccgcggagcccgcgcagtccgcgcagccctcatcgcaactgggcccgcgcgcaggccttacataggaagtccttctaaagagctgcctgccagctgcccttccccagatcccgaatatcctcctggccaggtggagcagagaacagttcctcagctggtcatgctgagctcataccctgatggctgctccatgaggtcaagactgggtctcctccctcctcccccttcaccaatgcctggtctcacggggctagttttgacccccacgctatggcatcatcgacctccctcccagctcctggctctcggcctaagaagcctctaggcaagatggctgactggttcaggcagaccctgctgaagaagcccaagaagaggcccaactccccagaaagcacctccagcgatgcttcacagcctacctcacaggacagcccactacccccaagcctcagctcagtcacgtctcccagcctgccacccacacatgcgagtgacagtggcagtagtcgctggagcaaagactatgacgtctgcgtgtgccacagtgaggaagacctggtggccgcccaggacctggtctcctacttggaaggcagcactgccagcctgcgctgcttcctgcaactccgggatgcaaccccaggcggcgctatagtgtccgagctgtgccaggcactgagcagtagtcactgccgggtgctgctcatcacgccgggcttccttcaggacccctggtgcaagtaccagatgctgcaggccctgaccgaggctccaggggccgagggctgcaccatccccctgctgtcgggcctcagcagagctgcctacccacctgagctccgattcatgtactacgtcgatggcaggggccctgatggtggctttcgtcaagtcaaagaagctgtcatgcgttatctgcagacactcagttgacacttgttatatcatgggaccccggaaattggagtgaagctagaaacagaaaacccatgcagggcctcggattcccacaaatgtgacaagaggtatagggagtgagtcgcagcgctttgctcgtgaccctgggatcagagcacccatcaggcttccattactgtgggctccctaagaagaccatggagagcttggggactcccccaggaaggccgtgaagctggggattccccctaggaaagccatgaggaagctggggactccccaagaaggccatgaggaagccagaaattggaggtggtaggaagtggtactgatcaatgatggccagcaggactcatctcctgcctaactggacaggaagcctggcacccacttctgtcttcccctggaactgggcactggcgtacactggtatccctcctaaagaagtgactcacctgactgatcagcaagaagcctagattgcaggcctcaccatggatggtcttcctagttgcctggggaaaccctggaatgggcatcaggagaaagcaacaagaatccagtccttcacactcacactactctgttcctcttcccagagacatcgattcaccccaaagagctgtagggaagatgcagtcagcactgcactgtattttttatttattgcctaggtgccattaaagacacaaacctagaagcctagaggccattctgaatatgggggtggggtggtggagggagcaagtgaagagatgggaatccagggctcagggttcaacgccttcacctgagatcacaagcccatggatgctgtgacatctgggagcttcatcagtggtctggctaaagctgatactttcacagtcaccatcttcacctttggactgggaagaatcaccatttttcttctggcagatgactgtattccgttctccggcttcagactgcagaaggtgctgagggagtctgcgcgggacaaaatcattttcctacacgggaaggtgaatgaggcctctggggatggggatggagaggatgccgttgtgatcctggagaagacgccatttcaggtggaacaggtggctcagctcctgacgggcagccctgagctccaattgcagttctccaatgatatctacagcacctatcacttgttccctccaagacaactgaatgatgtaaagacgaccgtggtttaccctgccacagagaaacacctgcagaagtacctgcgccaggacctccgcctgatccgagagacgggagatgactacaggaatattactttaccccacctggagtcccagagcctcagcatccagctcgatgacttgtacttgatcgccatctgccatcgccggggcatcagatccctacgcgaccttactccggagcacttgccgctgctcaggaacatcctccaccaggggcaggaggccatcctgcagcgctaccggatgaagggagaccatctgcgagtatacctgcactacctgccctcctactaccacctgcatgtgcacttcaccgccctgggcttcgaggcccccggctcaggcgtggagcgggcccacctgctggctgaggtgatcgagaacttggagtgtgaccctaggcactaccagcagcgcacgctcaccttcgccctcagggctgacgaccccctgctcaagctcttgcaggaggctcagcaaagctgaattaactcaggcagaagagcacagatgtgtgggattgggggaggagtggggacaagattttttatctccaagtgaattttctaaaaatgtattttataccggcttattcctagtattgaataaactagcgggctcactcaaagaagaacaaaaaaaaagc

SEQ ID NO: 736549 - DNA, 1679 bp, Homo sapiens; identical to SEQ ID NO: 125231

SEQ ID NO: 736550 - DNA, 771 bp, Homo sapiens
gtgagttacaaagtcctccggaatgagacggttctggaattcatgactgctctctgtcaaagaactggcttgtcctgtttcacccagacgtgtgagaagcagctaatagggctcattgtccttacaagatacaataacagaacctactccattgatgacattgactggtcagtgaagcccacacacacctttcagaagcgggatggcaccgagatcacctatgtggattactacaagcagcagtatgatattactgtatcggacctgaatcagcccatgcttgttagtctgttaaagaagaagagaaatgacaacagtgaggctcagctcgcccacctgatacctgagctctgctttctaacagggctgactgaccaggcaacatctgatttccagctgatgaaggctgtggctgaaaagacacgtctcagtccttcaggccggcagcagcgcctggccaggcttgtggacaacatccagaggaataccaatgctcgctttgaactagagacctggggactgcattttggaagccagatatctctgactggccggattgtgccttcagaaaaaatattaatgcaagaccacatatgtcaacctgtgtctgctgctgactggtccaaggatattcgaacttgcaagattttaaatgcacagtctttgaatacctggttgattttatgtagcgacagaactgaatatgttgccgagagctttctgaactgcttgagaagagttgcaggttccatgggatttaatgtggactac

SEQ ID NO: 736551 - DNA, 583 bp, Homo sapiens; identical to SEQ ID NO: 53475

SEQ ID NO: 736552 - DNA, 502 bp, Homo sapiens; identical to SEQ ID NO: 53474

SEQ ID NO: 736553 - DNA, 176 bp, Homo sapiens; identical to SEQ ID NO: 53467

SEQ ID NO: 736554 - DNA, 744 bp, Homo sapiens
ctggttattttgacgtgtgtttgtttggcggggggggttttaccttgtttactatggtttttataccatgaaaacgtttttattatttattaattaattaaagctgtcattttcttttcttttgctctactgattctactgtaggcagaaatagtatagtcatgtaaaatatatgttaaaatgtaaattaaatgtattttttaaaatatacacttaattctttgttgctataatgtgttcctcttctaggcaaggataaaagccatcaatacattttttgctaagaatggttatcgattaatggattctagtatctatagtcaccccattcaaactcaagcacagtatgcctccccagtctttatgcagcctgtatataatcctcaccaacagtactcggtctatagtattgtgcctcagtcttggtctccaaatcctacaccttactttgaaacaccactggtaagtgagatccttacaataaaatataataatatttttaatttgagctgaaatttgaagaaatcagttggagtgggagctcatttatgttgacattgatgactttttggcctttattttattttattttttgtatttttcgtagagatggaattttgccatgttgcccaggctggtctcgaactcctgtgctcaggcagtccacccgcctcagcctcccaaaatgctaggattacaagccactatgcccggccataataccgattcgccggtacctgcata

SEQ ID NO: 736555 - DNA, 720 bp, Homo sapiens; identical to SEQ ID NO: 53466

SEQ ID NO: 736556 - DNA, 504 bp, Homo sapiens; identical to SEQ ID NO: 23703

SEQ ID NO: 736557 - DNA, 1040 bp, Homo sapiens
actagttctagatcgcgagcggccgtctttttcttttttaaataaacaggtttgctttggaaaggcttaatgatggaatgttagcatcttcactagggtaaagaagaacaaaaagaatgttgctggaacgtaaaatagtatttaaaagttaatgaacacttctctagttttcttagttatggccttaataattagtctcttggcttaaatgtccactggttttactttgacacagttgaacaacactggggttaagtctctggtatttaggctggcaatatatatattaaccatattttaaaagtaccaattttgtttttacagaaaagataaaactcaaaagagaacagtgtattccttctgaggggcttttataaattattaactataatatatgatggattttttcctaattttttatatttccttacaattttggtggccattaatttaactttaggcttttgggcatatgctagtctgagcttccgaaaagatacatatatgtttcccttttcattagctgaatgaggatattttaagaagttgaaagagaatttattttcaagttgtgagtaaatcctcctttgaaattcacctgattattagataacttaaagtttatttttaaaagctgacaactttttatgaatcttcgagttgacagttcctaaaagcgtaactcagatattaatgggctgtgtattaaatggttttattttcagttttgcagcacagaacactgttgaaatatccatatcaacttgatttttttaacctaattcaggtgtcctttgcatctcttaaatgttgggggtgggggtcagagccagttatccggcttctgttttgtcgattgcttagatttgttcctgttgtcaaaactgttacccccaaaattggtgtgacacatgctcatgcataaaatgttaaaatgagtacatccttgtatttgtatttgttttcaacatcgccaaggtgctatgggaaattaacaaaattagaaaaaaaataaaattattaaaaagcaaaaaaaaaat

SEQ ID NO: 736558 - DNA, 7285 bp, Homo sapiens
gatgtaaaaattgaacctggatgattgatggggcaaaatacatttaatcaatttatacattttatttctgttttacagcatttatggggttaagtggcatgggatttctgtttctgatagtaaatagacgggctcactttgttaccccggctggagtgcggtgtcacgatctcggctcactgtaacctccacctcccaggttcaagcattcctcctgtctcagctctccaagtggctgggactacagtgagaatcagagcgtctactgcacctttcagatgaccgggtgccgtggctcaacacctataatcccagcacttgggatgggaggctaagcaggtagcatctaaaggaactggtttaaatcctaatgccaaagtatggcaagaaattgctcctggaaatactgatgccaccccagtaactcatggaactgaaagctcttggcatgaaatagcagctacatcaggtgctcatcctgagggtaatgcagagctctcagaagatatatgtaaagaatatgaagtaatgtattcttcatcttgtgaaaccacaagaaatactacaggcattgaagaatcaactgatgggatgattttaggaccagaagatctgagttaccaaatatatgatgtttccggagaaagcaattcagcagtttctacagaagacctaaaagaatgtctgaagaaacaattagaattctgtttttcacgagaaaatttgtcaaaggatctttacttgatatctcaaatggatagtgatcagttcatcccaatttggacagttgccaacatggaagaaataaaaaagttgactacagaccctgatctaattcttgaagtgttaagatcttctcccatggtacaagttgatgagaagggtgagaaagtgagaccaagtcataagcgttgtattgtaattcttagagagattcctgaaacaacaccaatagaggaagtgaaaggtttgttcaaaagtgaaaactgccccaaagtgataagctgtgagtttgcacacaatagcaactggtatatcactttccagtcagacacagatgcacaacaggcttttaaatacttaagagaagaagttaaaacatttcagggcaagccaattatggcaaggataaaagccatcaatacattttttgctaagaatggttatcgattaatggattctagtatctatagtcaccccattcaaactcaagcacagtatgcctccccagtctttatgcagcctgtatataatcctcaccaacagtactcggtctatagtattgtgcctcagtcttggtctccaaatcctacaccttactttgaaacaccactggtaagtgagatccttacaataaaatataataatatttttaatttgagctgaaatttgaagaaatcagttggagtgggagctcatttatgttgacattgatgactttttggcctttattttattttattttttgtatttttcgtagagatggaattttgccatgttgcccaggctggtctcgaactcctgtgctcaggcagtccacccgcctcagcctcccaaaatgctaggattacaagccactatgcccggccactttttggcttttaaacagtgatatggatatctaattctccataccaaataaatgcatatgactaagaggtgagctattagagcgcataattttattccataaaatttgctgagtgaattgaaagaagagactggataacttttgcgtgattttaaatgcattttagtgttgcgaaatgtcagaccagacattctttactaagttatgaattgttcataaatccagtggtacttgaagtgaatattgcagaaatgaatcagtaaaatattttaagatatttttggcttgtaaaagataaattcataagctcattaaggttcttgtgaccctcacaccagattttacctttgccattaatattgtttaaacatacatttttttctaggctccctttcccaatggtagttttgtgaatggctttaattcgccaggatcttataaaacaaatgctgctgctatgaatatgggtcgaccattccaaaaaaatcgtgtgaagcctcagtttaggtcatctggtggttcagaacactcaacagagggctctgtatccttgggggatggacagttgaacagatatagttcaagaaactttccagctgaacggcataaccccacagtaactgggcatcaggagcaaacttaccttcagaaggagacttccactttgcaggtggaacagaatggggactatggtaggggcaggagaactctcttcagaggtcgaagacgacgagaagatgacaggatctcaagacctcatccttcaacagctgaatcaaaggctccaacaccaaagtttgacttattagcctcaaattttccacctttacctggaagttcatcaagaatgccaggtgaactcgttttggagaataggatgtctgatgttgttaaaggtgtctacaaagaaaaggataatgaagagttgacaattagttgcccagtgcctgcagatgagcagacagaatgcacttctgcccagcaactcaatatgagtaccagttctccatgtgctgctgagcttactgcattaagcacaactcagcaagaaaaggatctaatagaagattcctctgttcagaaggatggtctcaatcagacaactataccagtttctcctccaagtactacaaagccatcgagggcaagtactgcttcaccatgtaataataacataaatgcagctacagctgtggctctacaggaaccccgaaagttaagttatgctgaagtgtgccagaagccccctaaagagccatcttcagttcttgtgcagccactacgggaacttcgctccaatgtggtgtctcccaccaaaaatgaagacaatggagctcctgagaactccgttgagaaaccacatgagaagccagaagcaagggctagtaaggattattctggcttccgaggcaatataatccccaggggagcagcaggaaaaatcagggaacagagacgccagtttagccatagggctatacctcagggagtgactcgacgtaatggcaaagagcaatatgtgccacccagatcaccaaagtaaaaaacaacaaaactattcaaaaacttcactctcttcccattaaacttgaactgtggctatattgaactgttttggaggggagggggtagccaggaaggaaacaagagaaagtacgtccatttcattatggattttggagttgtgagtgataggatcccaaaattcatctctaatgtggtttttaaatgctggaggattccaatcaatataaatatatatatatatatacacacacatatataaaaagtataatttttctatttttgtttttggttttaatttgcagagatttgctgccaggaatcaattttgagggttcagatttagcttggaagaaaaaaaagaaacatacatccttcagtataggagatgagggaatgagagaaaatattttttgaagaagcatttctgtaaaattagaaattactttttttaatctatttaaagtttggcttgaagaatgccatctctgactatatggccttgtattgcaaagcagatcagtggctggggtgcctgttgtgggtgtgagtgtgtacaagagcgattgaagccaaatctgttgtcatgttagtaaatgatttgaaaactgaatgtaatacttgagtagatttttttttctagtttgaaatttagtctgtctttttgaccttactaatatttcatttaacaagttgtaaaactctgattgtacttagagatgtgactaccaatcagtttgatactcaaggaaagggggttattcaagaaattgaaaatttcatcttggacctcagtgcatcggtcaaatggatttcagaggtttaaacttccctgtgattccccctgaatacccccaaaatgagaaacaaaattttttttcttactccatttgttactctctgttctttgactgcccacccacagaaaagcaaaataaccaactacctactcaattgtgtgtttgtaattgctttgagcagtctagtcaaatcatataaattgttctaaatttcagaattgaacattgaagtattaactcttctgttcacacatttagaattttagctcccaagatggtagggcagactgaccgtacagtaatttatttgtcgttagtgttaaagattaagcatagtaactgactcttaagtgttaaataatgtagaagtaaaaaaattttttttaaaggcttaatttgggaggggggacttatttctgtttacagtgtattaccttccttccctcctcttctccccccacacccaacaaaatacagtttggaattcactgaaacagtaccagcaagtcatgagattttttagtaaagatgagaaagatggttgaagaaaattagtgcataatttctcagtgaataaagttgtagctctcatatactaaatagacaagtttacatgctgttatttagaaaatgactaaaatattaaaaaccgtgttgtgttaatctgttttaagtcataccatgttcagagttctatgtaaggtgggttttatttttcttttaagggatagtttgtaatagtaagaactgtcccatatgttagtaaattacatatgtacaaattgaaactgtaaattgtgaacactggaaagcaccattgtgacatagagtaaacatcttagtaatatattaaagtgaatgtaaatggtggttaaaattacattactgtgaaattcatcttccaactctaagttaagctttggagatacatgttagtggttaactgttaagagctttgaaaacactgcacatatctgtacaagccagaattactatttctttgacttattattagcttggcagttgcttttgatttgattgttttatgacatggtatactactatatttactcagtttgaaactattcatttctacacactatttttaaaaattgcctactaggtgaaacataacaataaaactacctgtgctgaaatttgggggaagtttaggtcctttaaaaaaacatattaatcattgactacatctatgataaaagtgcttattttggtttactaagataatgcagttggtggaaatgataaacgttttaagtgttaacatcctttgaatgcgttggatttcagagaataaacattttgtaaaaatcacttggtaaggattataaacttaattactgcacttaaaatgaaacattactttttttaaacaatgtgtcacaaatgtaggtctgtattacttgtatgcttgtgtgacttactgttagtccagctctaaaaatttaaaggttgtaattgaaatacaagaaaagagccttcttttagaagaaagcaagtatatttttgcttttacttcaaatgttatttaaagtagaaatttaatttgtagatataacctttaaaaattttctcattaagacaatgtttttaatttaatttgcctcattacatctaatagttcccatttgatggcatgtatagggaagagtgagagagtgtgtgtgtgtgtatgtgtgtgtaatatttatatatattcacagtatgtatttagcatttattttattacagcagatttaaagtttgtatctaaataatgcctatgagttgtgtgaagctcttggcttttttccaacgttactttgtaactaatgagggtggatgttcattgtagtttatttatttggttctttagatggaggaatttaaaaaatcaaatttttctcttcacctttatgacttgacatttccttgatctgttggaggctaaaagtaggtataaatgatattgaatgttgggtatagtgatactctgccatagttcttactgcatgaagagaacaagagtcacacaagttcaccactttgcacttcatagagaaggtacatagagacattgcaaaacctgtctccatttgctatcctgataattaaggttttcataatacctagggcctgtctctgagtaattttaattttgccaaatacactgacatttaaaatagtgatccatctaaatttttttcagctgggttttgaggaatataagagctttcaatgataaaggtttgttgtagttgtcttatgtgctgaatttgcagatgatcagatgctgtgcagaattctgatttatttttgtttcctaaaattaagatagcttgaatattatttcacattcctttttcttttttaaataaacaggtttgctttggaaaggcttaatgatggaatgttagcatcttcactagggtaaagaagaacaaaaagaatgttgctggaacgtaaaatagtatttaaaagttaatgaacacttctctagttttcttagttatggccttaataattagtctcttggcttaaatgtccactggttttactttgacacagttgaacaacactggggttaagtctctggtatttaggctggcaatatatatattaaccatattttaaaagtaccaattttgtttttacagaaaagataaaactcaaaagagaacagtgtattccttctgaggggcttttataaattattaactataatatatgatggattttttcctaattttttatatttccttacaattttggtggccattaatttaactttaggcttttgggcatatgctagtctgagcttccgaaaagatacatatatgtttcccttttcattagctgaatgaggatattttaagaagttgaaagagaatttattttcaagttgtgagtaaatcctcctttgaaattcacctgattattagataacttaaagtttatttttaaaagctgacaactttttatgaatcttcgagttgacagttcctaaaagcgtaactcagatattaatgggctgtgtattaaatggttttattttcagttttgcagcacagaacactgttgaaatatccatatcaacttgatttttttaacctaattcaggtgtcctttgcatctcttaaatgttgggggtgggggtcagagccagttatccggcttctgttttgtcgattgcttagatttgttcctgttgtcaaaactgttacccccaaaattggtgtgacacatgctcatgcataaaatgttaaaatgagtacatccttgtatttgtatttgttttcaacatcgccaaggtgctatgggaaattaacaaaattagaaaaaaaataaaattattaaaaagcaaaaaaaaaat

SEQ ID NO: 736559 - DNA, 1797 bp, Homo sapiens
gatgtaaaaattgaacctggatgattgatggggcaaaatacatttaatcaatttatacattttatttctgttttacagcatttatggggttaagtggcatgggatttctgtttctgatagtaaatagacgggctcactttgttaccccggctggagtgcggtgtcacgatctcggctcactgtaacctccacctcccaggttcaagcattcctcctgtctcagctctccaagtggctgggactacagtgagaatcagagcgtctactgcacctttcagatgaccgggtgccgtggctcaacacctataatcccagcacttgggatgggaggctaagcaggtagcatctaaaggaactggtttaaatcctaatgccaaagtatggcaagaaattgctcctggaaatactgatgccaccccagtaactcatggaactgaaagctcttggcatgaaatagcagctacatcaggtgctcatcctgagggtaatgcagagctctcagaagatatatgtaaagaatatgaagtaatgtattcttcatcttgtgaaaccacaagaaatactacaggcattgaagaatcaactgatgggatgattttaggaccagaagatctgagttaccaaatatatgatgtttccggagaaagcaattcagcagtttctacagaagacctaaaagaatgtctgaagaaacaattagaattctgtttttcacgagaaaatttgtcaaaggatctttacttgatatctcaaatggatagtgatcagttcatcccaatttggacagttgccaacatggaagaaataaaaaagttgactacagaccctgatctaattcttgaagtgttaagatcttctcccatggtacaagttgatgagaagggtgagaaagtgagaccaagtcataagcgttgtattgtaattcttagagagattcctgaaacaacaccaatagaggaagtgaaaggtttgttcaaaagtgaaaactgccccaaagtgataagctgtgagtttgcacacaatagcaactggtatatcactttccagtcagacacagatgcacaacaggcttttaaatacttaagagaagaagttaaaacatttcagggcaagccaattatggcaaggataaaagccatcaatacattttttgctaagaatggttatcgattaatggattctagtatctatagtcaccccattcaaactcaagcacagtatgcctccccagtctttatgcagcctgtatataatcctcaccaacagtactcggtctatagtattgtgcctcagtcttggtctccaaatcctacaccttactttgaaacaccactggctccctttcccaatggtagttttgtgaatggctttaattcgccaggatcttataaaacaaatgctgctgctatgaatatgggtcgaccattccaaaaaaatcgtgtgaagcctcagtttaggtcatctggtggttcagaacactcaacagagggctctgtatccttgggggatggacagttgaacagatatagttcaagaaactttccagctgaacggcataaccccacagtaactgggcatcaggagcaaacttaccttcagaaggagacttccactttgcaggtggaacagaatggggactatggtaggggcaggtaagaaaataaagtacctgaaaacctttgataataatgtgatcatcctgaataattgaagaacgtgatcttcataataattaaatgagcatttaattattggtatatggttatattaaataaatacgttattttcagaacatga

SEQ ID NO: 736560 - DNA, 6644 bp, Homo sapiens
gatgtaaaaattgaacctggatgattgatggggcaaaatacatttaatcaatttatacattttatttctgttttacagcatttatggggttaagtggcatgggatttctgtttctgatagtaaatagacgggctcactttgttaccccggctggagtgcggtgtcacgatctcggctcactgtaacctccacctcccaggttcaagcattcctcctgtctcagctctccaagtggctgggactacagtgagaatcagagcgtctactgcacctttcagatgaccgggtgccgtggctcaacacctataatcccagcacttgggatgggaggctaagcaggtagcatctaaaggaactggtttaaatcctaatgccaaagtatggcaagaaattgctcctggaaatactgatgccaccccagtaactcatggaactgaaagctcttggcatgaaatagcagctacatcaggtgctcatcctgagggtaatgcagagctctcagaagatatatgtaaagaatatgaagtaatgtattcttcatcttgtgaaaccacaagaaatactacaggcattgaagaatcaactgatgggatgattttaggaccagaagatctgagttaccaaatatatgatgtttccggagaaagcaattcagcagtttctacagaagacctaaaagaatgtctgaagaaacaattagaattctgtttttcacgagaaaatttgtcaaaggatctttacttgatatctcaaatggatagtgatcagttcatcccaatttggacagttgccaacatggaagaaataaaaaagttgactacagaccctgatctaattcttgaagtgttaagatcttctcccatggtacaagttgatgagaagggtgagaaagtgagaccaagtcataagcgttgtattgtaattcttagagagattcctgaaacaacaccaatagaggaagtgaaaggtttgttcaaaagtgaaaactgccccaaagtgataagctgtgagtttgcacacaatagcaactggtatatcactttccagtcagacacagatgcacaacaggcttttaaatacttaagagaagaagttaaaacatttcagggcaagccaattatggcaaggataaaagccatcaatacattttttgctaagaatggttatcgattaatggattctagtatctatagtcaccccattcaaactcaagcacagtatgcctccccagtctttatgcagcctgtatataatcctcaccaacagtactcggtctatagtattgtgcctcagtcttggtctccaaatcctacaccttactttgaaacaccactggctccctttcccaatggtagttttgtgaatggctttaattcgccaggatcttataaaacaaatgctgctgctatgaatatgggtcgaccattccaaaaaaatcgtgtgaagcctcagtttaggtcatctggtggttcagaacactcaacagagggctctgtatccttgggggatggacagttgaacagatatagttcaagaaactttccagctgaacggcataaccccacagtaactgggcatcaggagcaaacttaccttcagaaggagacttccactttgcaggtggaacagaatggggactatggtaggggcaggagaactctcttcagaggtcgaagacgacgagaagatgacaggatctcaagacctcatccttcaacagctgaatcaaaggctccaacaccaaagtttgacttattagcctcaaattttccacctttacctggaagttcatcaagaatgccaggtgaactcgttttggagaataggatgtctgatgttgttaaaggtgtctacaaagaaaaggataatgaagagttgacaattagttgcccagtgcctgcagatgagcagacagaatgcacttctgcccagcaactcaatatgagtaccagttctccatgtgctgctgagcttactgcattaagcacaactcagcaagaaaaggatctaatagaagattcctctgttcagaaggatggtctcaatcagacaactataccagtttctcctccaagtactacaaagccatcgagggcaagtactgcttcaccatgtaataataacataaatgcagctacagctgtggctctacaggaaccccgaaagttaagttatgctgaagtgtgccagaagccccctaaagagccatcttcagttcttgtgcagccactacgggaacttcgctccaatgtggtgtctcccaccaaaaatgaagacaatggagctcctgagaactccgttgagaaaccacatgagaagccagaagcaagggctagtaaggattattctggcttccgaggcaatataatccccaggggagcagcaggaaaaatcagggaacagagacgccagtttagccatagggctatacctcagggagtgactcgacgtaatggcaaagagcaatatgtgccacccagatcaccaaagtaaaaaacaacaaaactattcaaaaacttcactctcttcccattaaacttgaactgtggctatattgaactgttttggaggggagggggtagccaggaaggaaacaagagaaagtacgtccatttcattatggattttggagttgtgagtgataggatcccaaaattcatctctaatgtggtttttaaatgctggaggattccaatcaatataaatatatatatatatatacacacacatatataaaaagtataatttttctatttttgtttttggttttaatttgcagagatttgctgccaggaatcaattttgagggttcagatttagcttggaagaaaaaaaagaaacatacatccttcagtataggagatgagggaatgagagaaaatattttttgaagaagcatttctgtaaaattagaaattactttttttaatctatttaaagtttggcttgaagaatgccatctctgactatatggccttgtattgcaaagcagatcagtggctggggtgcctgttgtgggtgtgagtgtgtacaagagcgattgaagccaaatctgttgtcatgttagtaaatgatttgaaaactgaatgtaatacttgagtagatttttttttctagtttgaaatttagtctgtctttttgaccttactaatatttcatttaacaagttgtaaaactctgattgtacttagagatgtgactaccaatcagtttgatactcaaggaaagggggttattcaagaaattgaaaatttcatcttggacctcagtgcatcggtcaaatggatttcagaggtttaaacttccctgtgattccccctgaatacccccaaaatgagaaacaaaattttttttcttactccatttgttactctctgttctttgactgcccacccacagaaaagcaaaataaccaactacctactcaattgtgtgtttgtaattgctttgagcagtctagtcaaatcatataaattgttctaaatttcagaattgaacattgaagtattaactcttctgttcacacatttagaattttagctcccaagatggtagggcagactgaccgtacagtaatttatttgtcgttagtgttaaagattaagcatagtaactgactcttaagtgttaaataatgtagaagtaaaaaaattttttttaaaggcttaatttgggaggggggacttatttctgtttacagtgtattaccttccttccctcctcttctccccccacacccaacaaaatacagtttggaattcactgaaacagtaccagcaagtcatgagattttttagtaaagatgagaaagatggttgaagaaaattagtgcataatttctcagtgaataaagttgtagctctcatatactaaatagacaagtttacatgctgttatttagaaaatgactaaaatattaaaaaccgtgttgtgttaatctgttttaagtcataccatgttcagagttctatgtaaggtgggttttatttttcttttaagggatagtttgtaatagtaagaactgtcccatatgttagtaaattacatatgtacaaattgaaactgtaaattgtgaacactggaaagcaccattgtgacatagagtaaacatcttagtaatatattaaagtgaatgtaaatggtggttaaaattacattactgtgaaattcatcttccaactctaagttaagctttggagatacatgttagtggttaactgttaagagctttgaaaacactgcacatatctgtacaagccagaattactatttctttgacttattattagcttggcagttgcttttgatttgattgttttatgacatggtatactactatatttactcagtttgaaactattcatttctacacactatttttaaaaattgcctactaggtgaaacataacaataaaactacctgtgctgaaatttgggggaagtttaggtcctttaaaaaaacatattaatcattgactacatctatgataaaagtgcttattttggtttactaagataatgcagttggtggaaatgataaacgttttaagtgttaacatcctttgaatgcgttggatttcagagaataaacattttgtaaaaatcacttggtaaggattataaacttaattactgcacttaaaatgaaacattactttttttaaacaatgtgtcacaaatgtaggtctgtattacttgtatgcttgtgtgacttactgttagtccagctctaaaaatttaaaggttgtaattgaaatacaagaaaagagccttcttttagaagaaagcaagtatatttttgcttttacttcaaatgttatttaaagtagaaatttaatttgtagatataacctttaaaaattttctcattaagacaatgtttttaatttaatttgcctcattacatctaatagttcccatttgatggcatgtatagggaagagtgagagagtgtgtgtgtgtgtatgtgtgtgtaatatttatatatattcacagtatgtatttagcatttattttattacagcagatttaaagtttgtatctaaataatgcctatgagttgtgtgaagctcttggcttttttccaacgttactttgtaactaatgagggtggatgttcattgtagtttatttatttggttctttagatggaggaatttaaaaaatcaaatttttctcttcacctttatgacttgacatttccttgatctgttggaggctaaaagtaggtataaatgatattgaatgttgggtatagtgatactctgccatagttcttactgcatgaagagaacaagagtcacacaagttcaccactttgcacttcatagagaaggtacatagagacattgcaaaacctgtctccatttgctatcctgataattaaggttttcataatacctagggcctgtctctgagtaattttaattttgccaaatacactgacatttaaaatagtgatccatctaaatttttttcagctgggttttgaggaatataagagctttcaatgataaaggtttgttgtagttgtcttatgtgctgaatttgcagatgatcagatgctgtgcagaattctgatttatttttgtttcctaaaattaagatagcttgaatattatttcacattcctttttcttttttaaataaacaggtttgctttggaaaggcttaatgatggaatgttagcatcttcactagggtaaagaagaacaaaaagaatgttgctggaacgtaaaatagtatttaaaagttaatgaacacttctctagttttcttagttatggccttaataattagtctcttggcttaaatgtccactggttttactttgacacagttgaacaacactggggttaagtctctggtatttaggctggcaatatatatattaaccatattttaaaagtaccaattttgtttttacagaaaagataaaactcaaaagagaacagtgtattccttctgaggggcttttataaattattaactataatatatgatggattttttcctaattttttatatttccttacaattttggtggccattaatttaactttaggcttttgggcatatgctagtctgagcttccgaaaagatacatatatgtttcccttttcattagctgaatgaggatattttaagaagttgaaagagaatttattttcaagttgtgagtaaatcctcctttgaaattcacctgattattagataacttaaagtttatttttaaaagctgacaactttttatgaatcttcgagttgacagttcctaaaagcgtaactcagatattaatgggctgtgtattaaatggttttattttcagttttgcagcacagaacactgttgaaatatccatatcaacttgatttttttaacctaattcaggtgtcctttgcatctcttaaatgttgggggtgggggtcagagccagttatccggcttctgttttgtcgattgcttagatttgttcctgttgtcaaaactgttacccccaaaattggtgtgacacatgctcatgcataaaatgttaaaatgagtacatccttgtatttgtatttgttttcaacatcgccaaggtgctatgggaaattaacaaaattagaaaaaaaataaaattattaaaaagcaaaaaaaaaat

SEQ ID NO: 736561 - DNA, 6428 bp, Homo sapiens
gatgtaaaaattgaacctggatgattgatggggcaaaatacatttaatcaatttatacattttatttctgttttacagcatttatggggttaagtggcatgggatttctgtttctgatagtaaatagacgggctcactttgttaccccggctggagtgcggtgtcacgatctcggctcactgtaacctccacctcccaggttcaagcattcctcctgtctcagctctccaagtggctgggactacagtgagaatcagagcgtctactgcacctttcagatgaccgggtgccgtggctcaacacctataatcccagcacttgggatgggaggctaagcaggtagcatctaaaggaactggtttaaatcctaatgccaaagtatggcaagaaattgctcctggaaatactgatgccaccccagtaactcatggaactgaaagctcttggcatgaaatagcagctacatcaggtgctcatcctgagggtaatgcagagctctcagaagatatatgtaaagaatatgaagtaatgtattcttcatcttgtgaaaccacaagaaatactacaggcattgaagaatcaactgatgggatgattttaggaccagaagatctgagttaccaaatatatgatgtttccggagaaagcaattcagcagtttctacagaagacctaaaagaatgtctgaagaaacaattagaattctgtttttcacgagaaaatttgtcaaaggatctttacttgatatctcaaatggatagtgatcagttcatcccaatttggacagttgccaacatggaagaaataaaaaagttgactacagaccctgatctaattcttgaagtgttaagatcttctcccatggtacaagttgatgagaagggtgagaaagtgagaccaagtcataagcgttgtattgtaattcttagagagattcctgaaacaacaccaatagaggaagtgaaaggtttgttcaaaagtgaaaactgccccaaagtgataagctgtgagtttgcacacaatagcaactggtatatcactttccagtcagacacagatgcacaacaggcttttaaatacttaagagaagaagttaaaacatttcagggcaagccaattatggcaaggataaaagccatcaatacattttttgctaagaatggttatcgattaatggattctagtatctatagtcaccccattcaaactcaagcacagtatgcctccccagtctttatgcagcctgtatataatcctcaccaacagtactcggtctatagtattgtgcctcagtcttggtctccaaatcctacaccttactttgaaacaccactggctccctttcccaatggtagttttgtgaatggctttaattcgccaggatcttataaaacaaatgctgctgctatgaatatgggtcgaccattccaaaaaaatcgtgtgaagcctcagtttaggtcatctggtggttcagaacactcaacagagggctctgtatccttgggggatggacagttgaacagatatagttcaagaaactttccagctgaacggcataaccccacagtaactgggcatcaggagcaaacttaccttcagaaggagacttccactttgcaggtggaacagaatggggactatggtaggggcaggagaactctcttcagaggtcgaagacgacgagaagatgacaggatctcaagacctcatccttcaacagctgaatcaaaggctccaacaccaaagtttgacttattagcctcaaattttccacctttacctggaagttcatcaagaatgccaggtgaactcgttttggagaataggatgtctgatgttgttaaaggtgtctacaaagaaaaggataatgaagagttgacaattagttgcccagtgcctgcagatgagcagacagaatgcacttctgcccagcaactcaatatgagtaccagttctccatgtgctgctgagcttactgcattaagcacaactcagcaagaaaaggatctaatagaagattcctctgttcagaaggatggtctcaatcagacaactataccagtttctcctccaagtactacaaagccatcgagggcaagtactgcttcaccatgtaataataacataaatgcagctacagctgtggctctacaggaaccccgaaagttaagttatgctgaagtgtgccagaagccccctaaagagccatcttcagttcttgtgcagccactacgggaacttcgctccaatgtggtgtctcccaccaaaaatgaagacaatggagctcctgagaactccgttgagaaaccacatgagaagccagaagcaagggctagtaaggattattctggcttccgaggcaatataatccccaggggagcagcaggaaaaatcagggaacagagacgccagtttagccatagggctatacctcagggagtgactcgacgtaatggcaaagagcaatatgtgccacccagatcaccaaagtaaaaaacaacaaaactattcaaaaacttcactctcttcccattaaacttgaactgtggctatattgaactgttttggaggggagggggtagccaggaaggaaacaagagaaagtacgtccatttcattatggattttggagttgtgagtgataggatcccaaaattcatctctaatgtggtttttaaatgctggaggattccaatcaatataaatatatatatatatatacacacacatatataaaaagtataatttttctatttttgtttttggttttaatttgcagagatttgctgccaggaatcaattttgagggttcagatttagcttggaagaaaaaaaagaaacatacatccttcagtataggagatgagggaatgagagaaaatattttttgaagaagcatttctgtaaaattagaaattactttttttaatctatttaaagtttggcttgaagaatgccatctctgactatatggccttgtattgcaaagcagatcagtggctggggtgcctgttgtgggtgtgagtgtgtacaagagcgattgaagccaaatctgttgtcatgttagtaaatgatttgaaaactgaatgtaatacttgagtagatttttttttctagtttgaaatttagtctgtctttttgaccttactaatatttcatttaacaagttgtaaaactctgattgtacttagagatgtgactaccaatcagtttgatactcaaggaaagggggttattcaagaaattgaaaatttcatcttggacctcagtgcatcggtcaaatggatttcagaggtttaaacttccctgtgattccccctgaatacccccaaaatgagaaacaaaattttttttcttactccatttgttactctctgttctttgactgcccacccacagaaaagcaaaataaccaactacctactcaattgtgtgtttgtaattgctttgagcagtctagtcaaatcatataaattgttctaaatttcagaattgaacattgaagtattaactcttctgttcacacatttagaattttagctcccaagatggtagggcagactgaccgtacagtaatttatttgtcgttagtgttaaagattaagcatagtaactgactcttaagtgttaaataatgtagaagtaaaaaaattttttttaaaggcttaatttgggaggggggacttatttctgtttacagtgtattaccttccttccctcctcttctccccccacacccaacaaaatacagtttggaattcactgaaacagtaccagcaagtcatgagattttttagtaaagatgagaaagatggttgaagaaaattagtgcataatttctcagtgaataaagttgtagctctcatatactaaatagacaagtttacatgctgttatttagaaaatgactaaaatattaaaaaccgtgttgtgttaatctgttttaagtcataccatgttcagagttctatgtaaggtgggttttatttttcttttaagggatagtttgtaatagtaagaactgtcccatatgttagtaaattacatatgtacaaattgaaactgtaaattgtgaacactggaaagcaccattgtgacatagagtaaacatcttagtaatatattaaagtgaatgtaaatggtggttaaaattacattactgtgaaattcatcttccaactctaagttaagctttggagatacatgttagtggttaactgttaagagctttgaaaacactgcacatatctgtacaagccagaattactatttctttgacttattattagcttggcagttgcttttgatttgattgttttatgacatggtatactactatatttactcagtttgaaactattcatttctacacactatttttaaaaattgcctactaggtgaaacataacaataaaactacctgtgctgaaatttgggggaagtttaggtcctttaaaaaaacatattaatcattgactacatctatgataaaagtgcttattttggtttactaagataatgcagttggtggaaatgataaacgttttaagtgttaacatcctttgaatgcgttggatttcagagaataaacattttgtaaaaatcacttggtaaggattataaacttaattactgcacttaaaatgaaacattactttttttaaacaatgtgtcacaaatgtaggtctgtattacttgtatgcttgtgtgacttactgttagtccagctctaaaaatttaaaggttgtaattgaaatacaagaaaagagccttcttttagaagaaagcaagtatatttttgcttttacttcaaatgttatttaaagtagaaatttaatttgtagatataacctttaaaaattttctcattaagacaatgtttttaatttaatttgcctcattacatctaatagttcccatttgatggcatgtatagggaagagtgagagagtgtgtgtgtgtgtatgtgtgtgtaatatttatatatattcacagtatgtatttagcatttattttattacagcagatttaaagtttgtatctaaataatgcctatgagttgtgtgaagctcttggcttttttccaacgttactttgtaactaatgagggtggatgttcattgtagtttatttatttggttctttagatggaggaatttaaaaaatcaaatttttctcttcacctttatgacttgacatttccttgatctgttggaggctaaaagtaggtataaatgatattgaatgttgggtatagtgatactctgccatagttcttactgcatgaagagaacaagagtcacacaagttcaccactttgcacttcatagagaaggtacatagagacattgcaaaacctgtctccatttgctatcctgataattaaggttttcataatacctagggcctgtctctgagtaattttaattttgccaaatacactgacatttaaaatagtgatccatctaaatttttttcagctgggttttgaggaatataagagctttcaatgataaaggtttgttgtagttgtcttatgtgctgaatttgcagatgatcagatgctgtgcagaattctgatttatttttgtttcctaaaattaagatagcttgaatattatttcacattcctttttcttttttaaataaacaggtttgctttggaaaggcttaatgatggaatgttagcatcttcactagggtaaagaagaacaaaaagaatgttgctggaacgtaaaatagtatttaaaagttaatgaacacttctctagttttcttagttatggccttaataattagtctcttggcttaaatgtccactggttttactttgacacagttgaacaacactggggttaagtctctggtatttaggctggcaatatatatattaaccatattttaaaagtaccaattttgtttttacagaaaagataaaactcaaaagagaacagtgtattccttctgaggggcttttataaattattaactataatatatgatggattttttcctaattttttatatttccttacaattttggtggccattaatttaactttaggcttttgggcatatgctagtctgagcttccgaaaagatacatatatgtttcccttttcattagctgaatgaggatattttaagaagttgaaagagaatttattttcaagttgtgagtaaatcctcctttgaaattcacctgattattagataacttaaagtttatttttaaaagctgacaactttttatgaatcttcgagttgacagttcctaaaagcgtaactcagatattaatgggctgtgtattaaatggttttattttcagttttgcagcacagaacactgttgatatggatattataaccatctgttatctaggctgtccatttaccggttggacactgatactctgtcaaattccttt

SEQ ID NO: 736562 - DNA, 2279 bp, Homo sapiens
gatgtaaaaattgaacctggatgattgatggggcaaaatacatttaatcaatttatacattttatttctgttttacagcatttatggggttaagtggcatgggatttctgtttctgatagtaaatagacgggctcactttgttaccccggctggagtgcggtgtcacgatctcggctcactgtaacctccacctcccaggttcaagcattcctcctgtctcagctctccaagtggctgggactacagtgagaatcagagcgtctactgcacctttcagatgaccgggtgccgtggctcaacacctataatcccagcacttgggatgggaggctaagcaggtagcatctaaaggaactggtttaaatcctaatgccaaagtatggcaagaaattgctcctggaaatactgatgccaccccagtaactcatggaactgaaagctcttggcatgaaatagcagctacatcaggtgctcatcctgagggtaatgcagagctctcagaagatatatgtaaagaatatgaagtaatgtattcttcatcttgtgaaaccacaagaaatactacaggcattgaagaatcaactgatgggatgattttaggaccagaagatctgagttaccaaatatatgatgtttccggagaaagcaattcagcagtttctacagaagacctaaaagaatgtctgaagaaacaattagaattctgtttttcacgagaaaatttgtcaaaggatctttacttgatatctcaaatggatagtgatcagttcatcccaatttggacagttgccaacatggaagaaataaaaaagttgactacagaccctgatctaattcttgaagtgttaagatcttctcccatggtacaagttgatgagaagggtgagaaagtgagaccaagtcataagcgttgtattgtaattcttagagagattcctgaaacaacaccaatagaggaagtgaaaggtttgttcaaaagtgaaaactgccccaaagtgataagctgtgagtttgcacacaatagcaactggtatatcactttccagtcagacacagatgcacaacaggcttttaaatacttaagagaagaagttaaaacatttcagggcaagccaattatggcaaggataaaagccatcaatacattttttgctaagaatggttatcgattaatggattctagtatctatagtcaccccattcaaactcaagcacagtatgcctccccagtctttatgcagcctgtatataatcctcaccaacagtactcggtctatagtattgtgcctcagtcttggtctccaaatcctacaccttactttgaaacaccactggctccctttcccaatggtagttttgtgaatggctttaattcgccaggatcttataaaacaaatgctgctgctatgaatatgggtcgaccattccaaaaaaatcgtgtgaagcctcagtttaggtcatctggtggttcagaacactcaacagagggctctgtatccttgggggatggacagttgaacagatatagttcaagaaactttccagctgaacggcataaccccacagtaactgggcatcaggagcaaacttaccttcagaaggagacttccactttgcaggtggaacagaatggggactatggtaggggcaggagaactctcttcagaggtcgaagacgacgagaagatgacaggatctcaagacctcatccttcaacagctgaatcaaaggctccaacaccaaagtttgacttattagcctcaaattttccacctttacctggaagttcatcaagaatgccaggtgaactcgttttggagaataggatgtctgatgttgttaaaggtgtctacaaagaaaaggataatgaagagttgacaattagttgcccagtgcctgcagatgagcagacagaatgcacttctgcccagcaactcaatatgagtaccagttctccatgtgctgctgagcttactgcattaagcacaactcagcaagaaaaggatctaatagaagattcctctgttcagaaggatggtctcaatcagacaactataccagtttctcctccaagtactacaaagccatcgagggcaagtactgcttcaccatgtaataataacataaatgcagctacagctgtggctctacaggcatttaggtcgctcccatcattataaacaacgctgacatgaacatccttcagttaaattccttacgtgaaattattgtataataaataaagattgtaccagtgtactctaagcagtatatatga

SEQ ID NO: 736563 - DNA, 1651 bp, Homo sapiens
gatgtaaaaattgaacctggatgattgatggggcaaaatacatttaatcaatttatacattttatttctgttttacagcatttatggggttaagtggcatgggatttctgtttctgatagtaaatagacgggctcactttgttaccccggctggagtgcggtgtcacgatctcggctcactgtaacctccacctcccaggttcaagcattcctcctgtctcagctctccaagtggctgggactacagtgagaatcagagcgtctactgcacctttcagatgaccgggtgccgtggctcaacacctataatcccagcacttgggatgggaggctaagcaggtagcatctaaaggaactggtttaaatcctaatgccaaagtatggcaagaaattgctcctggaaatactgatgccaccccagtaactcatggaactgaaagctcttggcatgaaatagcagctacatcaggtgctcatcctgagggtaatgcagagctctcagaagatatatgtaaagaatatgaagtaatgtattcttcatcttgtgaaaccacaagaaatactacaggcattgaagaatcaactgatgggatgattttaggaccagaagatctgagttaccaaatatatgatgtttccggagaaagcaattcagcagtttctacagaagacctaaaagaatgtctgaagaaacaattagaattctgtttttcacgagaaaatttgtcaaaggatctttacttgatatctcaaatggatagtgatcagttcatcccaatttggacagttgccaacatggaagaaataaaaaagttgactacagaccctgatctaattcttgaagtgttaagatcttctcccatggtacaagttgatgagaagggtgagaaagtgagaccaagtcataagcgttgtattgtaattcttagagagattcctgaaacaacaccaatagaggaagtgaaaggtttgttcaaaagtgaaaactgccccaaagtgataagctgtgagtttgcacacaatagcaactggtatatcactttccagtcagacacagatgcacaacaggcttttaaatacttaagagaagaagttaaaacatttcagggcaagccaattatggcaaggataaaagccatcaatacattttttgctaagaatggttatcgattaatggattctagtatctatagtcaccccattcaaactcaagcacagtatgcctccccagtctttatgcagcctgtatataatcctcaccaacagtactcggtctatagtattgtgcctcagtcttggtctccaaatcctacaccttactttgaaacaccactggctccctttcccaatggtagttttgtgaatggctttaattcgccaggatcttataaaacaaatgctgctgctatgaatatgggtcgaccattccaaaaaaatcgtgtgaagcctcagtttaggtcatctggtggttcagaacactcaacagagggctctgtatccttgggggatggacagttgaacagatatagttcaagaaactttccagctgaacggcataaccccacagtaactgggcatcaggagcttactccccaagggttttccaattacacgagaccgcacggtaggtaccggactttttacaaacagt

SEQ ID NO: 736564 - DNA, 1938 bp, Homo sapiens
gatgtaaaaattgaacctggatgattgatggggcaaaatacatttaatcaatttatacattttatttctgttttacagcatttatggggttaagtggcatgggatttctgtttctgatagtaaatagacgggctcactttgttaccccggctggagtgcggtgtcacgatctcggctcactgtaacctccacctcccaggttcaagcattcctcctgtctcagctctccaagtggctgggactacagtgagaatcagagcgtctactgcacctttcagatgaccgggtgccgtggctcaacacctataatcccagcacttgggatgggaggctaagcaggtagcatctaaaggaactggtttaaatcctaatgccaaagtatggcaagaaattgctcctggaaatactgatgccaccccagtaactcatggaactgaaagctcttggcatgaaatagcagctacatcaggtgctcatcctgagggtaatgcagagctctcagaagatatatgtaaagaatatgaagtaatgtattcttcatcttgtgaaaccacaagaaatactacaggcattgaagaatcaactgatgggatgattttaggaccagaagatctgagttaccaaatatatgatgtttccggagaaagcaattcagcagtttctacagaagacctaaaagaatgtctgaagaaacaattagaattctgtttttcacgagaaaatttgtcaaaggatctttacttgatatctcaaatggatagtgatcagttcatcccaatttggacagttgccaacatggaagaaataaaaaagttgactacagaccctgatctaattcttgaagtgttaagatcttctcccatggtacaagttgatgagaagggtgagaaagtgagaccaagtcataagcgttgtattgtaattcttagagagattcctgaaacaacaccaatagaggaagtgaaaggtttgttcaaaagtgaaaactgccccaaagtgataagctgtgagtttgcacacaatagcaactggtatatcactttccagtcagacacagatgcacaacaggcttttaaatacttaagagaagaagttaaaacatttcagggcaagccaattatgagacggagttttgctgtgtcatccaggttggtctcttaactcctgagggcaagcgatccccccactaaggcctcccaaagtgttgggactatagacgtgagccactgcgcccagcatttgtgatgagtattttccatggatacagaatgcagggatgacagctaaaattattttccattcttttaagataccattctggactcttgtttctgatgagatgttcaccatcattcacatggttcttcccctgtatatgatgtgtcctttttctttgcctgctgtcaagatgttttatttttggtttccagtaggttggctatggtgtgtctagtatgcttttacttattatacttgggaaatactaaacttcttggctctgtatgttgatattctttactgcatttggggaatttccaaatacttgccaaaaattttttctgccctctcttctcctttctttttttggtactccaatttcatatgttggactgattgatgtcactgagattctgttcatttttcttcaacctatttttgttgttgttgttgttctccagattggatcatttctgtggatttgggttcatcttcaagttcactgaacttttcttttgctgtccccaatgtgataggactgtccagtgaatattttagatgctgtattctagagtttccatttttcaaaatatttcttctctctctgctgtgatttccccttaatttcaatttattagaaacataaatgttatccatgaatatatgtacttgtaagagctgtattaaaactttgtctgcagtctgacatctgggtcatct

SEQ ID NO: 736565 - DNA, 815 bp, Homo sapiens
  misc_feature (796)..(796): n is a, c, g, or t
gatgtaaaaattgaacctggatgattgatggggcaaaatacatttaatcaatttatacattttatttctgttttacagcatttatggggttaagtggcatgggatttctgtttctgatagtaaatagacgggctcactttgttaccccggctggagtgcggtgtcacgatctcggctcactgtaacctccacctcccaggttcaagcattcctcctgtctcagctctccaagtggctgggactacagtgagaatcagagcgtctactgcacctttcagatgaccgggtgccgtggctcaacacctataatcccagcacttgggatgggaggctaagcaggtagcatctaaaggaactggtttaaatcctaatgccaaagtatggcaagaaattgctcctggaaatactgatgccaccccagtaactcatggaactgaaagctcttggcatgaaatagcagctacatcaggtgctcatcctgagggtaatgcagagctctcagaagatatatgtaaagaatatgaagtaatgtattcttcatcttgtgaaaccacaagaaatactacaggcattgaagaatcaactgatgggatgattttaggaccagaagatctgagttaccaaatatatgatgtttccggagaaagcaattcagcagtttctacagaagacctaaaagaatgtctgaagaaacaattagaattctgtttttcacgagaaaatttgtcaaaggatctttacttgatatctcaaatggatagtgatcagttcatcccaatttggacaggccaccttnagaaatggggatcctcaga

SEQ ID NO: 736566 - DNA, 1227 bp, Homo sapiens
tgaatgtgtgatcaatgagcaagaactgaaaagtctctgttctaggtaggatcgagaacttctttttttctaattccacacagacacatcttcggcctctgaggatgagggctctctgagacgccaagctgcgctctctgctgccttgcaacagagcttacagaatgctgagtcctggatcaaccgttcaattcagggatcgtccacttcttcatccgcatcttctacgctgtcccacggagaggtcaaaggaaccagtgggtctctagctgatgtatttgccaatactcgaataggtaggagctggatctacccaagaagcccaaattacattccatttggctcccagtatccaggaaatagtttatggtttgtgttaggtttttcagtatggcctgaagccatagctatttccataagcaatgctcaagctgcaagatataacaccagtctcagtgtggagttatcccagctgaagaatattcgatctggatttttgttaacaagatgtctcatccaaccgtatatttttcattgcttctactactctgtgaaaagttactggttcagttactcacagaaaccattttatccacattattgctttttggatgtttgttgtaacaggagtaattcatgatcctaatagaaaaattcaaaaatataggtaaaagaaaagtaaaataacctataatcctacctcccatgggtaatactttagtattattactgtagtgtatattcttctagattttacttacatatgtaaggttttggttttgattttacaaaaatgaactgtcctaaacataatgttaataacctgcttttcttagcagtatgtgatgaacatcttttacatcattatgttacactattatttttatggtttcaatatacactattgtgtgactctctgccctggtttatttggccattcccctattaaatagtgtccaattttttgctattataaaaattattggattgaacatgcttgaacacacaactttgtacatttgtctgattatttccttagcgtatattcctataagtttgaattgctggaccaaataaaaatgtctgttttaatgctttttgttaccacattatcctacagaaaggtataccggaatatactcatgttagtatatttaaaattttaaaaactattcaactaataattacagacttaaggggcatagagaccttacccccaaatctatt

SEQ ID NO: 736567 - DNA, 1589 bp, Homo sapiens
aaactgattcagcagtacagaaagaacttagaaaccagacacctgctccatctgcagctcaaacttctgctccctctaagtaccaccgaactcgatctgggggagccagggatgaacgatatcgatcagatatccacacagaagcagttcaggctgcactggcaaagcataaagaacagaagatggctttgcccatgccaaccaaaaggcgatccacatttgttcagtctcctgcagatgcctgcacacctcctgacacatcttcggcctctgaggatgagggctctctgagacgccaagctgcgctctctgctgccttgcaacagagcttacagaatgctgagtcctggatcaaccgttcaattcagggatcgtccacttcttcatccgcatcttctacgctgtcccacggagaggtcaaaggaaccagtgggtctctagctgatgtatttgccaatactcgaatagagaatttctctgctcctcctgatgtcactacaactacctcttcctcctcatcatcttcctcaattcgcccagcaaacattgacctgcccccctcggggatagttaaaggcatgcacaaaggatccaacaggtccagccttatggatacagctgatggtgttcctgtcagtagcagagtatctacaaaaatccagcagcttctgaacactctgaaacgacccaaaaggcctcccttaaaggaattttttgtggatgactctgaagaaattgtggaagtacctcagccagaccccaaccagcccaagccggagggacggcagatgacccctgtgaaaggagagcctttaggagtcatctgtaactggcctcctgctcttgaatctgccctgcagcgctggggtaccactcaagcaaaatgctcctgtctgactgcactggacatgacagggaaaccagtttacactcttacatatggaaagttgtggagcagaagtttaaagttggcctacacacttcttaataaactggggaccaaaaatgaacctgtgttaaaacctggagacagggtagccctggtttaccccaacaatgatccagtcatgtttatggtggctttctatggatgcctcctggcagaagtgattccagtgcctatagaggtacctcttaccagaaaggatgctggaggtcagcagattggcttcttgctaggaagctgtggtattgccttagctcttaccagtgaagtttgtctaaaaggactgccaaaaacccagaatggagaaattgtacagtttaaaggttggccccggctcaaatgggttgtaacagattccaagtacctttcaaagccaccgaaagactggcagccacacatctcacctgctgggacagaaccggcatacattgaggtaagtcctaagatgtaaaatatgctttcaggcttttccttgggctttgcttgccacctttcaaaatataaaactgaatttttgcaacgttaatgttagaagatcctcctgctttgtgagatttccatcttttggcttgtaaaatgccttgtagtggatcttctatcctaattattttgatcataagtatacattcaagagaatgacagc

SEQ ID NO: 736568 - DNA, 1488 bp, Homo sapiens
aaactgattcagcagtacagaaagaacttagaaaccagacacctgctccatctgcagctcaaacttctgctccctctaagtaccaccgaactcgatctgggggagccagggatgaacgatatcgatcagatatccacacagaagcagttcaggctgcactggcaaagcataaagaacagaagatggctttgcccatgccaaccaaaaggcgatccacatttgttcagtctcctgcagatgcctgcacacctcctgacacatcttcggcctctgaggatgagggctctctgagacgccaagctgcgctctctgctgccttgcaacagagcttacagaatgctgagtcctggatcaaccgttcaattcagggatcgtccacttcttcatccgcatcttctacgctgtcccacggagaggtcaaaggaaccagtgggtctctagctgatgtatttgccaatactcgaatagagaatttctctgctcctcctgatgtcactacaactacctcttcctcctcatcatcttcctcaattcgcccagcaaacattgacctgcccccctcggggatagttaaaggcatgcacaaaggatccaacaggtccagccttatggatacagctgatggtgttcctgtcagtagcagagtatctacaaaaatccagcagcttctgaacactctgaaacgacccaaaaggcctcccttaaaggaattttttgtggatgactctgaagaaattgtggaagtacctcagccagaccccaaccagcccaagccggagggacggcagatgacccctgtgaaaggagagcctttaggagtcatctgtaactggcctcctgctcttgaatctgccctgcagcgctggggtaccactcaagcaaaatgctcctgtctgactgcactggacatgacagggaaaccagtttacactcttacatatggaaagttgtggagcagaagtttaaagttggcctacacacttcttaataaactggggaccaaaaatgaacctgtgttaaaacctggagacagggtagccctggtttaccccaacaatgatccagtcatgtttatggtggctttctatggatgcctcctggcagaagtgattccagtgcctatagaggtacctcttaccagaaaggatgctggaggtcagcagattggcttcttgctaggaagctgtggtattgccttagctcttaccagtgaagtttgtctaaaaggactgccaaaaacccagaatggagaaattgtacagtttaaaggttggccccggctcaaatgggttgtaacagattccaagtacctttcaaagccaccgaaagactggcagccacacatctcacctgctgggacagaaccggcatacattgagtataaaacaagcaaagaagggagtgtaatgggagttacagtatcccggcttgcaatgttgtctcactgccaagctctgtcgcaggcctgcaattattctgaaggtcaga

SEQ ID NO: 736569 - DNA, 1360 bp, Homo sapiens
cggcgggaggcgcggggcggaacagatcgcagacctgggggttcgcagagcgtgagtctgatcccccagacccaattctaccgcacccggctctgcaaggccaggggagggccgcctccacccatacaagtcccgggtttccctcccgccccggggagggcggcgattccacccccagggctgcgggaggcctggagggtcttccggggctagctgtgcgcgcgcccaccttccttgggagccgaggggtcagccgagtggtgctggggcaggaggcttgctcctcccctaaaccaggcggagtgctttgtctcttcagctctgcctcctgtcagcactaactgcattattctgcccagtgtagtcggccggttccttattatctgcgtgaacttagccatttacttaacctctctgtttcagcgtattcataccccgtgcccaccccatcacctcatgatgcccccgcctctttcgctctgctccagtccgtctggcctcgctgttgctggagaggccaggtcctgcctcagtgcttttggcttggctgtttcgtttgccacggatgtctttctttccccagatatcaacatggcttgctggtcattcgcttcaggtcttcaagtcttgggtcaaatggtggcttctcagtgaagtcttatttgaccacactaaaaattgcaccatctcacccccattgtccttttcttgctcgattttgtttttaccccatagcacttaacaccttacaacaagctatatattttgcttatttcagtcattcatttaataactattcgcacctatttgtgtgccaggctatgtgtgcccccactgcatgggggcaaacatctctgcccttgtggagcttccattctaaggggggagataataaacacatttataagtaagagagtatgtcagataagtgtatcatctcctgtcacagtgagttaaaatctggtgtttaatctccatgattagactgagcttcctaaaactggagtggtagctgattttcacctccttgtccctgatatcttgagggagatcaggatctctcaggcccttcctgctcaaaacataggacacacttgacttttctgatatcctttcagcgccagtggggagatgttgaagttcaaatatggagcgcggaatcctttggatgctggtgctgctgaacccattgccagccgggcctccaggctgaatctgttcttccaggtaacagcctaccctgccaactttgctcacctgtgtgtgtccttggaatctccttgtcactcacctttgcttttatttatttgtttatttatttagagtctcagtcctgggcgacaagagcgagactctctca

SEQ ID NO: 736570 - DNA, 3298 bp, Homo sapiens
  misc_feature (3298)..(3298): n is a, c, g, or t
tgaatgccaaactcccgattgggaccccagattacatggctcctgaagtgctgactgtgatgaacggggatggaaaaggcacctacggcctggactgtgactggtggtcagtgggcgtgattgcctatgagatgatttatgggagatcccccttcgcagagggaacctctgccagaaccttcaataacattatgaatttccagcggtttttgaaatttccagatgaccccaaagtgagcagtgactttcttgatctgattcaaagcttgttgtgcggccagaaagagagactgaagtttgaaggtctttgctgccatcctttcttctctaaaattgactggaacaacattcgtaactctcctccccccttcgttcccaccctcaagtctgacgatgacacctccaattttgatgaaccagagaagaattcgtgggtttcatcctctccgtgccagctgagcccctcaggcttctcgggtgaagaactgccgtttgtggggttttcgtacagcaaggcactggggattcttggtagatctgagtctgttgtgtcgggtctggactcccctgccaagactagctccatggaaaagaaacttctcatcaaaagcaaagagctacaagactctcaggacaagtgtcacaagatggagcaggaaatgacccggttacatcggagagtgtcagaggtggaggctgtgcttagtcagaaggaggtggagctgaaggcctctgagactcagagatccctcctggagcaggaccttgctacctacatcacagaatgcagtagcttaaagcgaagtttggagcaagcacctccctgcagtcatctctttgcactttgttactctttcaaagcattcacaaacttttgtacctagctctagcctgtaccagttagttcatcaaaggaaaccaaccgggatgctaactacaacatggttagaatcctaattagctactttaagatcctaggattggttggtttttcttttttttttctctttgtttctttccttttttttttttttttttaagacaacagaattcttaatagatttgaatagcgacgtatttcccgtgttgtagtcatttttagctcgaccacatcatcaggtctttgccaccgaggcatagtgtagaacagtcccggtcagttggccaacctcccgcagccaagtaggttcatccttgttcctgttcattctcatagatggccctgctttccccagggtgacatcgtagccaaatgtttactgttttcattgccttttatggccttgacgacttcccctcccaccagctgagaatgtatggaggtcatcggggcctcagctcggaggcagtgacttggggccaagggacctcgagacgctttccttccccaccccccagcgtcatctccccagcctgctgttcccgctttccatatagctttggccaggaaagcatgcaatagacttgctcggagcccagcactcctgggtctcggggtcggggaggggacgggggcacccacttccttgtctgtgacggcgtgttgttccccactctgggatggggaagaggcccgtcgggagttctgcatggcagttcactgcatgtgctgcccccttgggttgctctgccaatgtattaataccatcccatagctcctgccaaatcgagaccctctgacgacttgccgactaactggccaccacaagctgcagtctgtagcactgaacaaacaaaaaacaaaacgctcaagccttacgaccagagaaggatttcagcaaaccaccacctcccactcagtgtcccctccaaacttcacacttccctgcctgcagaggatgactctgttcacacccaatccagcgcggttctaccccacgaaactgtgactttccaaatgagcctttccctagggctagacctaagaccaggaagtttgagaaagcagccgcagctcaactcttccagctccgccagggttgggaagtccttaggtgcagtgcggctcccactgggtctgcggaccctcctattagagtacgaaattcctggcaactggtacagaaccaacctagaggctttgcagttggcaagctaactcgcggccttatttctgcctttaatctcccacaaggcatctgttgctttgggtcctccacgactcttaggcccgcctcaacaacccaggcacctcctaggtaggctcaaaggtagacccgtttccaccgcagcaggtgaacatgaccgtgttttcaactgtgtccacagttcagatccctttccagattgcaacctggcctgcatcccagctccttcctgctcgtgtcttaacctaagtgctttcttgtttgaaacgcctacaaacctccatgtggtagctcctttggcaaatgtcctgctgtggcgttttatgtgttgcttggagtctgtggggtcgtactccctcccctcccgtccccagggcagatttgattgaatgtttgctgaagttttgtctcttggtccacagtatttggaaaggtcactgaaaatgggtctttcagtcttggcatttcatttaggatctccatgagaaatgggcttcttgagccctgaaaatgtatattgtgtgtctcatctgtgaactgctttctgctatatagaactagctcaaaagactgtacatatttacaagaaactttatattcgtaaaaaaaaaaagaggaaattgaattggtttctacttttttattgtaaaaggtgcatttttcaacacttacttttggtttcaatggtggtagttgtggacagccatcttcactggagggtggggagctccgtgtgaccaccaagatgccagcaggatataccgtaacacgaaattgctgtcaaaagcttattagcatcaatcaagattctaggtctccaaaagtacaggctttttcttcattaccttttttattcagaacgaggaagagaacacaaggaatgattcaagatccaccttgagaggaatgaactttgttgttgaacaattagtgaaataaagcaatgatctaaactaaaaaaaaaaaaaaacaaacaaaaaaacgtggtggggcgcctgcgacctggaaaaagttttccaaacccttcgtgggggcgcggcccagaggtaggtaaccatggccaaaactggtccaaagaacaccgcgcatagatcatgggtcgcgtcctcccataaaaaagcgcggcgaacggggggtcgaacaactcgagggggtctcgggcacacggtcttcaagggtccacgagtcaacaccccccgggacgcagaacn

SEQ ID NO: 736571 - DNA, 449 bp, Homo sapiens
taaaaagtccctcatttttaataaagctgagagctggctcagcagagggcctctggttttcacagtcagtcccatctggccaggggtccctgggctctgctcctcattcttccatcaccatgtgtgtcgctgatgcccctgctcttggctgtgctaatgcccacgtgctcttgacaccttgcagaatttggagtgttcgtggattcttacggaagacgtagccgcacagacgatctcaagtggagtcgcttacctttggcctttggtacgtgaggctcagtgtgggggcttctcttttgccagcagctggtgtcgtatctgtgtgaatgttctgaaatgccgtcgtggcccagatacccttcgaggctattttgtttctctcttgctgcataacaagccatctgaaagcttagtgacttcaaacaacagcttattattggccccaactc

SEQ ID NO: 736572 - DNA, 3244 bp, Homo sapiens
  misc_feature (3244)..(3244): n is a, c, g, or t
acatcgcaggctgtacgcgccggatgttacggatcagcaggacccctgcccgagcgtacctggacatcccgaacccgcgctacctgggccctgccatttcctcaggagcgatttacttggcgtcctcataccaggataaattaagggtcatttgctgcaagggaaacctcgtgaaggagtccggcactgaacaccaccggggcccgtccacctcccgcagcagccccaacaagcgaggcccacccacgtacaacgagcacatcaccaagcgcgtggcctccagcccagcgccgcccgaaggccccagccacccgcgagagccaagcacaccccaccgctaccgcgaggggcggaccgagctgcgcagggacaagtctcctggccgccccctggagcgagagaagtcccccggccggatgctcagcacgcggagagagcggtcccccgggaggctgtttgaagacagcagcaggggccggctgcctgcgggagccgtgaggaccccgctgtcccaggtgaacaaggtctgggaccagtcttcagtataaatctcagccagaaaaaccaactcctcatcttgatctgcaggaaaacaccaaacacactatggaactctgctgatggggacccaagcgcccacgtgctcagccaccctctggctcagcggggcccagacccacctcggcacggacacccctgtctccaggaggggcaggtggctgaggctcttcggagctgtcagcgcccggtgcctgccctgggcacctccctgcagtcatctctttgcactttgttactctttcaaagcattcacaaacttttgtacctagctctagcctgtaccagttagttcatcaaaggaaaccaaccgggatgctaactacaacatggttagaatcctaattagctactttaagatcctaggattggttggtttttcttttttttttctctttgtttctttccttttttttttttttttttaagacaacagaattcttaatagatttgaatagcgacgtatttcccgtgttgtagtcatttttagctcgaccacatcatcaggtctttgccaccgaggcatagtgtagaacagtcccggtcagttggccaacctcccgcagccaagtaggttcatccttgttcctgttcattctcatagatggccctgctttccccagggtgacatcgtagccaaatgtttactgttttcattgccttttatggccttgacgacttcccctcccaccagctgagaatgtatggaggtcatcggggcctcagctcggaggcagtgacttggggccaagggacctcgagacgctttccttccccaccccccagcgtcatctccccagcctgctgttcccgctttccatatagctttggccaggaaagcatgcaatagacttgctcggagcccagcactcctgggtctcggggtcggggaggggacgggggcacccacttccttgtctgtgacggcgtgttgttccccactctgggatggggaagaggcccgtcgggagttctgcatggcagttcactgcatgtgctgcccccttgggttgctctgccaatgtattaataccatcccatagctcctgccaaatcgagaccctctgacgacttgccgactaactggccaccacaagctgcagtctgtagcactgaacaaacaaaaaacaaaacgctcaagccttacgaccagagaaggatttcagcaaaccaccacctcccactcagtgtcccctccaaacttcacacttccctgcctgcagaggatgactctgttcacacccaatccagcgcggttctaccccacgaaactgtgactttccaaatgagcctttccctagggctagacctaagaccaggaagtttgagaaagcagccgcagctcaactcttccagctccgccagggttgggaagtccttaggtgcagtgcggctcccactgggtctgcggaccctcctattagagtacgaaattcctggcaactggtacagaaccaacctagaggctttgcagttggcaagctaactcgcggccttatttctgcctttaatctcccacaaggcatctgttgctttgggtcctccacgactcttaggcccgcctcaacaacccaggcacctcctaggtaggctcaaaggtagacccgtttccaccgcagcaggtgaacatgaccgtgttttcaactgtgtccacagttcagatccctttccagattgcaacctggcctgcatcccagctccttcctgctcgtgtcttaacctaagtgctttcttgtttgaaacgcctacaaacctccatgtggtagctcctttggcaaatgtcctgctgtggcgttttatgtgttgcttggagtctgtggggtcgtactccctcccctcccgtccccagggcagatttgattgaatgtttgctgaagttttgtctcttggtccacagtatttggaaaggtcactgaaaatgggtctttcagtcttggcatttcatttaggatctccatgagaaatgggcttcttgagccctgaaaatgtatattgtgtgtctcatctgtgaactgctttctgctatatagaactagctcaaaagactgtacatatttacaagaaactttatattcgtaaaaaaaaaaagaggaaattgaattggtttctacttttttattgtaaaaggtgcatttttcaacacttacttttggtttcaatggtggtagttgtggacagccatcttcactggagggtggggagctccgtgtgaccaccaagatgccagcaggatataccgtaacacgaaattgctgtcaaaagcttattagcatcaatcaagattctaggtctccaaaagtacaggctttttcttcattaccttttttattcagaacgaggaagagaacacaaggaatgattcaagatccaccttgagaggaatgaactttgttgttgaacaattagtgaaataaagcaatgatctaaactaaaaaaaaaaaaaaacaaacaaaaaaacgtggtggggcgcctgcgacctggaaaaagttttccaaacccttcgtgggggcgcggcccagaggtaggtaaccatggccaaaactggtccaaagaacaccgcgcatagatcatgggtcgcgtcctcccataaaaaagcgcggcgaacggggggtcgaacaactcgagggggtctcgggcacacggtcttcaagggtccacgagtcaacaccccccgggacgcagaacn

SEQ ID NO: 736573 - DNA, 2501 bp, Homo sapiens
  misc_feature (2501)..(2501): n is a, c, g, or t
atcgagctcggtaccgtcgtgtctccctgcagtcatctctttgcactttgttactctttcaaagcattcacaaacttttgtacctagctctagcctgtaccagttagttcatcaaaggaaaccaaccgggatgctaactacaacatggttagaatcctaattagctactttaagatcctaggattggttggtttttcttttttttttctctttgtttctttccttttttttttttttttttaagacaacagaattcttaatagatttgaatagcgacgtatttcccgtgttgtagtcatttttagctcgaccacatcatcaggtctttgccaccgaggcatagtgtagaacagtcccggtcagttggccaacctcccgcagccaagtaggttcatccttgttcctgttcattctcatagatggccctgctttccccagggtgacatcgtagccaaatgtttactgttttcattgccttttatggccttgacgacttcccctcccaccagctgagaatgtatggaggtcatcggggcctcagctcggaggcagtgacttggggccaagggacctcgagacgctttccttccccaccccccagcgtcatctccccagcctgctgttcccgctttccatatagctttggccaggaaagcatgcaatagacttgctcggagcccagcactcctgggtctcggggtcggggaggggacgggggcacccacttccttgtctgtgacggcgtgttgttccccactctgggatggggaagaggcccgtcgggagttctgcatggcagttcactgcatgtgctgcccccttgggttgctctgccaatgtattaataccatcccatagctcctgccaaatcgagaccctctgacgacttgccgactaactggccaccacaagctgcagtctgtagcactgaacaaacaaaaaacaaaacgctcaagccttacgaccagagaaggatttcagcaaaccaccacctcccactcagtgtcccctccaaacttcacacttccctgcctgcagaggatgactctgttcacacccaatccagcgcggttctaccccacgaaactgtgactttccaaatgagcctttccctagggctagacctaagaccaggaagtttgagaaagcagccgcagctcaactcttccagctccgccagggttgggaagtccttaggtgcagtgcggctcccactgggtctgcggaccctcctattagagtacgaaattcctggcaactggtacagaaccaacctagaggctttgcagttggcaagctaactcgcggccttatttctgcctttaatctcccacaaggcatctgttgctttgggtcctccacgactcttaggcccgcctcaacaacccaggcacctcctaggtaggctcaaaggtagacccgtttccaccgcagcaggtgaacatgaccgtgttttcaactgtgtccacagttcagatccctttccagattgcaacctggcctgcatcccagctccttcctgctcgtgtcttaacctaagtgctttcttgtttgaaacgcctacaaacctccatgtggtagctcctttggcaaatgtcctgctgtggcgttttatgtgttgcttggagtctgtggggtcgtactccctcccctcccgtccccagggcagatttgattgaatgtttgctgaagttttgtctcttggtccacagtatttggaaaggtcactgaaaatgggtctttcagtcttggcatttcatttaggatctccatgagaaatgggcttcttgagccctgaaaatgtatattgtgtgtctcatctgtgaactgctttctgctatatagaactagctcaaaagactgtacatatttacaagaaactttatattcgtaaaaaaaaaaagaggaaattgaattggtttctacttttttattgtaaaaggtgcatttttcaacacttacttttggtttcaatggtggtagttgtggacagccatcttcactggagggtggggagctccgtgtgaccaccaagatgccagcaggatataccgtaacacgaaattgctgtcaaaagcttattagcatcaatcaagattctaggtctccaaaagtacaggctttttcttcattaccttttttattcagaacgaggaagagaacacaaggaatgattcaagatccaccttgagaggaatgaactttgttgttgaacaattagtgaaataaagcaatgatctaaactaaaaaaaaaaaaaaacaaacaaaaaaacgtggtggggcgcctgcgacctggaaaaagttttccaaacccttcgtgggggcgcggcccagaggtaggtaaccatggccaaaactggtccaaagaacaccgcgcatagatcatgggtcgcgtcctcccataaaaaagcgcggcgaacggggggtcgaacaactcgagggggtctcgggcacacggtcttcaagggtccacgagtcaacaccccccgggacgcagaacn

SEQ ID NO: 736574 - DNA, 2021 bp, Homo sapiens
  misc_feature (2021)..(2021): n is a, c, g, or t
ggtggaccggtccggaattcttgcgatagctgagaatgtatggaggtcatcggggcctcagctcggaggcagtgacttggggccaagggacctcgagacgctttccttccccaccccccagcgtcatctccccagcctgctgttcccgctttccatatagctttggccaggaaagcatgcaatagacttgctcggagcccagcactcctgggtctcggggtcggggaggggacgggggcacccacttccttgtctgtgacggcgtgttgttccccactctgggatggggaagaggcccgtcgggagttctgcatggcagttcactgcatgtgctgcccccttgggttgctctgccaatgtattaataccatcccatagctcctgccaaatcgagaccctctgacgacttgccgactaactggccaccacaagctgcagtctgtagcactgaacaaacaaaaaacaaaacgctcaagccttacgaccagagaaggatttcagcaaaccaccacctcccactcagtgtcccctccaaacttcacacttccctgcctgcagaggatgactctgttcacacccaatccagcgcggttctaccccacgaaactgtgactttccaaatgagcctttccctagggctagacctaagaccaggaagtttgagaaagcagccgcagctcaactcttccagctccgccagggttgggaagtccttaggtgcagtgcggctcccactgggtctgcggaccctcctattagagtacgaaattcctggcaactggtacagaaccaacctagaggctttgcagttggcaagctaactcgcggccttatttctgcctttaatctcccacaaggcatctgttgctttgggtcctccacgactcttaggcccgcctcaacaacccaggcacctcctaggtaggctcaaaggtagacccgtttccaccgcagcaggtgaacatgaccgtgttttcaactgtgtccacagttcagatccctttccagattgcaacctggcctgcatcccagctccttcctgctcgtgtcttaacctaagtgctttcttgtttgaaacgcctacaaacctccatgtggtagctcctttggcaaatgtcctgctgtggcgttttatgtgttgcttggagtctgtggggtcgtactccctcccctcccgtccccagggcagatttgattgaatgtttgctgaagttttgtctcttggtccacagtatttggaaaggtcactgaaaatgggtctttcagtcttggcatttcatttaggatctccatgagaaatgggcttcttgagccctgaaaatgtatattgtgtgtctcatctgtgaactgctttctgctatatagaactagctcaaaagactgtacatatttacaagaaactttatattcgtaaaaaaaaaaagaggaaattgaattggtttctacttttttattgtaaaaggtgcatttttcaacacttacttttggtttcaatggtggtagttgtggacagccatcttcactggagggtggggagctccgtgtgaccaccaagatgccagcaggatataccgtaacacgaaattgctgtcaaaagcttattagcatcaatcaagattctaggtctccaaaagtacaggctttttcttcattaccttttttattcagaacgaggaagagaacacaaggaatgattcaagatccaccttgagaggaatgaactttgttgttgaacaattagtgaaataaagcaatgatctaaactaaaaaaaaaaaaaaacaaacaaaaaaacgtggtggggcgcctgcgacctggaaaaagttttccaaacccttcgtgggggcgcggcccagaggtaggtaaccatggccaaaactggtccaaagaacaccgcgcatagatcatgggtcgcgtcctcccataaaaaagcgcggcgaacggggggtcgaacaactcgagggggtctcgggcacacggtcttcaagggtccacgagtcaacaccccccgggacgcagaacn

SEQ ID NO: 736575 - DNA, 1872 bp, Homo sapiens
  misc_feature (1872)..(1872): n is a, c, g, or t
ggcccctgtgacgtcgtgaacttagggatcagatcacgtaatcaacgctctgggatcgctgcaacctggcacttcaaggtaagtgcaccgataacgtctagaccggcaaacacagatctagaggtggccaactgatcactgtaggagctgactggcaaagtcaaccaggcccaaccaagagtgaccaagacaacgattaggataacccacaggcactcctcgtcataaggccaacgacacagacaggctggcaaataaagggtttaatcctaagttcagagccaggcctggctctgcactgaacaaacaaaaaacaaaacgctcaagccttacgaccagagaaggatttcagcaaaccaccacctcccactcagtgtcccctccaaacttcacacttccctgcctgcagaggatgactctgttcacacccaatccagcgcggttctaccccacgaaactgtgactttccaaatgagcctttccctagggctagacctaagaccaggaagtttgagaaagcagccgcagctcaactcttccagctccgccagggttgggaagtccttaggtgcagtgcggctcccactgggtctgcggaccctcctattagagtacgaaattcctggcaactggtacagaaccaacctagaggctttgcagttggcaagctaactcgcggccttatttctgcctttaatctcccacaaggcatctgttgctttgggtcctccacgactcttaggcccgcctcaacaacccaggcacctcctaggtaggctcaaaggtagacccgtttccaccgcagcaggtgaacatgaccgtgttttcaactgtgtccacagttcagatccctttccagattgcaacctggcctgcatcccagctccttcctgctcgtgtcttaacctaagtgctttcttgtttgaaacgcctacaaacctccatgtggtagctcctttggcaaatgtcctgctgtggcgttttatgtgttgcttggagtctgtggggtcgtactccctcccctcccgtccccagggcagatttgattgaatgtttgctgaagttttgtctcttggtccacagtatttggaaaggtcactgaaaatgggtctttcagtcttggcatttcatttaggatctccatgagaaatgggcttcttgagccctgaaaatgtatattgtgtgtctcatctgtgaactgctttctgctatatagaactagctcaaaagactgtacatatttacaagaaactttatattcgtaaaaaaaaaaagaggaaattgaattggtttctacttttttattgtaaaaggtgcatttttcaacacttacttttggtttcaatggtggtagttgtggacagccatcttcactggagggtggggagctccgtgtgaccaccaagatgccagcaggatataccgtaacacgaaattgctgtcaaaagcttattagcatcaatcaagattctaggtctccaaaagtacaggctttttcttcattaccttttttattcagaacgaggaagagaacacaaggaatgattcaagatccaccttgagaggaatgaactttgttgttgaacaattagtgaaataaagcaatgatctaaactaaaaaaaaaaaaaaacaaacaaaaaaacgtggtggggcgcctgcgacctggaaaaagttttccaaacccttcgtgggggcgcggcccagaggtaggtaaccatggccaaaactggtccaaagaacaccgcgcatagatcatgggtcgcgtcctcccataaaaaagcgcggcgaacggggggtcgaacaactcgagggggtctcgggcacacggtcttcaagggtccacgagtcaacaccccccgggacgcagaacn

SEQ ID NO: 736576 - DNA, 1168 bp, Homo sapiens; identical to SEQ ID NO: 353976
  misc_feature (54)..(54): n is a, c, g, or t
  misc_feature (1168)..(1168): n is a, c, g, or t

SEQ ID NO: 736577 - DNA, 1699 bp, Homo sapiens
cggcgggaggcgcggggcggaacagatcgcagacctgggggttcgcagagcgtgagtctgatcccccagacccaattctaccgcacccggctctgcaaggccaggggagggccgcctccacccatacaagtcccgggtttccctcccgccccggggagggcggcgattccacccccagggctgcgggaggcctggagggtcttccggggctagctgtgcgcgcgcccaccttccttgggagccgaggggtcagccgagtggtgctggggcaggaggcttgctcctcccctaaaccaggcggagtgctttgtctcttcagctctgcctcctgtcagcactaactgcattattctgcccagtgtagtcggccggttccttattatctgcgtgaacttagccatttacttaacctctctgtttcagcgtattcataccccgtgcccaccccatcacctcatgatgcccccgcctctttcgctctgctccagtccgtctggcctcgctgttgctggagaggccaggtcctgcctcagtgcttttggcttggctgtttcgtttgccacggatgtctttctttccccagatatcaacatggcttgctggtcattcgcttcaggtcttcaagtcttgggtcaaatggtggcttctcagtgaagtcttatttgaccacactaaaaattgcaccatctcacccccattgtccttttcttgctcgattttgtttttaccccatagcacttaacaccttacaacaagctatatattttgcttatttcagtcattcatttaataactattcgcacctatttgtgtgccaggctatgtgtgcccccactgcatgggggcaaacatctctgcccttgtggagcttccattctaaggggggagataataaacacatttataagtaagagagtatgtcagataagtgtatcatctcctgtcacagtgagttaaaatctggtgtttaatctccatgattagactgagcttcctaaaactggagtggtagctgattttcacctccttgtccctgatatcttgagggagatcaggatctctcaggcccttcctgctcaaaacataggacacacttgacttttctgatatcctttcagcgccagtggggagatgttgaagttcaaatatggagcgcggaatcctttggatgctggtgctgctgaacccattgccagccgggcctccaggctgaatctgttcttccaggggaaaccaccctttatgactcaacagcagatgtctcctctttcccgagaagggatattagatgccctctttgttctctttgaagaatgcagtcagcctgctctgatgaagattaagcacgtgagcaactttgtccggaagtattccgacaccatagctgagttacaggagctccagccttcggcaaaggacttcgaagtcagaagtcttgtaggttgtggtcactttgctgaagtgcaggtggtaagagagaaagcaaccggggacatctatgctatgaaagtgatgaagaagaaggctttattggcccaggagcaggtttcattttttgaggaagagcggaacatattatctcgaagcacaagcccgtggatcccccaattacagtatgcctttcaggacaaaaatcacctttatctggtcatggaatatcagcctggaggggacttgctgtcacttttgaatagatatg

SEQ ID NO: 736578 - DNA, 5709 bp, Homo sapiens
  misc_feature (5709)..(5709): n is a, c, g, or t
cggcgggaggcgcggggcggaacagatcgcagacctgggggttcgcagagccgccagtggggagatgttgaagttcaaatatggagcgcggaatcctttggatgctggtgctgctgaacccattgccagccgggcctccaggctgaatctgttcttccaggggaaaccaccctttatgactcaacagcagatgtctcctctttcccgagaagggatattagatgccctctttgttctctttgaagaatgcagtcagcctgctctgatgaagattaagcacgtgagcaactttgtccggaagtattccgacaccatagctgagttacaggagctccagccttcggcaaaggacttcgaagtcagaagtcttgtaggttgtggtcactttgctgaagtgcaggtggtaagagagaaagcaaccggggacatctatgctatgaaagtgatgaagaagaaggctttattggcccaggagcaggtttcattttttgaggaagagcggaacatattatctcgaagcacaagcccgtggatcccccaattacagtatgcctttcaggacaaaaatcacctttatctggttctctattctcatgaaaaggtgaaaatggaaggcactatttctcaacaaaccaaactcattgattttctgcaagccaaaatggaccaacctgctaaaaagaaaaaggttcctctgcagtacaatgagctgaagctggccctggagaaggagaaagctcgctgtgcagagctagaggaagcccttcagaagacccgcatcgagctccggtccgcccgggaggaagctgcccaccgcaaagcaacggaccacccacacccatccacgccagccaccgcgaggcagcagatcgccatgtccgccatcgtgcggtcgccagagcaccagcccagtgccatgagcctgctggccccgccatccagccgcagaaaggagtcttcaactccagaggaatttagtcggcgtcttaaggaacgcatgcaccacaatattcctcaccgattcaacgtaggactgaacatgcgagccacaaagtgtgctgtgtgtctggataccgtgcactttggacgccaggcatccaaatgtctcgaatgtcaggtgatgtgtcaccccaagtgctccacgtgcttgccagccacctgcggcttgcctgctgaatatgccacacacttcaccgaggccttctgccgtgacaaaatgaactccccaggtctccagaccaaggagcccagcagcagcttgcacctggaagggtggatgaaggtgcccaggaataacaaacgaggacagcaaggctgggacaggaagtacattgtcctggagggatcaaaagtcctcatttatgacaatgaagccagagaagctggacagaggccggtggaagaatttgagctgtgccttcccgacggggatgtatctattcatggtgccgttggtgcttccgaactcgcaaatacagccaaagcagatgtcccatacatactgaagatggaatctcacccgcacaccacctgctggcccgggagaaccctctacttgctagctcccagcttccctgacaaacagcgctgggtcaccgccttagaatcagttgtcgcaggtgggagagtttctagggaaaaagcagaagctgatgctaaactgcttggaaactccctgctgaaactggaaggtgatgaccgtctagacatgaactgcacgctgcccttcagtgaccaggtggtgttggtgggcaccgaggaagggctctacgccctgaatgtcttgaaaaactccctaacccatgtcccaggaattggagcagtcttccaaatttatattatcaaggacctggagaagctactcatgatagcaggagaagagcgggcactgtgtcttgtggacgtgaagaaagtgaaacagtccctggcccagtcccacctgcctgcccagcccgacatctcacccaacatttttgaagctgtcaagggctgccacttgtttggggcaggcaagattgagaacgggctctgcatctgtgcagccatgcccagcaaagtcgtcattctccgctacaacgaaaacctcagcaaatactgcatccggaaagagatagagacctcagagccctgcagctgtatccacttcaccaattacagtatcctcattggaaccaataaattctacgaaatcgacatgaagcagtacacgctcgaggaattcctggataagaatgaccattccttggcacctgctgtgtttgccgcctcttccaacagcttccctgtctcaatcgtgcaggtgaacagcgcagggcagcgagaggagtacttgctgtgtttccacgaatttggagtgttcgtggattcttacggaagacgtagccgcacagacgatctcaagtggagtcgcttacctttggcctttgcctacagagaaccctatctgtttgtgacccacttcaactcactcgaagtaattgagatccaggcacgctcctcagcagggacccctgcccgagcgtacctggacatcccgaacccgcgctacctgggccctgccatttcctcaggagcgatttacttggcgtcctcataccaggataaattaagggtcatttgctgcaagggaaacctcgtgaaggagtccggcactgaacaccaccggggcccgtccacctcccgcagcagccccaacaagcgaggcccacccacgtacaacgagcacatcaccaagcgcgtggcctccagcccagcgccgcccgaaggccccagccacccgcgagagccaagcacaccccaccgctaccgcgaggggcggaccgagctgcgcagggacaagtctcctggccgccccctggagcgagagaagtcccccggccggatgctcagcacgcggagagagcggtcccccgggaggctgtttgaagacagcagcaggggccggctgcctgcgggagccgtgaggaccccgctgtcccaggtgaacaaggtctgggaccagtcttcagtataaatctcagccagaaaaaccaactcctcatcttgatctgcaggaaaacaccaaacacactatggaactctgctgatggggacccaagcgcccacgtgctcagccaccctctggctcagcggggcccagacccacctcggcacggacacccctgtctccaggaggggcaggtggctgaggctcttcggagctgtcagcgcccggtgcctgccctgggcacctccctgcagtcatctctttgcactttgttactctttcaaagcattcacaaacttttgtacctagctctagcctgtaccagttagttcatcaaaggaaaccaaccgggatgctaactacaacatggttagaatcctaattagctactttaagatcctaggattggttggtttttcttttttttttctctttgtttctttccttttttttttttttttttaagacaacagaattcttaatagatttgaatagcgacgtatttcccgtgttgtagtcatttttagctcgaccacatcatcaggtctttgccaccgaggcatagtgtagaacagtcccggtcagttggccaacctcccgcagccaagtaggttcatccttgttcctgttcattctcatagatggccctgctttccccagggtgacatcgtagccaaatgtttactgttttcattgccttttatggccttgacgacttcccctcccaccagctgagaatgtatggaggtcatcggggcctcagctcggaggcagtgacttggggccaagggacctcgagacgctttccttccccaccccccagcgtcatctccccagcctgctgttcccgctttccatatagctttggccaggaaagcatgcaatagacttgctcggagcccagcactcctgggtctcggggtcggggaggggacgggggcacccacttccttgtctgtgacggcgtgttgttccccactctgggatggggaagaggcccgtcgggagttctgcatggcagttcactgcatgtgctgcccccttgggttgctctgccaatgtattaataccatcccatagctcctgccaaatcgagaccctctgacgacttgccgactaactggccaccacaagctgcagtctgtagcactgaacaaacaaaaaacaaaacgctcaagccttacgaccagagaaggatttcagcaaaccaccacctcccactcagtgtcccctccaaacttcacacttccctgcctgcagaggatgactctgttcacacccaatccagcgcggttctaccccacgaaactgtgactttccaaatgagcctttccctagggctagacctaagaccaggaagtttgagaaagcagccgcagctcaactcttccagctccgccagggttgggaagtccttaggtgcagtgcggctcccactgggtctgcggaccctcctattagagtacgaaattcctggcaactggtacagaaccaacctagaggctttgcagttggcaagctaactcgcggccttatttctgcctttaatctcccacaaggcatctgttgctttgggtcctccacgactcttaggcccgcctcaacaacccaggcacctcctaggtaggctcaaaggtagacccgtttccaccgcagcaggtgaacatgaccgtgttttcaactgtgtccacagttcagatccctttccagattgcaacctggcctgcatcccagctccttcctgctcgtgtcttaacctaagtgctttcttgtttgaaacgcctacaaacctccatgtggtagctcctttggcaaatgtcctgctgtggcgttttatgtgttgcttggagtctgtggggtcgtactccctcccctcccgtccccagggcagatttgattgaatgtttgctgaagttttgtctcttggtccacagtatttggaaaggtcactgaaaatgggtctttcagtcttggcatttcatttaggatctccatgagaaatgggcttcttgagccctgaaaatgtatattgtgtgtctcatctgtgaactgctttctgctatatagaactagctcaaaagactgtacatatttacaagaaactttatattcgtaaaaaaaaaaagaggaaattgaattggtttctacttttttattgtaaaaggtgcatttttcaacacttacttttggtttcaatggtggtagttgtggacagccatcttcactggagggtggggagctccgtgtgaccaccaagatgccagcaggatataccgtaacacgaaattgctgtcaaaagcttattagcatcaatcaagattctaggtctccaaaagtacaggctttttcttcattaccttttttattcagaacgaggaagagaacacaaggaatgattcaagatccaccttgagaggaatgaactttgttgttgaacaattagtgaaataaagcaatgatctaaactaaaaaaaaaaaaaaacaaacaaaaaaacgtggtggggcgcctgcgacctggaaaaagttttccaaacccttcgtgggggcgcggcccagaggtaggtaaccatggccaaaactggtccaaagaacaccgcgcatagatcatgggtcgcgtcctcccataaaaaagcgcggcgaacggggggtcgaacaactcgagggggtctcgggcacacggtcttcaagggtccacgagtcaacaccccccgggacgcagaacn

SEQ ID NO: 736579 - DNA, 2296 bp, Homo sapiens
tgaatgccaaactcccgattgggaccccagattacatggctcctgaagtgctgactgtgatgaacggggatggaaaaggcacctacggcctggactgtgactggtggtcagtgggcgtgattgcctatgagatgatttatgggagatcccccttcgcagagggaacctctgccagaaccttcaataacattatgaatttccagcggtttttgaaatttccagatgaccccaaagtgagcagtgactttcttgatctgattcaaagcttgttgtgcggccagaaagagagactgaagtttgaaggtctttgctgccatcctttcttctctaaaattgactggaacaacattcgtaactctcctccccccttcgttcccaccctcaagtctgacgatgacacctccaattttgatgaaccagagaagaattcgtgggtttcatcctctccgtgccagctgagcccctcaggcttctcgggtgaagaactgccgtttgtggggttttcgtacagcaaggcactggggattcttggtagatctgagtctgttgtgtcgggtctggactcccctgccaagactagctccatggaaaagaaacttctcatcaaaagcaaagagctacaagactctcaggacaagtgtcacaagatggagcaggaaatgacccggttacatcggagagtgtcagaggtggaggctgtgcttagtcagaaggaggtggagctgaaggcctctgagactcagagatccctcctggagcaggaccttgctacctacatcacagaatgcagtagcttaaagcgaagtttggagcaagcacggatggaggtgtcccaggaggatgacaaagcactgcagcttctccatgatatcagagagcagagccggaagctccaagaaatcaaagagcaggagtaccaggctcaagtggaagaaatgaggttgatgatgaatcagttggaagaggatcttgtctcagcaagaagacggagtgatctctacgaatctgagctgagagagtctcggcttgctgctgaagaattcaagcggaaagcgacagaatgtcagcataaactgttgaaggctaaggatcaagggaagcctgaagtgggagaatatgcgaaactggagaagatcaatgctgagcagcagctcaaaattcaggagctccaagagaaactggagaaggctgtaaaagccagcacggaggccaccgagctgctgcagaatatccgccaggcaaaggagcgagccgagagggagctggagaagctgcagaaccgagaggattcttctgaaggcatcagaaagaagctggtggaagctgaggagctcgaagagaaacatcgggaggcccaagtctcagcccagcacctagaagtgcacctgaaacagaaagagcagcactatgaggaaaagattaaagtgttggacaatcagataaagaaagacctggctgacaaggagacactggagaacatgatgcagagacacgaggaggaggcccatgagaagggcaaaattctcagcgaacagaaggcgatgatcaatgctatggattccaagatcagatccctggaacagaggattgtggaactgtctgaagccaataaacttgcagcaaatagcagtctttttacccaaaggaacatgaaggcccaagaagagatgatttctgaactcaggcaacagaaattttacctggagacacaggctgggaagttggaggcccagaaccgaaaactggaggagcagctggagaagatcagccaccaagaccacagtgacaagaatcggctgctggaactggagacaagattgcgggaggtcagtctagagcacgaggagcagaaactggagctcaagcgccagctcacagagctacagctctccctgcaggagcgcgagtcacagttgacagccctgcaggctgcacgggcggccctggagagccagcttcgccaggcgaagacagagctggaagagaccacagcagaagctgaagaggagatccaggcactcacggcacatagagatgaaatccagcgcaaatttgatgctcttcgtaacagctgtactgtaatcacagacctggaggagcagctaaaccagctgaccgaggacaacgctgaactcaacaaccaaaacttctacttgtccaaacaactcgatgaggcttctggcgccaacgacgagattgtacaactgcgaagtgaagtggaccatctccgccgggagatcacggaacgagagatgcagcttaccagccagaagcaagtaaggagggttaacaaggt

SEQ ID NO: 736580 - DNA, 4270 bp, Homo sapiens
tgaatgccaaactcccgattgggaccccagattacatggctcctgaagtgctgactgtgatgaacggggatggaaaaggcacctacggcctggactgtgactggtggtcagtgggcgtgattgcctatgagatgatttatgggagatcccccttcgcagagggaacctctgccagaaccttcaataacattatgaatttccagcggtttttgaaatttccagatgaccccaaagtgagcagtgactttcttgatctgattcaaagcttgttgtgcggccagaaagagagactgaagtttgaaggtctttgctgccatcctttcttctctaaaattgactggaacaacattcgtaactctcctccccccttcgttcccaccctcaagtctgacgatgacacctccaattttgatgaaccagagaagaattcgtgggtttcatcctctccgtgccagctgagcccctcaggcttctcgggtgaagaactgccgtttgtggggttttcgtacagcaaggcactggggattcttggtagatctgagtctgttgtgtcgggtctggactcccctgccaagactagctccatggaaaagaaacttctcatcaaaagcaaagagctacaagactctcaggacaagtgtcacaagatggagcaggaaatgacccggttacatcggagagtgtcagaggtggaggctgtgcttagtcagaaggaggtggagctgaaggcctctgagactcagagatccctcctggagcaggaccttgctacctacatcacagaatgcagtagcttaaagcgaagtttggagcaagcacggatggaggtgtcccaggaggatgacaaagcactgcagcttctccatgatatcagagagcagagccggaagctccaagaaatcaaagagcaggagtaccaggctcaagtggaagaaatgaggttgatgatgaatcagttggaagaggatcttgtctcagcaagaagacggagtgatctctacgaatctgagctgagagagtctcggcttgctgctgaagaattcaagcggaaagcgacagaatgtcagcataaactgttgaaggctaaggatcaagggaagcctgaagtgggagaatatgcgaaactggagaagatcaatgctgagcagcagctcaaaattcaggagctccaagagaaactggagaaggctgtaaaagccagcacggaggccaccgagctgctgcagaatatccgccaggcaaaggagcgagccgagagggagctggagaagctgcagaaccgagaggattcttctgaaggcatcagaaagaagctggtggaagctgaggagctcgaagagaaacatcgggaggcccaagtctcagcccagcacctagaagtgcacctgaaacagaaagagcagcactatgaggaaaagattaaagtgttggacaatcagataaagaaagacctggctgacaaggagacactggagaacatgatgcagagacacgaggaggaggcccatgagaagggcaaaattctcagcgaacagaaggcgatgatcaatgctatggattccaagatcagatccctggaacagaggattgtggaactgtctgaagccaataaacttgcagcaaatagcagtctttttacccaaaggaacatgaaggcccaagaagagatgatttctgaactcaggcaacagaaattttacctggagacacaggctgggaagttggaggcccagaaccgaaaactggaggagcagctggagaagatcagccaccaagaccacagtgacaagaatcggctgctggaactggagacaagattgcgggaggtcagtctagagcacgaggagcagaaactggagctcaagcgccagctcacagagctacagctctccctgcaggagcgcgagtcacagttgacagccctgcaggctgcacgggcggccctggagagccagcttcgccaggcgaagacagagctggaagagaccacagcagaagctgaagaggagatccaggcactcacggcacatagagatgaaatccagcgcaaatttgatgctcttcgtaacagctgtactgtaatcacagacctggaggagcagctaaaccagctgaccgaggacaacgctgaactcaacaaccaaaacttctacttgtccaaacaactcgatgaggcttctggcgccaacgacgagattgtacaactgcgaagtgaagtggaccatctccgccgggagatcacggaacgagagatgcagcttaccagccagaagcaaacgatggaggctctgaagaccacgtgcaccatgctggaggaacaggtcatggatttggaggccctaaacgatgagctgctagaaaaagagcggcagtgggaggcctggaggagcgtcctgggtgatgagaaatcccagtttgagtgtcgggttcgagagctgcagagaatgctggacaccgagaaacagagcagggcgagagccgatcagcggatcaccgagtctcgccaggtggtggagctggcagtgaaggagcacaaggctgagattctcgctctgcagcaggctctcaaagagcagaagctgaaggccgagagcctctctgacaagctcaatgacctggagaagaagcatgctatgcttgaaatgaatgcccgaagcttacagcagaagctggagactgaacgagagctcaaacagaggcttctggaagagcaagccaaattacagcagcagatggacctgcagaaaaatcacattttccgtctgactcaaggactgcaagaagctctagatcgggctgatctactgaagacagaaagaagtgacttggagtatcagctggaaaacattcaggttctctattctcatgaaaaggtgaaaatggaaggcactatttctcaacaaaccaaactcattgattttctgcaagccaaaatggaccaacctgctaaaaagaaaaaggttcctctgcagtacaatgagctgaagctggccctggagaaggagaaagctcgctgtgcagagctagaggaagcccttcagaagacccgcatcgagctccggtccgcccgggaggaagctgcccaccgcaaagcaacggaccacccacacccatccacgccagccaccgcgaggcagcagatcgccatgtccgccatcgtgcggtcgccagagcaccagcccagtgccatgagcctgctggccccgccatccagccgcagaaaggagtcttcaactccagaggaatttagtcggcgtcttaaggaacgcatgcaccacaatattcctcaccgattcaacgtaggactgaacatgcgagccacaaagtgtgctgtgtgtctggataccgtgcactttggacgccaggcatccaaatgtctcgaatgtcaggtgatgtgtcaccccaagtgctccacgtgcttgccagccacctgcggcttgcctgctgaatatgccacacacttcaccgaggccttctgccgtgacaaaatgaactccccaggtctccagaccaaggagcccagcagcagcttgcacctggaagggtggatgaaggtgcccaggaataacaaacgaggacagcaaggctgggacaggaagtacattgtcctggagggatcaaaagtcctcatttatgacaatgaagccagagaagctggacagaggccggtggaagaatttgagctgtgccttcccgacggggatgtatctattcatggtgccgttggtgcttccgaactcgcaaatacagccaaagcagatgtcccatacatactgaagatggaatctcacccgcacaccacctgctggcccgggagaaccctctacttgctagctcccagcttccctgacaaacagcgctgggtcaccgccttagaatcagttgtcgcaggtgggagagtttctagggaaaaagcagaagctgatgctgtgagtatgaaagcgggccctggaggttgtctttgtaaagggggctgacttggtaactggtgttaacgacgagaatcccattggccattttgattcccctcaggctctctctctgagggctgatggctctagactgtgtcatggccaggagtctggtggtgatgaaggcacaagcaccaaggtagcttgtgtggcatcatgatccatttagaatgtgggaatcagggatgcggtggctcatgcctgtggtcccagtgacccaggaggccaaggcaggaggatcacttgagcccaggagtttgaaaccagactgggcaagatagcaagatcccatctcttaa

SEQ ID NO: 736581 - DNA, 7981 bp, Homo sapiens
  misc_feature (7981)..(7981): n is a, c, g, or t
tgaatgccaaactcccgattgggaccccagattacatggctcctgaagtgctgactgtgatgaacggggatggaaaaggcacctacggcctggactgtgactggtggtcagtgggcgtgattgcctatgagatgatttatgggagatcccccttcgcagagggaacctctgccagaaccttcaataacattatgaatttccagcggtttttgaaatttccagatgaccccaaagtgagcagtgactttcttgatctgattcaaagcttgttgtgcggccagaaagagagactgaagtttgaaggtctttgctgccatcctttcttctctaaaattgactggaacaacattcgtaactctcctccccccttcgttcccaccctcaagtctgacgatgacacctccaattttgatgaaccagagaagaattcgtgggtttcatcctctccgtgccagctgagcccctcaggcttctcgggtgaagaactgccgtttgtggggttttcgtacagcaaggcactggggattcttggtagatctgagtctgttgtgtcgggtctggactcccctgccaagactagctccatggaaaagaaacttctcatcaaaagcaaagagctacaagactctcaggacaagtgtcacaagatggagcaggaaatgacccggttacatcggagagtgtcagaggtggaggctgtgcttagtcagaaggaggtggagctgaaggcctctgagactcagagatccctcctggagcaggaccttgctacctacatcacagaatgcagtagcttaaagcgaagtttggagcaagcacggatggaggtgtcccaggaggatgacaaagcactgcagcttctccatgatatcagagagcagagccggaagctccaagaaatcaaagagcaggagtaccaggctcaagtggaagaaatgaggttgatgatgaatcagttggaagaggatcttgtctcagcaagaagacggagtgatctctacgaatctgagctgagagagtctcggcttgctgctgaagaattcaagcggaaagcgacagaatgtcagcataaactgttgaaggctaaggatcaagggaagcctgaagtgggagaatatgcgaaactggagaagatcaatgctgagcagcagctcaaaattcaggagctccaagagaaactggagaaggctgtaaaagccagcacggaggccaccgagctgctgcagaatatccgccaggcaaaggagcgagccgagagggagctggagaagctgcagaaccgagaggattcttctgaaggcatcagaaagaagctggtggaagctgaggagctcgaagagaaacatcgggaggcccaagtctcagcccagcacctagaagtgcacctgaaacagaaagagcagcactatgaggaaaagattaaagtgttggacaatcagataaagaaagacctggctgacaaggagacactggagaacatgatgcagagacacgaggaggaggcccatgagaagggcaaaattctcagcgaacagaaggcgatgatcaatgctatggattccaagatcagatccctggaacagaggattgtggaactgtctgaagccaataaacttgcagcaaatagcagtctttttacccaaaggaacatgaaggcccaagaagagatgatttctgaactcaggcaacagaaattttacctggagacacaggctgggaagttggaggcccagaaccgaaaactggaggagcagctggagaagatcagccaccaagaccacagtgacaagaatcggctgctggaactggagacaagattgcgggaggtcagtctagagcacgaggagcagaaactggagctcaagcgccagctcacagagctacagctctccctgcaggagcgcgagtcacagttgacagccctgcaggctgcacgggcggccctggagagccagcttcgccaggcgaagacagagctggaagagaccacagcagaagctgaagaggagatccaggcactcacggcacatagagatgaaatccagcgcaaatttgatgctcttcgtaacagctgtactgtaatcacagacctggaggagcagctaaaccagctgaccgaggacaacgctgaactcaacaaccaaaacttctacttgtccaaacaactcgatgaggcttctggcgccaacgacgagattgtacaactgcgaagtgaagtggaccatctccgccgggagatcacggaacgagagatgcagcttaccagccagaagcaaacgatggaggctctgaagaccacgtgcaccatgctggaggaacaggtcatggatttggaggccctaaacgatgagctgctagaaaaagagcggcagtgggaggcctggaggagcgtcctgggtgatgagaaatcccagtttgagtgtcgggttcgagagctgcagagaatgctggacaccgagaaacagagcagggcgagagccgatcagcggatcaccgagtctcgccaggtggtggagctggcagtgaaggagcacaaggctgagattctcgctctgcagcaggctctcaaagagcagaagctgaaggccgagagcctctctgacaagctcaatgacctggagaagaagcatgctatgcttgaaatgaatgcccgaagcttacagcagaagctggagactgaacgagagctcaaacagaggcttctggaagagcaagccaaattacagcagcagatggacctgcagaaaaatcacattttccgtctgactcaaggactgcaagaagctctagatcgggctgatctactgaagacagaaagaagtgacttggagtatcagctggaaaacattcaggttctctattctcatgaaaaggtgaaaatggaaggcactatttctcaacaaaccaaactcattgattttctgcaagccaaaatggaccaacctgctaaaaagaaaaaggttcctctgcagtacaatgagctgaagctggccctggagaaggagaaagctcgctgtgcagagctagaggaagcccttcagaagacccgcatcgagctccggtccgcccgggaggaagctgcccaccgcaaagcaacggaccacccacacccatccacgccagccaccgcgaggcagcagatcgccatgtccgccatcgtgcggtcgccagagcaccagcccagtgccatgagcctgctggccccgccatccagccgcagaaaggagtcttcaactccagaggaatttagtcggcgtcttaaggaacgcatgcaccacaatattcctcaccgattcaacgtaggactgaacatgcgagccacaaagtgtgctgtgtgtctggataccgtgcactttggacgccaggcatccaaatgtctcgaatgtcaggtgatgtgtcaccccaagtgctccacgtgcttgccagccacctgcggcttgcctgctgaatatgccacacacttcaccgaggccttctgccgtgacaaaatgaactccccaggtctccagaccaaggagcccagcagcagcttgcacctggaagggtggatgaaggtgcccaggaataacaaacgaggacagcaaggctgggacaggaagtacattgtcctggagggatcaaaagtcctcatttatgacaatgaagccagagaagctggacagaggccggtggaagaatttgagctgtgccttcccgacggggatgtatctattcatggtgccgttggtgcttccgaactcgcaaatacagccaaagcagatgtcccatacatactgaagatggaatctcacccgcacaccacctgctggcccgggagaaccctctacttgctagctcccagcttccctgacaaacagcgctgggtcaccgccttagaatcagttgtcgcaggtgggagagtttctagggaaaaagcagaagctgatgctaaactgcttggaaactccctgctgaaactggaaggtgatgaccgtctagacatgaactgcacgctgcccttcagtgaccaggtggtgttggtgggcaccgaggaagggctctacgccctgaatgtcttgaaaaactccctaacccatgtcccaggaattggagcagtcttccaaatttatattatcaaggacctggagaagctactcatgatagcaggagaagagcgggcactgtgtcttgtggacgtgaagaaagtgaaacagtccctggcccagtcccacctgcctgcccagcccgacatctcacccaacatttttgaagctgtcaagggctgccacttgtttggggcaggcaagattgagaacgggctctgcatctgtgcagccatgcccagcaaagtcgtcattctccgctacaacgaaaacctcagcaaatactgcatccggaaagagatagagacctcagagccctgcagctgtatccacttcaccaattacagtatcctcattggaaccaataaattctacgaaatcgacatgaagcagtacacgctcgaggaattcctggataagaatgaccattccttggcacctgctgtgtttgccgcctcttccaacagcttccctgtctcaatcgtgcaggtgaacagcgcagggcagcgagaggagtacttgctgtgtttccacgaatttggagtgttcgtggattcttacggaagacgtagccgcacagacgatctcaagtggagtcgcttacctttggcctttgcctacagagaaccctatctgtttgtgacccacttcaactcactcgaagtaattgagatccaggcacgctcctcagcagggacccctgcccgagcgtacctggacatcccgaacccgcgctacctgggccctgccatttcctcaggagcgatttacttggcgtcctcataccaggataaattaagggtcatttgctgcaagggaaacctcgtgaaggagtccggcactgaacaccaccggggcccgtccacctcccgcagcagccccaacaagcgaggcccacccacgtacaacgagcacatcaccaagcgcgtggcctccagcccagcgccgcccgaaggccccagccacccgcgagagccaagcacaccccaccgctaccgcgaggggcggaccgagctgcgcagggacaagtctcctggccgccccctggagcgagagaagtcccccggccggatgctcagcacgcggagagagcggtcccccgggaggctgtttgaagacagcagcaggggccggctgcctgcgggagccgtgaggaccccgctgtcccaggtgaacaaggtctgggaccagtcttcagtataaatctcagccagaaaaaccaactcctcatcttgatctgcaggaaaacaccaaacacactatggaactctgctgatggggacccaagcgcccacgtgctcagccaccctctggctcagcggggcccagacccacctcggcacggacacccctgtctccaggaggggcaggtggctgaggctcttcggagctgtcagcgcccggtgcctgccctgggcacctccctgcagtcatctctttgcactttgttactctttcaaagcattcacaaacttttgtacctagctctagcctgtaccagttagttcatcaaaggaaaccaaccgggatgctaactacaacatggttagaatcctaattagctactttaagatcctaggattggttggtttttcttttttttttctctttgtttctttccttttttttttttttttttaagacaacagaattcttaatagatttgaatagcgacgtatttcccgtgttgtagtcatttttagctcgaccacatcatcaggtctttgccaccgaggcatagtgtagaacagtcccggtcagttggccaacctcccgcagccaagtaggttcatccttgttcctgttcattctcatagatggccctgctttccccagggtgacatcgtagccaaatgtttactgttttcattgccttttatggccttgacgacttcccctcccaccagctgagaatgtatggaggtcatcggggcctcagctcggaggcagtgacttggggccaagggacctcgagacgctttccttccccaccccccagcgtcatctccccagcctgctgttcccgctttccatatagctttggccaggaaagcatgcaatagacttgctcggagcccagcactcctgggtctcggggtcggggaggggacgggggcacccacttccttgtctgtgacggcgtgttgttccccactctgggatggggaagaggcccgtcgggagttctgcatggcagttcactgcatgtgctgcccccttgggttgctctgccaatgtattaataccatcccatagctcctgccaaatcgagaccctctgacgacttgccgactaactggccaccacaagctgcagtctgtagcactgaacaaacaaaaaacaaaacgctcaagccttacgaccagagaaggatttcagcaaaccaccacctcccactcagtgtcccctccaaacttcacacttccctgcctgcagaggatgactctgttcacacccaatccagcgcggttctaccccacgaaactgtgactttccaaatgagcctttccctagggctagacctaagaccaggaagtttgagaaagcagccgcagctcaactcttccagctccgccagggttgggaagtccttaggtgcagtgcggctcccactgggtctgcggaccctcctattagagtacgaaattcctggcaactggtacagaaccaacctagaggctttgcagttggcaagctaactcgcggccttatttctgcctttaatctcccacaaggcatctgttgctttgggtcctccacgactcttaggcccgcctcaacaacccaggcacctcctaggtaggctcaaaggtagacccgtttccaccgcagcaggtgaacatgaccgtgttttcaactgtgtccacagttcagatccctttccagattgcaacctggcctgcatcccagctccttcctgctcgtgtcttaacctaagtgctttcttgtttgaaacgcctacaaacctccatgtggtagctcctttggcaaatgtcctgctgtggcgttttatgtgttgcttggagtctgtggggtcgtactccctcccctcccgtccccagggcagatttgattgaatgtttgctgaagttttgtctcttggtccacagtatttggaaaggtcactgaaaatgggtctttcagtcttggcatttcatttaggatctccatgagaaatgggcttcttgagccctgaaaatgtatattgtgtgtctcatctgtgaactgctttctgctatatagaactagctcaaaagactgtacatatttacaagaaactttatattcgtaaaaaaaaaaagaggaaattgaattggtttctacttttttattgtaaaaggtgcatttttcaacacttacttttggtttcaatggtggtagttgtggacagccatcttcactggagggtggggagctccgtgtgaccaccaagatgccagcaggatataccgtaacacgaaattgctgtcaaaagcttattagcatcaatcaagattctaggtctccaaaagtacaggctttttcttcattaccttttttattcagaacgaggaagagaacacaaggaatgattcaagatccaccttgagaggaatgaactttgttgttgaacaattagtgaaataaagcaatgatctaaactaaaaaaaaaaaaaaacaaacaaaaaaacgtggtggggcgcctgcgacctggaaaaagttttccaaacccttcgtgggggcgcggcccagaggtaggtaaccatggccaaaactggtccaaagaacaccgcgcatagatcatgggtcgcgtcctcccataaaaaagcgcggcgaacggggggtcgaacaactcgagggggtctcgggcacacggtcttcaagggtccacgagtcaacaccccccgggacgcagaacn

SEQ ID NO: 736582 - DNA, 4639 bp, Homo sapiens
tgaatgccaaactcccgattgggaccccagattacatggctcctgaagtgctgactgtgatgaacggggatggaaaaggcacctacggcctggactgtgactggtggtcagtgggcgtgattgcctatgagatgatttatgggagatcccccttcgcagagggaacctctgccagaaccttcaataacattatgaatttccagcggtttttgaaatttccagatgaccccaaagtgagcagtgactttcttgatctgattcaaagcttgttgtgcggccagaaagagagactgaagtttgaaggtctttgctgccatcctttcttctctaaaattgactggaacaacattcgtaactctcctccccccttcgttcccaccctcaagtctgacgatgacacctccaattttgatgaaccagagaagaattcgtgggtttcatcctctccgtgccagctgagcccctcaggcttctcgggtgaagaactgccgtttgtggggttttcgtacagcaaggcactggggattcttggtagatctgagtctgttgtgtcgggtctggactcccctgccaagactagctccatggaaaagaaacttctcatcaaaagcaaagagctacaagactctcaggacaagtgtcacaagatggagcaggaaatgacccggttacatcggagagtgtcagaggtggaggctgtgcttagtcagaaggaggtggagctgaaggcctctgagactcagagatccctcctggagcaggaccttgctacctacatcacagaatgcagtagcttaaagcgaagtttggagcaagcacggatggaggtgtcccaggaggatgacaaagcactgcagcttctccatgatatcagagagcagagccggaagctccaagaaatcaaagagcaggagtaccaggctcaagtggaagaaatgaggttgatgatgaatcagttggaagaggatcttgtctcagcaagaagacggagtgatctctacgaatctgagctgagagagtctcggcttgctgctgaagaattcaagcggaaagcgacagaatgtcagcataaactgttgaaggctaaggatcaagggaagcctgaagtgggagaatatgcgaaactggagaagatcaatgctgagcagcagctcaaaattcaggagctccaagagaaactggagaaggctgtaaaagccagcacggaggccaccgagctgctgcagaatatccgccaggcaaaggagcgagccgagagggagctggagaagctgcagaaccgagaggattcttctgaaggcatcagaaagaagctggtggaagctgaggagctcgaagagaaacatcgggaggcccaagtctcagcccagcacctagaagtgcacctgaaacagaaagagcagcactatgaggaaaagattaaagtgttggacaatcagataaagaaagacctggctgacaaggagacactggagaacatgatgcagagacacgaggaggaggcccatgagaagggcaaaattctcagcgaacagaaggcgatgatcaatgctatggattccaagatcagatccctggaacagaggattgtggaactgtctgaagccaataaacttgcagcaaatagcagtctttttacccaaaggaacatgaaggcccaagaagagatgatttctgaactcaggcaacagaaattttacctggagacacaggctgggaagttggaggcccagaaccgaaaactggaggagcagctggagaagatcagccaccaagaccacagtgacaagaatcggctgctggaactggagacaagattgcgggaggtcagtctagagcacgaggagcagaaactggagctcaagcgccagctcacagagctacagctctccctgcaggagcgcgagtcacagttgacagccctgcaggctgcacgggcggccctggagagccagcttcgccaggcgaagacagagctggaagagaccacagcagaagctgaagaggagatccaggcactcacggcacatagagatgaaatccagcgcaaatttgatgctcttcgtaacagctgtactgtaatcacagacctggaggagcagctaaaccagctgaccgaggacaacgctgaactcaacaaccaaaacttctacttgtccaaacaactcgatgaggcttctggcgccaacgacgagattgtacaactgcgaagtgaagtggaccatctccgccgggagatcacggaacgagagatgcagcttaccagccagaagcaaacgatggaggctctgaagaccacgtgcaccatgctggaggaacaggtcatggatttggaggccctaaacgatgagctgctagaaaaagagcggcagtgggaggcctggaggagcgtcctgggtgatgagaaatcccagtttgagtgtcgggttcgagagctgcagagaatgctggacaccgagaaacagagcagggcgagagccgatcagcggatcaccgagtctcgccaggtggtggagctggcagtgaaggagcacaaggctgagattctcgctctgcagcaggctctcaaagagcagaagctgaaggccgagagcctctctgacaagctcaatgacctggagaagaagcatgctatgcttgaaatgaatgcccgaagcttacagcagaagctggagactgaacgagagctcaaacagaggcttctggaagagcaagccaaattacagcagcagatggacctgcagaaaaatcacattttccgtctgactcaaggactgcaagaagctctagatcgggctgatctactgaagacagaaagaagtgacttggagtatcagctggaaaacattcaggttctctattctcatgaaaaggtgaaaatggaaggcactatttctcaacaaaccaaactcattgattttctgcaagccaaaatggaccaacctgctaaaaagaaaaaggttcctctgcagtacaatgagctgaagctggccctggagaaggagaaagctcgctgtgcagagctagaggaagcccttcagaagacccgcatcgagctccggtccgcccgggaggaagctgcccaccgcaaagcaacggaccacccacacccatccacgccagccaccgcgaggcagcagatcgccatgtccgccatcgtgcggtcgccagagcaccagcccagtgccatgagcctgctggccccgccatccagccgcagaaaggagtcttcaactccagaggaatttagtcggcgtcttaaggaacgcatgcaccacaatattcctcaccgattcaacgtaggactgaacatgcgagccacaaagtgtgctgtgtgtctggataccgtgcactttggacgccaggcatccaaatgtctcgaatgtcaggtgatgtgtcaccccaagtgctccacgtgcttgccagccacctgcggcttgcctgctgaatatgccacacacttcaccgaggccttctgccgtgacaaaatgaactccccaggtctccagaccaaggagcccagcagcagcttgcacctggaagggtggatgaaggtgcccaggaataacaaacgaggacagcaaggctgggacaggaagtacattgtcctggagggatcaaaagtcctcatttatgacaatgaagccagagaagctggacagaggccggtggaagaatttgagctgtgccttcccgacggggatgtatctattcatggtgccgttggtgcttccgaactcgcaaatacagccaaagcagatgtcccatacatactgaagatggaatctcacccgcacaccacctgctggcccgggagaaccctctacttgctagctcccagcttccctgacaaacagcgctgggtcaccgccttagaatcagttgtcgcaggtgggagagtttctagggaaaaagcagaagctgatgctaaactgcttggaaactccctgctgaaactggaaggtgatgaccgtctagacatgaactgcacgctgcccttcagtgaccaggtggtgttggtgggcaccgaggaagggctctacgccctgaatgtcttgaaaaactccctaacccatgtcccaggaattggagcagtcttccaaatttatattatcaaggacctggagaagctactcatgatagcaggagaagagcgggcactgtgtcttgtggacgtgaagaaagtgaaacagtccctggcccagtcccacctgcctgcccagcccgacatctcacccaacatttttgaagctgtcaagggctgccacttgtttggggcaggcaagattgagaacgggctctgcatctgtgcagccatgcccagcaaagtcgtcattctccgctacaacgaaaacctcagcaaatactgcatccggaaagagatagagacctcagagccctgcagctgtatccacttcaccaattacagtatcctcattggaaccaataaattctacgaaatcgacatgaagcagtacacgctcgaggaattcctggataacacgttcgcgagagataacacgttcgcgagggataacacgttcgcgagagataacacgttcgcgagggataacacgttcgcgagagataacacgttcgcgagggataacacgttcgcgagagataacacgttcgcgag

SEQ ID NO: 736583 - DNA, 3950 bp, Homo sapiens
  misc_feature (3950)..(3950): n is a, c, g, or t
gatcactgttcatcctgagaggcatgaaaggtgaatggggcgtgtgcagtggctcaagcttgtaattctaatgctttgggaggctgaggtgggaggattgcttgagcccagcagtttgaggctgcagtgagctatgatcacaccactgcactctaacctaggtgacagagcgagatcttgtctccaaaaaaaaaaaaagatgaatggctctctatgacaacgtgaacaagcttggtgacaatgttctccagggcttggctagatgctgtaggcagaagcagaacagctgtggaccttggctgccctgtgttacctctcacatccttctcttctgctctcatgtctcaggagatagagacctcagagccctgcagctgtatccacttcaccaattacagtatcctcattggaaccaataaattctacgaaatcgacatgaagcagtacacgctcgaggaattcctggataagaatgaccattccttggcacctgctgtgtttgccgcctcttccaacagcttccctgtctcaatcgtgcaggtgaacagcgcagggcagcgagaggagtacttgctgtgtttccacgaatttggagtgttcgtggattcttacggaagacgtagccgcacagacgatctcaagtggagtcgcttacctttggcctttgcctacagagaaccctatctgtttgtgacccacttcaactcactcgaagtaattgagatccaggcacgctcctcagcagggacccctgcccgagcgtacctggacatcccgaacccgcgctacctgggccctgccatttcctcaggagcgatttacttggcgtcctcataccaggataaattaagggtcatttgctgcaagggaaacctcgtgaaggagtccggcactgaacaccaccggggcccgtccacctcccgcagcagccccaacaagcgaggcccacccacgtacaacgagcacatcaccaagcgcgtggcctccagcccagcgccgcccgaaggccccagccacccgcgagagccaagcacaccccaccgctaccgcgaggggcggaccgagctgcgcagggacaagtctcctggccgccccctggagcgagagaagtcccccggccggatgctcagcacgcggagagagcggtcccccgggaggctgtttgaagacagcagcaggggccggctgcctgcgggagccgtgaggaccccgctgtcccaggtgaacaaggtctgggaccagtcttcagtataaatctcagccagaaaaaccaactcctcatcttgatctgcaggaaaacaccaaacacactatggaactctgctgatggggacccaagcgcccacgtgctcagccaccctctggctcagcggggcccagacccacctcggcacggacacccctgtctccaggaggggcaggtggctgaggctcttcggagctgtcagcgcccggtgcctgccctgggcacctccctgcagtcatctctttgcactttgttactctttcaaagcattcacaaacttttgtacctagctctagcctgtaccagttagttcatcaaaggaaaccaaccgggatgctaactacaacatggttagaatcctaattagctactttaagatcctaggattggttggtttttcttttttttttctctttgtttctttccttttttttttttttttttaagacaacagaattcttaatagatttgaatagcgacgtatttcccgtgttgtagtcatttttagctcgaccacatcatcaggtctttgccaccgaggcatagtgtagaacagtcccggtcagttggccaacctcccgcagccaagtaggttcatccttgttcctgttcattctcatagatggccctgctttccccagggtgacatcgtagccaaatgtttactgttttcattgccttttatggccttgacgacttcccctcccaccagctgagaatgtatggaggtcatcggggcctcagctcggaggcagtgacttggggccaagggacctcgagacgctttccttccccaccccccagcgtcatctccccagcctgctgttcccgctttccatatagctttggccaggaaagcatgcaatagacttgctcggagcccagcactcctgggtctcggggtcggggaggggacgggggcacccacttccttgtctgtgacggcgtgttgttccccactctgggatggggaagaggcccgtcgggagttctgcatggcagttcactgcatgtgctgcccccttgggttgctctgccaatgtattaataccatcccatagctcctgccaaatcgagaccctctgacgacttgccgactaactggccaccacaagctgcagtctgtagcactgaacaaacaaaaaacaaaacgctcaagccttacgaccagagaaggatttcagcaaaccaccacctcccactcagtgtcccctccaaacttcacacttccctgcctgcagaggatgactctgttcacacccaatccagcgcggttctaccccacgaaactgtgactttccaaatgagcctttccctagggctagacctaagaccaggaagtttgagaaagcagccgcagctcaactcttccagctccgccagggttgggaagtccttaggtgcagtgcggctcccactgggtctgcggaccctcctattagagtacgaaattcctggcaactggtacagaaccaacctagaggctttgcagttggcaagctaactcgcggccttatttctgcctttaatctcccacaaggcatctgttgctttgggtcctccacgactcttaggcccgcctcaacaacccaggcacctcctaggtaggctcaaaggtagacccgtttccaccgcagcaggtgaacatgaccgtgttttcaactgtgtccacagttcagatccctttccagattgcaacctggcctgcatcccagctccttcctgctcgtgtcttaacctaagtgctttcttgtttgaaacgcctacaaacctccatgtggtagctcctttggcaaatgtcctgctgtggcgttttatgtgttgcttggagtctgtggggtcgtactccctcccctcccgtccccagggcagatttgattgaatgtttgctgaagttttgtctcttggtccacagtatttggaaaggtcactgaaaatgggtctttcagtcttggcatttcatttaggatctccatgagaaatgggcttcttgagccctgaaaatgtatattgtgtgtctcatctgtgaactgctttctgctatatagaactagctcaaaagactgtacatatttacaagaaactttatattcgtaaaaaaaaaaagaggaaattgaattggtttctacttttttattgtaaaaggtgcatttttcaacacttacttttggtttcaatggtggtagttgtggacagccatcttcactggagggtggggagctccgtgtgaccaccaagatgccagcaggatataccgtaacacgaaattgctgtcaaaagcttattagcatcaatcaagattctaggtctccaaaagtacaggctttttcttcattaccttttttattcagaacgaggaagagaacacaaggaatgattcaagatccaccttgagaggaatgaactttgttgttgaacaattagtgaaataaagcaatgatctaaactaaaaaaaaaaaaaaacaaacaaaaaaacgtggtggggcgcctgcgacctggaaaaagttttccaaacccttcgtgggggcgcggcccagaggtaggtaaccatggccaaaactggtccaaagaacaccgcgcatagatcatgggtcgcgtcctcccataaaaaagcgcggcgaacggggggtcgaacaactcgagggggtctcgggcacacggtcttcaagggtccacgagtcaacaccccccgggacgcagaacn

SEQ ID NO: 736584 - DNA, 7363 bp, Homo sapiens
  misc_feature (7363)..(7363): n is a, c, g, or t
ggatcccctctggatgaaagtgtcacaagatggagcaggaaatgacccggttacatcggagagtgtcagaggtggaggctgtgcttagtcagaaggaggtggagctgaaggcctctgagactcagagatccctcctggagcaggaccttgctacctacatcacagaatgcagtagcttaaagcgaagtttggagcaagcacggatggaggtgtcccaggaggatgacaaagcactgcagcttctccatgatatcagagagcagagccggaagctccaagaaatcaaagagcaggagtaccaggctcaagtggaagaaatgaggttgatgatgaatcagttggaagaggatcttgtctcagcaagaagacggagtgatctctacgaatctgagctgagagagtctcggcttgctgctgaagaattcaagcggaaagcgacagaatgtcagcataaactgttgaaggctaaggatcaagggaagcctgaagtgggagaatatgcgaaactggagaagatcaatgctgagcagcagctcaaaattcaggagctccaagagaaactggagaaggctgtaaaagccagcacggaggccaccgagctgctgcagaatatccgccaggcaaaggagcgagccgagagggagctggagaagctgcagaaccgagaggattcttctgaaggcatcagaaagaagctggtggaagctgaggagctcgaagagaaacatcgggaggcccaagtctcagcccagcacctagaagtgcacctgaaacagaaagagcagcactatgaggaaaagattaaagtgttggacaatcagataaagaaagacctggctgacaaggagacactggagaacatgatgcagagacacgaggaggaggcccatgagaagggcaaaattctcagcgaacagaaggcgatgatcaatgctatggattccaagatcagatccctggaacagaggattgtggaactgtctgaagccaataaacttgcagcaaatagcagtctttttacccaaaggaacatgaaggcccaagaagagatgatttctgaactcaggcaacagaaattttacctggagacacaggctgggaagttggaggcccagaaccgaaaactggaggagcagctggagaagatcagccaccaagaccacagtgacaagaatcggctgctggaactggagacaagattgcgggaggtcagtctagagcacgaggagcagaaactggagctcaagcgccagctcacagagctacagctctccctgcaggagcgcgagtcacagttgacagccctgcaggctgcacgggcggccctggagagccagcttcgccaggcgaagacagagctggaagagaccacagcagaagctgaagaggagatccaggcactcacggcacatagagatgaaatccagcgcaaatttgatgctcttcgtaacagctgtactgtaatcacagacctggaggagcagctaaaccagctgaccgaggacaacgctgaactcaacaaccaaaacttctacttgtccaaacaactcgatgaggcttctggcgccaacgacgagattgtacaactgcgaagtgaagtggaccatctccgccgggagatcacggaacgagagatgcagcttaccagccagaagcaaacgatggaggctctgaagaccacgtgcaccatgctggaggaacaggtcatggatttggaggccctaaacgatgagctgctagaaaaagagcggcagtgggaggcctggaggagcgtcctgggtgatgagaaatcccagtttgagtgtcgggttcgagagctgcagagaatgctggacaccgagaaacagagcagggcgagagccgatcagcggatcaccgagtctcgccaggtggtggagctggcagtgaaggagcacaaggctgagattctcgctctgcagcaggctctcaaagagcagaagctgaaggccgagagcctctctgacaagctcaatgacctggagaagaagcatgctatgcttgaaatgaatgcccgaagcttacagcagaagctggagactgaacgagagctcaaacagaggcttctggaagagcaagccaaattacagcagcagatggacctgcagaaaaatcacattttccgtctgactcaaggactgcaagaagctctagatcgggctgatctactgaagacagaaagaagtgacttggagtatcagctggaaaacattcaggttctctattctcatgaaaaggtgaaaatggaaggcactatttctcaacaaaccaaactcattgattttctgcaagccaaaatggaccaacctgctaaaaagaaaaaggttcctctgcagtacaatgagctgaagctggccctggagaaggagaaagctcgctgtgcagagctagaggaagcccttcagaagacccgcatcgagctccggtccgcccgggaggaagctgcccaccgcaaagcaacggaccacccacacccatccacgccagccaccgcgaggcagcagatcgccatgtccgccatcgtgcggtcgccagagcaccagcccagtgccatgagcctgctggccccgccatccagccgcagaaaggagtcttcaactccagaggaatttagtcggcgtcttaaggaacgcatgcaccacaatattcctcaccgattcaacgtaggactgaacatgcgagccacaaagtgtgctgtgtgtctggataccgtgcactttggacgccaggcatccaaatgtctcgaatgtcaggtgatgtgtcaccccaagtgctccacgtgcttgccagccacctgcggcttgcctgctgaatatgccacacacttcaccgaggccttctgccgtgacaaaatgaactccccaggtctccagaccaaggagcccagcagcagcttgcacctggaagggtggatgaaggtgcccaggaataacaaacgaggacagcaaggctgggacaggaagtacattgtcctggagggatcaaaagtcctcatttatgacaatgaagccagagaagctggacagaggccggtggaagaatttgagctgtgccttcccgacggggatgtatctattcatggtgccgttggtgcttccgaactcgcaaatacagccaaagcagatgtcccatacatactgaagatggaatctcacccgcacaccacctgctggcccgggagaaccctctacttgctagctcccagcttccctgacaaacagcgctgggtcaccgccttagaatcagttgtcgcaggtgggagagtttctagggaaaaagcagaagctgatgctaaactgcttggaaactccctgctgaaactggaaggtgatgaccgtctagacatgaactgcacgctgcccttcagtgaccaggtggtgttggtgggcaccgaggaagggctctacgccctgaatgtcttgaaaaactccctaacccatgtcccaggaattggagcagtcttccaaatttatattatcaaggacctggagaagctactcatgatagcaggagaagagcgggcactgtgtcttgtggacgtgaagaaagtgaaacagtccctggcccagtcccacctgcctgcccagcccgacatctcacccaacatttttgaagctgtcaagggctgccacttgtttggggcaggcaagattgagaacgggctctgcatctgtgcagccatgcccagcaaagtcgtcattctccgctacaacgaaaacctcagcaaatactgcatccggaaagagatagagacctcagagccctgcagctgtatccacttcaccaattacagtatcctcattggaaccaataaattctacgaaatcgacatgaagcagtacacgctcgaggaattcctggataagaatgaccattccttggcacctgctgtgtttgccgcctcttccaacagcttccctgtctcaatcgtgcaggtgaacagcgcagggcagcgagaggagtacttgctgtgtttccacgaatttggagtgttcgtggattcttacggaagacgtagccgcacagacgatctcaagtggagtcgcttacctttggcctttgcctacagagaaccctatctgtttgtgacccacttcaactcactcgaagtaattgagatccaggcacgctcctcagcagggacccctgcccgagcgtacctggacatcccgaacccgcgctacctgggccctgccatttcctcaggagcgatttacttggcgtcctcataccaggataaattaagggtcatttgctgcaagggaaacctcgtgaaggagtccggcactgaacaccaccggggcccgtccacctcccgcagcagccccaacaagcgaggcccacccacgtacaacgagcacatcaccaagcgcgtggcctccagcccagcgccgcccgaaggccccagccacccgcgagagccaagcacaccccaccgctaccgcgaggggcggaccgagctgcgcagggacaagtctcctggccgccccctggagcgagagaagtcccccggccggatgctcagcacgcggagagagcggtcccccgggaggctgtttgaagacagcagcaggggccggctgcctgcgggagccgtgaggaccccgctgtcccaggtgaacaaggtctgggaccagtcttcagtataaatctcagccagaaaaaccaactcctcatcttgatctgcaggaaaacaccaaacacactatggaactctgctgatggggacccaagcgcccacgtgctcagccaccctctggctcagcggggcccagacccacctcggcacggacacccctgtctccaggaggggcaggtggctgaggctcttcggagctgtcagcgcccggtgcctgccctgggcacctccctgcagtcatctctttgcactttgttactctttcaaagcattcacaaacttttgtacctagctctagcctgtaccagttagttcatcaaaggaaaccaaccgggatgctaactacaacatggttagaatcctaattagctactttaagatcctaggattggttggtttttcttttttttttctctttgtttctttccttttttttttttttttttaagacaacagaattcttaatagatttgaatagcgacgtatttcccgtgttgtagtcatttttagctcgaccacatcatcaggtctttgccaccgaggcatagtgtagaacagtcccggtcagttggccaacctcccgcagccaagtaggttcatccttgttcctgttcattctcatagatggccctgctttccccagggtgacatcgtagccaaatgtttactgttttcattgccttttatggccttgacgacttcccctcccaccagctgagaatgtatggaggtcatcggggcctcagctcggaggcagtgacttggggccaagggacctcgagacgctttccttccccaccccccagcgtcatctccccagcctgctgttcccgctttccatatagctttggccaggaaagcatgcaatagacttgctcggagcccagcactcctgggtctcggggtcggggaggggacgggggcacccacttccttgtctgtgacggcgtgttgttccccactctgggatggggaagaggcccgtcgggagttctgcatggcagttcactgcatgtgctgcccccttgggttgctctgccaatgtattaataccatcccatagctcctgccaaatcgagaccctctgacgacttgccgactaactggccaccacaagctgcagtctgtagcactgaacaaacaaaaaacaaaacgctcaagccttacgaccagagaaggatttcagcaaaccaccacctcccactcagtgtcccctccaaacttcacacttccctgcctgcagaggatgactctgttcacacccaatccagcgcggttctaccccacgaaactgtgactttccaaatgagcctttccctagggctagacctaagaccaggaagtttgagaaagcagccgcagctcaactcttccagctccgccagggttgggaagtccttaggtgcagtgcggctcccactgggtctgcggaccctcctattagagtacgaaattcctggcaactggtacagaaccaacctagaggctttgcagttggcaagctaactcgcggccttatttctgcctttaatctcccacaaggcatctgttgctttgggtcctccacgactcttaggcccgcctcaacaacccaggcacctcctaggtaggctcaaaggtagacccgtttccaccgcagcaggtgaacatgaccgtgttttcaactgtgtccacagttcagatccctttccagattgcaacctggcctgcatcccagctccttcctgctcgtgtcttaacctaagtgctttcttgtttgaaacgcctacaaacctccatgtggtagctcctttggcaaatgtcctgctgtggcgttttatgtgttgcttggagtctgtggggtcgtactccctcccctcccgtccccagggcagatttgattgaatgtttgctgaagttttgtctcttggtccacagtatttggaaaggtcactgaaaatgggtctttcagtcttggcatttcatttaggatctccatgagaaatgggcttcttgagccctgaaaatgtatattgtgtgtctcatctgtgaactgctttctgctatatagaactagctcaaaagactgtacatatttacaagaaactttatattcgtaaaaaaaaaaagaggaaattgaattggtttctacttttttattgtaaaaggtgcatttttcaacacttacttttggtttcaatggtggtagttgtggacagccatcttcactggagggtggggagctccgtgtgaccaccaagatgccagcaggatataccgtaacacgaaattgctgtcaaaagcttattagcatcaatcaagattctaggtctccaaaagtacaggctttttcttcattaccttttttattcagaacgaggaagagaacacaaggaatgattcaagatccaccttgagaggaatgaactttgttgttgaacaattagtgaaataaagcaatgatctaaactaaaaaaaaaaaaaaacaaacaaaaaaacgtggtggggcgcctgcgacctggaaaaagttttccaaacccttcgtgggggcgcggcccagaggtaggtaaccatggccaaaactggtccaaagaacaccgcgcatagatcatgggtcgcgtcctcccataaaaaagcgcggcgaacggggggtcgaacaactcgagggggtctcgggcacacggtcttcaagggtccacgagtcaacaccccccgggacgcagaacn

SEQ ID NO: 736585 - DNA, 5696 bp, Homo sapiens
  misc_feature (5696)..(5696): n is a, c, g, or t
atgcatgtagtcgcagtcagcgttgattattatttactcgctggcatgtcagtatattactccgttagcagctttcctccgttaaactggttcttgctttttcccttgtttcaaacttagaaataatttccatcctcatataataacctatggaagactcaccagtgacagggacttctgtatttagaaaaaagcaacctttacgttctgacctttagaactcaatattctttctccgtgaaggttcgtggacattcataaacgttgtcagcatctaacattcctaagtgtggcattatgccaatctttccaaatgtctagctcaatgacctggagaagaagcatgctatgcttgaaatgaatgcccgaagcttacagcagaagctggagactgaacgagagctcaaacagaggcttctggaagagcaagccaaattacagcagcagatggacctgcagaaaaatcacattttccgtctgactcaaggactgcaagaagctctagatcgggctgatctactgaagacagaaagaagtgacttggagtatcagctggaaaacattcaggttctctattctcatgaaaaggtgaaaatggaaggcactatttctcaacaaaccaaactcattgattttctgcaagccaaaatggaccaacctgctaaaaagaaaaaggttcctctgcagtacaatgagctgaagctggccctggagaaggagaaagctcgctgtgcagagctagaggaagcccttcagaagacccgcatcgagctccggtccgcccgggaggaagctgcccaccgcaaagcaacggaccacccacacccatccacgccagccaccgcgaggcagcagatcgccatgtccgccatcgtgcggtcgccagagcaccagcccagtgccatgagcctgctggccccgccatccagccgcagaaaggagtcttcaactccagaggaatttagtcggcgtcttaaggaacgcatgcaccacaatattcctcaccgattcaacgtaggactgaacatgcgagccacaaagtgtgctgtgtgtctggataccgtgcactttggacgccaggcatccaaatgtctcgaatgtcaggtgatgtgtcaccccaagtgctccacgtgcttgccagccacctgcggcttgcctgctgaatatgccacacacttcaccgaggccttctgccgtgacaaaatgaactccccaggtctccagaccaaggagcccagcagcagcttgcacctggaagggtggatgaaggtgcccaggaataacaaacgaggacagcaaggctgggacaggaagtacattgtcctggagggatcaaaagtcctcatttatgacaatgaagccagagaagctggacagaggccggtggaagaatttgagctgtgccttcccgacggggatgtatctattcatggtgccgttggtgcttccgaactcgcaaatacagccaaagcagatgtcccatacatactgaagatggaatctcacccgcacaccacctgctggcccgggagaaccctctacttgctagctcccagcttccctgacaaacagcgctgggtcaccgccttagaatcagttgtcgcaggtgggagagtttctagggaaaaagcagaagctgatgctaaactgcttggaaactccctgctgaaactggaaggtgatgaccgtctagacatgaactgcacgctgcccttcagtgaccaggtggtgttggtgggcaccgaggaagggctctacgccctgaatgtcttgaaaaactccctaacccatgtcccaggaattggagcagtcttccaaatttatattatcaaggacctggagaagctactcatgatagcaggagaagagcgggcactgtgtcttgtggacgtgaagaaagtgaaacagtccctggcccagtcccacctgcctgcccagcccgacatctcacccaacatttttgaagctgtcaagggctgccacttgtttggggcaggcaagattgagaacgggctctgcatctgtgcagccatgcccagcaaagtcgtcattctccgctacaacgaaaacctcagcaaatactgcatccggaaagagatagagacctcagagccctgcagctgtatccacttcaccaattacagtatcctcattggaaccaataaattctacgaaatcgacatgaagcagtacacgctcgaggaattcctggataagaatgaccattccttggcacctgctgtgtttgccgcctcttccaacagcttccctgtctcaatcgtgcaggtgaacagcgcagggcagcgagaggagtacttgctgtgtttccacgaatttggagtgttcgtggattcttacggaagacgtagccgcacagacgatctcaagtggagtcgcttacctttggcctttgcctacagagaaccctatctgtttgtgacccacttcaactcactcgaagtaattgagatccaggcacgctcctcagcagggacccctgcccgagcgtacctggacatcccgaacccgcgctacctgggccctgccatttcctcaggagcgatttacttggcgtcctcataccaggataaattaagggtcatttgctgcaagggaaacctcgtgaaggagtccggcactgaacaccaccggggcccgtccacctcccgcagcagccccaacaagcgaggcccacccacgtacaacgagcacatcaccaagcgcgtggcctccagcccagcgccgcccgaaggccccagccacccgcgagagccaagcacaccccaccgctaccgcgaggggcggaccgagctgcgcagggacaagtctcctggccgccccctggagcgagagaagtcccccggccggatgctcagcacgcggagagagcggtcccccgggaggctgtttgaagacagcagcaggggccggctgcctgcgggagccgtgaggaccccgctgtcccaggtgaacaaggtctgggaccagtcttcagtataaatctcagccagaaaaaccaactcctcatcttgatctgcaggaaaacaccaaacacactatggaactctgctgatggggacccaagcgcccacgtgctcagccaccctctggctcagcggggcccagacccacctcggcacggacacccctgtctccaggaggggcaggtggctgaggctcttcggagctgtcagcgcccggtgcctgccctgggcacctccctgcagtcatctctttgcactttgttactctttcaaagcattcacaaacttttgtacctagctctagcctgtaccagttagttcatcaaaggaaaccaaccgggatgctaactacaacatggttagaatcctaattagctactttaagatcctaggattggttggtttttcttttttttttctctttgtttctttccttttttttttttttttttaagacaacagaattcttaatagatttgaatagcgacgtatttcccgtgttgtagtcatttttagctcgaccacatcatcaggtctttgccaccgaggcatagtgtagaacagtcccggtcagttggccaacctcccgcagccaagtaggttcatccttgttcctgttcattctcatagatggccctgctttccccagggtgacatcgtagccaaatgtttactgttttcattgccttttatggccttgacgacttcccctcccaccagctgagaatgtatggaggtcatcggggcctcagctcggaggcagtgacttggggccaagggacctcgagacgctttccttccccaccccccagcgtcatctccccagcctgctgttcccgctttccatatagctttggccaggaaagcatgcaatagacttgctcggagcccagcactcctgggtctcggggtcggggaggggacgggggcacccacttccttgtctgtgacggcgtgttgttccccactctgggatggggaagaggcccgtcgggagttctgcatggcagttcactgcatgtgctgcccccttgggttgctctgccaatgtattaataccatcccatagctcctgccaaatcgagaccctctgacgacttgccgactaactggccaccacaagctgcagtctgtagcactgaacaaacaaaaaacaaaacgctcaagccttacgaccagagaaggatttcagcaaaccaccacctcccactcagtgtcccctccaaacttcacacttccctgcctgcagaggatgactctgttcacacccaatccagcgcggttctaccccacgaaactgtgactttccaaatgagcctttccctagggctagacctaagaccaggaagtttgagaaagcagccgcagctcaactcttccagctccgccagggttgggaagtccttaggtgcagtgcggctcccactgggtctgcggaccctcctattagagtacgaaattcctggcaactggtacagaaccaacctagaggctttgcagttggcaagctaactcgcggccttatttctgcctttaatctcccacaaggcatctgttgctttgggtcctccacgactcttaggcccgcctcaacaacccaggcacctcctaggtaggctcaaaggtagacccgtttccaccgcagcaggtgaacatgaccgtgttttcaactgtgtccacagttcagatccctttccagattgcaacctggcctgcatcccagctccttcctgctcgtgtcttaacctaagtgctttcttgtttgaaacgcctacaaacctccatgtggtagctcctttggcaaatgtcctgctgtggcgttttatgtgttgcttggagtctgtggggtcgtactccctcccctcccgtccccagggcagatttgattgaatgtttgctgaagttttgtctcttggtccacagtatttggaaaggtcactgaaaatgggtctttcagtcttggcatttcatttaggatctccatgagaaatgggcttcttgagccctgaaaatgtatattgtgtgtctcatctgtgaactgctttctgctatatagaactagctcaaaagactgtacatatttacaagaaactttatattcgtaaaaaaaaaaagaggaaattgaattggtttctacttttttattgtaaaaggtgcatttttcaacacttacttttggtttcaatggtggtagttgtggacagccatcttcactggagggtggggagctccgtgtgaccaccaagatgccagcaggatataccgtaacacgaaattgctgtcaaaagcttattagcatcaatcaagattctaggtctccaaaagtacaggctttttcttcattaccttttttattcagaacgaggaagagaacacaaggaatgattcaagatccaccttgagaggaatgaactttgttgttgaacaattagtgaaataaagcaatgatctaaactaaaaaaaaaaaaaaacaaacaaaaaaacgtggtggggcgcctgcgacctggaaaaagttttccaaacccttcgtgggggcgcggcccagaggtaggtaaccatggccaaaactggtccaaagaacaccgcgcatagatcatgggtcgcgtcctcccataaaaaagcgcggcgaacggggggtcgaacaactcgagggggtctcgggcacacggtcttcaagggtccacgagtcaacaccccccgggacgcagaacn

SEQ ID NO: 736586 - DNA, 5348 bp, Homo sapiens
  misc_feature (5348)..(5348): n is a, c, g, or t
cgagctagaggatccagaggctgagtggaagagcaagccaaattacagcagcagatggacctgcagaaaaatcacattttccgtctgactcaaggactgcaagaagctctagatcgggctgatctactgaagacagaaagaagtgacttggagtatcagctggaaaacattcaggttctctattctcatgaaaaggtgaaaatggaaggcactatttctcaacaaaccaaactcattgattttctgcaagccaaaatggaccaacctgctaaaaagaaaaagggtttatttagtcgacggaaagaggaccctgctttacccacacaggttcctctgcagtacaatgagctgaagctggccctggagaaggagaaagctcgctgtgcagagctagaggaagcccttcagaagacccgcatcgagctccggtccgcccgggaggaagctgcccaccgcaaagcaacggaccacccacacccatccacgccagccaccgcgaggcagcagatcgccatgtccgccatcgtgcggtcgccagagcaccagcccagtgccatgagcctgctggccccgccatccagccgcagaaaggagtcttcaactccagaggaatttagtcggcgtcttaaggaacgcatgcaccacaatattcctcaccgattcaacgtaggactgaacatgcgagccacaaagtgtgctgtgtgtctggataccgtgcactttggacgccaggcatccaaatgtctcgaatgtcaggtgatgtgtcaccccaagtgctccacgtgcttgccagccacctgcggcttgcctgctgaatatgccacacacttcaccgaggccttctgccgtgacaaaatgaactccccaggtctccagaccaaggagcccagcagcagcttgcacctggaagggtggatgaaggtgcccaggaataacaaacgaggacagcaaggctgggacaggaagtacattgtcctggagggatcaaaagtcctcatttatgacaatgaagccagagaagctggacagaggccggtggaagaatttgagctgtgccttcccgacggggatgtatctattcatggtgccgttggtgcttccgaactcgcaaatacagccaaagcagatgtcccatacatactgaagatggaatctcacccgcacaccacctgctggcccgggagaaccctctacttgctagctcccagcttccctgacaaacagcgctgggtcaccgccttagaatcagttgtcgcaggtgggagagtttctagggaaaaagcagaagctgatgctaaactgcttggaaactccctgctgaaactggaaggtgatgaccgtctagacatgaactgcacgctgcccttcagtgaccaggtggtgttggtgggcaccgaggaagggctctacgccctgaatgtcttgaaaaactccctaacccatgtcccaggaattggagcagtcttccaaatttatattatcaaggacctggagaagctactcatgatagcaggagaagagcgggcactgtgtcttgtggacgtgaagaaagtgaaacagtccctggcccagtcccacctgcctgcccagcccgacatctcacccaacatttttgaagctgtcaagggctgccacttgtttggggcaggcaagattgagaacgggctctgcatctgtgcagccatgcccagcaaagtcgtcattctccgctacaacgaaaacctcagcaaatactgcatccggaaagagatagagacctcagagccctgcagctgtatccacttcaccaattacagtatcctcattggaaccaataaattctacgaaatcgacatgaagcagtacacgctcgaggaattcctggataagaatgaccattccttggcacctgctgtgtttgccgcctcttccaacagcttccctgtctcaatcgtgcaggtgaacagcgcagggcagcgagaggagtacttgctgtgtttccacgaatttggagtgttcgtggattcttacggaagacgtagccgcacagacgatctcaagtggagtcgcttacctttggcctttgcctacagagaaccctatctgtttgtgacccacttcaactcactcgaagtaattgagatccaggcacgctcctcagcagggacccctgcccgagcgtacctggacatcccgaacccgcgctacctgggccctgccatttcctcaggagcgatttacttggcgtcctcataccaggataaattaagggtcatttgctgcaagggaaacctcgtgaaggagtccggcactgaacaccaccggggcccgtccacctcccgcagcagccccaacaagcgaggcccacccacgtacaacgagcacatcaccaagcgcgtggcctccagcccagcgccgcccgaaggccccagccacccgcgagagccaagcacaccccaccgctaccgcgaggggcggaccgagctgcgcagggacaagtctcctggccgccccctggagcgagagaagtcccccggccggatgctcagcacgcggagagagcggtcccccgggaggctgtttgaagacagcagcaggggccggctgcctgcgggagccgtgaggaccccgctgtcccaggtgaacaaggtctgggaccagtcttcagtataaatctcagccagaaaaaccaactcctcatcttgatctgcaggaaaacaccaaacacactatggaactctgctgatggggacccaagcgcccacgtgctcagccaccctctggctcagcggggcccagacccacctcggcacggacacccctgtctccaggaggggcaggtggctgaggctcttcggagctgtcagcgcccggtgcctgccctgggcacctccctgcagtcatctctttgcactttgttactctttcaaagcattcacaaacttttgtacctagctctagcctgtaccagttagttcatcaaaggaaaccaaccgggatgctaactacaacatggttagaatcctaattagctactttaagatcctaggattggttggtttttcttttttttttctctttgtttctttccttttttttttttttttttaagacaacagaattcttaatagatttgaatagcgacgtatttcccgtgttgtagtcatttttagctcgaccacatcatcaggtctttgccaccgaggcatagtgtagaacagtcccggtcagttggccaacctcccgcagccaagtaggttcatccttgttcctgttcattctcatagatggccctgctttccccagggtgacatcgtagccaaatgtttactgttttcattgccttttatggccttgacgacttcccctcccaccagctgagaatgtatggaggtcatcggggcctcagctcggaggcagtgacttggggccaagggacctcgagacgctttccttccccaccccccagcgtcatctccccagcctgctgttcccgctttccatatagctttggccaggaaagcatgcaatagacttgctcggagcccagcactcctgggtctcggggtcggggaggggacgggggcacccacttccttgtctgtgacggcgtgttgttccccactctgggatggggaagaggcccgtcgggagttctgcatggcagttcactgcatgtgctgcccccttgggttgctctgccaatgtattaataccatcccatagctcctgccaaatcgagaccctctgacgacttgccgactaactggccaccacaagctgcagtctgtagcactgaacaaacaaaaaacaaaacgctcaagccttacgaccagagaaggatttcagcaaaccaccacctcccactcagtgtcccctccaaacttcacacttccctgcctgcagaggatgactctgttcacacccaatccagcgcggttctaccccacgaaactgtgactttccaaatgagcctttccctagggctagacctaagaccaggaagtttgagaaagcagccgcagctcaactcttccagctccgccagggttgggaagtccttaggtgcagtgcggctcccactgggtctgcggaccctcctattagagtacgaaattcctggcaactggtacagaaccaacctagaggctttgcagttggcaagctaactcgcggccttatttctgcctttaatctcccacaaggcatctgttgctttgggtcctccacgactcttaggcccgcctcaacaacccaggcacctcctaggtaggctcaaaggtagacccgtttccaccgcagcaggtgaacatgaccgtgttttcaactgtgtccacagttcagatccctttccagattgcaacctggcctgcatcccagctccttcctgctcgtgtcttaacctaagtgctttcttgtttgaaacgcctacaaacctccatgtggtagctcctttggcaaatgtcctgctgtggcgttttatgtgttgcttggagtctgtggggtcgtactccctcccctcccgtccccagggcagatttgattgaatgtttgctgaagttttgtctcttggtccacagtatttggaaaggtcactgaaaatgggtctttcagtcttggcatttcatttaggatctccatgagaaatgggcttcttgagccctgaaaatgtatattgtgtgtctcatctgtgaactgctttctgctatatagaactagctcaaaagactgtacatatttacaagaaactttatattcgtaaaaaaaaaaagaggaaattgaattggtttctacttttttattgtaaaaggtgcatttttcaacacttacttttggtttcaatggtggtagttgtggacagccatcttcactggagggtggggagctccgtgtgaccaccaagatgccagcaggatataccgtaacacgaaattgctgtcaaaagcttattagcatcaatcaagattctaggtctccaaaagtacaggctttttcttcattaccttttttattcagaacgaggaagagaacacaaggaatgattcaagatccaccttgagaggaatgaactttgttgttgaacaattagtgaaataaagcaatgatctaaactaaaaaaaaaaaaaaacaaacaaaaaaacgtggtggggcgcctgcgacctggaaaaagttttccaaacccttcgtgggggcgcggcccagaggtaggtaaccatggccaaaactggtccaaagaacaccgcgcatagatcatgggtcgcgtcctcccataaaaaagcgcggcgaacggggggtcgaacaactcgagggggtctcgggcacacggtcttcaagggtccacgagtcaacaccccccgggacgcagaacn

SEQ ID NO: 736587 - DNA, 4579 bp, Homo sapiens
  misc_feature (4579)..(4579): n is a, c, g, or t
ttcctggaagttgtcccccaccaggtgcaacacgcttgtctgctgaatatgccacacacttcaccgaggccttctgccgtgacaaaatgaactccccaggtctccagaccaaggagcccagcagcagcttgcacctggaagggtggatgaaggtgcccaggaataacaaacgaggacagcaaggctgggacaggaagtacattgtcctggagggatcaaaagtcctcatttatgacaatgaagccagagaagctggacagaggccggtggaagaatttgagctgtgccttcccgacggggatgtatctattcatggtgccgttggtgcttccgaactcgcaaatacagccaaagcagatgtcccatacatactgaagatggaatctcacccgcacaccacctgctggcccgggagaaccctctacttgctagctcccagcttccctgacaaacagcgctgggtcaccgccttagaatcagttgtcgcaggtgggagagtttctagggaaaaagcagaagctgatgctaaactgcttggaaactccctgctgaaactggaaggtgatgaccgtctagacatgaactgcacgctgcccttcagtgaccaggtggtgttggtgggcaccgaggaagggctctacgccctgaatgtcttgaaaaactccctaacccatgtcccaggaattggagcagtcttccaaatttatattatcaaggacctggagaagctactcatgatagcaggagaagagcgggcactgtgtcttgtggacgtgaagaaagtgaaacagtccctggcccagtcccacctgcctgcccagcccgacatctcacccaacatttttgaagctgtcaagggctgccacttgtttggggcaggcaagattgagaacgggctctgcatctgtgcagccatgcccagcaaagtcgtcattctccgctacaacgaaaacctcagcaaatactgcatccggaaagagatagagacctcagagccctgcagctgtatccacttcaccaattacagtatcctcattggaaccaataaattctacgaaatcgacatgaagcagtacacgctcgaggaattcctggataagaatgaccattccttggcacctgctgtgtttgccgcctcttccaacagcttccctgtctcaatcgtgcaggtgaacagcgcagggcagcgagaggagtacttgctgtgtttccacgaatttggagtgttcgtggattcttacggaagacgtagccgcacagacgatctcaagtggagtcgcttacctttggcctttgcctacagagaaccctatctgtttgtgacccacttcaactcactcgaagtaattgagatccaggcacgctcctcagcagggacccctgcccgagcgtacctggacatcccgaacccgcgctacctgggccctgccatttcctcaggagcgatttacttggcgtcctcataccaggataaattaagggtcatttgctgcaagggaaacctcgtgaaggagtccggcactgaacaccaccggggcccgtccacctcccgcagcagccccaacaagcgaggcccacccacgtacaacgagcacatcaccaagcgcgtggcctccagcccagcgccgcccgaaggccccagccacccgcgagagccaagcacaccccaccgctaccgcgaggggcggaccgagctgcgcagggacaagtctcctggccgccccctggagcgagagaagtcccccggccggatgctcagcacgcggagagagcggtcccccgggaggctgtttgaagacagcagcaggggccggctgcctgcgggagccgtgaggaccccgctgtcccaggtgaacaaggtctgggaccagtcttcagtataaatctcagccagaaaaaccaactcctcatcttgatctgcaggaaaacaccaaacacactatggaactctgctgatggggacccaagcgcccacgtgctcagccaccctctggctcagcggggcccagacccacctcggcacggacacccctgtctccaggaggggcaggtggctgaggctcttcggagctgtcagcgcccggtgcctgccctgggcacctccctgcagtcatctctttgcactttgttactctttcaaagcattcacaaacttttgtacctagctctagcctgtaccagttagttcatcaaaggaaaccaaccgggatgctaactacaacatggttagaatcctaattagctactttaagatcctaggattggttggtttttcttttttttttctctttgtttctttccttttttttttttttttttaagacaacagaattcttaatagatttgaatagcgacgtatttcccgtgttgtagtcatttttagctcgaccacatcatcaggtctttgccaccgaggcatagtgtagaacagtcccggtcagttggccaacctcccgcagccaagtaggttcatccttgttcctgttcattctcatagatggccctgctttccccagggtgacatcgtagccaaatgtttactgttttcattgccttttatggccttgacgacttcccctcccaccagctgagaatgtatggaggtcatcggggcctcagctcggaggcagtgacttggggccaagggacctcgagacgctttccttccccaccccccagcgtcatctccccagcctgctgttcccgctttccatatagctttggccaggaaagcatgcaatagacttgctcggagcccagcactcctgggtctcggggtcggggaggggacgggggcacccacttccttgtctgtgacggcgtgttgttccccactctgggatggggaagaggcccgtcgggagttctgcatggcagttcactgcatgtgctgcccccttgggttgctctgccaatgtattaataccatcccatagctcctgccaaatcgagaccctctgacgacttgccgactaactggccaccacaagctgcagtctgtagcactgaacaaacaaaaaacaaaacgctcaagccttacgaccagagaaggatttcagcaaaccaccacctcccactcagtgtcccctccaaacttcacacttccctgcctgcagaggatgactctgttcacacccaatccagcgcggttctaccccacgaaactgtgactttccaaatgagcctttccctagggctagacctaagaccaggaagtttgagaaagcagccgcagctcaactcttccagctccgccagggttgggaagtccttaggtgcagtgcggctcccactgggtctgcggaccctcctattagagtacgaaattcctggcaactggtacagaaccaacctagaggctttgcagttggcaagctaactcgcggccttatttctgcctttaatctcccacaaggcatctgttgctttgggtcctccacgactcttaggcccgcctcaacaacccaggcacctcctaggtaggctcaaaggtagacccgtttccaccgcagcaggtgaacatgaccgtgttttcaactgtgtccacagttcagatccctttccagattgcaacctggcctgcatcccagctccttcctgctcgtgtcttaacctaagtgctttcttgtttgaaacgcctacaaacctccatgtggtagctcctttggcaaatgtcctgctgtggcgttttatgtgttgcttggagtctgtggggtcgtactccctcccctcccgtccccagggcagatttgattgaatgtttgctgaagttttgtctcttggtccacagtatttggaaaggtcactgaaaatgggtctttcagtcttggcatttcatttaggatctccatgagaaatgggcttcttgagccctgaaaatgtatattgtgtgtctcatctgtgaactgctttctgctatatagaactagctcaaaagactgtacatatttacaagaaactttatattcgtaaaaaaaaaaagaggaaattgaattggtttctacttttttattgtaaaaggtgcatttttcaacacttacttttggtttcaatggtggtagttgtggacagccatcttcactggagggtggggagctccgtgtgaccaccaagatgccagcaggatataccgtaacacgaaattgctgtcaaaagcttattagcatcaatcaagattctaggtctccaaaagtacaggctttttcttcattaccttttttattcagaacgaggaagagaacacaaggaatgattcaagatccaccttgagaggaatgaactttgttgttgaacaattagtgaaataaagcaatgatctaaactaaaaaaaaaaaaaaacaaacaaaaaaacgtggtggggcgcctgcgacctggaaaaagttttccaaacccttcgtgggggcgcggcccagaggtaggtaaccatggccaaaactggtccaaagaacaccgcgcatagatcatgggtcgcgtcctcccataaaaaagcgcggcgaacggggggtcgaacaactcgagggggtctcgggcacacggtcttcaagggtccacgagtcaacaccccccgggacgcagaacn

SEQ ID NO: 736588 - DNA, 1224 bp, Homo sapiens
  misc_feature (9)..(9): n is a, c, g, or t
gcggccgcncccacttcagataatgacaaagcaagggaaggagacaaacaaagagaaggaacaatttaagggacaagaagagaaaggggagaacaaggacagcaccttgacaaggaccccgctcgagccgctggagaaaaacaagcaaatcctagtgctgggcctggatggagcaggaaaaaccagtgtcctgcactctctagcttcaaacagagtccagcacagtgtggcacccacccaaggtttccatgcagtttgcatcaacactgaagacagccagatggagttcctggagattggtggcagtaaaccttttcggtcctactgggaaatgtacctatccaagggattgctgctgatctttgtggtggattcagcagatcacagccgattacctgaagccaagaaataccttcatcagctaattgcagcaaacccagtacttcctctggttgtgtttgcaaacaaacaggatcttgaagcagcctatcacattacagatatccatgaagctttggcattatctgaagtgggaaatgacaggaagatgttcttgtttggaacctacctgactaagaatggctcagagataccctccaccatgcaagatgccaaagacttgattgcacagctggctgcagatgtgcagtgaccaggactcagcccactgtgcggctcacgactgagatgtcatcagtgttgaatggcaggcttgaagccaaaggtttccacctcaaataaaaattaagccatttcctattttctcagtgcatgggatgtatatagttagccctccatatccatgggttccacatctggggattcaagaactgtggatccaaaacattcaaaaagtaaacccactgaagaataataacacaacaataaaaataatacacattttaaaatacaatataacaactatttacatagcattttcattgtattaggtattataagtaatctaaagatgatttaaaatacacgagtagaagtgtgtaggttatatgtaaatatgccattttccatcaggagcttgagcatccacatttgcctgtgaggatcttggaatcagtctccctgagaataccaacggacaactgtacaaagataatgctaacataataacagcatctctatttggattttgaatgttaaaaatatttgtaaaacagtgtattgggggtattgggatttttaatcaacaaaggtaaaatgaacatt

SEQ ID NO: 736589 - DNA, 1258 bp, Homo sapiens
agctgagggaaggctgagaatcctcccggaacctctggattctgacgccccaggggttcttcacacaggctggccggtctcgggattgaagccggagacgtcagacgctaaggttgcttagactgcggcccacgtggaaggctcttagccaccctgcctggcccgaggagaaaaacaagcaaatcctagtgctgggcctggatggagcaggaaaaaccagtgtcctgcactctctagcttcaaacagagtccagcacagtgtggcacccacccaaggtttccatgcagtttgcatcaacactgaagacagccagatggagttcctggagattggtggcagtaaaccttttcggtcctactgggaaatgtacctatccaagggattgctgctgatctttgtggtggattcagcagatcacagccgattacctgaagccaagaaataccttcatcagctaattgcagcaaacccagtacttcctctggttgtgtttgcaaacaaacaggatcttgaagcagcctatcacattacagatatccatgaagctttggcattatctgaagtgggaaatgacaggaagatgttcttgtttggaacctacctgactaagaatggctcagagataccctccaccatgcaagatgccaaagacttgattgcacagctggctgcagatgtgcagtgaccaggactcagcccactgtgcggctcacgactgagatgtcatcagtgttgaatggcaggcttgaagccaaaggtttccacctcaaataaaaattaagccatttcctattttctcagtgcatgggatgtatatagttagccctccatatccatgggttccacatctggggattcaagaactgtggatccaaaacattcaaaaagtaaacccactgaagaataataacacaacaataaaaataatacacattttaaaatacaatataacaactatttacatagcattttcattgtattaggtattataagtaatctaaagatgatttaaaatacacgagtagaagtgtgtaggttatatgtaaatatgccattttccatcaggagcttgagcatccacatttgcctgtgaggatcttggaatcagtctccctgagaataccaacggacaactgtacaaagataatgctaacataataacagcatctctatttggattttgaatgttaaaaatatttgtaaaacagtgtattgggggtattgggatttttaatcaacaaaggtaaaatgaacatt

SEQ ID NO: 736590 - DNA, 974 bp, Homo sapiens
  misc_feature (850)..(850): n is a, c, g, or t
cagctctgtgctgattagtaatgatgtgtttaatgaaatttcaaggttcattacggaatgtggattaattaaattgagagggaagataatgaaaaatattcccattggatacataaaagagcaggcctgctgtggtgggaggagggagttgaaatgtatggacctgccagaactctccaagtctgcccctggaaaatgagccaagtctttctgctgcgtcctctaagcaaagacggtggcctgagtccatgtgggagcccagtggggcctctgagtctcacttgtgatttggggagagtcatactggctccctgctgggctcagcatcacattcaaagtcactggttcatgtcctcccaggaccttggagttggccaagcactcatgaatccctctgtgtactttctttaccaagggttctggaaggaaaggaatgaaaacatacacatcagattcatccagatgcaccaatctcagcagccaggcagcagcaggaggaggcgcagcagtgtctgacagctctgaagtttccgcctggttcaggaatcctggaagttttcccagagtcctctgcgcatgctggaaaaatctgctttgaacttcctgatgagccagttggagcatgaaggatctggttgagtcttaaaagccttaatactgaggcttaaattccagtgtctgtgtgagttaggattgcgggttactgagcaccctcggctgaagaacaatcatgctcatcccgtgtgtctgcaagcccacctctccctgcctcttgtgccttccccagcccaatccccagcagaactctatccgtaagggctattgtgcccatttcatggaaacacacagntggcaagcagctgctacacccaccacagataaatctcataaacaaaacgctaagtgaaaaccactagagttaagagaatatgcaatgtgtgatgccattcacccaaagcgggttcaactgttca

SEQ ID NO: 736591 - DNA, 1544 bp, Homo sapiens
tcagttaattagtaagaggaagcagaaatatcaagggacttaagaattggcaggcatgagccaccactcccggccttaactattcttttggagttaatgtttgcactgatgactttgttttatattagtatattacttagtaatacagtattaggtaaaaagattatagatccttaatgatctgtgaagggaaaggtgttttctggttaggaatttaggcagttgccatatttgtgaaaatgttcacaaagtcataattaaaaacctcggatgtggagttgagctgttttggagttaactttgaatgatattgataattggtttaagacttggtttaggaaatgggaagtgcactagtttatattacagaatatatagataattgtgagttgtaatatgacatttgacatcacttcatgactagtttttcagatcctgaaattgggctgcactgtgaaataattctaaaatttaggtaattgctgtttggtggtgaagatacttggcaagaagaccacttttacttgagtttcagactttaatctgagtttagacttagttattatagatgtaaataccaaaacggttgataatagatggatcatcctagagaaaaattttaaaaatatgaatatccaagtccacttaggtacctttctcattctcttactatatctgttctcatgaacaagcagtcactaagatggacctgactcactctgaattcagttttgaaggcaaacctttttggggcttgcatggcttggctctccatttttcagtcttggggtcaaaatacctctgattgtgtccctcagttctgggcagatttcctctgtctttgctgttcatactgttaaaccaaagcagtcattttcttatctacctctcctgatcagttaagcaggtttgtgctgttttttcaaactgttcctttactctcagattctattagaattaaagaagcaagaatagaaccaattgtatatataggttctgttgtgagattataacactccataaccaaattgcctgcaatcagaagtcttactttcattacaggtagaaatagcttatatcatttgaaattttatctctcttagttttgtaatttcctattaccttacttaggtcattttaaaaagtctacttgtttaaccattttggaattgttgatttaaaggggctataatccataaacaaaataatttttgttttataaaactattgtcttataagattttaatacatttaagagggtttcatgtcgcctgggaatatagttcaagattttaaaacctcttttgaacaaagggtactatcgaatgtgaaagttgatgaaaaacagactaaaagttttgaatgactgctcactaaaattttattgcttaatgtatttgtagccttatgtctttttggaaaatataataacattattatgaaggtaatgtttaatcatttctcaatactttccagatagaatttttgtagaacttttagcttaagtttctttttttaacataataaattctgctttgattgtc

SEQ ID NO: 736592 - DNA, 1623 bp, Homo sapiens
atgtgacaccacgcccggctaattttgtatttttagtagagatggggttttaccatgttggtcaggctggtatcaaagtcctgacctcaggtaatccacccacctcggcctcccgaagtgttgggattacaggcatgagccaccactcccggccttaactattcttttggagttaatgtttgcactgatgactttgttttatattagtatattacttagtaatacagtattaggtaaaaagattatagatccttaatgatctgtgaagggaaaggtgttttctggttaggaatttaggcagttgccatatttgtgaaaatgttcacaaagtcataattaaaaacctcggatgtggagttgagctgttttggagttaactttgaatgatattgataattggtttaagacttggtttaggaaatgggaagtgcactagtttatattacagaatatatagataattgtgagttgtaatatgacatttgacatcacttcatgactagtttttcagatcctgaaattgggctgcactgtgaaataattctaaaatttaggtaattgctgtttggtggtgaagatacttggcaagaagaccacttttacttgagtttcagactttaatctgagtttagacttagttattatagatgtaaataccaaaacggttgataatagatggatcatcctagagaaaaattttaaaaatatgaatatccaagtccacttaggtacctttctcattctcttactatatctgttctcatgaacaagcagtcactaagatggacctgactcactctgaattcagttttgaaggcaaacctttttggggcttgcatggcttggctctccatttttcagtcttggggtcaaaatacctctgattgtgtccctcagttctgggcagatttcctctgtctttgctgttcatactgttaaaccaaagcagtcattttcttatctacctctcctgatcagttaagcaggtttgtgctgttttttcaaactgttcctttactctcagattctattagaattaaagaagcaagaatagaaccaattgtatatataggttctgttgtgagattataacactccataaccaaattgcctgcaatcagaagtcttactttcattacaggtagaaatagcttatatcatttgaaattttatctctcttagttttgtaatttcctattaccttacttaggtcattttaaaaagtctacttgtttaaccattttggaattgttgatttaaaggggctataatccataaacaaaataatttttgttttataaaactattgtcttataagattttaatacatttaagagggtttcatgtcgcctgggaatatagttcaagattttaaaacctcttttgaacaaagggtactatcgaatgtgaaagttgatgaaaaacagactaaaagttttgaatgactgctcactaaaattttattgcttaatgtatttgtagccttatgtctttttggaaaatataataacattattatgaaggtaatgtttaatcatttctcaatactttccagatagaatttttgtagaacttttagcttaagtttctttttttaacataataaattctgctttgattgtc

SEQ ID NO: 736593 - DNA, 570 bp, Homo sapiens
  misc_feature (549)..(549): n is a, c, g, or t
tccttaagttggagacttgtgctccaagctctgaaagagttaattcccttttctactctgtgccaacggaaatggatgtcactgcttaccttgtagagcttcagggccgcctcgtgcctgtgattggtggtatgcaagcgtaatttatccacactgttggtgtaatagtcacaggcgttacattttaggtgaacagggttgccaatggcaatacacttcaacctccactcattgcttttgcccccttctttaatgtgagccaccagttgatatttctgcatatgtttatcagtcttgcagtgtagctggaagttggctttgagctgagtgttgtagttgcagagcttgcactggtagatatctccaattactgccctccattcctcttcagggagagagcgctcactgctcacatgcacacttagggcctccaggctgtcagaggtgaatttgttgcaaacagcacactggaatagcttcagcgctgggtcactgatataaggtgacagctctcctgcagtaaggagggacaggtcatcacccattagntgaccactggcaagccggatt

SEQ ID NO: 736594 - DNA, 1146 bp, Homo sapiens
gatctctgctgcctgcattgagggctgttatttcaagaaaccaagaagggccaggagaaatgggaaaagctgtgttgattcctaaagatgaccaggagaaaatgaaagagctgtttaaaatcaatcagtttaaccttatggccagtgatttgattgcccttaatagaagtctgccagatgtaagattagaaggatgtaagacaaaagtctaccctgatgaacttccaaacacaagtgtagtcattgtgtttcataatgaagcttggagcactctccttagaactgtttacagtgtgataaatcgttccccacactatctactctcagaggtcatcttggtagatgatgccagtgaaagagattttctcaagttgacattagagaattacgtgaaaaatttagaagtgccagtaaaaattattaggatggaagaacgctctgggttaatacgtgcccgtcttcgaggagcagctgcttcaaaagggcaggtcataacttttcttgatgcacactgtgaatgcacgttaggatggctggagcctttgctggcaagaataaaggaagacaggaaaacggttgtctgccctatcattgatgtgattagtgatgatacttttgaatatatggctgggtcagacatgacttatgggggttttaactggaaactgaatttccgctggtatcctgttccccaaagagaaatggacaggaggaaaggagacagaacattacctgtcaggacccctactatggctggtggcctattttctattgacagaaactactttgaagagataggaacttacgatgcaggaatggatatctggggtggagagaatcttgaaatgtcttttagggtaattgcattttattttattttttgatgctgaacatacaatgctgtagcatgcacataccagtcccagtaatttactgtcaaatcatttttgctgagtgatgcaaattactgatcaattggttatcttaattcacattttgatttgacagagtcctattgcatgcaatattttcttctaaatgggaaattataggtaatttttgttttcaaaaatattgtttttattcacagtaaaaatacattaggactttcaattgctgaaataaagaagggttttattttttaat

SEQ ID NO: 736595 - DNA, 4989 bp, Homo sapiens
  misc_feature (2322)..(2322): n is a, c, g, or t
  misc_feature (3162)..(3162): n is a, c, g, or t
gatctctgctgcctgcattgagggctgttatttcaagaaaccaagaagggccaggagaaatgggaaaagctgtgttgattcctaaagatgaccaggagaaaatgaaagagctgtttaaaatcaatcagtttaaccttatggccagtgatttgattgcccttaatagaagtctgccagatgtaagattagaaggatgtaagacaaaagtctaccctgatgaacttccaaacacaagtgtagtcattgtgtttcataatgaagcttggagcactctccttagaactgtttacagtgtgataaatcgttccccacactatctactctcagaggtcatcttggtagatgatgccagtgaaagagattttctcaagttgacattagagaattacgtgaaaaatttagaagtgccagtaaaaattattaggatggaagaacgctctgggttaatacgtgcccgtcttcgaggagcagctgcttcaaaagggcaggtcataacttttcttgatgcacactgtgaatgcacgttaggatggctggagcctttgctggcaagaataaaggaagacaggaaaacggttgtctgccctatcattgatgtgattagtgatgatacttttgaatatatggctgggtcagacatgacttatgggggttttaactggaaactgaatttccgctggtatcctgttccccaaagagaaatggacaggaggaaaggagacagaacattacctgtcaggacccctactatggctggtggcctattttctattgacagaaactactttgaagagataggaacttacgatgcaggaatggatatctggggtggagagaatcttgaaatgtcttttaggatttggcaatgtggaggctccttggagattgttacttgctcccatgttggtcatgtttttcggaaggcaactccatacacttttcctggtggcactggtcatgtcatcaacaagaacaacaggagactggcagaagtttggatggatgaatttaaagatttcttctacatcatatccccaggtgttgtcaaagtggattatggagatgtgtcagtcagaaaaacactaagagaaaatctgaagtgtaagcccttttcttggtacctagaaaacatctatccggactcccagatcccaagacgttattactcacttggtgagataagaaatgttgaaaccaatcagtgtttagacaacatgggccgcaaggaaaatgaaaaagtgggtatattcaactgtcatggtatgggaggaaatcaggtattttcttacactgctgacaaagaaatccgaaccgatgacttgtgcttggatgtttctagactcaatggacctgtaatcatgttaaaatgccaccatatgagaggaaatcagttatgggaatatgatgctgagagactcacgttgcgacatgttaacagtaaccaatgtctcgatgaaccttctgaagaagacaaaatggtgcctacaatgcaggactgtagtggaagcagatcccaacagtggctgctaaggaacatgaccttgggcacatgaagatcatgtcctccaagccatgaaagtgtctacgcttttgtttttccattatttcaattgggggaaaatattaactttgctgaattgaaagttttaaaaatccttttagtattctaaaacacaattgtttctaattcgtttctagaaatgtttgcttatttccctactaaaatttgtatctgatcaaagcacataagaatataaataatagcaaactactattaaacaacagaacaacttgtaaaacaaattgtgtttgctttaagaaaaatctttattgcactcatgtcatagggttaattggaggttattttatttttggttgtcatggtgattgaaagagataatgtaaatgccttataaaatcttcattatgaaatattatcagttgctttataaactcactctttttatggatccttcatggaaacatgtttgatttctgtgtctacaacagggccacatattaaattacttctgaatggtgaattcatcttacaaaatgttccaagttttggacaaggaaaaacattacattggatattgaattcatggagcctttacagaagcatcacatttaaaccaatgtgaattcaaaaaagagaaggaaactttttaaattcaatttagagtacataaaaaaagaaatccgcgaagcattgaggggaacaagatgagtctaatccgcagcacttcgatcactgtgagagaactcaaagtgggttgcaatcattcctaacacaggctgaaactaaacaatcttgctccnagagtttatgttggatactcaattcttaaccaaaatcttggtctccacaaactctaccatcccttttctcttcactctatagacagtggcatgccattgatgctgtacagaattgcaggtgaaagggagaattttagacttaatttttaactctattgcacttaaagattttagttaggttaccactgtcattttcattttctatgttaaagaatacctttcagtgctgtgctccagtatctaaaaattttatcaccaggggaataaactcaatacacattcattaaacttttgttgtaattaaactgctatatattgtttgccatatattatggcccaaggaatatagttataatcaggctacattcacattttcttttctcatcttaaaaccctttatgttcaaaatacattagcagaggccatgaaagtgaaaaaaaatcagatttttgctagtaagtttttatatttgacatcattttaaatgctcaaagagttgccctatatatgcatgttatccattataaatgcactcagcagctaagagaaatttgagaggaaaagtggaagaagtgttttctggagcagaagattccacttctttggtcctcatctttacttaaaaagctcttatagaaaggattaatcattttgactgcatacaaactatgtctctgacatgcacatacactgctttataatgaaaatgaggacactttctgatggtcagtaaaatcttaaatgatttttgccactggtattccttcctcttttgactttttattggtacaactgtagggaagaatctacaacctggagcatttcaggtttgctctttanatatagacacccctcaccatgagctctctgtgaatccgtgaatttcctaaaattgtaagcaaaatgttgaatatcagggcatttttttttctgaggtgggagtatgtcactcacagcaaacttggaaagaaggctatgactcccaagaggcagtgaaccattgccttaaattaatagcagcctctcaagtccattgaggcctcatgtaaaattcccatttttcatctttacactccttttctcccctcatttcctcttctccttactaaggtaaaaagaccctgcacagcattattacttaagttgaaaaagcttcaactctcaaggactcatgtataccatatgttccacttattgctttgttagtcaaaatgcatgttatgtagaaaatggtcaatggcaaatttttataaatacagctaccccatcaaagctgaacttgaaacgttttagcagaattttaaatatgtgaaagttcattgtggtcatggtgagaaaactaaaactacatgagtttcatgttagaaaagaatttttaaacaatcttcagatggcttgaacacgtgccattatagtatctaacaaaaagtggcataaaatattacaaaacatccaacactagaaagcaatgactaacatttaatttgtttacaaaaatgtttattgtcttcagtacaaaaagttaaaaccatgattggattcataatgcacttgtcttatcccttatttatggagctagactgacatatttcaaaccaatctcttctgtggtcttctccatctcagttaatgcaacttcaaccttccagatgctcaggtcaaaaactgaaagttgcttttgactcctctatttctgtttcaactctcgtctaatccaacagcaaatccccttgatgctacctttgaaatataactagaaaagaatgacttgccaccatatccactaggtgtcactacctctaacctttttaatcgcaatatgcttattatttagttccctaatttcccagtccttgtcttgaacaatcttttctcagtacaacagccatagtgattctgttaaccatgaatttgattgtgtcacttccctgctcacaatcttccaatgacttctccctccggtggccttcaaggtcctttatgagtgttacccctctacacgtccacaccactcaccacacatacatacacatgcacacacacacacatgcaattctacctttttctaacaccatctcttatctctcattattctgcctcttacttaccctattatggctcccaagaaagttcctgctttagtgttttgttccctctgccccagagagctccccttagtgatctcagttcaaatattatcttatcagtaagacaaacccttctcccatctgccttccctatcccctgtacctgacaatctatgagtttgcttctttatttctgtctatacttccccctccccagccccaaacatgcccatcacatgccctagaaggtaagtcccatgaaggcaggggctttgtcagttttgttcatttggtatttctggcatatatattctctaaatatttcttgaattaatgaactgaaaaatgtgtgttaaagttgctaagtgtaactgtatcatactttttttgtattttaaattttaaaataaaggctaatatatttagacaggatttccaaaaactttgtcttcaaattttaattttcttcctaatattcttcacattaaactatggactctaattttctggataaaatatcctgccttatggaaatgaaatatgaaattttattaaaatgctgctatattacataagttgc

SEQ ID NO: 736596 - DNA, 3750 bp, Homo sapiens
  misc_feature (26)..(26): n is a, c, g, or t
  misc_feature (38)..(38): n is a, c, g, or t
  misc_feature (1083)..(1083): n is a, c, g, or t
  misc_feature (1923)..(1923): n is a, c, g, or t
cctagctggagacgactctctaattnccaccgctacangtattttcttacactgctgacaaagaaatccgaaccgatgacttgtgcttggatgtttctagactcaatggacctgtaatcatgttaaaatgccaccatatgagaggaaatcagttatgggaatatgatgctgagagactcacgttgcgacatgttaacagtaaccaatgtctcgatgaaccttctgaagaagacaaaatggtgcctacaatgcaggactgtagtggaagcagatcccaacagtggctgctaaggaacatgaccttgggcacatgaagatcatgtcctccaagccatgaaagtgtctacgcttttgtttttccattatttcaattgggggaaaatattaactttgctgaattgaaagttttaaaaatccttttagtattctaaaacacaattgtttctaattcgtttctagaaatgtttgcttatttccctactaaaatttgtatctgatcaaagcacataagaatataaataatagcaaactactattaaacaacagaacaacttgtaaaacaaattgtgtttgctttaagaaaaatctttattgcactcatgtcatagggttaattggaggttattttatttttggttgtcatggtgattgaaagagataatgtaaatgccttataaaatcttcattatgaaatattatcagttgctttataaactcactctttttatggatccttcatggaaacatgtttgatttctgtgtctacaacagggccacatattaaattacttctgaatggtgaattcatcttacaaaatgttccaagttttggacaaggaaaaacattacattggatattgaattcatggagcctttacagaagcatcacatttaaaccaatgtgaattcaaaaaagagaaggaaactttttaaattcaatttagagtacataaaaaaagaaatccgcgaagcattgaggggaacaagatgagtctaatccgcagcacttcgatcactgtgagagaactcaaagtgggttgcaatcattcctaacacaggctgaaactaaacaatcttgctccnagagtttatgttggatactcaattcttaaccaaaatcttggtctccacaaactctaccatcccttttctcttcactctatagacagtggcatgccattgatgctgtacagaattgcaggtgaaagggagaattttagacttaatttttaactctattgcacttaaagattttagttaggttaccactgtcattttcattttctatgttaaagaatacctttcagtgctgtgctccagtatctaaaaattttatcaccaggggaataaactcaatacacattcattaaacttttgttgtaattaaactgctatatattgtttgccatatattatggcccaaggaatatagttataatcaggctacattcacattttcttttctcatcttaaaaccctttatgttcaaaatacattagcagaggccatgaaagtgaaaaaaaatcagatttttgctagtaagtttttatatttgacatcattttaaatgctcaaagagttgccctatatatgcatgttatccattataaatgcactcagcagctaagagaaatttgagaggaaaagtggaagaagtgttttctggagcagaagattccacttctttggtcctcatctttacttaaaaagctcttatagaaaggattaatcattttgactgcatacaaactatgtctctgacatgcacatacactgctttataatgaaaatgaggacactttctgatggtcagtaaaatcttaaatgatttttgccactggtattccttcctcttttgactttttattggtacaactgtagggaagaatctacaacctggagcatttcaggtttgctctttanatatagacacccctcaccatgagctctctgtgaatccgtgaatttcctaaaattgtaagcaaaatgttgaatatcagggcatttttttttctgaggtgggagtatgtcactcacagcaaacttggaaagaaggctatgactcccaagaggcagtgaaccattgccttaaattaatagcagcctctcaagtccattgaggcctcatgtaaaattcccatttttcatctttacactccttttctcccctcatttcctcttctccttactaaggtaaaaagaccctgcacagcattattacttaagttgaaaaagcttcaactctcaaggactcatgtataccatatgttccacttattgctttgttagtcaaaatgcatgttatgtagaaaatggtcaatggcaaatttttataaatacagctaccccatcaaagctgaacttgaaacgttttagcagaattttaaatatgtgaaagttcattgtggtcatggtgagaaaactaaaactacatgagtttcatgttagaaaagaatttttaaacaatcttcagatggcttgaacacgtgccattatagtatctaacaaaaagtggcataaaatattacaaaacatccaacactagaaagcaatgactaacatttaatttgtttacaaaaatgtttattgtcttcagtacaaaaagttaaaaccatgattggattcataatgcacttgtcttatcccttatttatggagctagactgacatatttcaaaccaatctcttctgtggtcttctccatctcagttaatgcaacttcaaccttccagatgctcaggtcaaaaactgaaagttgcttttgactcctctatttctgtttcaactctcgtctaatccaacagcaaatccccttgatgctacctttgaaatataactagaaaagaatgacttgccaccatatccactaggtgtcactacctctaacctttttaatcgcaatatgcttattatttagttccctaatttcccagtccttgtcttgaacaatcttttctcagtacaacagccatagtgattctgttaaccatgaatttgattgtgtcacttccctgctcacaatcttccaatgacttctccctccggtggccttcaaggtcctttatgagtgttacccctctacacgtccacaccactcaccacacatacatacacatgcacacacacacacatgcaattctacctttttctaacaccatctcttatctctcattattctgcctcttacttaccctattatggctcccaagaaagttcctgctttagtgttttgttccctctgccccagagagctccccttagtgatctcagttcaaatattatcttatcagtaagacaaacccttctcccatctgccttccctatcccctgtacctgacaatctatgagtttgcttctttatttctgtctatacttccccctccccagccccaaacatgcccatcacatgccctagaaggtaagtcccatgaaggcaggggctttgtcagttttgttcatttggtatttctggcatatatattctctaaatatttcttgaattaatgaactgaaaaatgtgtgttaaagttgctaagtgtaactgtatcatactttttttgtattttaaattttaaaataaaggctaatatatttagacaggatttccaaaaactttgtcttcaaattttaattttcttcctaatattcttcacattaaactatggactctaattttctggataaaatatcctgccttatggaaatgaaatatgaaattttattaaaatgctgctatattacataagttgc

SEQ ID NO: 736597 - DNA, 3953 bp, Homo sapiens
  misc_feature (1286)..(1286): n is a, c, g, or t
  misc_feature (2126)..(2126): n is a, c, g, or t
agaaccccccttgggtagtacagatcacaacccagaggtttcagtattttcttacactgctgacaaagaaatccgaaccgatgacttgtgcttggatgtttctagactcaatggacctgtaatcatgttaaaatgccaccatatgagaggaaatcagttatgggaatatgatgctgagacccacactcttcttcatataatcacccagtcttgtctctcagtgaacaaagtagctgatggctcccagcatcctactgtggaaacctgtaatgatagcactttgcaaaaatggctactaagaaactatacaagaatggaaatttttagaaatatttttgggaattctactgattacattctctaatgatttttggagagactcacgttgcgacatgttaacagtaaccaatgtctcgatgaaccttctgaagaagacaaaatggtgcctacaatgcaggactgtagtggaagcagatcccaacagtggctgctaaggaacatgaccttgggcacatgaagatcatgtcctccaagccatgaaagtgtctacgcttttgtttttccattatttcaattgggggaaaatattaactttgctgaattgaaagttttaaaaatccttttagtattctaaaacacaattgtttctaattcgtttctagaaatgtttgcttatttccctactaaaatttgtatctgatcaaagcacataagaatataaataatagcaaactactattaaacaacagaacaacttgtaaaacaaattgtgtttgctttaagaaaaatctttattgcactcatgtcatagggttaattggaggttattttatttttggttgtcatggtgattgaaagagataatgtaaatgccttataaaatcttcattatgaaatattatcagttgctttataaactcactctttttatggatccttcatggaaacatgtttgatttctgtgtctacaacagggccacatattaaattacttctgaatggtgaattcatcttacaaaatgttccaagttttggacaaggaaaaacattacattggatattgaattcatggagcctttacagaagcatcacatttaaaccaatgtgaattcaaaaaagagaaggaaactttttaaattcaatttagagtacataaaaaaagaaatccgcgaagcattgaggggaacaagatgagtctaatccgcagcacttcgatcactgtgagagaactcaaagtgggttgcaatcattcctaacacaggctgaaactaaacaatcttgctccnagagtttatgttggatactcaattcttaaccaaaatcttggtctccacaaactctaccatcccttttctcttcactctatagacagtggcatgccattgatgctgtacagaattgcaggtgaaagggagaattttagacttaatttttaactctattgcacttaaagattttagttaggttaccactgtcattttcattttctatgttaaagaatacctttcagtgctgtgctccagtatctaaaaattttatcaccaggggaataaactcaatacacattcattaaacttttgttgtaattaaactgctatatattgtttgccatatattatggcccaaggaatatagttataatcaggctacattcacattttcttttctcatcttaaaaccctttatgttcaaaatacattagcagaggccatgaaagtgaaaaaaaatcagatttttgctagtaagtttttatatttgacatcattttaaatgctcaaagagttgccctatatatgcatgttatccattataaatgcactcagcagctaagagaaatttgagaggaaaagtggaagaagtgttttctggagcagaagattccacttctttggtcctcatctttacttaaaaagctcttatagaaaggattaatcattttgactgcatacaaactatgtctctgacatgcacatacactgctttataatgaaaatgaggacactttctgatggtcagtaaaatcttaaatgatttttgccactggtattccttcctcttttgactttttattggtacaactgtagggaagaatctacaacctggagcatttcaggtttgctctttanatatagacacccctcaccatgagctctctgtgaatccgtgaatttcctaaaattgtaagcaaaatgttgaatatcagggcatttttttttctgaggtgggagtatgtcactcacagcaaacttggaaagaaggctatgactcccaagaggcagtgaaccattgccttaaattaatagcagcctctcaagtccattgaggcctcatgtaaaattcccatttttcatctttacactccttttctcccctcatttcctcttctccttactaaggtaaaaagaccctgcacagcattattacttaagttgaaaaagcttcaactctcaaggactcatgtataccatatgttccacttattgctttgttagtcaaaatgcatgttatgtagaaaatggtcaatggcaaatttttataaatacagctaccccatcaaagctgaacttgaaacgttttagcagaattttaaatatgtgaaagttcattgtggtcatggtgagaaaactaaaactacatgagtttcatgttagaaaagaatttttaaacaatcttcagatggcttgaacacgtgccattatagtatctaacaaaaagtggcataaaatattacaaaacatccaacactagaaagcaatgactaacatttaatttgtttacaaaaatgtttattgtcttcagtacaaaaagttaaaaccatgattggattcataatgcacttgtcttatcccttatttatggagctagactgacatatttcaaaccaatctcttctgtggtcttctccatctcagttaatgcaacttcaaccttccagatgctcaggtcaaaaactgaaagttgcttttgactcctctatttctgtttcaactctcgtctaatccaacagcaaatccccttgatgctacctttgaaatataactagaaaagaatgacttgccaccatatccactaggtgtcactacctctaacctttttaatcgcaatatgcttattatttagttccctaatttcccagtccttgtcttgaacaatcttttctcagtacaacagccatagtgattctgttaaccatgaatttgattgtgtcacttccctgctcacaatcttccaatgacttctccctccggtggccttcaaggtcctttatgagtgttacccctctacacgtccacaccactcaccacacatacatacacatgcacacacacacacatgcaattctacctttttctaacaccatctcttatctctcattattctgcctcttacttaccctattatggctcccaagaaagttcctgctttagtgttttgttccctctgccccagagagctccccttagtgatctcagttcaaatattatcttatcagtaagacaaacccttctcccatctgccttccctatcccctgtacctgacaatctatgagtttgcttctttatttctgtctatacttccccctccccagccccaaacatgcccatcacatgccctagaaggtaagtcccatgaaggcaggggctttgtcagttttgttcatttggtatttctggcatatatattctctaaatatttcttgaattaatgaactgaaaaatgtgtgttaaagttgctaagtgtaactgtatcatactttttttgtattttaaattttaaaataaaggctaatatatttagacaggatttccaaaaactttgtcttcaaattttaattttcttcctaatattcttcacattaaactatggactctaattttctggataaaatatcctgccttatggaaatgaaatatgaaattttattaaaatgctgctatattacataagttgc

SEQ ID NO: 736598 - DNA, 4278 bp, Homo sapiens
  misc_feature (1611)..(1611): n is a, c, g, or t
  misc_feature (2451)..(2451): n is a, c, g, or t
ggctgactagaggacccttacctgtcaggacccctactatggctggtggcctattttctattgacagaaactactttgaagagataggaacttacgatgcaggaatggatatctggggtggagagaatcttgaaatgtcttttaggatttggcaatgtggaggctccttggagattgttacttgctcccatgttggtcatgtttttcggaaggcaactccatacacttttcctggtggcactggtcatgtcatcaacaagaacaacaggagactggcagaagtttggatggatgaatttaaagatttcttctacatcatatccccaggtgttgtcaaagtggattatggagatgtgtcagtcagaaaaacactaagagaaaatctgaagtgtaagcccttttcttggtacctagaaaacatctatccggactcccagatcccaagacgttattactcacttggtgagataagaaatgttgaaaccaatcagtgtttagacaacatgggccgcaaggaaaatgaaaaagtgggtatattcaactgtcatggtatgggaggaaatcaggtattttcttacactgctgacaaagaaatccgaaccgatgacttgtgcttggatgtttctagactcaatggacctgtaatcatgttaaaatgccaccatatgagaggaaatcagttatgggaatatgatgctgagagactcacgttgcgacatgttaacagtaaccaatgtctcgatgaaccttctgaagaagacaaaatggtgcctacaatgcaggactgtagtggaagcagatcccaacagtggctgctaaggaacatgaccttgggcacatgaagatcatgtcctccaagccatgaaagtgtctacgcttttgtttttccattatttcaattgggggaaaatattaactttgctgaattgaaagttttaaaaatccttttagtattctaaaacacaattgtttctaattcgtttctagaaatgtttgcttatttccctactaaaatttgtatctgatcaaagcacataagaatataaataatagcaaactactattaaacaacagaacaacttgtaaaacaaattgtgtttgctttaagaaaaatctttattgcactcatgtcatagggttaattggaggttattttatttttggttgtcatggtgattgaaagagataatgtaaatgccttataaaatcttcattatgaaatattatcagttgctttataaactcactctttttatggatccttcatggaaacatgtttgatttctgtgtctacaacagggccacatattaaattacttctgaatggtgaattcatcttacaaaatgttccaagttttggacaaggaaaaacattacattggatattgaattcatggagcctttacagaagcatcacatttaaaccaatgtgaattcaaaaaagagaaggaaactttttaaattcaatttagagtacataaaaaaagaaatccgcgaagcattgaggggaacaagatgagtctaatccgcagcacttcgatcactgtgagagaactcaaagtgggttgcaatcattcctaacacaggctgaaactaaacaatcttgctccnagagtttatgttggatactcaattcttaaccaaaatcttggtctccacaaactctaccatcccttttctcttcactctatagacagtggcatgccattgatgctgtacagaattgcaggtgaaagggagaattttagacttaatttttaactctattgcacttaaagattttagttaggttaccactgtcattttcattttctatgttaaagaatacctttcagtgctgtgctccagtatctaaaaattttatcaccaggggaataaactcaatacacattcattaaacttttgttgtaattaaactgctatatattgtttgccatatattatggcccaaggaatatagttataatcaggctacattcacattttcttttctcatcttaaaaccctttatgttcaaaatacattagcagaggccatgaaagtgaaaaaaaatcagatttttgctagtaagtttttatatttgacatcattttaaatgctcaaagagttgccctatatatgcatgttatccattataaatgcactcagcagctaagagaaatttgagaggaaaagtggaagaagtgttttctggagcagaagattccacttctttggtcctcatctttacttaaaaagctcttatagaaaggattaatcattttgactgcatacaaactatgtctctgacatgcacatacactgctttataatgaaaatgaggacactttctgatggtcagtaaaatcttaaatgatttttgccactggtattccttcctcttttgactttttattggtacaactgtagggaagaatctacaacctggagcatttcaggtttgctctttanatatagacacccctcaccatgagctctctgtgaatccgtgaatttcctaaaattgtaagcaaaatgttgaatatcagggcatttttttttctgaggtgggagtatgtcactcacagcaaacttggaaagaaggctatgactcccaagaggcagtgaaccattgccttaaattaatagcagcctctcaagtccattgaggcctcatgtaaaattcccatttttcatctttacactccttttctcccctcatttcctcttctccttactaaggtaaaaagaccctgcacagcattattacttaagttgaaaaagcttcaactctcaaggactcatgtataccatatgttccacttattgctttgttagtcaaaatgcatgttatgtagaaaatggtcaatggcaaatttttataaatacagctaccccatcaaagctgaacttgaaacgttttagcagaattttaaatatgtgaaagttcattgtggtcatggtgagaaaactaaaactacatgagtttcatgttagaaaagaatttttaaacaatcttcagatggcttgaacacgtgccattatagtatctaacaaaaagtggcataaaatattacaaaacatccaacactagaaagcaatgactaacatttaatttgtttacaaaaatgtttattgtcttcagtacaaaaagttaaaaccatgattggattcataatgcacttgtcttatcccttatttatggagctagactgacatatttcaaaccaatctcttctgtggtcttctccatctcagttaatgcaacttcaaccttccagatgctcaggtcaaaaactgaaagttgcttttgactcctctatttctgtttcaactctcgtctaatccaacagcaaatccccttgatgctacctttgaaatataactagaaaagaatgacttgccaccatatccactaggtgtcactacctctaacctttttaatcgcaatatgcttattatttagttccctaatttcccagtccttgtcttgaacaatcttttctcagtacaacagccatagtgattctgttaaccatgaatttgattgtgtcacttccctgctcacaatcttccaatgacttctccctccggtggccttcaaggtcctttatgagtgttacccctctacacgtccacaccactcaccacacatacatacacatgcacacacacacacatgcaattctacctttttctaacaccatctcttatctctcattattctgcctcttacttaccctattatggctcccaagaaagttcctgctttagtgttttgttccctctgccccagagagctccccttagtgatctcagttcaaatattatcttatcagtaagacaaacccttctcccatctgccttccctatcccctgtacctgacaatctatgagtttgcttctttatttctgtctatacttccccctccccagccccaaacatgcccatcacatgccctagaaggtaagtcccatgaaggcaggggctttgtcagttttgttcatttggtatttctggcatatatattctctaaatatttcttgaattaatgaactgaaaaatgtgtgttaaagttgctaagtgtaactgtatcatactttttttgtattttaaattttaaaataaaggctaatatatttagacaggatttccaaaaactttgtcttcaaattttaattttcttcctaatattcttcacattaaactatggactctaattttctggataaaatatcctgccttatggaaatgaaatatgaaattttattaaaatgctgctatattacataagttgc

SEQ ID NO: 736599 - DNA, 453 bp, Homo sapiens
tttgtatttccaatggttcctttattttcaaaattcttaaaagtacttgtaatcactgattcattcaacaatcatttattaacacctaataggtgctaggaacttttctaggtgctagggatccaacagggaaaaattccctacattacattccagccaattatgttctgctcttaacagcaaggtgactggttaaaaattgaacgaacaaacactgattaataacctctaaagatcgagagccttccatctggttcactgctatttttcaatttgctaatctctgccccctaagaggctgatacctctccctttccagaatggggaatagactggtgtaatgggtgaagtctgggaaccgcgggtcaggagacggagctgtgtcacaaaaagtagcttcttggtaaattacttgatcagggtattttacttcaaaatacaagtgtgatcatg

SEQ ID NO: 736600 - DNA, 1119 bp, Homo sapiens
cccaaccaatcagagctcttgactcactggcttccccctacccaccaagttgtccttaaaaactttgatccccgaatgcttggggaaaccaatctgagtaataataaaactcaagtcacctgcacagctggctctgtgtgaattactctctctattgcaattcccctgtcttgataaaatggctctatctaggcagctggcaaggtgaatccattgggtggttacaatacctcccttagtagactaaagaacaacttggataaaaccagcaagaaatggattatatcgagggaaattgtcatgcccatccaagaccatgataaggaatgaggaagtaacataatggaaggattctgtctcttctcattgggactgactctaagcacctctgattagatgtcattctatgtctgggatgatctcaggactatggtattgtcctcttgtgctatcaattttaactcacaaatggatgtcgatgtcatttattctcttattctacagaccttcattggctacatgggtagtatgggcaagagataggtggtcctgacggaggagtgggaagagccagtgctctggagtgggattactttctggctgcctgctcaggaaagttgtttcaccattctcaacctcagtttccacatctgtaatatatggaaattaatttctacctcataggattgttgtaagtattaaatgagatattattgtaatgcttaattaaatgagataatatatttaaaaatataattcccctagatataatacatatgtatacataatatatacatataatacatatgtatacataacatatacgtataatacgtatgtatacataatctatgcatataatacatatgtatacataatctgtgcgtatataatacatatgtatacataatctgtgcgtatataatacatatgtatacataagctgtgcatatataatacatatgtatacataagctgtgcgtatataatacatatgtatacataagctgtgcgtatagaatacatatgtatacataagctgtgcgtatagaatacatatgtatacataatctgtgcgtatagaatacatatgtatacataatctgtgcgtatagaata

SEQ ID NO: 736601 - DNA, 496 bp, Homo sapiens
aatcttcatgacatatttttatctgaagaagaaaatgaaagcaaagcagtgcccaaaggccccctcctactgaactatcatgatgcacacgcccacaagaagtacgcactacaggaccaaaagaattttgatccagttcaaattgagcaggagatgcagtccaagttgccactgtgggaatttcttcaattccctctacccccaccatggaacaacactaaacgtctagctacaattcatgagcttatgcacttttgtacgagtggtgagtccattgctttgtcttagcttaaactcaatttaattaatggtcatatatgcctcttaaaattacacccttatttacaaaaagtattttcattattgaaagacctttcagaggctaaggtgggtattttgattgactacaactttcttgtttgaataatgtcattagcaatgttatcatagctataatgcataacactcttcaatttgatacactggggtttttttc

SEQ ID NO: 736602 - DNA, 786 bp, Homo sapiens
aatcttcatgacatatttttatctgaagaagaaaatgaaagcaaagcagtgcccaaaggccccctcctactgaactatcatgatgcacacgcccacaagaagtacgcactacaggaccaaaagaattttgatccagttcaaattgagcaggagatgcagtccaagttgccactgtgggaatttcttcaattccctctacccccaccatggaacaacactaaacgtctagctacaattcatgagcttatgcacttttgtacgagtgatgtcttgagctggaatgaagtagaacgagccttcaaggtgtttacttttgagagcctgaagctctctgaggttgatgaaaaagggaaactgaaaccttctgggatgatgtgtgggtcagattctgaaatgttcaacataccgtgggacaaccctgccagatttgctaaacagataaggcagcaatatgtcatgaaaatgaatactcaagaggccaagcagaaagcagatattaaaatcaaagacagaacactatttgtggatcagaatttgtcaatgtctgtgcaagataatgaaagcaaccgagaaccttcagatcctagtcagtgtgatgctaacaatatgaagcattctgacttgaataatctcaaactctcagtccctgataatagacagctgttagagcaggagagcatcatgaaggctcagccccaacatgagtctctgggtaagttaaagtgtgtgtgtgtgtgtgtgtgtgtgtgtgtgtaagacactattatagtacacataaatcaaaaa

SEQ ID NO: 736603 - DNA, 937 bp, Homo sapiens
aatcttcatgacatatttttatctgaagaagaaaatgaaagcaaagcagtgcccaaaggccccctcctactgaactatcatgatgcacacgcccacaagaagtacgcactacaggaccaaaagaattttgatccagttcaaattgagcaggagatgcagtccaagttgccactgtgggaatttcttcaattccctctacccccaccatggaacaacactaaacgtctagctacaattcatgagcttatgcacttttgtacgagtgatgtcttgagctggaatgaagtagaacgagccttcaaggtgtttacttttgagagcctgaagctctctgaggttgatgaaaaagggaaactgaaaccttctgggatgatgtgtgggtcagattctgaaatgttcaacataccgtgggacaaccctgccagatttgctaaacagataaggcagcaatatgtcatgaaaatgaatactcaagaggccaagcagaaagcagatattaaaatcaaagacagaacactatttgtggatcagaatttgtcaatgtctgtgcaagataatgaaagcaaccgagaaccttcagatcctagtcagtgtgatgctaacaatatgaagcattctgacttgaataatctcaaactctcagtccctgataatagacagctgttagagcaggagagcatcatgaaggctcagccccaacatgagtctctgggaattatttggaacttgttgcaaaatctattcaagattggattacaaaagaagaagctatatatcaggaatctaaaatgaatgagaaaatcatcaggaccagagctgagctggaattgaaatcttctgctaatgccaaacttacttctgctagcaaaattttttccattaaagaatctaaaagtaacaaaggaatcagcaaaacagagatatcagatcaagaaaa

SEQ ID NO: 736604 - DNA, 443 bp, Homo sapiens; identical to SEQ ID NO: 83270

SEQ ID NO: 736605 - DNA, 916 bp, Homo sapiens
cacgcgtcgcccacgcgtcgttgtaatggtaatcatgagtatacttaattttatttatgtatagaatatttgtatttattttttggacatatatttatcactttgtcattttttttaaccaatttgagaaatgttagctgctgaattaatttgttgcccgagccttcatattttcttctttgctgccttctccctgtggcaatgtactgttctcacattaagccttttaaaaatgttccatactgtattagcatccttagaagggacagaactaagaaatacattgctcaaataatattttactttattgataatgacaaaaagaatattttttaaaccccatcaaaatagatttcaattgactgtttcccctacatcttttgagccacagtcgcccatcgaataagcaaatttgtttttgagaataaactggtaaccagtttgtgatgactctcagaagccttttggctgggttacagaagagtttctaagttcctagagagccatttaataattagttggtgagccagaggcttgacagagctgttacttatgtgtgagggctttattctcaggcagtagtttattcatcatttggtaagcccctccccacactcctctaatttaaacaagtagtgaaggcttatcttaaactgtgtagtaccttagacttggcatttatttttgatagagcagagataaaatattttgatggaaggaaatcaattttctgtaactgatgatgtgaaaattttattttctgggaaattatatagccattcaaaaattcaaagtatgttattatgattggttacaagagaataatgttacatgtttaattgtaatatttgtctcctatcattttcttccctttcagtcataataaatgatttacaaaacccaaaaaaaaaaatat

SEQ ID NO: 736606 - DNA, 3857 bp, Homo sapiens
atagaattacagaaccacaagggaccttagagaaataatgcacttattttgcaaatgagaaagctgaggcctagagagggaaatgagttacccaaaatcaaatagctagacctgggtctagactctttccataaattatatgtcaaatttctttggtataactttagttattaaaatctttttgaactcggaaggtgaaaaacttgcttcttcagtgaccaaatcatggaaaaatccctggaatcttcttgtttccagtttcaggcagtcctacattacagttcctttttgagtaaaaaatgcgtggccacagtccaaagttaatgtgtgtccaaaaggataagtggaccaaatagcaatttataattacatactaaactcagagccgcacagaggctgaaaacaaaaagcttgagtatatttggtttgatcatattaattgaaaaatttcagtctgcagcacacttgtcttcaaaaaatgttgatttgaaaagtactgtaaatctcagttttccacttcctttctagatttgtgacattatttccaaatgggaacaggcttccaaagaacagcagcctggaaaatgtgaaggtacaaggactgttcgtctgacatacaaaaacagactatatttctcagtgcaagctcgtggagagactgatagagaaaagttgctgttaatgtatcagacaaatgatcaaatcataaatggactttttcctctgaacaaagatctggcattagaaatggcagctcttttatctcaggtagagattggagattttgaaagacctttctcaactccagcagggcatgttaccaatcagtgcaaagtgaatcaaactctaaagcaagtcatagagaaattttatcctaaaaggtatagagatggctgttctgaagagcagttaaggcagctttgccagcgactttcaaccagatggatggccctccggggacacagtgctgctgactgtgtgcgcatttatttgacagtagccaggaagtggccattctttggtgccaagttgtttcttgcaaaacccataactccatcatcacttggaagtactttcttgtggctggctgtacatgaggatggtttaagcctcttagaatacaactccatgaggttaatagtcagctatgtgtacaagagtctaatgacctttggaggctatcaagatgattttatggtagtcattaacaatacacattcaaaggacaaaccaacagagaaattactttttgccatggcaaaacccaagattcttgaaatcactcttttgatcgccagttacataaacaacttccatcagcaaaaggcagcatttcaccacctctctgctccagcactgctctcagcccagacccggggaccccaagccagaatgatgggaagccagcctcttctgtcaagcagcagaccgaccaaaggccccaccttactctgaaagctggggagcctgaacattcactccttgtcctccatgctgtggctgtatcagctccctacaagttcgtttacacctggcagcacggcagccacacaccggtattccaaaccttaacaatgaagggggttagtctcttttatttgattcttaaatattcaaataaatattaacagtaaaacataaacacaaaatttgccaacacactaattttcttatagagtaaatgagtaagaattcatcattttttccatctcccttctcccttgtcatcagacacattgtgcaatgtggcttttcttttcttttctttttttcccctttttaatattctggcaatctttagaaagggagattccaaactcccatttggtaaaccagttgattatttggaaatgttcactgccaaaatagtaagtgctataactaaatgcgcttttaattaatgatatagtgtttggaaaggagtagaacatgcagcataagaaactgctgcagagtggtgcgaggagtacattttcagagcaggtgcagtacatcttccggctctatgaatcattatgtgagaaagcaggataacattaggtaacctgagcctcctgtgtggtattagaaagtataccgtcaccttttcacatcactggagtgtaaaatttaaaacaagatggtgattcctgacattccttggctgtcagtgctgcccagattcagaagaatattgcccacatttcactgtatttggtgctgggtcattttgaccttgctttgttaataatatctttaaaaacaaagacaatccttaaagctttgctcctcacacattaccttctaattatagtttgaaaatagattccctacacatacatacatatgtatgcacagatagggtcttgctatgttgcccaggctggtcttgaactcctggcctcaagcaatcctctctcctcagcctcccaaagtgctgggattacacgtgtgagccaccacacctggctccagaaattttattttatttttttgaggcagggtctcactctggttgcccaggctggagtgcagtggtgccatcatagctcactgtagcctcgaccttccgggatcaagcaatcccacttcagcctcttgaatagctgggactagaagcatgcaccaccatgcccatctaatatttgtatttttagtagagacaggatctccctatgttgtccagcctagtctcaaactcctgggttcaagcaatcctcccacctcggcctcccaaagtgctgggattgcaggcatgagccaccgtgcccagcctcaaaaatattttttaaaagaaaagagaaaataattcttctgtcaaaggaggttaaattttagttgatagagtacttaaatgcattactttattaggttatgtaagtggtcagtgcattccagtatgtgtcacaacagtgtagttcatattcatgataaaaatgaaactgtgataagacatgaaaattatattattaaaatgttcaattgtaatggtaatcatgagtatacttaattttatttatgtatagaatatttgtatttattttttggacatatatttatcactttgtcattttttttaaccaatttgagaaatgttagctgctgaattaatttgttgcccgagccttcatattttcttctttgctgccttctccctgtggcaatgtactgttctcacattaagccttttaaaaatgttccatactgtattagcatccttagaagggacagaactaagaaatacattgctcaaataatattttactttattgataatgacaaaaagaatattttttaaaccccatcaaaatagatttcaattgactgtttcccctacatcttttgagccacagtcgcccatcgaataagcaaatttgtttttgagaataaactggtaaccagtttgtgatgactctcagaagccttttggctgggttacagaagagtttctaagttcctagagagccatttaataattagttggtgagccagaggcttgacagagctgttacttatgtgtgagggctttattctcaggcagtagtttattcatcatttggtaagcccctccccacactcctctaatttaaacaagtagtgaaggcttatcttaaactgtgtagtaccttagacttggcatttatttttgatagagcagagataaaatattttgatggaaggaaatcaattttctgtaactgatgatgtgaaaattttattttctgggaaattatatagccattcaaaaattcaaagtatgttattatgattggttacaagagaataatgttacatgtttaattgtaatatttgtctcctatcattttcttccctttcagtcataataaatgatttacaaaacccaaaaaaaaaaatat

SEQ ID NO: 736607 - DNA, 3618 bp, Homo sapiens
atagaattacagaaccacaagggaccttagagaaataatgcacttattttgcaaatgagaaagctgaggcctagagagggaaatgagttacccaaaatcaaatagctagacctgggtctagactctttccataaattatatgtcaaatttctttggtataactttagttattaaaatctttttgaactcggaaggtgaaaaacttgcttcttcagtgaccaaatcatggaaaaatccctggaatcttcttgtttccagtttcaggcagtcctacattacagttcctttttgagtaaaaaatgcgtggccacagtccaaagttaatgtgtgtccaaaaggataagtggaccaaatagcaatttataattacatactaaactcagagccgcacagaggctgaaaacaaaaagcttgagtatatttggtttgatcatattaattgaaaaatttcagtctgcagcacacttgtcttcaaaaaatgttgatttgaaaagtactgtaaatctcagttttccacttcctttctagatttgtgacattatttccaaatgggaacaggcttccaaagaacagcagcctggaaaatgtgaaggtacaaggactgttcgtctgacatacaaaaacagactatatttctcagtgcaagctcgtggagagactgatagagaaaagttgctgttaatgtatcagacaaatgatcaaatcataaatggactttttcctctgaacaaagatctggcattagaaatggcagctcttttatctcaggtagagattggagattttgaaagacctttctcaactccagcagggcatgttaccaatcagtgcaaagtgaatcaaactctaaagcaagtcatagagaaattttatcctaaaaggtatagagatggctgttctgaagagcagttaaggcagctttgccagcgactttcaaccagatggatggccctccggggacacagtgctgctgactgtgtgcgcatttatttgacagtagccaggaagtggccattctttggtgccaagttgtttcttgcaaaacccataactccatcatcacttggaagtactttcttgtggctggctgtacatgaggatggtttaagcctcttagaatacaactccatgaggttaatagtcagctatgtgtacaagagtctaatgacctttggaggctatcaagatgattttatggtagtcattaacaatacacattcaaaggacaaaccaacagagaaattactttttgccatggcaaaacccaagattcttgaaatcactcttttgatcgccagttacataaacaacttccatcagcaaaaggcagcatttcaccacctctctgctccagcactgctctcagcccagacccggggaccccaagccagaatgatgggaagccagcctcttctgtcaagcagcagaccgaccaaaggccccaccttactctgaaagctggggagcctgaacattcactccttgtcctccatgctgtggctgtatcagctccctacaagttcgtttacacctggcagcacggcagccacacaccggtattccaaaccttaacaatgaagggggttagtctcttttatttgattcttaaatattcaaataaatattaacagtaaaacataaacacaaaatttgccaacacactaattttcttatagagtaaatgagtaagaattcatcattttttccatctcccttctcccttgtcatcagacacattgtgcaatgtggcttttcttttcttttctttttttcccctttttaatattctggcaatctttagaaagggagattccaaactcccatttggtaaaccagttgattatttggaaatgttcactgccaaaatagtaagtgctataactaaatgcgcttttaattaatgatatagtgtttggaaaggagtagaacatgcagcataagaaactgctgcagagtggtgcgaggagtacattttcagagcaggtgcagtacatcttccggctctatgaatcattatgtgagaaagcaggataacattaggtaacctgagcctcctgtgtggtattagaaagtataccgtcaccttttcacatcactggagtgtaaaatttaaaacaagatggtgattcctgacattccttggctgtcagtgctgcccagattcagaagaatattgcccacatttcactgtatttggtgctgggtcattttgaccttgctttgttaataatatctttaaaaacaaagacaatccttaaagctttgctcctcacacattaccttctaattatagtttgaaaatagattccctacacatacatacatatgtatgcacagatagggtcttgctatgttgcccaggctggtcttgaactcctggcctcaagcaatcctctctcctcagcctcccaaagtgctgggattacacgtgtgagccaccacacctggctccagaaattttattttatttttttgaggcagggtctcactctggttgcccaggctggagtgcagtggtgccatcatagctcactgtagcctcgaccttccgggatcaagcaatcccacttcagcctcttgaatagctgggactagaagcatgcaccaccatgcccatctaatatttgtatttttagtagagacaggatctccctatgttgtccagcctagtctcaaactcctgggttcaagcaatcctcccacctcggcctcccaaagtgctgggattgcaggcatgagccaccgtgcccagcctcaaaaatattttttaaaagaaaagagaaaataattcttctgtcaaaggaggttaaattttagttgatagagtacttaaatgcattactttattaggttatgtaagtggtcagtgcattccagtatgtgtcacaacagtgtagttcatattcatgataaaaatgaaactgtgataagacatgaaaattatattattaaaatgttcaattgtaatggtaatcatgagtatacttaattttatttatgtatagaatatttgtatttattttttggacatatatttatcactttgtcattttttttaaccaatttgagaaatgttagctgctgaattaatttgttgcccgagccttcatattttcttctttgctgccttctccctgtggcaatgtactgttctcacattaagccttttaaaaatgttccatactgtattagcatccttagaagggacagaactaagaaatacattgctcaaataatattttactttattgataatgacaaaaagaatattttttaaaccccatcaaaatagatttcaattgactgtttccccacactcctctaatttaaacaagtagtgaaggcttatcttaaactgtgtagtaccttagacttggcatttatttttgatagagcagagataaaatattttgatggaaggaaatcaattttctgtaactgatgatgtgaaaattttattttctgggaaattatatagccattcaaaaattcaaagtatgttattatgattggttacaagagaataatgttacatgtttaattgtaatatttgtctcctatcattttcttccctttcagtcataataaatgatttacaaaacccaaaaaaaaaaatat

SEQ ID NO: 736608 - DNA, 3803 bp, Homo sapiens
atagaattacagaaccacaagggaccttagagaaataatgcacttattttgcaaatgagaaagctgaggcctagagagggaaatgagttacccaaaatcaaatagctagacctgggtctagactctttccataaattatatgtcaaatttctttggtataactttagttattaaaatctttttgaactcggaaggtgaaaaacttgcttcttcagtgaccaaatcatggaaaaatccctggaatcttcttgtttccagtttcaggcagtcctacattacagttcctttttgagtaaaaaatgcgtggccacagtccaaagttaatgtgtgtccaaaaggataagtggaccaaatagcaatttataattacatactaaactcagagccgcacagaggctgaaaacaaaaagcttgagtatatttggtttgatcatattaattgaaaaatttcagtctgcagcacacttgtcttcaaaaaatgttgatttgaaaagtactgtaaatctcagttttccacttcctttctagatttgtgacattatttccaaatgggaacaggcttccaaagaacagcagcctggaaaatgtgaaggtacaaggactgttcgtctgacatacaaaaacagactatatttctcagtgcaagctcgtggagagactgatagagaaaagttgctgttaatgtatcagacaaatgatcaaatcataaatggactttttcctctgaacaaagatctggcattagaaatggcagctcttttatctcaggtagagattggagattttgaaagacctttctcaactccagcagggcatgttaccaatcagtgcaaagtgaatcaaactctaaagcaagtcatagagaaattttatcctaaaaggtatagagatggctgttctgaagagcagttaaggcagctttgccagcgactttcaaccagatggatggccctccggggacacagtgctgctgactgtgtgcgcatttatttgacagtagccaggaagtggccattctttggtgccaagttgtttcttgcaaaacccataactccatcatcacttggaagtactttcttgtggctggctgtacatgaggatggtttaagcctcttagaatacaactccatgaggttaatagtcagctatgtgtacaagagtctaatgacctttggaggctatcaagatgattttatggtagtcattaacaatacacattcaaaggacaaaccaacagagaaattactttttgccatggcaaaacccaagattcttgaaatcactcttttgatcgccagttacataaacaacttccatcagcaaaaggcagcatttcaccacctctctgctccagcactgctctcagcccagacccggggaccccaagccagaatgatgggaagccagcctcttctgtcaagcagcagaccgaccaaaggccccaccttactctgaaagctggggagcctgaacattcactccttgtcctccatgctgtggctgtatcagctccctacaagttcgtttacacctggcagcacggcagccacacaccggtattccaaaccttaacaatgaagggggttagtctcttttatttgattcttaaatattcaaataaatattaacagtaaaacataaacacaaaatttgccaacacactaattttcttatagagtaaatgagtaagaattcatcattttttccatctcccttctcccttgtcatcagacacattgtgcaatgtggcttttcttttcttttctttttttcccctttttaatattctggcaatctttagaaagggagattccaaactcccatttggtaaaccagttgattatttggaaatgttcactgccaaaatagtaagtgctataactaaatgcgcttttaattaatgatatagtgtttggaaaggagtagaacatgcagcataagaaactgctgcagagtggtgcgaggagtacattttcagagcaggtgcagtacatcttccggctctatgaatcattatgtgagaaagcaggataacattaggtaacctgagcctcctgtgtggtattagaaagtataccgtcaccttttcacatcactggagtgtaaaatttaaaacaagatggtgattcctgacattccttggctgtcagtgctgcccagattcagaagaatattgcccacatttcactgtatttggtgctgggtcattttgaccttgctttgttaataatatctttaaaaacaaagacaatccttaaagctttgctcctcacacattaccttctaattatagtttgaaaatagattccctacacatacatacatatgtatgcacagatagggtcttgctatgttgcccaggctggtcttgaactcctggcctcaagcaatcctctctcctcagcctcccaaagtgctgggattacacgtgtgagccaccacacctggctccagaaattttattttatttttttgaggcagggtctcactctggttgcccaggctggagtgcagtggtgccatcatagctcactgtagcctcgaccttccgggatcaagcaatcccacttcagcctcttgaatagctgggactagaagcatgcaccaccatgcccatctaatatttgtatttttagtagagacaggatctccctatgttgtccagcctagtctcaaactcctgggttcaagcaatcctcccacctcggcctcccaaagtgctgggattgcaggcatgagccaccgtgcccagcctcaaaaatattttttaaaagaaaagagaaaataattcttctgtcaaaggaggttaaattttagttgatagagtacttaaatgcattactttattaggttatgtaagtggtcagtgcattccagtatgtgtcacaacagtgtagttcatattcatgataaaaatgaaactgtgataagacatgaaaattatattattaaaatgttcaattgtaatggtaatcatgagtatacttaattttatttatgtatagaatatttgtatttattttttggacatatatttatcactttgtcattttttttaaccaatttgagaaatgttagctgctgaattaatttgttgcccgagccttcatattttcttctttgctgccttctccctgtggcaatgtactgttctcacattaagccttttaaaaatgttccatactgtattagcatccttagaagggacagaactaagaaatacattgctcaaataatattttactttattgataatgacaaaaagaatattttttaaaccccatatcgaataagcaaatttgtttttgagaataaactggtaaccagtttgtgatgactctcagaagccttttggctgggttacagaagagtttctaagttcctagagagccatttaataattagttggtgagccagaggcttgacagagctgttacttatgtgtgagggctttattctcaggcagtagtttattcatcatttggtaagcccctccccacactcctctaatttaaacaagtagtgaaggcttatcttaaactgtgtagtaccttagacttggcatttatttttgatagagcagagataaaatattttgatggaaggaaatcaattttctgtaactgatgatgtgaaaattttattttctgggaaattatatagccattcaaaaattcaaagtatgttattatgattggttacaagagaataatgttacatgtttaattgtaatatttgtctcctatcattttcttccctttcagtcataataaatgatttacaaaacccaaaaaaaaaaatat

SEQ ID NO: 736609 - DNA, 2301 bp, Homo sapiens
atagaattacagaaccacaagggaccttagagaaataatgcacttattttgcaaatgagaaagctgaggcctagagagggaaatgagttacccaaaatcaaatagctagacctgggtctagactctttccataaattatatgtcaaatttctttggtataactttagttattaaaatctttttgaactcggaaggtgaaaaacttgcttcttcagtgaccaaatcatggaaaaatccctggaatcttcttgtttccagtttcaggcagtcctacattacagttcctttttgagtaaaaaatgcgtggccacagtccaaagttaatgtgtgtccaaaaggataagtggaccaaatagcaatttataattacatactaaactcagagccgcacagaggctgaaaacaaaaagcttgagtatatttggtttgatcatattaattgaaaaatttcagtctgcagcacacttgtcttcaaaaaatgttgatttgaaaagtactgtaaatctcagttttccacttcctttctagatttgtgacattatttccaaatgggaacaggcttccaaagaacagcagcctggaaaatgtgaaggtacaaggactgttcgtctgacatacaaaaacagactatatttctcagtgcaagctcgtggagagactgatagagaaaagttgctgttaatgtatcagacaaatgatcaaatcataaatggactttttcctctgaacaaagatctggcattagaaatggcagctcttttatctcaggtagagattggagattttgaaagacctttctcaactccagcagggcatgttaccaatcagtgcaaagtgaatcaaactctaaagcaagtcatagagaaattttatcctaaaaggtatagagatggctgttctgaagagcagttaaggcagctttgccagcgactttcaaccagatggatggccctccggggacacagtgctgctgactgtgtgcgcatttatttgacagtagccaggaagtggccattctttggtgccaagttgtttcttgcaaaacccataactccatcatcacttggaagtactttcttgtggctggctgtacatgaggatggtttaagcctcttagaatacaactccatgaggttaatagtcagctatgtgtacaagagtctaatgacctttggaggctatcaagatgattttatggtagtcattaacaatacacattcaaaggacaaaccaacagagaaattactttttgccatggcaaaacccaagattcttgaaatcactcttttgatcgccagttacataaacaacttccatcagcaaaaggcagcatttcaccacctctctgctccagcactgctctcagcccagacccggggaccccaagccagaatgatgggaagccagcctcttctgtcaagcagcagaccgaccaaaggccccaccttactctgaaagctggggagcctgaacattcactccttgtcctccatgctgtggctgtatcagctccctacaagttcgtttacacctggcagcacggcagccacacaccggtattccaaaccttaacaatgaagggggttagtctcttttatttgattcttaaatattcaaataaatattaacagtaaaacataaacacaaaatttgccaacacactaattttcttatagagtaaatgagtaagaattcatcattttttccatctcccttctcccttgtcatcagacacattgtgcaatgtggcttttcttttcttttctttttttcccctttttaatattctggcaatctttagaaagggagattccaaactcccatttggtaaaccagttgattatttggaaatgttcactgccaaaatagtaagtgctataactaaatgcgcttttaattaatgatatagtgtttggaaaggagtagaacatgcagcataagaaactgctgcagagtggtgcgaggagtacattttcagagcaggtgcagtacatcttccggctctatgaatcattatgtgagaaagcaggataacattaggtaacctgagcctcctgtgtggtattagaaagtataccgtcaccttttcacatcactggagtgtaaaatttaaaacaagatggtgattcctgacattccttggctgtcagtgctgcccagattcagaagaatattgcccacatttcactgtatttggtgctgggtcattttgaccttgctttgttaataatatctttaaaaacaaagacaatccttaaagctttgctcctcacacagtagcgaacgggtaccgagcttacc

SEQ ID NO: 736610 - DNA, 1831 bp, Homo sapiens; identical to SEQ ID NO: 416475

SEQ ID NO: 736611 - DNA, 661 bp, Homo sapiens
  misc_feature (31)..(31): n is a, c, g, or t
tcttgtaccaggatccactcgacagacttancgcatgattaatttgattgattactcttgaagttactgaccttaggaaaattcctcaattgtaaaaaggctttctctatatgtaaattatgctgttatctttttctatacacaaagtatatagacctataaatattatacatatatattatatatataaagactaattcttgtacagaccaacgcggaccgatggtccatattcttttctccatgtttgtttgtgtcgactgttgcagagtgagttgatgtaagaaggtggtttcatgttttcttttggggggccacttctttcttttcctttccgtttctatctctgtctgtctccgtctctgtctctctctttctcacttgttgccaatgtcttgttgctgagaaggaacactctattcagatgccatccaggaaagaaaggccagatggatggagggtccactgtgtatatttgtacagaatcatttataaagttttctacacttctaaaaaaagtatttctaacttgggctgttggacagtttgtgtgcctctgagccggcaagcctgttgtttcttgtgtttagtgcaatgtttagtgagaaaccaatgtctgaattatttatgccaataaaaaatttgagaattactgcattgc

SEQ ID NO: 736612 - DNA, 558 bp, Homo sapiens
  misc_feature (31)..(31): n is a, c, g, or t
  misc_feature (522)..(522): n is a, c, g, or t
  misc_feature (528)..(528): n is a, c, g, or t
  misc_feature (538)..(539): n is a, c, g, or t
tcttgtaccaggatccactcgacagacttancgcatgattaatttgattgattactcttgaagttactgaccttaggaaaattcctcaattgtaaaaaggctttctctatatgtaaattatgctgttatctttttctatacacaaagtatatagacctataaatattatacatatatattatatatataaagactaattcttgtacagaccaacgcggaccgatggtccatattcttttctccatgtttgtttgtgtcgactgttgcagagtgagttgatgtaagaaggtggtttcatgttttcttttggggggccacttctttcttttcctttccgtttctatctctgtctgtctccgtctctgtctctctctttctcacttgttgccaatgtcttgttgctgagaaggaacactctattcagatgccatccaggaaagaaaggccagatggatggagggtccactgtgtatatttgtacagaatcatttataaagttttctacacttctaaaaaaagtanggatancttaagcatnntgcagaccgccgaaaaacg

SEQ ID NO: 736613 - DNA, 3815 bp, Homo sapiens
  misc_feature (18)..(18): n is a, c, g, or t
  misc_feature (34)..(35): n is a, c, g, or t
  misc_feature (44)..(45): n is a, c, g, or t
gcttaatctccttgtgancaacaaacctttgagnnccccattgnnacgtgattttgagttagcccaggcataccttgcattgtttctaaagttacaccttaaaatgcttccttcagagccagtactcctagaagaaataacaaatttgtcatcccaggtggaagaaaactggacccatttgcaatcactcttcaatcaaagcatgtgtattttaaattatctcaaaagtgctttgttgtaaaaataaatttgtgactaaacaaagactttcatattaaatgggttcaattgaactcatttcttattttccaagtgtcaatgtgaaaagaaaataaatgctagcactactgactagtcagtatatctccactttaaatgctaaatactttcttgaatttcagaggccaaagcgggaggattgcttgaagccaggaatttgagcccagcctgggcaacatagcaagcaagatcccatctctacaaaaagttaaaaaaataaattacacctgccttttgttttgaagacttaaagaatctgctcaaatgatttattttctgagtctcttcacattaacttttatatgatttttaaaaaattattacctgcttatattttttgagtatctgtttcatataaagagatgctgcatgttcactgtgaagtattgctgaattaaattgaaaatgtcagataaaactgatacatgatgtagttataaaaatgctgttatgaagaaaaaaggaatgcttttttcctcggtggcctttgataaaaatatgaatgattgactctcagagttggaggataaactaatcatcttctagcacagccctgttgtgttgcaggagaggaatcaggctaaagtctgctggtatttcagtgacagattaaaactttctaacagtggcctagtgctttctccattgtaatgtactgaaaggaagttgttcatggatcagaaatgtgggaggcccttccttgcccaaggcaagtcgctgtagatggttaaactgataccaaggataggtaagggaaattccaaattccattggaagatggccttttactgacactgcagacatgtagataacaatagtttaatgtcctctgaaaaggtaaaaattccataaatccttgcaaacaatttttagcaatattgtttattgctaccacagccaagaatgggtatttcaaagccagggtttttttattttgttttgttttgttttgtttttttttttttttggctacacttttttgggggggaccttttaatttgggaagaaaatgctgagtatacttttctttcacaaccattgcaaacccaggtagccctggagttttctttttttctcatcatcattgttttgttttttttatggttcaagacttttgcaatacatgaattaaaaataagcagttctttaaagcatagcgctctaaaaactattcttagtttataccctcaaaagttgggtctttcatgaaacacagtggtttgaatatgaacaccagtagcattctcgttcgttgttagggtaagagagttttgtagaatgatctccaaaagaagcagtcctcaaaaggcatttaccagtgatatcttttaatattcatgtttttatttaatgatgtaagatagaattaataaactactaaggaaataagccaatgtggttattgtactcaatttcgtttttcttttagaaatgtgtattgacttattaaagccactgacagaaatgttaatcatgacttaagttctaatttaaaaaactattttcctctttcctaaatactatattctaaattggaatatggcaaaatcccaatatataattctatacctagtaaagattgtaaataactaaaacaaaatgataagagctgtgaactgaaattgtattgcttacagaaatcatgaaccgaattttcttctctttttaaagtgagcataaagacttaagtgtattgttaccagagatatatttagatagaatacatcattttggcaggtaatcttctagaacctttcatgtactgtttccatcaagggagggaaagaaatagaaaatataattttatctatattttccttaaaatatatcaatctgtgcacactctttcagttttttaattactcatgtaatatatgactacattttgcttgtgtgctttttgaaaaccatcttcagtcccaatatcctctgtagaagtaatagttttaactctcctagatcttcttttagagtgtttttatgagtgtttaatgtaggaatgtgtatatattatctacagccacaggaaatgtatagttacgatttttacatacgtgtatgtatattattgtacaacttgctatttctacttgggagttttttattttggtacattcacatttacctaatctcttgtgcactgtccaacagtactttgcctataatagacacttaaggaagttttccttctttttattcctttataattacaaacaatgctgaaaggaacatcatcctacatgagccctttttgtacatataaggctctctctgtggtatatgcttaggatttgaatttcaggccagagtataaccatttttaatttgaagagatacttccatttgggttccagaatggctgtatcaagttacagttcccctgagcaagatatgagcatctgcttccccatgtaattaatgacacttgctattggatttttgtaatttaattactctgaaaaaattattttggttttaaatcagaaatttctcactagtgaagatggacatatttttgtatgtttattttagaacatataaacatttgttaattttctttttcctctcatttttctattgaatgatttgtccttttatctcatggatttgttaggagttctcttgtattttctgtattttatgtctgttgccaatgttttctcctacttagccatttggctttaattttacatggtgtctgtttaaataaatgttttatatttgtatacaatcaaattgattaattttcatgacttatttcaggatataaagcaaattattttctaagacatttacagtgtatgttttcctatgtttacatgtgctcatttcacgtcatgtattttcctctacgacatgtttctgtgtgagtagttaacatgtagatctttagaattgatttttctgaagagtgaaacagcgctgcttccaatatctgttcaaaattcatttattgaaaagtccactcatatgtctgatttgaaatgctgtttcattatgtgttaaattctttcactgagctcttccatattcctagtaaatgatgcattactttggtatgttctcagatttgggtaaagccttcctcatgttctataaaaattggttaactgctggtgagcacatctcttgaagttttgatatgggttgcacaacatttataggactgatttggagagaccgacaataccgagtgcagtcctcccttggtatctagttccaggacccctgtggataccaaaatccaagcaatgccctgcagatcatgggacctatgcatatgaaaagtcggtccttgtatttgagggttttgcatccctcaaataccatatgttttatttgtgtttggttgaaaaaagtttgcatataagtgaaacttagcatttcaaacctgtgttgttcaaagatcatttgtatttctcttcaagaacaatgaatgtcttcattaaatcatcttttgtgggagagcttttggtttcatagattttcatatatatatatgatataataaacactttttgacattcaaaaaaaaa

SEQ ID NO: 736614 - DNA, 726 bp, Homo sapiens
catgatttaatattttaatgataattataatgatttcagatacctctgtttgctccatggatgtgttatttatcattcatgacttgcttctgaaattgagagcagcattactgttgtcatataacagtcatataacatgcaaataatatttttattaaaatataagttattccctttcatgatgtttctataaagatactgcagtcctaaattttttttactgtagcctgtaatataacatgatttttacacacgtatttttttttccacttaggacatttaatttcttaatgaggtggcatagcatagtagttagtttgagacctagaatttgtctggacaatattactaaccttgtgacattagcttaatcatcagaatagtgtgtggaagagtaagaacttaataaatatcacctattattatttcactttttaatgtgtagctgatattgttttcctccaaaaaaaaaaaaatacagctttcaactatttttcttcttgtagtaaacttctatatacatttccaggatggaaagttggagtgacagctcttcagcaggttagtctgagatttcccagaaagcacgaagaacatcagggtggagagtttcactctcagcgacaaatagaaataatccacttgattccacatgaacttagaggtccttggaaagcagaaatgctgtttctagcacagagtaagtgctcagttatagtttgttga

SEQ ID NO: 736615 - DNA, 413 bp, Homo sapiens
ggaagcggtgttgtgtctgcagctctggcagaggactgttccactagacacgctgaagggactgggtacgtgttttccttcaggaccagagctgagaggagctgggatcgcggcggcaatggaacgggcctcagaaaggcgcacggccagcgcgctttttgcggggttccgggccttgggacttttcagcaacgacattccacacgtggtgcggttcagcgcgctcaagcgccggttctatgtaacaacctgcgtgggcaagagtttccacacctatgacgtgagtgacttcttttgttagcttcccagttcccatttaccacgggcttcccttctttaacccctccctgtcctattaatatttcgccatccggtcacgtccacgtgctgatttggcacttgcagtcctcctg

SEQ ID NO: 736616 - DNA, 6440 bp, Homo sapiens
ggaagcggtgttgtgtctgcagctctggcagaggactgttccactagacacgctgaagggactgggtacgtgttttccttcaggaccagagctgagaggagctgggatcgcggcggcaatggaacgggcctcagaaaggcgcacggccagcgcgctttttgcggggttccgggccttgggacttttcagcaacgacattccacacgtggtgcggttcagcgcgctcaagcgccggttctatgtaacaacctgcgtgggcaagagtttccacacctatgacgttcagaaacttagtctggttgcagtaagtaattctgttccacaggatatctgctgtatggcagctgatggcagattagtctttgctgcttatggaaatgttttctctgcatttgcccgtaataaagagatagtacatacctttaagggtcataaggcagaaatccatttcttgcaaccctttggagaccacattatctctgttgatactgatggcattcttattatttggcacatatattcagaagaagaatacctgcagttgacttttgataaatcagtatttaaaatttctgcaattttgcatccaagtacctacttgaataaaatacttctgggcagtgaacaaggaagcctgcagttgtggaatgtaaaatccaataaacttctatatacatttccaggatggaaagttggagtgacagctcttcagcaggttagtgcaccagccgtggatgttgttgctattggtcttatgtcaggtcaagttatcattcacaacattaaatttaatgaaacattaatgaagtttcgtcaagactggggacccattacttcaatttcatttcgcacagatggtcatccagtaatggcagctggaagcccatgtggccatattggactctgggatctagaagacaaaaaattaatcaaccaaatgagaaatgcacactctacagcaattgccggactgacatttctccatagagagccacttcttgtcacaaatggcgctgacaatgctcttaggatatggatatttgatggtcctacaggtgaaggccgacttttgagattcagaatgggtcatagtgctcctcttaccaatatcagatattatggacagaatggacagcagattctaagtgcaagtcaagatggaactcttcagtcattttccacggtacatgaaaaattcaataagagcttgggacatggattaataaataaaaagagagttaaacgtaaaggacttcagaataccatgtcagtgagacttccacccatcacaaagtttgcagcagaggaagctcgtgaaagtgactgggatggtatcattgcttgccatcaaggtaagctatcttgctcaacctggaattatcagaaatctacaataggcgcttactttctcaagccaaaagagttgaagaaagatgacataactgcaacagcagtggatataacttcttgtggaaactttgctgtaattggcctctcatcaggaactgtagatgtatataacatgcagtctggcatacatcgaggaagttttggcaaggatcaagctcacaagggatctgttagaggtgtcgcagtggatggattaaaccagttgacagttacaactggtagtgaaggattactcaaattctggaactttaaaaacaaaattttaatccattctgtgagcctcagttcatctccaaatatcatgttgctacatagggacagtggcattctgggactcgccttggatgacttctccattagtgttctggacatagaaactaggaagattgtcagagagttttctggacaccaaggccaaataaatgacatggcttttagtcctgatggtcgttggttaataagtgctgcgatggattgctctattaggacttgggaccttccttctgggtgccttatagactgctttttgttggactcggctcctctcaatgtttctatgtctcctactggagactttctggcaacttcccatgtggaccaccttggaatttatctatggtccaatatttccctgtattcagttgtttcattacggccacttcctgcagattatgtcccttcaatagtcatgcttcctggtacttgtcaaacccaagatgtagaagtatcagaagaaacagtagaaccaagtgatgaattgatagaatatgattcgccagaacagttgaatgagcaattggtgactctttcacttcttcctgaatcacgatggaaaaaccttcttaaccttgatgttattaagaaaaagaataaaccaaaggaaccacccaaagtacccaaatcagcaccatttttcattccaacaattcctggccttgtacccagatatgctgcacctgaacaaaataatgatccccagcagtctaaagtggtaaatcttggagttttggctcaaaaatcagatttctgcttgaaacttgaagaaggactggtaaataataagtatgacactgctctcaaccttctgaaagaatcaggcccatcaggaattgaaacagagctgcgaagcttgtctcctgattgtggtgggtccatagaagttatgcagagcttcttgaaaatgattgggatgatgctggacagaaagcgtgattttgagttagcccaggcataccttgcattgtttctaaagttacaccttaaaatgcttccttcagagccagtactcctagaagaaataacaaatttgtcatcccaggtggaagaaaactggacccatttgcaatcactcttcaatcaaagcatgtgtattttaaattatctcaaaagtgctttgttgtaaaaataaatttgtgactaaacaaagactttcatattaaatgggttcaattgaactcatttcttattttccaagtgtcaatgtgaaaagaaaataaatgctagcactactgactagtcagtatatctccactttaaatgctaaatactttcttgaaataaaatcgcacctcccggccaggcatgatggataatgcctgtaattccagcactttcagaggccaaagcgggaggattgcttgaagccaggaatttgagcccagcctgggcaacatagcaagcaagatcccatctctacaaaaagttaaaaaaataaattacacctgccttttgttttgaagacttaaagaatctgctcaaatgatttattttctgagtctcttcacattaacttttatatgatttttaaaaaattattacctgcttatattttttgagtatctgtttcatataaagagatgctgcatgttcactgtgaagtattgctgaattaaattgaaaatgtcagataaaactgatacatgatgtagttataaaaatgctgttatgaagaaaaaaggaatgcttttttcctcggtggcctttgataaaaatatgaatgattgactctcagagttggaggataaactaatcatcttctagcacagccctgttgtgttgcaggagaggaatcaggctaaagtctgctggtatttcagtgacagattaaaactttctaacagtggcctagtgctttctccattgtaatgtactgaaaggaagttgttcatggatcagaaatgtgggaggcccttccttgcccaaggcaagtcgctgtagatggttaaactgataccaaggataggtaagggaaattccaaattccattggaagatggccttttactgacactgcagacatgtagataacaatagtttaatgtcctctgaaaaggtaaaaattccataaatccttgcaaacaatttttagcaatattgtttattgctaccacagccaagaatgggtatttcaaagccagggtttttttattttgttttgttttgttttgtttttttttttttttggctacacttttttgggggggaccttttaatttgggaagaaaatgctgagtatacttttctttcacaaccattgcaaacccaggtagccctggagttttctttttttctcatcatcattgttttgttttttttatggttcaagacttttgcaatacatgaattaaaaataagcagttctttaaagcatagcgctctaaaaactattcttagtttataccctcaaaagttgggtctttcatgaaacacagtggtttgaatatgaacaccagtagcattctcgttcgttgttagggtaagagagttttgtagaatgatctccaaaagaagcagtcctcaaaaggcatttaccagtgatatcttttaatattcatgtttttatttaatgatgtaagatagaattaataaactactaaggaaataagccaatgtggttattgtactcaatttcgtttttcttttagaaatgtgtattgacttattaaagccactgacagaaatgttaatcatgacttaagttctaatttaaaaaactattttcctctttcctaaatactatattctaaattggaatatggcaaaatcccaatatataattctatacctagtaaagattgtaaataactaaaacaaaatgataagagctgtgaactgaaattgtattgcttacagaaatcatgaaccgaattttcttctctttttaaagtgagcataaagacttaagtgtattgttaccagagatatatttagatagaatacatcattttggcaggtaatcttctagaacctttcatgtactgtttccatcaagggagggaaagaaatagaaaatataattttatctatattttccttaaaatatatcaatctgtgcacactctttcagttttttaattactcatgtaatatatgactacattttgcttgtgtgctttttgaaaaccatcttcagtcccaatatcctctgtagaagtaatagttttaactctcctagatcttcttttagagtgtttttatgagtgtttaatgtaggaatgtgtatatattatctacagccacaggaaatgtatagttacgatttttacatacgtgtatgtatattattgtacaacttgctatttctacttgggagttttttattttggtacattcacatttacctaatctcttgtgcactgtccaacagtactttgcctataatagacacttaaggaagttttccttctttttattcctttataattacaaacaatgctgaaaggaacatcatcctacatgagccctttttgtacatataaggctctctctgtggtatatgcttaggatttgaatttcaggccagagtataaccatttttaatttgaagagatacttccatttgggttccagaatggctgtatcaagttacagttcccctgagcaagatatgagcatctgcttccccatgtaattaatgacacttgctattggatttttgtaatttaattactctgaaaaaattattttggttttaaatcagaaatttctcactagtgaagatggacatatttttgtatgtttattttagaacatataaacatttgttaattttctttttcctctcatttttctattgaatgatttgtccttttatctcatggatttgttaggagttctcttgtattttctgtattttatgtctgttgccaatgttttctcctacttagccatttggctttaattttacatggtgtctgtttaaataaatgttttatatttgtatacaatcaaattgattaattttcatgacttatttcaggatataaagcaaattattttctaagacatttacagtgtatgttttcctatgtttacatgtgctcatttcacgtcatgtattttcctctacgacatgtttctgtgtgagtagttaacatgtagatctttagaattgatttttctgaagagtgaaacagcgctgcttccaatatctgttcaaaattcatttattgaaaagtccactcatatgtctgatttgaaatgctgtttcattatgtgttaaattctttcactgagctcttccatattcctagtaaatgatgcattactttggtatgttctcagatttgggtaaagccttcctcatgttctataaaaattggttaactgctggtgagcacatctcttgaagttttgatatgggttgcacaacatttataggactgatttggagagaccgacaataccgagtgcagtcctcccttggtatctagttccaggacccctgtggataccaaaatccaagcaatgccctgcagatcatgggacctatgcatatgaaaagtcggtccttgtatttgagggttttgcatccctcaaataccatatgttttatttgtgtttggttgaaaaaagtttgcatataagtgaaacttagcatttcaaacctgtgttgttcaaagatcatttgtatttctcttcaagaacaatgaatgtcttcattaaatcatcttttgtgggagagcttttggtttcatagattttcatatatatatatgatataataaacactttttgacattcaaaaaaaaa

SEQ ID NO: 736617 - DNA, 6286 bp, Homo sapiens
catgatttaatattttaatgataattataatgatttcagatacctctgtttgctccatggatgtgttatttatcattcatgacttgcttctgaaattgagagcagcattactgttgtcatataacagtcatataacatgcaaataatatttttattaaaatataagttattccctttcatgatgtttctataaagatactgcagtcctaaattttttttactgtagcctgtaatataacatgatttttacacacgtatttttttttccacttaggacatttaatttcttaatgaggtggcatagcatagtagttagtttgagacctagaatttgtctggacaatattactaaccttgtgacattagcttaatcatcagaatagtgtgtggaagagtaagaacttaataaatatcacctattattatttcactttttaatgtgtagctgatattgttttcctccaaaaaaaaaaaaatacagctttcaactatttttcttcttgtagtaaacttctatatacatttccaggatggaaagttggagtgacagctcttcagcaggttagtgcaccagccgtggatgttgttgctattggtcttatgtcaggtcaagttatcattcacaacattaaatttaatgaaacattaatgaagtttcgtcaagactggggacccattacttcaatttcatttcgcacagatggtcatccagtaatggcagctggaagcccatgtggccatattggactctgggatctagaagacaaaaaattaatcaaccaaatgagaaatgcacactctacagcaattgccggactgacatttctccatagagagccacttcttgtcacaaatggcgctgacaatgctcttaggatatggatatttgatggtcctacaggtgaaggccgacttttgagattcagaatgggtcatagtgctcctcttaccaatatcagatattatggacagaatggacagcagattctaagtgcaagtcaagatggaactcttcagtcattttccacggtacatgaaaaattcaataagagcttgggacatggattaataaataaaaagagagttaaacgtaaaggacttcagaataccatgtcagtgagacttccacccatcacaaagtttgcagcagaggaagctcgtgaaagtgactgggatggtatcattgcttgccatcaaggtaagctatcttgctcaacctggaattatcagaaatctacaataggcgcttactttctcaagccaaaagagttgaagaaagatgacataactgcaacagcagtggatataacttcttgtggaaactttgctgtaattggcctctcatcaggaactgtagatgtatataacatgcagtctggcatacatcgaggaagttttggcaaggatcaagctcacaagggatctgttagaggtgtcgcagtggatggattaaaccagttgacagttacaactggtagtgaaggattactcaaattctggaactttaaaaacaaaattttaatccattctgtgagcctcagttcatctccaaatatcatgttgctacatagggacagtggcattctgggactcgccttggatgacttctccattagtgttctggacatagaaactaggaagattgtcagagagttttctggacaccaaggccaaataaatgacatggcttttagtcctgatggtcgttggttaataagtgctgcgatggattgctctattaggacttgggaccttccttctgggtgccttatagactgctttttgttggactcggctcctctcaatgtttctatgtctcctactggagactttctggcaacttcccatgtggaccaccttggaatttatctatggtccaatatttccctgtattcagttgtttcattacggccacttcctgcagattatgtcccttcaatagtcatgcttcctggtacttgtcaaacccaagatgtagaagtatcagaagaaacagtagaaccaagtgatgaattgatagaatatgattcgccagaacagttgaatgagcaattggtgactctttcacttcttcctgaatcacgatggaaaaaccttcttaaccttgatgttattaagaaaaagaataaaccaaaggaaccacccaaagtacccaaatcagcaccatttttcattccaacaattcctggccttgtacccagatatgctgcacctgaacaaaataatgatccccagcagtctaaagtggtaaatcttggagttttggctcaaaaatcagatttctgcttgaaacttgaagaaggactggtaaataataagtatgacactgctctcaaccttctgaaagaatcaggcccatcaggaattgaaacagagctgcgaagcttgtctcctgattgtggtgggtccatagaagttatgcagagcttcttgaaaatgattgggatgatgctggacagaaagcgtgattttgagttagcccaggcataccttgcattgtttctaaagttacaccttaaaatgcttccttcagagccagtactcctagaagaaataacaaatttgtcatcccaggtggaagaaaactggacccatttgcaatcactcttcaatcaaagcatgtgtattttaaattatctcaaaagtgctttgttgtaaaaataaatttgtgactaaacaaagactttcatattaaatgggttcaattgaactcatttcttattttccaagtgtcaatgtgaaaagaaaataaatgctagcactactgactagtcagtatatctccactttaaatgctaaatactttcttgaaataaaatcgcacctcccggccaggcatgatggataatgcctgtaattccagcactttcagaggccaaagcgggaggattgcttgaagccaggaatttgagcccagcctgggcaacatagcaagcaagatcccatctctacaaaaagttaaaaaaataaattacacctgccttttgttttgaagacttaaagaatctgctcaaatgatttattttctgagtctcttcacattaacttttatatgatttttaaaaaattattacctgcttatattttttgagtatctgtttcatataaagagatgctgcatgttcactgtgaagtattgctgaattaaattgaaaatgtcagataaaactgatacatgatgtagttataaaaatgctgttatgaagaaaaaaggaatgcttttttcctcggtggcctttgataaaaatatgaatgattgactctcagagttggaggataaactaatcatcttctagcacagccctgttgtgttgcaggagaggaatcaggctaaagtctgctggtatttcagtgacagattaaaactttctaacagtggcctagtgctttctccattgtaatgtactgaaaggaagttgttcatggatcagaaatgtgggaggcccttccttgcccaaggcaagtcgctgtagatggttaaactgataccaaggataggtaagggaaattccaaattccattggaagatggccttttactgacactgcagacatgtagataacaatagtttaatgtcctctgaaaaggtaaaaattccataaatccttgcaaacaatttttagcaatattgtttattgctaccacagccaagaatgggtatttcaaagccagggtttttttattttgttttgttttgttttgtttttttttttttttggctacacttttttgggggggaccttttaatttgggaagaaaatgctgagtatacttttctttcacaaccattgcaaacccaggtagccctggagttttctttttttctcatcatcattgttttgttttttttatggttcaagacttttgcaatacatgaattaaaaataagcagttctttaaagcatagcgctctaaaaactattcttagtttataccctcaaaagttgggtctttcatgaaacacagtggtttgaatatgaacaccagtagcattctcgttcgttgttagggtaagagagttttgtagaatgatctccaaaagaagcagtcctcaaaaggcatttaccagtgatatcttttaatattcatgtttttatttaatgatgtaagatagaattaataaactactaaggaaataagccaatgtggttattgtactcaatttcgtttttcttttagaaatgtgtattgacttattaaagccactgacagaaatgttaatcatgacttaagttctaatttaaaaaactattttcctctttcctaaatactatattctaaattggaatatggcaaaatcccaatatataattctatacctagtaaagattgtaaataactaaaacaaaatgataagagctgtgaactgaaattgtattgcttacagaaatcatgaaccgaattttcttctctttttaaagtgagcataaagacttaagtgtattgttaccagagatatatttagatagaatacatcattttggcaggtaatcttctagaacctttcatgtactgtttccatcaagggagggaaagaaatagaaaatataattttatctatattttccttaaaatatatcaatctgtgcacactctttcagttttttaattactcatgtaatatatgactacattttgcttgtgtgctttttgaaaaccatcttcagtcccaatatcctctgtagaagtaatagttttaactctcctagatcttcttttagagtgtttttatgagtgtttaatgtaggaatgtgtatatattatctacagccacaggaaatgtatagttacgatttttacatacgtgtatgtatattattgtacaacttgctatttctacttgggagttttttattttggtacattcacatttacctaatctcttgtgcactgtccaacagtactttgcctataatagacacttaaggaagttttccttctttttattcctttataattacaaacaatgctgaaaggaacatcatcctacatgagccctttttgtacatataaggctctctctgtggtatatgcttaggatttgaatttcaggccagagtataaccatttttaatttgaagagatacttccatttgggttccagaatggctgtatcaagttacagttcccctgagcaagatatgagcatctgcttccccatgtaattaatgacacttgctattggatttttgtaatttaattactctgaaaaaattattttggttttaaatcagaaatttctcactagtgaagatggacatatttttgtatgtttattttagaacatataaacatttgttaattttctttttcctctcatttttctattgaatgatttgtccttttatctcatggatttgttaggagttctcttgtattttctgtattttatgtctgttgccaatgttttctcctacttagccatttggctttaattttacatggtgtctgtttaaataaatgttttatatttgtatacaatcaaattgattaattttcatgacttatttcaggatataaagcaaattattttctaagacatttacagtgtatgttttcctatgtttacatgtgctcatttcacgtcatgtattttcctctacgacatgtttctgtgtgagtagttaacatgtagatctttagaattgatttttctgaagagtgaaacagcgctgcttccaatatctgttcaaaattcatttattgaaaagtccactcatatgtctgatttgaaatgctgtttcattatgtgttaaattctttcactgagctcttccatattcctagtaaatgatgcattactttggtatgttctcagatttgggtaaagccttcctcatgttctataaaaattggttaactgctggtgagcacatctcttgaagttttgatatgggttgcacaacatttataggactgatttggagagaccgacaataccgagtgcagtcctcccttggtatctagttccaggacccctgtggataccaaaatccaagcaatgccctgcagatcatgggacctatgcatatgaaaagtcggtccttgtatttgagggttttgcatccctcaaataccatatgttttatttgtgtttggttgaaaaaagtttgcatataagtgaaacttagcatttcaaacctgtgttgttcaaagatcatttgtatttctcttcaagaacaatgaatgtcttcattaaatcatcttttgtgggagagcttttggtttcatagattttcatatatatatatgatataataaacactttttgacattcaaaaaaaaa

SEQ ID NO: 736618 - DNA, 4427 bp, Homo sapiens
atcatggctgcagatgatctgtgctttcttacattatgactgcacatggttacttgtgtaatacccgaggatgttagatagtattcaagcatggagaacaagttatgtaacctagacgatgagtgatgtaagtatcagaagttgttgaatttgacgaggatcaagttcgaaatgcaaggctattgggtagcattctctatacgttctatcttgaattcatcccatcgtgattaaccttcttaaccttgatgttattaagaaaaagaataaaccaaaggaaccacccaaagtacccaaatcagcaccatttttcattccaacaattcctggccttgtacccagatatgctgcacctgaacaaaataatgatccccagcagtctaaagtggtaaatcttggagttttggctcaaaaatcagatttctgcttgaaacttgaagaaggactggtaaataataagtatgacactgctctcaaccttctgaaagaatcaggcccatcaggaattgaaacagagctgcgaagcttgtctcctgattgtggtgggtccatagaagttatgcagagcttcttgaaaatgattgggatgatgctggacagaaagcgtgattttgagttagcccaggcataccttgcattgtttctaaagttacaccttaaaatgcttccttcagagccagtactcctagaagaaataacaaatttgtcatcccaggtggaagaaaactggacccatttgcaatcactcttcaatcaaagcatgtgtattttaaattatctcaaaagtgctttgttgtaaaaataaatttgtgactaaacaaagactttcatattaaatgggttcaattgaactcatttcttattttccaagtgtcaatgtgaaaagaaaataaatgctagcactactgactagtcagtatatctccactttaaatgctaaatactttcttgaaataaaatcgcacctcccggccaggcatgatggataatgcctgtaattccagcactttcagaggccaaagcgggaggattgcttgaagccaggaatttgagcccagcctgggcaacatagcaagcaagatcccatctctacaaaaagttaaaaaaataaattacacctgccttttgttttgaagacttaaagaatctgctcaaatgatttattttctgagtctcttcacattaacttttatatgatttttaaaaaattattacctgcttatattttttgagtatctgtttcatataaagagatgctgcatgttcactgtgaagtattgctgaattaaattgaaaatgtcagataaaactgatacatgatgtagttataaaaatgctgttatgaagaaaaaaggaatgcttttttcctcggtggcctttgataaaaatatgaatgattgactctcagagttggaggataaactaatcatcttctagcacagccctgttgtgttgcaggagaggaatcaggctaaagtctgctggtatttcagtgacagattaaaactttctaacagtggcctagtgctttctccattgtaatgtactgaaaggaagttgttcatggatcagaaatgtgggaggcccttccttgcccaaggcaagtcgctgtagatggttaaactgataccaaggataggtaagggaaattccaaattccattggaagatggccttttactgacactgcagacatgtagataacaatagtttaatgtcctctgaaaaggtaaaaattccataaatccttgcaaacaatttttagcaatattgtttattgctaccacagccaagaatgggtatttcaaagccagggtttttttattttgttttgttttgttttgtttttttttttttttggctacacttttttgggggggaccttttaatttgggaagaaaatgctgagtatacttttctttcacaaccattgcaaacccaggtagccctggagttttctttttttctcatcatcattgttttgttttttttatggttcaagacttttgcaatacatgaattaaaaataagcagttctttaaagcatagcgctctaaaaactattcttagtttataccctcaaaagttgggtctttcatgaaacacagtggtttgaatatgaacaccagtagcattctcgttcgttgttagggtaagagagttttgtagaatgatctccaaaagaagcagtcctcaaaaggcatttaccagtgatatcttttaatattcatgtttttatttaatgatgtaagatagaattaataaactactaaggaaataagccaatgtggttattgtactcaatttcgtttttcttttagaaatgtgtattgacttattaaagccactgacagaaatgttaatcatgacttaagttctaatttaaaaaactattttcctctttcctaaatactatattctaaattggaatatggcaaaatcccaatatataattctatacctagtaaagattgtaaataactaaaacaaaatgataagagctgtgaactgaaattgtattgcttacagaaatcatgaaccgaattttcttctctttttaaagtgagcataaagacttaagtgtattgttaccagagatatatttagatagaatacatcattttggcaggtaatcttctagaacctttcatgtactgtttccatcaagggagggaaagaaatagaaaatataattttatctatattttccttaaaatatatcaatctgtgcacactctttcagttttttaattactcatgtaatatatgactacattttgcttgtgtgctttttgaaaaccatcttcagtcccaatatcctctgtagaagtaatagttttaactctcctagatcttcttttagagtgtttttatgagtgtttaatgtaggaatgtgtatatattatctacagccacaggaaatgtatagttacgatttttacatacgtgtatgtatattattgtacaacttgctatttctacttgggagttttttattttggtacattcacatttacctaatctcttgtgcactgtccaacagtactttgcctataatagacacttaaggaagttttccttctttttattcctttataattacaaacaatgctgaaaggaacatcatcctacatgagccctttttgtacatataaggctctctctgtggtatatgcttaggatttgaatttcaggccagagtataaccatttttaatttgaagagatacttccatttgggttccagaatggctgtatcaagttacagttcccctgagcaagatatgagcatctgcttccccatgtaattaatgacacttgctattggatttttgtaatttaattactctgaaaaaattattttggttttaaatcagaaatttctcactagtgaagatggacatatttttgtatgtttattttagaacatataaacatttgttaattttctttttcctctcatttttctattgaatgatttgtccttttatctcatggatttgttaggagttctcttgtattttctgtattttatgtctgttgccaatgttttctcctacttagccatttggctttaattttacatggtgtctgtttaaataaatgttttatatttgtatacaatcaaattgattaattttcatgacttatttcaggatataaagcaaattattttctaagacatttacagtgtatgttttcctatgtttacatgtgctcatttcacgtcatgtattttcctctacgacatgtttctgtgtgagtagttaacatgtagatctttagaattgatttttctgaagagtgaaacagcgctgcttccaatatctgttcaaaattcatttattgaaaagtccactcatatgtctgatttgaaatgctgtttcattatgtgttaaattctttcactgagctcttccatattcctagtaaatgatgcattactttggtatgttctcagatttgggtaaagccttcctcatgttctataaaaattggttaactgctggtgagcacatctcttgaagttttgatatgggttgcacaacatttataggactgatttggagagaccgacaataccgagtgcagtcctcccttggtatctagttccaggacccctgtggataccaaaatccaagcaatgccctgcagatcatgggacctatgcatatgaaaagtcggtccttgtatttgagggttttgcatccctcaaataccatatgttttatttgtgtttggttgaaaaaagtttgcatataagtgaaacttagcatttcaaacctgtgttgttcaaagatcatttgtatttctcttcaagaacaatgaatgtcttcattaaatcatcttttgtgggagagcttttggtttcatagattttcatatatatatatgatataataaacactttttgacattcaaaaaaaaa

SEQ ID NO: 736619 - DNA, 6421 bp, Homo sapiens
gcagccgtggcctctcccccacgcgtagacacgctgaagggactgggtacgtgttttccttcaggaccagagctgagaggagctgggatcgcggcggcaatggaacgggcctcagaaaggcgcacggccagcgcgctttttgcggggttccgggccttgggacttttcagcaacgacattccacacgtggtgcggttcagcgcgctcaagcgccggttctatgtaacaacctgcgtgggcaagagtttccacacctatgacgttcagaaacttagtctggttgcagtaagtaattctgttccacaggatatctgctgtatggcagctgatggcagattagtctttgctgcttatggaaatgttttctctgcatttgcccgtaataaagagatagtacatacctttaagggtcataaggcagaaatccatttcttgcaaccctttggagaccacattatctctgttgatactgatggcattcttattatttggcacatatattcagaagaagaatacctgcagttgacttttgataaatcagtatttaaaatttctgcaattttgcatccaagtacctacttgaataaaatacttctgggcagtgaacaaggaagcctgcagttgtggaatgtaaaatccaataaacttctatatacatttccaggatggaaagttggagtgacagctcttcagcaggttagtgcaccagccgtggatgttgttgctattggtcttatgtcaggtcaagttatcattcacaacattaaatttaatgaaacattaatgaagtttcgtcaagactggggacccattacttcaatttcatttcgcacagatggtcatccagtaatggcagctggaagcccatgtggccatattggactctgggatctagaagacaaaaaattaatcaaccaaatgagaaatgcacactctacagcaattgccggactgacatttctccatagagagccacttcttgtcacaaatggcgctgacaatgctcttaggatatggatatttgatggtcctacaggtgaaggccgacttttgagattcagaatgggtcatagtgctcctcttaccaatatcagatattatggacagaatggacagcagattctaagtgcaagtcaagatggaactcttcagtcattttccacggtacatgaaaaattcaataagagcttgggacatggattaataaataaaaagagagttaaacgtaaaggacttcagaataccatgtcagtgagacttccacccatcacaaagtttgcagcagaggaagctcgtgaaagtgactgggatggtatcattgcttgccatcaaggtaagctatcttgctcaacctggaattatcagaaatctacaataggcgcttactttctcaagccaaaagagttgaagaaagatgacataactgcaacagcagtggatataacttcttgtggaaactttgctgtaattggcctctcatcaggaactgtagatgtatataacatgcagtctggcatacatcgaggaagttttggcaaggatcaagctcacaagggatctgttagaggtgtcgcagtggatggattaaaccagttgacagttacaactggtagtgaaggattactcaaattctggaactttaaaaacaaaattttaatccattctgtgagcctcagttcatctccaaatatcatgttgctacatagggacagtggcattctgggactcgccttggatgacttctccattagtgttctggacatagaaactaggaagattgtcagagagttttctggacaccaaggccaaataaatgacatggcttttagtcctgatggtcgttggttaataagtgctgcgatggattgctctattaggacttgggaccttccttctgggtgccttatagactgctttttgttggactcggctcctctcaatgtttctatgtctcctactggagactttctggcaacttcccatgtggaccaccttggaatttatctatggtccaatatttccctgtattcagttgtttcattacggccacttcctgcagattatgtcccttcaatagtcatgcttcctggtacttgtcaaacccaagatgtagaagtatcagaagaaacagtagaaccaagtgatgaattgatagaatatgattcgccagaacagttgaatgagcaattggtgactctttcacttcttcctgaatcacgatggaaaaaccttcttaaccttgatgttattaagaaaaagaataaaccaaaggaaccacccaaagtacccaaatcagcaccatttttcattccaacaattcctggccttgtacccagatatgctgcacctgaacaaaataatgatccccagcagtctaaagtggtaaatcttggagttttggctcaaaaatcagatttctgcttgaaacttgaagaaggactggtaaataataagtatgacactgctctcaaccttctgaaagaatcaggcccatcaggaattgaaacagagctgcgaagcttgtctcctgattgtggtgggtccatagaagttatgcagagcttcttgaaaatgattgggatgatgctggacagaaagcgtgattttgagttagcccaggcataccttgcattgtttctaaagttacaccttaaaatgcttccttcagagccagtactcctagaagaaataacaaatttgtcatcccaggtggaagaaaactggacccatttgcaatcactcttcaatcaaagcatgtgtattttaaattatctcaaaagtgctttgttgtaaaaataaatttgtgactaaacaaagactttcatattaaatgggttcaattgaactcatttcttattttccaagtgtcaatgtgaaaagaaaataaatgctagcactactgactagtcagtatatctccactttaaatgctaaatactttcttgaaataaaatcgcacctcccggccaggcatgatggataatgcctgtaattccagcactttcagaggccaaagcgggaggattgcttgaagccaggaatttgagcccagcctgggcaacatagcaagcaagatcccatctctacaaaaagttaaaaaaataaattacacctgccttttgttttgaagacttaaagaatctgctcaaatgatttattttctgagtctcttcacattaacttttatatgatttttaaaaaattattacctgcttatattttttgagtatctgtttcatataaagagatgctgcatgttcactgtgaagtattgctgaattaaattgaaaatgtcagataaaactgatacatgatgtagttataaaaatgctgttatgaagaaaaaaggaatgcttttttcctcggtggcctttgataaaaatatgaatgattgactctcagagttggaggataaactaatcatcttctagcacagccctgttgtgttgcaggagaggaatcaggctaaagtctgctggtatttcagtgacagattaaaactttctaacagtggcctagtgctttctccattgtaatgtactgaaaggaagttgttcatggatcagaaatgtgggaggcccttccttgcccaaggcaagtcgctgtagatggttaaactgataccaaggataggtaagggaaattccaaattccattggaagatggccttttactgacactgcagacatgtagataacaatagtttaatgtcctctgaaaaggtaaaaattccataaatccttgcaaacaatttttagcaatattgtttattgctaccacagccaagaatgggtatttcaaagccagggtttttttattttgttttgttttgttttgtttttttttttttttggctacacttttttgggggggaccttttaatttgggaagaaaatgctgagtatacttttctttcacaaccattgcaaacccaggtagccctggagttttctttttttctcatcatcattgttttgttttttttatggttcaagacttttgcaatacatgaattaaaaataagcagttctttaaagcatagcgctctaaaaactattcttagtttataccctcaaaagttgggtctttcatgaaacacagtggtttgaatatgaacaccagtagcattctcgttcgttgttagggtaagagagttttgtagaatgatctccaaaagaagcagtcctcaaaaggcatttaccagtgatatcttttaatattcatgtttttatttaatgatgtaagatagaattaataaactactaaggaaataagccaatgtggttattgtactcaatttcgtttttcttttagaaatgtgtattgacttattaaagccactgacagaaatgttaatcatgacttaagttctaatttaaaaaactattttcctctttcctaaatactatattctaaattggaatatggcaaaatcccaatatataattctatacctagtaaagattgtaaataactaaaacaaaatgataagagctgtgaactgaaattgtattgcttacagaaatcatgaaccgaattttcttctctttttaaagtgagcataaagacttaagtgtattgttaccagagatatatttagatagaatacatcattttggcaggtaatcttctagaacctttcatgtactgtttccatcaagggagggaaagaaatagaaaatataattttatctatattttccttaaaatatatcaatctgtgcacactctttcagttttttaattactcatgtaatatatgactacattttgcttgtgtgctttttgaaaaccatcttcagtcccaatatcctctgtagaagtaatagttttaactctcctagatcttcttttagagtgtttttatgagtgtttaatgtaggaatgtgtatatattatctacagccacaggaaatgtatagttacgatttttacatacgtgtatgtatattattgtacaacttgctatttctacttgggagttttttattttggtacattcacatttacctaatctcttgtgcactgtccaacagtactttgcctataatagacacttaaggaagttttccttctttttattcctttataattacaaacaatgctgaaaggaacatcatcctacatgagccctttttgtacatataaggctctctctgtggtatatgcttaggatttgaatttcaggccagagtataaccatttttaatttgaagagatacttccatttgggttccagaatggctgtatcaagttacagttcccctgagcaagatatgagcatctgcttccccatgtaattaatgacacttgctattggatttttgtaatttaattactctgaaaaaattattttggttttaaatcagaaatttctcactagtgaagatggacatatttttgtatgtttattttagaacatataaacatttgttaattttctttttcctctcatttttctattgaatgatttgtccttttatctcatggatttgttaggagttctcttgtattttctgtattttatgtctgttgccaatgttttctcctacttagccatttggctttaattttacatggtgtctgtttaaataaatgttttatatttgtatacaatcaaattgattaattttcatgacttatttcaggatataaagcaaattattttctaagacatttacagtgtatgttttcctatgtttacatgtgctcatttcacgtcatgtattttcctctacgacatgtttctgtgtgagtagttaacatgtagatctttagaattgatttttctgaagagtgaaacagcgctgcttccaatatctgttcaaaattcatttattgaaaagtccactcatatgtctgatttgaaatgctgtttcattatgtgttaaattctttcactgagctcttccatattcctagtaaatgatgcattactttggtatgttctcagatttgggtaaagccttcctcatgttctataaaaattggttaactgctggtgagcacatctcttgaagttttgatatgggttgcacaacatttataggactgatttggagagaccgacaataccgagtgcagtcctcccttggtatctagttccaggacccctgtggataccaaaatccaagcaatgccctgcagatcatgggacctatgcatatgaaaagtcggtccttgtatttgagggttttgcatccctcaaataccatatgttttatttgtgtttggttgaaaaaagtttgcatataagtgaaacttagcatttcaaacctgtgttgttcaaagatcatttgtatttctcttcaagaacaatgaatgtcttcattaaatcatcttttgtgggagagcttttggtttcatagattttcatatatatatatgatataataaacactttttgacattcaaaaaaaaa

SEQ ID NO: 736620 - DNA, 1340 bp, Homo sapiens
atttacctcaaccaaccgcatctcaacaaattccgcgacaaccagatcagtacggccaagtacaacgtgttgacatttctacctcgattcttgtatgagcagattagaagagctgctaatgccttctttctcttcattgccttattacagcaaattccagatgtatctccaacaggaagatataccaccctggtgccattgatcattattttaacaattgcaggcatcaaagagattgtagaagattttaagcgacacaaggcagacaatgcagttaacaaaaagaaaacaatagtgttaagaaatggtatgtggcataccattatgtggaaagaggtggcagtgggagacattgtgaaggtcgtcaatgggcagtatcttccagcagatgtggtcctgctgtcatccagtgaacctcaggcaatgtgttatgttgaaacagctaatctggatggggagacgaaccttaaaatacgtcagggtttgagtcacactgctgacatgcaaacacgtgaagttctgatgaagttatctggaactatagagtgtgaagggcccaaccgccacctctatgacttcactggaaacttgaacttagatgggaaaagccttgttgcccttgggcctgaccagatcttattaagaggtacacagcttagaaatactcagtgggtctttggcatagttgtttatactggacacgacaccaaactcatgcagaattcaaccaaagcgcctctcaagagatcaaatgttgagaaggtgactaacgtgcagatcctggtgttgtttggcatcctcttggtcatggccttggtgagctcggcgggggccctgtactggaacaggtctcatggtgaaaagaactggtacatcaagaagatgggtaagtgtcggggtgggttgcttgttccagtggaagaaaaccatttttgagatgttcttgcagccatggttgaagtgtggtgtccctgctgtccttctgttccctttggttactgtacataatgccagcctttcaaggagaattgagattaggatcatgtgatgaaatgaagatgggcacatttgggacttgtcttatactcaaatggttatttttaaactctgtgttaaagtattttcttagtggttgccctaggaattacaatgtatttcccaatttatccaaatctacttttgattaatactaacaattctagtcaaacacagaaatgtcactccagcgtacctccatttcctctcctgcttggtgctgtcattgttatattccatttatctgtgttgtcaactccaaaatagtgttataataatttgtgtctcttaaagaagctaaagga

SEQ ID NO: 736621 - DNA, 968 bp, Homo sapiens
atttacctcaaccaaccgcatctcaacaaattccgcgacaaccagatcagtacggccaagtacaacgtgttgacatttctacctcgattcttgtatgagcagattagaagagctgctaatgccttctttctcttcattgccttattacagcaaattccagatgtatctccaacaggaagatataccaccctggtgccattgatcattattttaacaattgcaggcatcaaagagattgtagaagattttaagcgacacaaggcagacaatgcagttaacaaaaagaaaacaatagtgttaagaaatggtatgtggcataccattatgtggaaagaggtggcagtgggagacattgtgaaggtcgtcaatgggcagtatcttccagcagatgtggtcctgctgtcatccagtgaacctcaggcaatgtgttatgttgaaacagctaatctggatggggagacgaaccttaaaatacgtcagggtttgagtcacactgctgacatgcaaacacgtgaagttctgatgaagttatctggaactatagagtgtgaagggcccaaccgccacctctatgacttcactggaaacttgaacttagatgggaaaagccttgttgcccttgggcctgaccagatcttattaagaggtacacagcttagaaatactcagtgggtctttggcatagttgtttatactggacacgacaccaaactcatgcagaattcaaccaaagcgcctctcaagagatcaaatgttgagaaggtgactaacgtgcagatcctggtgttgtttggcatcctcttggtcatggccttggtgagctcggcgggggccctgtactggaacaggtctcatggtgaaaagaactggtacatcaagaagatggacaccacctcagataattttggatacaacctactgacgttcatcatcttatacaacaatcttattcccatcagtctgttggt

SEQ ID NO: 736622 - DNA, 743 bp, Homo sapiens
ggtgagcgagcggcgaccctcacctcgcctcccgcctagctcctgcgcagccagcgggtaccgggagctgcggccagcgccgcttctttcctttccttttctctccgttttccttctccttccccggaggagaaaacaaataaagaagagcaaatagccgggaggcgctcggcatccaggacgttccctcccccgatccaagttggaattagcatcctctcgggggtggctcgggagcggcccggaggagccggcggcggcccgaggagcgagggaccgaaccgggagccatgccgcgctgagggggggccgcacagccgccgccaccgccaccgccgccgggtggggtgggaggggcgggagacgccgccgccgccgcctccagggtgggcgcctttcgccgtggacgccgaccgtccgggacgagggttcatagtggcgtcatgcacgcagactcctgcaagttcccctaagttcttagaggactgctttgccttttgatctgagagttgcaaagttccataaagaatggcccttgtggataagcacaaagtcaagagacagcgattggacagaatttgtgaaggttcatagtggcgtcatgcacgcagactcctgcaagttcccctaagttcttagaggactgctttgcctttgatctgagagttgcaaagttccataaagaatggcccttgttggataagcacaaagtcaagagacagcgattggacagaattgtgagg

SEQ ID NO: 736623 - DNA, 929 bp, Homo sapiens; identical to SEQ ID NO: 358492

SEQ ID NO: 736624 - DNA, 404 bp, Homo sapiens
aattcgagctcgggtacacggaatgtgtggtgttatggtgacaagtagagctggtcatgtcgacagccccctcttacctcgtcgcgtctcagcagatgtccatggggtcgtattgggagtgacttttgtaccagttggcttggctgattttggaaagagtggaagaacccccttcaccttgtgagttttgttcatctgtgttgcatgtgtttgcacagtgtacattgactgaaacgtgaagaaacagcccttgggcttttgagtctcggttttctttcttggcgctcatgctctcagaataataatacgtgtggtgcaggcccggtgcaccaggcaagtgagggctgtgctggcatggtttctttaggaggaaggcctgttgcataacaccacaagtttccggg

SEQ ID NO: 736625 - DNA, 666 bp, Homo sapiens
tgaccgttagggacgaggggcttcaaggagcggttcatagtggcgtcatgcacgcagactcctgcaagttcccctaagttcttagaggactgctttgccttttgatctgagagttgcaaagttccataaagaatggcccttgtggataagcacaaagtcaagagacagcgattggacagaatttgtgaagtcgccacagcgagatcgactgaacggcgcacaccgtgcgcacacacccggggggcacttgagataagcggcatgacgtcggacggcccagggacatgcacgggaaaagaaagtagcgacaatcgctgagaggcacctggccaacgagtaggcattcatgtgaccgcgcaagacaagaaggacaacgcagaaaagtcggaacggaagaaaacgggaagcactaaagaacaggaagcgcccaggaggaggaagcacaggccgaagtggaattggatgtaacacaaaagacgaccaaaaatctcaagcaccacttaccgacgaaacagaggacacaggagaacccattgggagacgcaaaaagaattaccaagaagggccacccattgcaaaacaaggctgcaatcaggcaagaaagggagaagacagcagcaaaaagggggcggcaaagggaagcaaagaaaggcgggaaaaaaatag

SEQ ID NO: 736626 - DNA, 2460 bp, Homo sapiens
ggacctggcaggctggggacagcctcctctccgggactgagctgtaaggaacagacctctctggctatcgttggggagtgaggcaaagttaccgtgagtcttatgttttgtctgctaaggtttcggaggattaataattcaggccatgctttgaaacagaaaacccccagttggttgtccctgccgtctcggaagggttagcacacagccaggtctgtttttgatgtatgtaattgaagatttataaagaaaagcttctcctctgcctcatccacagtcattttttttccaatgccagttcccagcaggcatataaatattggtcgttctcagagctgggatgctgctgggtggtacgagggcccctgggagaacgccgagtccctgcggcctctggggaggagaagctccctgacgtatggcacagcagaggggacttggtttgagccaaaccaccgaccacaggacgctgccctgcccgtggccgccgagccctacctgtaccgggaggccgtttataactcagtggctgcaagaaaggggtctactcctgacttcaccttctacgacagcagacaggcagtgatgtctggtcgcagccccctgctgccacgggagtactacagtgatccgtctggagctgctagggtacccaaagagcctcccctctatcgggacccaggagtcagccggccggtccccagctacggagtgcttggcagcagaacgtcatgggatccaatgcaaggccggtcacctgccctgcaggacgccggtcacctgtaccgggatcctggaggtaaaatgatccctcaggggcggcagacacagagcagggctgcatctcccgggcggtatggacgggagcagcccgacaccaggtatggggcggaggtgcctgcctaccccctcagccaggtcttcagcgacatcagcgaaagacccattgaccctgcccctgccagacaggtggccccgacgtgcctggttgtggaccccagttcagctgctgcccccgaaggcagcacaggggtggccccaggggccctgaatcgtggctacgggcctgcccgggaaagcatcccatccaagatggcttacgagacttacgaagctgacctgtccaccttccagggtcctggtggcaagaggaccgtgctccctgagttcctggcctttctgcgggcggaggggctggcagaggccacgctgggagccctactgcagcagggctttgactccccggccgtcctggctaccctggaggacgcggatatcaagtctgtcgcacccaacctgggccaggcccgtgttctgagccgcctggccaatagctgcaggaccgaaatgcagctgcggaggcaggaccgggggggcccgctgccccgggcgcggtccagcagcttcagccaccgaagcgaactgctccatggtgacttggcttctctgggcgctgcggctcctctgcagacagcatccccccgagctggagacccggctcgccgtccctccagcgcaccatctcagcacctcctggagacggcagccacctattctgcccctggcgtgggcacccatgccccacacttcccctccaactccgggtacagctctcccaccccttgcgccctgacagcgcgtctgagccccacgcaccccctgcaggcaggggtggccttgactaacccgggcccctcaaacccccttcacccaggccccagaacagcttactccacggcatacacggtgcccatggagctgctaaagagggagcgcaacgtggccgcctctccgctgcccagccctcacggcagcccccaggtcttgcggaagccaggtgcacccctggggccatccaccctgccgccggccagccagagcctccacacgcctcactcaccgtacgagaaggtggcccggcgcacaggggcacccatcatcgtgtccaccatgcttgcaccagaaccaagtgcggctcccaggatgactgaagctggtcacttggtagtcccactgactccgctctgtgaggccgactcgaccgtgaccagtgacagagccaaaagatctcacactgatgagagaaagttcctcacataccatgagatagcgatcatagacggcatctctccttgacacttttcttgtccaacagcggcaacgccctcagcagacgaatctatgatcacacagcaaaacagaggttacataacccgtgtacctccctcactagggacgccttagctgaaatagtaaccatcaactgcacatcactcccgtctgacttagaggtaccggaaccatgggtaccaagggttcctacaagatcgcgtagaaagcccgatcgagtatccaggaactgggcactgggtcgcattccaccttgcgacgctgacccgtctacgcggacttgcgcgctgaaccccacactcctaattagccggccatcgcaagcgcatg

SEQ ID NO: 736627 - DNA, 524 bp, Homo sapiens
acccagagacagtgaaaaatagatgaactaagagaacaagaatcggatggtcttagtaactagattctggacatatgcatcattgatgttgcagtgtggttccccggaagcccacaaaacacggggacaatcgagagcaccccaacgagcaatagcagagaatgccagaaggtaatcactcagatacacttgggaccaagagacagtgaaaaatagatgaactaagagaaaaagaatcggatggtctttgtaactgattctggacatatgcatcattgatgttgcagtgttgaaactacaagagctagaaaactgaagatgtcgtctgcttacggaagcgctgaaagactaggatgtgatttattaacgaccaacttctgttattgtgtgttaagtttttcatctgtgcatcaaatcacaaaaagaataaatagagctttttcctttatcagtcccttgggcacagcaggtcctgaacaccctgctctacaatgttgcagtgtgcttccggggtaccgagctct

SEQ ID NO: 736628 - DNA, 572 bp, Homo sapiens
ccatggacgtgttcaaagtattttaatgtccaaaatgaactgtttttcctccagtttccatagaaaatataactgacataaaaagtatcccaccactacaaggaaataatccagcaaatgcactcctgggttgaaacagggcagaatgccagctcaccaatgtgaacagtcatgcaggctgtcatgcagggctttccgaagcactgagtccttgtcatagatgccccaggtagcttgtagaactgaatcaagtaggcagtctcctgcagtccggttccaaagtgcatacagtcgactgtccaaacgtgtagccaattccaaggaccagttaataattggagattcttcttctaattctgtacgatggatttaaatacatgttcatttccatacctatgtcattagagaatactcatggggagaagaacctattttctagctataaaatggtttatatgtaatttaccaataaacacctaaataaaattgaccaattgaaatataaacttttgagtacttgaaacatcttctgtctctagaataatttaataaacttttaaattctttacagt

SEQ ID NO: 736629 - DNA, 1954 bp, Homo sapiens
ggtgagcgagcggcgaccctcacctcgcctcccgcctagctcctgcgcagccagcgggtaccgggagctgcggccagcgccgcttctttcctttccttttctctccgttttccttctccttccccggaggagaaaacaaataaagaagagcaaatagccgggaggcgctcggcatccaggacgttccctcccccgatccaagttggaattagcatcctctcggggggttcatagtggcgtcatgcacgcagactcctgcaagttcccctaagttcttagaggactgctttgccttttgatctgagagttgcaaagttccataaagaatggcccttgtggataagcacaaagtcaagagacagcgattggacagaatttgtgaaggtatccgcccccagatcatgaacggccccctgcacccccgccccctggtggcgctgctggacggccgcgactgcactgtggagatgcccatcctgaaggacctggccactgtggccttctgtgacgcgcagtcgacgcaggaaatccacgagaaggttctaaacgaagccgtgggcgccatgatgtaccacaccatcaccctcaccagggaggacctggagaagttcaaggccctgagagtgatcgtgcggataggcagtggctatgacaacgtggacatcaaggctgccggcgagctcggaattgccgtgtgcaacatcccgtctgcagccgtggaagagacagcggactctaccatctgccacatcctcaacctgtaccggaggaacacgtggctgtaccaggcactgcgggaaggcacgcgggttcagagcgtggagcagatccgcgaggtggcctcgggagcggcccgcatccgtggggagacgctgggcctcattggctttggtcgcacggggcaggcggttgcagttcgagccaaggcctttggattcagcgtcatattttatgacccctacttgcaggatgggatcgagcggtccctgggcgtgcagagggtctacaccctgcaggatttgctgtatcagagcgactgcgtctccttgcactgcaatctcaacgaacataaccaccacctcatcaatgactttaccataaagcagatgaggcagggagcattccttgtgaacgcagcccgtggcggcctggtggacgagaaagccttagcacaagccctcaaggagggcaggatacgaggggcagccctcgacgtgcatgagtcagagcccttcagctttgctcagggtccgttgaaagatgccccgaatctcatctgcactcctcacactgcctggtacagtgagcaggcgtcactggagatgagggaggcagctgccaccgagatccgccgagccatcacaggtcgcatcccagaaagcttaagaaattgtgtgaacaaggaattctttgtcacatcagcgccttggtcagtaatagaccagcaagcaattcatcctgagctcaatggtgccacatacaggtgagaaaaggaactgactttgtctcagcttgtgagcaccacggccccggggccagggagagaagcccaaacttggcggaagcttaacctcccgcagatgctaagtcagggtcagaacaatcagccttctcagcaggaactgtgtacaccgcccccatttcttccaatgcctaatttcatggaacaaacagaagctcctattttaaaagggggtgtgttcggtcagatgtgattgaccacaggtgctaggaactgcctttcattctaaagccatcttaaaaccagaaggcttcccagtcacgtgtggtggcgcacacctgcagtctcagctgctagggaggctgaggtgggagaggtgcttgaagctgggaggtggagattgcagtgagccgagatcacccactgcactccagcctaggccacagagtgagacaatgctgctaccccccgaccccaccccaccaccaaaaa

SEQ ID NO: 736630 - DNA, 6944 bp, Homo sapiens
ggtgagcgagcggcgaccctcacctcgcctcccgcctagctcctgcgcagccagcgggtaccgggagctgcggccagcgccgcttctttcctttccttttctctccgttttccttctccttccccggaggagaaaacaaataaagaagagcaaatagccgggaggcgctcggcatccaggacgttccctcccccgatccaagttggaattagcatcctctcggggggttcatagtggcgtcatgcacgcagactcctgcaagttcccctaagttcttagaggactgctttgccttttgatctgagagttgcaaagttccataaagaatggcccttgtggataagcacaaagtcaagagacagcgattggacagaatttgtgaaggtatccgcccccagatcatgaacggccccctgcacccccgccccctggtggcgctgctggacggccgcgactgcactgtggagatgcccatcctgaaggacctggccactgtggccttctgtgacgcgcagtcgacgcaggaaatccacgagaaggttctaaacgaagccgtgggcgccatgatgtaccacaccatcaccctcaccagggaggacctggagaagttcaaggccctgagagtgatcgtgcggataggcagtggctatgacaacgtggacatcaaggctgccggcgagctcggaattgccgtgtgcaacatcccgtctgcagccgtggaagagacagcggactctaccatctgccacatcctcaacctgtaccggaggaacacgtggctgtaccaggcactgcgggaaggcacgcgggttcagagcgtggagcagatccgcgaggtggcctcgggagcggcccgcatccgtggggagacgctgggcctcattggctttggtcgcacggggcaggcggttgcagttcgagccaaggcctttggattcagcgtcatattttatgacccctacttgcaggatgggatcgagcggtccctgggcgtgcagagggtctacaccctgcaggatttgctgtatcagagcgactgcgtctccttgcactgcaatctcaacgaacataaccaccacctcatcaatgactttaccataaagcagatgaggcagggagcattccttgtgaacgcagcccgtggcggcctggtggacgagaaagccttagcacaagccctcaaggagggcaggatacgaggggcagccctcgacgtgcatgagtcagagcccttcagctttgctcagggtccgttgaaagatgccccgaatctcatctgcactcctcacactgcctggtacagtgagcaggcgtcactggagatgagggaggcagctgccaccgagatccgccgagccatcacaggtcgcatcccagaaagcttaagaaattgtgtgaacaaggaattctttgtcacatcagcgccttggtcagtaatagaccagcaagcaattcatcctgagctcaatggtgccacatacagatatccgccaggcatcgtgggtgtggctccaggaggacttcctgcagccatggaagggatcatccctggaggcatcccagtgactcacaacctcccgacagtggcacatccttcccaagcgccctctcccaaccagcccacaaaacacggggacaatcgagagcaccccaacgagcaatagcagagaatgccagaaggtaatcactcagatacacttgggaccaagagacagtgaaaaatagatgaactaagagaaaaagaatcggatggtctttgtaactgattctggacatatgcatcattgatgttgcagtgttgaaactacaagagctagaaaactgaagatgtcgtctgcttacggaagcgctgaaagactaggatgtgatttattaacgaccaacttctgttattgtgtgttaagtttttcatctgtgcatcaaatcacaaaaagaataaatagagctttttcctttatcagtcccttgggcacagcaggtcctgaacaccctgctctacaatgttgcatcaagagttcaaacaacaaaataaaaaatattaagaggaaatccccatcctgtgacttgagtcccttaagtctacaggggctggtgacctctttttgctaataggaaaatcacattactacaaaatggggagaaaactgtttgcctgtggtagacacctgcacgcataggattgaagacagtacaggctgctgtacagagaagcgcctctcacatctgaactgcatactgagcgggcaagtcggttgtaagttcagtaaaaccctctgatgatgcaaaaaaaaaaaaaaaagtattaagtttcacaagctgtttgtactcaaatatattttctcagtttcagatcctctgctattttattgagtggaaagtcttgagctaaaagggttcaagaagaataatgttgcatttccttatgtctcaggaaacactttttatggtaacttgtcagattgtctatgaacaaacccacttttttagacattgataaagtcttcttttcttcacgtgatattttatacaagaacacttcagatgtattagatgtgactgattttaacaaatcctattagatttgtatcaactagttacatgttctattcatagtcttttgtgaatcattgcctttttgtttaaaaagatggcctattttgagcctttgtataggtacattcctgtttttgtgacaaaagaaaaactttaaaattgtcccaaacagaaaaataatggctatcagaagtatgttttgttttagtgtgagttaccgttactgtatttgtttattgtaaaggtggacatttagcgttcagtgcagttttcaataaaaagtaattaaaatttgttaagttctgaaattcaagtacatctcactaatgtaaatgttctctacttgagatgtttaaggcagttgcattgtcaattagccaatttccagctcttgttactacagggttccataaccagactcaagaccgctgacaattaattacctgtgataacaaaaagtttaattgaaaaatcaaaacctcacacaagtccatcattatcacgtcatgccgtccttaagatgcaatggtgggttagtgctaaatcaattcaaaaaaaaacaaagttgctcaacttttagagttctgactttaatctaccccaaagcaaaatgacctggacctggttcaagggagggaagtgaaccttgaaactgttttgccaataacctaacaaacaaaatgatatttacaaagaagtgttgcaaatagtcccatgagttaagagcttgatttaatggatcttctttttaaatagaattaaacctttatactaaaagtatttgcaagtgtcaattaagtccaacaattccaggtatgaaactccctctgagctcttccttatacttcccttcccaattaaaacaaaacaagaaaatcatggtgtcttaaagcctttggcttgcctggccttgtctgctcactcattttaaggtggtggccccatcccaactctaccataaaagtgtctattaacacaagctcacatggagagagacggcgctcatagttactgacctattaccccagggaacaaaaaaggtagtttaacgtcttcgtaaccactcatcaaagaggcaatgaaatatgcgtgaaaaggaggccaagcgcacacagaatatcttaccttcacgaatatgtgaagaagtctgggacacgatgaacctaagagtcaaaaacataaaaggcaggtctgaatccatggtccacctgggttttaattattagatcttggtcgcccaaacaaaaatttatatatatatatataaatttgaccccaaggaagaacaagtcaaaacaaaatgccacgctctgtttgctctagaaaaagaaccatcaagtccacagagtgcaggtatgacttactctccagagtcagtcattaatgtctgtcacctagccacgtataatcatctttgaaaaaggactatattctatcttgggacaataattatggctgttttaatagttcaagagcataatatagcattgatttaccaaaatttttggcctttaacagccagtctatgaaaaccatttagagccccattcctgtctgtagcctaggaaatggaaccatctttaattctttcccacagggaagaatgctgcacctatcacactatgtggtcagggtcactgattgataataaataaataaataatagagcgctcaggggaaacaacactcaccagaccacaacacacagtagaagctaagtgctgagcgtgtactctctggacaacgctggctgcaatgcagactgcaatggctacatgcttttccctctaacaattctctttggctttttcaattgggagggcagattttgcttaacaggcaactagaacaggatctctgcccactaaaaaattatccctatacatagagaaattactacagatgctaagtagtcagaatgctaacattttctacaaacttgattacttattggccaaaatgaaagcaaacagccaatttttaacaacacattcaccacttgaaacaaacagcagcatttacattatatcaaagattcatttctacagaatcgtactaaaaaatcatttttcctgcaagatttagcatgcagcaaaaaatgatcttttcatcctgggaacacctttttactgagttttcggggggaaagaactaaagacatgacagttttgtgggtatttttctatttttagtattctggcagcaaatttgaggttgtacacatttcattatcaactaaacaaaacaagaagcaagcaaatactttaaggttttcacagcctttttcatcacagggaaggaaaaaactgtgtgtgtgtgtgtgtgtgtgtgtgtggtgcgtgtgtgcgtgcgtgtgtcgtctttccaaattcctggccacatcaatagtctagaaagtgcttatcaggacaccaaatatttctgtgttcctgagataggtctgaaatttttacccagtattgaatgtatacctgaagtggtcaaataatacttcttataaaaaagttgttctacctaagattatagttttaactttaaattaaagaatggccacaattaaccaacatgcaaaaattctcagactaaacactgagaaattcttcatacaatgcatttgccaccttattgcatttttaaaatctttattctgtagtgaattggtattcccaatctgcctaagcaaaggcatgcccttctaacaagatttgcttagagcagaggtgatagaaggaagaatccgaagaccctctggcatggcaatctgggagcagcacattgttgatggagtccaagtgagcacatttcacacaattcatttagtgacaagtgggcttgctcccttttcatccaggaaaaaaactactcacagaccactgcccagaatctggaataagaaccctcattttaaggtattcttcccaacaaataaatatctaaatattgaaagggggcatatcagaaaacttaaaagacacaataaccaaaaccaaaaccctcttcaaaacaagtaagcaatgtctgtatttagttcactctaaaacattcttagcttttcttgcagtttgttcctaaaagatttgattgggcacaagaggaacgaaattgttaataaaataaaagcttatttttgttttgctgtggataatcggtacaaaacgtttccagatctgagacttagatggatcttttaaggtgaaaggagaatgccaggttctactgaaataatatctgaaaggaacaaagagccatttgccatgtgctttttctaagtgcccatgctggaaaaaattttctcaataatatgaagatgctggtacaacttttcctattaaacaatgtcttacacaaccacatgcgttacatttatagacagatttacaatttggaaggaaaaaaagttctgtcttaataaaattagttttttttacaaactgtagtccaactaaagttctctgtctcctcacgcagcagaggcattatctccataaggtgtgtgtggtccaggaaaacacttccccgagcagatcctgccagatttggttcattccatgatgtcgactctgcttggagcaccacactaactttagggtcattacagatctgatgccttggtcttctgctgtttgattttttttttcattcatcttcatcatcctcatcttcctctccatcagacagggatgtacacggccggatctgtcggtagcggtcaagccatttttctaccatctgagtgaccagggggtgatttcgccgccgagaactcttctgcatggcaaccagaactcccccctccgtcacacagcagtccagccactccctgagcagtttttcttgctgttcctcattacctagcttttggaggaatatgaagacaaagggaaaatcatacaacagatcagagacttggtaggaatgtgacatggaaacctacagctggtatgctaactcatgaaaaggccaaagcaatcaacttttcacatggttttgacctcttggaagttttgtgattaaagtccagtttgctctggttaaatttaaaaagacataaatgggaaatttctcagaaaaaaactaaagaggagcacactagagggtaatttgttagataaaataaaaaacaaatgtcctaataaactgatcctggcaagccacagcttcaaacacatgacaaggtaagtttacttagtcaattatgtacaagctgaaattacacaagttacggtctatgaactttttttcttcatgttgtgattataaacgttttataattactagtatattaaataaaagaccaatacttttataagaatactggctttctgaaagagcgttgtttttgtaccttctcaccacctcccctgtctggtctacagcaccctttcactccc

SEQ ID NO: 736631 - DNA, 7187 bp, Homo sapiens
ggtgagcgagcggcgaccctcacctcgcctcccgcctagctcctgcgcagccagcgggtaccgggagctgcggccagcgccgcttctttcctttccttttctctccgttttccttctccttccccggaggagaaaacaaataaagaagagcaaatagccgggaggcgctcggcatccaggacgttccctcccccgatccaagttggaattagcatcctctcggggggttcatagtggcgtcatgcacgcagactcctgcaagttcccctaagttcttagaggactgctttgccttttgatctgagagttgcaaagttccataaagaatggcccttgtggataagcacaaagtcaagagacagcgattggacagaatttgtgaaggtatccgcccccagatcatgaacggccccctgcacccccgccccctggtggcgctgctggacggccgcgactgcactgtggagatgcccatcctgaaggacctggccactgtggccttctgtgacgcgcagtcgacgcaggaaatccacgagaaggttctaaacgaagccgtgggcgccatgatgtaccacaccatcaccctcaccagggaggacctggagaagttcaaggccctgagagtgatcgtgcggataggcagtggctatgacaacgtggacatcaaggctgccggcgagctcggaattgccgtgtgcaacatcccgtctgcagccgtggaagagacagcggactctaccatctgccacatcctcaacctgtaccggaggaacacgtggctgtaccaggcactgcgggaaggcacgcgggttcagagcgtggagcagatccgcgaggtggcctcgggagcggcccgcatccgtggggagacgctgggcctcattggctttggtcgcacggggcaggcggttgcagttcgagccaaggcctttggattcagcgtcatattttatgacccctacttgcaggatgggatcgagcggtccctgggcgtgcagagggtctacaccctgcaggatttgctgtatcagagcgactgcgtctccttgcactgcaatctcaacgaacataaccaccacctcatcaatgactttaccataaagcagatgaggcagggagcattccttgtgaacgcagcccgtggcggcctggtggacgagaaagccttagcacaagccctcaaggagggcaggatacgaggggcagccctcgacgtgcatgagtcagagcccttcagctttgctcagggtccgttgaaagatgccccgaatctcatctgcactcctcacactgcctggtacagtgagcaggcgtcactggagatgagggaggcagctgccaccgagatccgccgagccatcacaggtcgcatcccagaaagcttaagaaattgtgtgaacaaggaattctttgtcacatcagcgccttggtcagtaatagaccagcaagcaattcatcctgagctcaatggtgccacatacagatatccgccaggcatcgtgggtgtggctccaggaggacttcctgcagccatggaagggatcatccctggaggcatcccagtgactcacaacctcccgacagtggcacatccttcccaagcgccctctcccaaccagcccacaaaacacggggacaatcgagagcaccccaacgagcaatagcagagaatgccagaaggtaatcactcagatacacttgggaccaagagacagtgaaaaatagatgaactaagagaaaaagaatcggatggtctttgtaactgattctggacatatgcatcattgatgttgcagtgttgaaactacaagagctagaaaactgaagatgtcgtctgcttacggaagcgctgaaagactaggatgtgatttattaacgaccaacttctgttattgtgtgttaagtttttcatctgtgcatcaaatcacaaaaagaataaatagagctttttcctttatcagtcccttgggcacagcaggtcctgaacaccctgctctacaatgttgcatcaagagttcaaacaacaaaataaaaaatattaagaggaaatccccatcctgtgacttgagtcccttaagtctacaggggctggtgacctctttttgctaataggaaaatcacattactacaaaatggggagaaaactgtttgcctgtggtagacacctgcacgcataggattgaagacagtacaggctgctgtacagagaagcgcctctcacatctgaactgcatactgagcgggcaagtcggttgtaagttcagtaaaaccctctgatgatgcaaaaaaaaaaaaaaaagtattaagtttcacaagctgtttgtactcaaatatattttctcagtttcagatcctctgctattttattgagtggaaagtcttgagctaaaagggttcaagaagaataatgttgcatttccttatgtctcaggaaacactttttatggtaacttgtcagattgtctatgaacaaacccacttttttagacattgataaagtcttcttttcttcacgtgatattttatacaagaacacttcagatgtattagatgtgactgattttaacaaatcctattagatttgtatcaactagttacatgttctattcatagtcttttgtgaatcattgcctttttgtttaaaaagatggcctattttgagcctttgtataggtacattcctgtttttgtgacaaaagaaaaactttaaaattgtcccaaacagaaaaataatggctatcagaagtatgttttgttttagtgtgagttaccgttactgtatttgtttattgtaaaggtggacatttagcgttcagtgcagttttcaataaaaagtaattaaaatttgttaagttctgaaattcaagtacatctcactaatgtaaatgttctctacttgagatgtttaaggcagttgcattgtcaattagccaatttccagctcttgttactacagggttccataaccagactcaagaccgctgacaattaattacctgtgataacaaaaagtttaattgaaaaatcaaaacctcacacaagtccatcattatcacgtcatgccgtccttaagatgcaatggtgggttagtgctaaatcaattcaaaaaaaaacaaagttgctcaacttttagagttctgactttaatctaccccaaagcaaaatgacctggacctggttcaagggagggaagtgaaccttgaaactgttttgccaataacctaacaaacaaaatgatatttacaaagaagtgttgcaaatagtcccatgagttaagagcttgatttaatggatcttctttttaaatagaattaaacctttatactaaaagtatttgcaagtgtcaattaagtccaacaattccaggtatgaaactccctctgagctcttccttatacttcccttcccaattaaaacaaaacaagaaaatcatggtgtcttaaagcctttggcttgcctggccttgtctgctcactcattttaaggtggtggccccatcccaactctaccataaaagtgtctattaacacaagctcacatggagagagacggcgctcatagttactgacctattaccccagggaacaaaaaaggtagtttaacgtcttcgtaaccactcatcaaagaggcaatgaaatatgcgtgaaaaggaggccaagcgcacacagaatatcttaccttcacgaatatgtgaagaagtctgggacacgatgaacctaagagtcaaaaacataaaaggcaggtctgaatccatggtccacctgggttttaattattagatcttggtcgcccaaacaaaaatttatatatatatatataaatttgaccccaaggaagaacaagtcaaaacaaaatgccacgctctgtttgctctagaaaaagaaccatcaagtccacagagtgcaggtatgacttactctccagagtcagtcattaatgtctgtcacctagccacgtataatcatctttgaaaaaggactatattctatcttgggacaataattatggctgttttaatagttcaagagcataatatagcattgatttaccaaaatttttggcctttaacagccagtctatgaaaaccatttagagccccattcctgtctgtagcctaggaaatggaaccatctttaattctttcccacagggaagaatgctgcacctatcacactatgtggtcagggtcactgattgataataaataaataaataatagagcgctcaggggaaacaacactcaccagaccacaacacacagtagaagctaagtgctgagcgtgtactctctggacaacgctggctgcaatgcagactgcaatggctacatgcttttccctctaacaattctctttggctttttcaattgggagggcagattttgcttaacaggcaactagaacaggatctctgcccactaaaaaattatccctatacatagagaaattactacagatgctaagtagtcagaatgctaacattttctacaaacttgattacttattggccaaaatgaaagcaaacagccaatttttaacaacacattcaccacttgaaacaaacagcagcatttacattatatcaaagattcatttctacagaatcgtactaaaaaatcatttttcctgcaagatttagcatgcagcaaaaaatgatcttttcatcctgggaacacctttttactgagttttcggggggaaagaactaaagacatgacagttttgtgggtatttttctatttttagtattctggcagcaaatttgaggttgtacacatttcattatcaactaaacaaaacaagaagcaagcaaatactttaaggttttcacagcctttttcatcacagggaaggaaaaaactgtgtgtgtgtgtgtgtgtgtgtgtgtggtgcgtgtgtgcgtgcgtgtgtcgtctttccaaattcctggccacatcaatagtctagaaagtgcttatcaggacaccaaatatttctgtgttcctgagataggtctgaaatttttacccagtattgaatgtatacctgaagtggtcaaataatacttcttataaaaaagttgttctacctaagattatagttttaactttaaattaaagaatggccacaattaaccaacatgcaaaaattctcagactaaacactgagaaattcttcatacaatgcatttgccaccttattgcatttttaaaatctttattctgtagtgaattggtattcccaatctgcctaagcaaaggcatgcccttctaacaagatttgcttagagcagaggtgatagaaggaagaatccgaagaccctctggcatggcaatctgggagcagcacattgttgatggagtccaagtgagcacatttcacacaattcatttagtgacaagtgggcttgctcccttttcatccaggaaaaaaactactcacagaccactgcccagaatctggaataagaaccctcattttaaggtattcttcccaacaaataaatatctaaatattgaaagggggcatatcagaaaacttaaaagacacaataaccaaaaccaaaaccctcttcaaaacaagtaagcaatgtctgtatttagttcactctaaaacattcttagcttttcttgcagtttgttcctaaaagatttgattgggcacaagaggaacgaaattgttaataaaataaaagcttatttttgttttgctgtggataatcggtacaaaacgtttccagatctgagacttagatggatcttttaaggtgaaaggagaatgccaggttctactgaaataatatctgaaaggaacaaagagccatttgccatgtgctttttctaagtgcccatgctggaaaaaattttctcaataatatgaagatgctggtacaacttttcctattaaacaatgtcttacacaaccacatgcgttacatttatagacagatttacaatttggaaggaaaaaaagttctgtcttaataaaattagttttttttacaaactgtagtccaactaaagttctctgtctcctcacgcagcagaggcattatctccataaggtgtgtgtggtccaggaaaacacttccccgagcagatcctgccagatttggttcattccatgatgtcgactctgcttggagcaccacactaactttagggtcattacagatctgatgccttggtcttctgctgtttgattttttttttcattcatcttcatcatcctcatcttcctctccatcagacagggatgtacacggccggatctgtcggtagcggtcaagccatttttctaccatctgagtgaccagggggtgatttcgccgccgagaactcttctgcatggcaaccagaactcccccctccgtcacacagcagtccagccactccctgagcagtttttcttgctgttcctcattacctagctcctgagcagaaaggaagtgcacatggagtagcttcctttcactgtcaaccagaggcaaaaatgtgatggtgacatcatcatcggtattgagattagcaccagcacctcggttgccatagccatcattttccatggcaaccaaagcagagaagtggcccctcgtataacccagagcaatcggacttttccaacaaaaactctgttcccacaacaaaggcagataaacaccttgaaaccgagtatatcctaaagtttctccccggaaactcttgtaatattttactccataaactataattggtcgtctaagaatatgtgccagtacaaaaatgtgcgtctgctccaagcttgctccaggctgactagcaagagagagtataaatgcccagtcttcttgccattgttcttctctcaaggaaaaatgtaaaccaaagctctgagaataccatgattcccaatctttccagcgtgtgtaaaacctaaaaaagcaggatagtaaaaaaataaataaatagtcttctataaataaaacatttaaagttctgatcatttttatttaatgcagtctttaagcagtctgtgaaacaattaataattttattttgtctggttggtaatgtatttttctaatgaaaaatgcctccctcttccactagcagataccttgtaacatcctttaacatctttagtcagaatttgatttaccgacaaccaaattttcaaacttcaaacgctaatgatgagactggttattttccactgtccacaattagttta

SEQ ID NO: 736632 - DNA, 8722 bp, Homo sapiens
ggtgagcgagcggcgaccctcacctcgcctcccgcctagctcctgcgcagccagcgggtaccgggagctgcggccagcgccgcttctttcctttccttttctctccgttttccttctccttccccggaggagaaaacaaataaagaagagcaaatagccgggaggcgctcggcatccaggacgttccctcccccgatccaagttggaattagcatcctctcggggggttcatagtggcgtcatgcacgcagactcctgcaagttcccctaagttcttagaggactgctttgccttttgatctgagagttgcaaagttccataaagaatggcccttgtggataagcacaaagtcaagagacagcgattggacagaatttgtgaaggtatccgcccccagatcatgaacggccccctgcacccccgccccctggtggcgctgctggacggccgcgactgcactgtggagatgcccatcctgaaggacctggccactgtggccttctgtgacgcgcagtcgacgcaggaaatccacgagaaggttctaaacgaagccgtgggcgccatgatgtaccacaccatcaccctcaccagggaggacctggagaagttcaaggccctgagagtgatcgtgcggataggcagtggctatgacaacgtggacatcaaggctgccggcgagctcggaattgccgtgtgcaacatcccgtctgcagccgtggaagagacagcggactctaccatctgccacatcctcaacctgtaccggaggaacacgtggctgtaccaggcactgcgggaaggcacgcgggttcagagcgtggagcagatccgcgaggtggcctcgggagcggcccgcatccgtggggagacgctgggcctcattggctttggtcgcacggggcaggcggttgcagttcgagccaaggcctttggattcagcgtcatattttatgacccctacttgcaggatgggatcgagcggtccctgggcgtgcagagggtctacaccctgcaggatttgctgtatcagagcgactgcgtctccttgcactgcaatctcaacgaacataaccaccacctcatcaatgactttaccataaagcagatgaggcagggagcattccttgtgaacgcagcccgtggcggcctggtggacgagaaagccttagcacaagccctcaaggagggcaggatacgaggggcagccctcgacgtgcatgagtcagagcccttcagctttgctcagggtccgttgaaagatgccccgaatctcatctgcactcctcacactgcctggtacagtgagcaggcgtcactggagatgagggaggcagctgccaccgagatccgccgagccatcacaggtcgcatcccagaaagcttaagaaattgtgtgaacaaggaattctttgtcacatcagcgccttggtcagtaatagaccagcaagcaattcatcctgagctcaatggtgccacatacagatatccgccaggcatcgtgggtgtggctccaggaggacttcctgcagccatggaagggatcatccctggaggcatcccagtgactcacaacctcccgacagtggcacatccttcccaagcgccctctcccaaccagcccacaaaacacggggacaatcgagagcaccccaacgagcaatagcagagaatgccagaaggtaatcactcagatacacttgggaccaagagacagtgaaaaatagatgaactaagagaaaaagaatcggatggtctttgtaactgattctggacatatgcatcattgatgttgcagtgttgaaactacaagagctagaaaactgaagatgtcgtctgcttacggaagcgctgaaagactaggatgtgatttattaacgaccaacttctgttattgtgtgttaagtttttcatctgtgcatcaaatcacaaaaagaataaatagagctttttcctttatcagtcccttgggcacagcaggtcctgaacaccctgctctacaatgttgcatcaagagttcaaacaacaaaataaaaaatattaagaggaaatccccatcctgtgacttgagtcccttaagtctacaggggctggtgacctctttttgctaataggaaaatcacattactacaaaatggggagaaaactgtttgcctgtggtagacacctgcacgcataggattgaagacagtacaggctgctgtacagagaagcgcctctcacatctgaactgcatactgagcgggcaagtcggttgtaagttcagtaaaaccctctgatgatgcaaaaaaaaaaaaaaaagtattaagtttcacaagctgtttgtactcaaatatattttctcagtttcagatcctctgctattttattgagtggaaagtcttgagctaaaagggttcaagaagaataatgttgcatttccttatgtctcaggaaacactttttatggtaacttgtcagattgtctatgaacaaacccacttttttagacattgataaagtcttcttttcttcacgtgatattttatacaagaacacttcagatgtattagatgtgactgattttaacaaatcctattagatttgtatcaactagttacatgttctattcatagtcttttgtgaatcattgcctttttgtttaaaaagatggcctattttgagcctttgtataggtacattcctgtttttgtgacaaaagaaaaactttaaaattgtcccaaacagaaaaataatggctatcagaagtatgttttgttttagtgtgagttaccgttactgtatttgtttattgtaaaggtggacatttagcgttcagtgcagttttcaataaaaagtaattaaaatttgttaagttctgaaattcaagtacatctcactaatgtaaatgttctctacttgagatgtttaaggcagttgcattgtcaattagccaatttccagctcttgttactacagggttccataaccagactcaagaccgctgacaattaattacctgtgataacaaaaagtttaattgaaaaatcaaaacctcacacaagtccatcattatcacgtcatgccgtccttaagatgcaatggtgggttagtgctaaatcaattcaaaaaaaaacaaagttgctcaacttttagagttctgactttaatctaccccaaagcaaaatgacctggacctggttcaagggagggaagtgaaccttgaaactgttttgccaataacctaacaaacaaaatgatatttacaaagaagtgttgcaaatagtcccatgagttaagagcttgatttaatggatcttctttttaaatagaattaaacctttatactaaaagtatttgcaagtgtcaattaagtccaacaattccaggtatgaaactccctctgagctcttccttatacttcccttcccaattaaaacaaaacaagaaaatcatggtgtcttaaagcctttggcttgcctggccttgtctgctcactcattttaaggtggtggccccatcccaactctaccataaaagtgtctattaacacaagctcacatggagagagacggcgctcatagttactgacctattaccccagggaacaaaaaaggtagtttaacgtcttcgtaaccactcatcaaagaggcaatgaaatatgcgtgaaaaggaggccaagcgcacacagaatatcttaccttcacgaatatgtgaagaagtctgggacacgatgaacctaagagtcaaaaacataaaaggcaggtctgaatccatggtccacctgggttttaattattagatcttggtcgcccaaacaaaaatttatatatatatatataaatttgaccccaaggaagaacaagtcaaaacaaaatgccacgctctgtttgctctagaaaaagaaccatcaagtccacagagtgcaggtatgacttactctccagagtcagtcattaatgtctgtcacctagccacgtataatcatctttgaaaaaggactatattctatcttgggacaataattatggctgttttaatagttcaagagcataatatagcattgatttaccaaaatttttggcctttaacagccagtctatgaaaaccatttagagccccattcctgtctgtagcctaggaaatggaaccatctttaattctttcccacagggaagaatgctgcacctatcacactatgtggtcagggtcactgattgataataaataaataaataatagagcgctcaggggaaacaacactcaccagaccacaacacacagtagaagctaagtgctgagcgtgtactctctggacaacgctggctgcaatgcagactgcaatggctacatgcttttccctctaacaattctctttggctttttcaattgggagggcagattttgcttaacaggcaactagaacaggatctctgcccactaaaaaattatccctatacatagagaaattactacagatgctaagtagtcagaatgctaacattttctacaaacttgattacttattggccaaaatgaaagcaaacagccaatttttaacaacacattcaccacttgaaacaaacagcagcatttacattatatcaaagattcatttctacagaatcgtactaaaaaatcatttttcctgcaagatttagcatgcagcaaaaaatgatcttttcatcctgggaacacctttttactgagttttcggggggaaagaactaaagacatgacagttttgtgggtatttttctatttttagtattctggcagcaaatttgaggttgtacacatttcattatcaactaaacaaaacaagaagcaagcaaatactttaaggttttcacagcctttttcatcacagggaaggaaaaaactgtgtgtgtgtgtgtgtgtgtgtgtgtggtgcgtgtgtgcgtgcgtgtgtcgtctttccaaattcctggccacatcaatagtctagaaagtgcttatcaggacaccaaatatttctgtgttcctgagataggtctgaaatttttacccagtattgaatgtatacctgaagtggtcaaataatacttcttataaaaaagttgttctacctaagattatagttttaactttaaattaaagaatggccacaattaaccaacatgcaaaaattctcagactaaacactgagaaattcttcatacaatgcatttgccaccttattgcatttttaaaatctttattctgtagtgaattggtattcccaatctgcctaagcaaaggcatgcccttctaacaagatttgcttagagcagaggtgatagaaggaagaatccgaagaccctctggcatggcaatctgggagcagcacattgttgatggagtccaagtgagcacatttcacacaattcatttagtgacaagtgggcttgctcccttttcatccaggaaaaaaactactcacagaccactgcccagaatctggaataagaaccctcattttaaggtattcttcccaacaaataaatatctaaatattgaaagggggcatatcagaaaacttaaaagacacaataaccaaaaccaaaaccctcttcaaaacaagtaagcaatgtctgtatttagttcactctaaaacattcttagcttttcttgcagtttgttcctaaaagatttgattgggcacaagaggaacgaaattgttaataaaataaaagcttatttttgttttgctgtggataatcggtacaaaacgtttccagatctgagacttagatggatcttttaaggtgaaaggagaatgccaggttctactgaaataatatctgaaaggaacaaagagccatttgccatgtgctttttctaagtgcccatgctggaaaaaattttctcaataatatgaagatgctggtacaacttttcctattaaacaatgtcttacacaaccacatgcgttacatttatagacagatttacaatttggaaggaaaaaaagttctgtcttaataaaattagttttttttacaaactgtagtccaactaaagttctctgtctcctcacgcagcagaggcattatctccataaggtgtgtgtggtccaggaaaacacttccccgagcagatcctgccagatttggttcattccatgatgtcgactctgcttggagcaccacactaactttagggtcattacagatctgatgccttggtcttctgctgtttgattttttttttcattcatcttcatcatcctcatcttcctctccatcagacagggatgtacacggccggatctgtcggtagcggtcaagccatttttctaccatctgagtgaccagggggtgatttcgccgccgagaactcttctgcatggcaaccagaactcccccctccgtcacacagcagtccagccactccctgagcagtttttcttgctgttcctcattacctagctcctgagcagaaaggaagtgcacatggagtagcttcctttcactgtcaaccagaggcaaaaatgtgatggtgacatcatcatcggtattgagattagcaccagcacctcggttgccatagccatcattttccatggcaaccaaagcagagaagtggcccctcgtataacccagagcaatcggacttttccaacaaaaactctgttcccacaacaaaggcagataaacaccttgaaaccgagtatatcctaaagtttctccccggaaactcttgtaatattttactccataaactataattggtcgtctaagaatatgtgccagtacaaaaatgtgcgtctgctccaagcttgctccaggctgactagcaagagagagtataaatgcccagtcttcttgccattgttcttctctcaaggaaaaatgtaaaccaaagctctgagaataccatgattcccaatctttccagcgtgtgtaaaaccaatgtgaacagtcatgcaggctgtcatgcagggctttccgaagcactgagtccttgtcatagatgccccaggtagcttgtagaactgaatcaagtaggcagtctcctgcagtccggttccaaagtgcatacagtcgactgtccaaacgtgtagccaattccaaggaccagttaataattggagattcttcttctaattctttttgaacgtctctatcaagcacctcatcaaataatttttcttggactgttgggggcaaatcttcaatatctgctggcaatgtaaatgttacaaggtcagtcagaatatagcaagcaaaatccccctttctctgatgaagagaggcagctatctctctccggatttgttctgtcagttcaggacacaccattgctggaatacactttgctgcttgttgagacacctctgtaagcaatattgctagcatatcctgcctctgaaaacgtatagccaagtgtacaagagtatagccaacatcaaaggcagaaggacgattcagcaagcgtacttcatctgcggtgagctgacgtgcaatgtctcctcctgatgacttgtatgcttctatggcagctaaatcaccttctacaacccccacacaagcattgaggaagagccaatcagtctttttcatcctgtttttaatttgctttagttttttaaagtctacttcaagttcctccttgcttcccacagcaccagccaattcaatcctctgaaaatccattttcacttcagagtcccgcttcgtagcaggaggtgatctcctttggctattaccactactgcaacttcccctccatcgagctctgtcttgctcatttattattgaagaagcctcttcagtctctgccaattctattgcttcaatgttattaggtctgggatgatcacaaacaacacatcttttagccttggcccagttttcatatgtgcaaacagagcaagtccagtgctgtgtcctagtgttcagtttatttctatcattgtattcctcacaaggatcaacagaaaaagcaactggtcttgagccagatcctgaggactgaggagattctgtaggactcctggtcctacgttgggataagcactgggtacatctgattgctcttggccagttcaaatatgtacacatgtggcatgaccacttatttgcattttccatgctatacgaagatttcacccttggtcttgcactagagtctggacatatcaaaggactacttcctccttcggtgctggaaggatcccaatctctaccaacatcacttgaaccacttttaaatggatcttctgtaataattgttccactaggtctttgggcacgacacatagtacacttgattgcagatggccagttttcatacgtacaatattcacaagcccacttaattccacgttctgacattgtgcacttcttgaagtgagctgtgtcaggcaggaagctataaataattaggacatggttattaaaataactacattccacctccaaaaatacgctgcccaaaaagcaagtccttcaacctacaaaatataaatttctcaaaagatgcatgcaacatttcgacattgaattatcctaattttcttttttaatttccatagaaacactggagataaattctcaaagaaaaaatcttagaccctgggatttaataaaactgaactttggaatgcaaaagagataggcaggagatataacgaggtttgatctaagaaggatgagattaacgggaagccactaatagaaatgtttaatttcagggaggccatcaccccgcgtactctgcgttgttaccactgcttaagcc

SEQ ID NO: 736633 - DNA, 8494 bp, Homo sapiens
ggtgagcgagcggcgaccctcacctcgcctcccgcctagctcctgcgcagccagcgggtaccgggagctgcggccagcgccgcttctttcctttccttttctctccgttttccttctccttccccggaggagaaaacaaataaagaagagcaaatagccgggaggcgctcggcatccaggacgttccctcccccgatccaagttggaattagcatcctctcggggggttcatagtggcgtcatgcacgcagactcctgcaagttcccctaagttcttagaggactgctttgccttttgatctgagagttgcaaagttccataaagaatggcccttgtggataagcacaaagtcaagagacagcgattggacagaatttgtgaaggtatccgcccccagatcatgaacggccccctgcacccccgccccctggtggcgctgctggacggccgcgactgcactgtggagatgcccatcctgaaggacctggccactgtggccttctgtgacgcgcagtcgacgcaggaaatccacgagaaggttctaaacgaagccgtgggcgccatgatgtaccacaccatcaccctcaccagggaggacctggagaagttcaaggccctgagagtgatcgtgcggataggcagtggctatgacaacgtggacatcaaggctgccggcgagctcggaattgccgtgtgcaacatcccgtctgcagccgtggaagagacagcggactctaccatctgccacatcctcaacctgtaccggaggaacacgtggctgtaccaggcactgcgggaaggcacgcgggttcagagcgtggagcagatccgcgaggtggcctcgggagcggcccgcatccgtggggagacgctgggcctcattggctttggtcgcacggggcaggcggttgcagttcgagccaaggcctttggattcagcgtcatattttatgacccctacttgcaggatgggatcgagcggtccctgggcgtgcagagggtctacaccctgcaggatttgctgtatcagagcgactgcgtctccttgcactgcaatctcaacgaacataaccaccacctcatcaatgactttaccataaagcagatgaggcagggagcattccttgtgaacgcagcccgtggcggcctggtggacgagaaagccttagcacaagccctcaaggagggcaggatacgaggggcagccctcgacgtgcatgagtcagagcccttcagctttgctcagggtccgttgaaagatgccccgaatctcatctgcactcctcacactgcctggtacagtgagcaggcgtcactggagatgagggaggcagctgccaccgagatccgccgagccatcacaggtcgcatcccagaaagcttaagaaattgtgtgaacaaggaattctttgtcacatcagcgccttggtcagtaatagaccagcaagcaattcatcctgagctcaatggtgccacatacagatatccgccaggcatcgtgggtgtggctccaggaggacttcctgcagccatggaagggatcatccctggaggcatcccagtgactcacaacctcccgacagtggcacatccttcccaagcgccctctcccaaccagcccacaaaacacggggacaatcgagagcaccccaacgagcaatagcagagaatgccagaaggtaatcactcagatacacttgggaccaagagacagtgaaaaatagatgaactaagagaaaaagaatcggatggtctttgtaactgattctggacatatgcatcattgatgttgcagtgttgaaactacaagagctagaaaactgaagatgtcgtctgcttacggaagcgctgaaagactaggatgtgatttattaacgaccaacttctgttattgtgtgttaagtttttcatctgtgcatcaaatcacaaaaagaataaatagagctttttcctttatcagtcccttgggcacagcaggtcctgaacaccctgctctacaatgttgcatcaagagttcaaacaacaaaataaaaaatattaagaggaaatccccatcctgtgacttgagtcccttaagtctacaggggctggtgacctctttttgctaataggaaaatcacattactacaaaatggggagaaaactgtttgcctgtggtagacacctgcacgcataggattgaagacagtacaggctgctgtacagagaagcgcctctcacatctgaactgcatactgagcgggcaagtcggttgtaagttcagtaaaaccctctgatgatgcaaaaaaaaaaaaaaaagtattaagtttcacaagctgtttgtactcaaatatattttctcagtttcagatcctctgctattttattgagtggaaagtcttgagctaaaagggttcaagaagaataatgttgcatttccttatgtctcaggaaacactttttatggtaacttgtcagattgtctatgaacaaacccacttttttagacattgataaagtcttcttttcttcacgtgatattttatacaagaacacttcagatgtattagatgtgactgattttaacaaatcctattagatttgtatcaactagttacatgttctattcatagtcttttgtgaatcattgcctttttgtttaaaaagatggcctattttgagcctttgtataggtacattcctgtttttgtgacaaaagaaaaactttaaaattgtcccaaacagaaaaataatggctatcagaagtatgttttgttttagtgtgagttaccgttactgtatttgtttattgtaaaggtggacatttagcgttcagtgcagttttcaataaaaagtaattaaaatttgttaagttctgaaattcaagtacatctcactaatgtaaatgttctctacttgagatgtttaaggcagttgcattgtcaattagccaatttccagctcttgttactacagggttccataaccagactcaagaccgctgacaattaattacctgtgataacaaaaagtttaattgaaaaatcaaaacctcacacaagtccatcattatcacgtcatgccgtccttaagatgcaatggtgggttagtgctaaatcaattcaaaaaaaaacaaagttgctcaacttttagagttctgactttaatctaccccaaagcaaaatgacctggacctggttcaagggagggaagtgaaccttgaaactgttttgccaataacctaacaaacaaaatgatatttacaaagaagtgttgcaaatagtcccatgagttaagagcttgatttaatggatcttctttttaaatagaattaaacctttatactaaaagtatttgcaagtgtcaattaagtccaacaattccaggtatgaaactccctctgagctcttccttatacttcccttcccaattaaaacaaaacaagaaaatcatggtgtcttaaagcctttggcttgcctggccttgtctgctcactcattttaaggtggtggccccatcccaactctaccataaaagtgtctattaacacaagctcacatggagagagacggcgctcatagttactgacctattaccccagggaacaaaaaaggtagtttaacgtcttcgtaaccactcatcaaagaggcaatgaaatatgcgtgaaaaggaggccaagcgcacacagaatatcttaccttcacgaatatgtgaagaagtctgggacacgatgaacctaagagtcaaaaacataaaaggcaggtctgaatccatggtccacctgggttttaattattagatcttggtcgcccaaacaaaaatttatatatatatatataaatttgaccccaaggaagaacaagtcaaaacaaaatgccacgctctgtttgctctagaaaaagaaccatcaagtccacagagtgcaggtatgacttactctccagagtcagtcattaatgtctgtcacctagccacgtataatcatctttgaaaaaggactatattctatcttgggacaataattatggctgttttaatagttcaagagcataatatagcattgatttaccaaaatttttggcctttaacagccagtctatgaaaaccatttagagccccattcctgtctgtagcctaggaaatggaaccatctttaattctttcccacagggaagaatgctgcacctatcacactatgtggtcagggtcactgattgataataaataaataaataatagagcgctcaggggaaacaacactcaccagaccacaacacacagtagaagctaagtgctgagcgtgtactctctggacaacgctggctgcaatgcagactgcaatggctacatgcttttccctctaacaattctctttggctttttcaattgggagggcagattttgcttaacaggcaactagaacaggatctctgcccactaaaaaattatccctatacatagagaaattactacagatgctaagtagtcagaatgctaacattttctacaaacttgattacttattggccaaaatgaaagcaaacagccaatttttaacaacacattcaccacttgaaacaaacagcagcatttacattatatcaaagattcatttctacagaatcgtactaaaaaatcatttttcctgcaagatttagcatgcagcaaaaaatgatcttttcatcctgggaacacctttttactgagttttcggggggaaagaactaaagacatgacagttttgtgggtatttttctatttttagtattctggcagcaaatttgaggttgtacacatttcattatcaactaaacaaaacaagaagcaagcaaatactttaaggttttcacagcctttttcatcacagggaaggaaaaaactgtgtgtgtgtgtgtgtgtgtgtgtgtggtgcgtgtgtgcgtgcgtgtgtcgtctttccaaattcctggccacatcaatagtctagaaagtgcttatcaggacaccaaatatttctgtgttcctgagataggtctgaaatttttacccagtattgaatgtatacctgaagtggtcaaataatacttcttataaaaaagttgttctacctaagattatagttttaactttaaattaaagaatggccacaattaaccaacatgcaaaaattctcagactaaacactgagaaattcttcatacaatgcatttgccaccttattgcatttttaaaatctttattctgtagtgaattggtattcccaatctgcctaagcaaaggcatgcccttctaacaagatttgcttagagcagaggtgatagaaggaagaatccgaagaccctctggcatggcaatctgggagcagcacattgttgatggagtccaagtgagcacatttcacacaattcatttagtgacaagtgggcttgctcccttttcatccaggaaaaaaactactcacagaccactgcccagaatctggaataagaaccctcattttaaggtattcttcccaacaaataaatatctaaatattgaaagggggcatatcagaaaacttaaaagacacaataaccaaaaccaaaaccctcttcaaaacaagtaagcaatgtctgtatttagttcactctaaaacattcttagcttttcttgcagtttgttcctaaaagatttgattgggcacaagaggaacgaaattgttaataaaataaaagcttatttttgttttgctgtggataatcggtacaaaacgtttccagatctgagacttagatggatcttttaaggtgaaaggagaatgccaggttctactgaaataatatctgaaaggaacaaagagccatttgccatgtgctttttctaagtgcccatgctggaaaaaattttctcaataatatgaagatgctggtacaacttttcctattaaacaatgtcttacacaaccacatgcgttacatttatagacagatttacaatttggaaggaaaaaaagttctgtcttaataaaattagttttttttacaaactgtagtccaactaaagttctctgtctcctcacgcagcagaggcattatctccataaggtgtgtgtggtccaggaaaacacttccccgagcagatcctgccagatttggttcattccatgatgtcgactctgcttggagcaccacactaactttagggtcattacagatctgatgccttggtcttctgctgtttgattttttttttcattcatcttcatcatcctcatcttcctctccatcagacagggatgtacacggccggatctgtcggtagcggtcaagccatttttctaccatctgagtgaccagggggtgatttcgccgccgagaactcttctgcatggcaaccagaactcccccctccgtcacacagcagtccagccactccctgagcagtttttcttgctgttcctcattacctagctcctgagcagaaaggaagtgcacatggagtagcttcctttcactgtcaaccagaggcaaaaatgtgatggtgacatcatcatcggtattgagattagcaccagcacctcggttgccatagccatcattttccatggcaaccaaagcagagaagtggcccctcgtataacccagagcaatcggacttttccaacaaaaactctgttcccacaacaaaggcagataaacaccttgaaaccgagtatatcctaaagtttctccccggaaactcttgtaatattttactccataaactataattggtcgtctaagaatatgtgccagtacaaaaatgtgcgtctgctccaagcttgctccaggctgactagcaagagagagtataaatgcccagtcttcttgccattgttcttctctcaaggaaaaatgtaaaccaaagctctgagaataccatgattcccaatctttccagcgtgtgtaaaaccaatgtgaacagtcatgcaggctgtcatgcagggctttccgaagcactgagtccttgtcatagatgccccaggtagcttgtagaactgaatcaagtaggcagtctcctgcagtccggttccaaagtgcatacagtcgactgtccaaacgtgtagccaattccaaggaccagttaataattggagattcttcttctaattctttttgaacgtctctatcaagcacctcatcaaataatttttcttggactgttgggggcaaatcttcaatatctgctggcaatgtaaatgttacaaggtcagtcagaatatagcaagcaaaatccccctttctctgatgaagagaggcagctatctctctccggatttgttctgtcagttcaggacacaccattgctggaatacactttgctgcttgttgagacacctctgtaagcaatattgctagcatatcctgcctctgaaaacgtatagccaagtgtacaagagtatagccaacatcaaaggcagaaggacgattcagcaagcgtacttcatctgcggtgagctgacgtgcaatgtctcctcctgatgacttgtatgcttctatggcagctaaatcaccttctacaacccccacacaagcattgaggaagagccaatcagtctttttcatcctgtttttaatttgctttagttttttaaagtctacttcaagttcctccttgcttcccacagcaccagccaattcaatcctctgaaaatccattttcacttcagagtcccgcttcgtagcaggaggtgatctcctttggctattaccactactgcaacttcccctccatcgagctctgtcttgctcatttattattgaagaagcctcttcagtctctgccaattctattgcttcaatgttattaggtctgggatgatcacaaacaacacatcttttagccttggcccagttttcatatgtgcaaacagagcaagtccagtgctgtgtcctagtgttcagtttatttctatcattgtattcctcacaaggatcaacagaaaaagcaactggtcttgagccagatcctgaggactgaggagattctgtaggactcctggtcctacgttgggataagcactgggtacatctgattgctcttggccagttcaaatatgtacacatgtggcatgaccacttatttgcattttccatgctatacgaagatttcacccttggtcttgcactagagtctggacatatcaaaggactacttcctccttcggtgctggaaggatcccaatctctaccaacatcacttgaaccacttttaaatggatcttctgtaataattgttccactaggtctttgggcacgacacatagtacacttgattgcagatggccagttttcatacgtacaatattcacaagcccacttaattccacgttctgacattgtgcacttcttgaagtgagctgtgtcaggcaggaagctggcggcggcggctcctcctccagctcctgctcctcctccccgtccgacgggcgcttggcggcggcggcggcggcggcggcttttatataattatcaactacccgcacaacccgcggctacgagttgagcccagaccctc

SEQ ID NO: 736634 - DNA, 6833 bp, Homo sapiens
ggtgagcgagcggcgaccctcacctcgcctcccgcctagctcctgcgcagccagcgggtaccgggagctgcggccagcgccgcttctttcctttccttttctctccgttttccttctccttccccggaggagaaaacaaataaagaagagcaaatagccgggaggcgctcggcatccaggacgttccctcccccgatccaagttggaattagcatcctctcggggggttcatagtggcgtcatgcacgcagactcctgcaagttcccctaagttcttagaggactgctttgccttttgatctgagagttgcaaagttccataaagaatggcccttgtggataagcacaaagtcaagagacagcgattggacagaatttgtgaaggtatccgcccccagatcatgaacggccccctgcacccccgccccctggtggcgctgctggacggccgcgactgcactgtggagatgcccatcctgaaggacctggccactgtggccttctgtgacgcgcagtcgacgcaggaaatccacgagaaggttctaaacgaagccgtgggcgccatgatgtaccacaccatcaccctcaccagggaggacctggagaagttcaaggccctgagagtgatcgtgcggataggcagtggctatgacaacgtggacatcaaggctgccggcgagctcggaattgccgtgtgcaacatcccgtctgcagccgtggaagagacagcggactctaccatctgccacatcctcaacctgtaccggaggaacacgtggctgtaccaggcactgcgggaaggcacgcgggttcagagcgtggagcagatccgcgaggtggcctcgggagcggcccgcatccgtggggagacgctgggcctcattggctttggtcgcacggggcaggcggttgcagttcgagccaaggcctttggattcagcgtcatattttatgacccctacttgcaggatgggatcgagcggtccctgggcgtgcagagggtctacaccctgcaggatttgctgtatcagagcgactgcgtctccttgcactgcaatctcaacgaacataaccaccacctcatcaatgactttaccataaagcagatgaggcagggagcattccttgtgaacgcagcccgtggcggcctggtggacgagaaagccttagcacaagccctcaaggagggcaggatacgaggggcagccctcgacgtgcatgagtcagagcccttcagctttgctcagggtccgttgaaagatgccccgaatctcatctgcactcctcacactgcctggtacagtgagcaggcgtcactggagatgagggaggcagctgccaccgagatccgccgagccatcacaggtcgcatcccagaaagcttaagaaattgtgtgaacaaggaattctttgtcacatcagcgccttggtcagtaatagaccagcaagcaattcatcctgagctcaatggtgccacatacagatatccgccaggcatcgtgggtgtggctccaggaggacttcctgcagccatggaagggatcatccctggaggcatcccagtgactcacaacctcccgacagtggcacatccttcccaagcgccctctcccaaccagcccacaaaacacggggacaatcgagagcaccccaacgagcaatagcagagaatgccagaaggtaatcactcagatacacttgggaccaagagacagtgaaaaatagatgaactaagagaaaaagaatcggatggtctttgtaactgattctggacatatgcatcattgatgttgcagtgttgaaactacaagagctagaaaactgaagatgtcgtctgcttacggaagcgctgaaagactaggatgtgatttattaacgaccaacttctgttattgtgtgttaagtttttcatctgtgcatcaaatcacaaaaagaataaatagagctttttcctttatcagtcccttgggcacagcaggtcctgaacaccctgctctacaatgttgcatcaagagttcaaacaacaaaataaaaaatattaagaggaaatccccatcctgtgacttgagtcccttaagtctacaggggctggtgacctctttttgctaataggaaaatcacattactacaaaatggggagaaaactgtttgcctgtggtagacacctgcacgcataggattgaagacagtacaggctgctgtacagagaagcgcctctcacatctgaactgcatactgagcgggcaagtcggttgtaagttcagtaaaaccctctgatgatgcaaaaaaaaaaaaaaaagtattaagtttcacaagctgtttgtactcaaatatattttctcagtttcagatcctctgctattttattgagtggaaagtcttgagctaaaagggttcaagaagaataatgttgcatttccttatgtctcaggaaacactttttatggtaacttgtcagattgtctatgaacaaacccacttttttagacattgataaagtcttcttttcttcacgtgatattttatacaagaacacttcagatgtattagatgtgactgattttaacaaatcctattagatttgtatcaactagttacatgttctattcatagtcttttgtgaatcattgcctttttgtttaaaaagatggcctattttgagcctttgtataggtacattcctgtttttgtgacaaaagaaaaactttaaaattgtcccaaacagaaaaataatggctatcagaagtatgttttgttttagtgtgagttaccgttactgtatttgtttattgtaaaggtggacatttagcgttcagtgcagttttcaataaaaagtaattaaaatttgttaagttctgaaattcaagtacatctcactaatgtaaatgttctctacttgagatgtttaaggcagttgcattgtcaattagccaatttccagctcttgttactacagggttccataaccagactcaagaccgctgacaattaattacctgtgataacaaaaagtttaattgaaaaatcaaaacctcacacaagtccatcattatcacgtcatgccgtccttaagatgcaatggtgggttagtgctaaatcaattcaaaaaaaaacaaagttgctcaacttttagagttctgactttaatctaccccaaagcaaaatgacctggacctggttcaagggagggaagtgaaccttgaaactgttttgccaataacctaacaaacaaaatgatatttacaaagaagtgttgcaaatagtcccatgagttaagagcttgatttaatggatcttctttttaaatagaattaaacctttatactaaaagtatttgcaagtgtcaattaagtccaacaattccaggtatgaaactccctctgagctcttccttatacttcccttcccaattaaaacaaaacaagaaaatcatggtgtcttaaagcctttggcttgcctggccttgtctgctcactcattttaaggtggtggccccatcccaactctaccataaaagtgtctattaacacaagctcacatggagagagacggcgctcatagttactgacctattaccccagggaacaaaaaaggtagtttaacgtcttcgtaaccactcatcaaagaggcaatgaaatatgcgtgaaaaggaggccaagcgcacacagaatatcttaccttcacgaatatgtgaagaagtctgggacacgatgaacctaagagtcaaaaacataaaaggcaggtctgaatccatggtccacctgggttttaattattagatcttggtcgcccaaacaaaaatttatatatatatatataaatttgaccccaaggaagaacaagtcaaaacaaaatgccacgctctgtttgctctagaaaaagaaccatcaagtccacagagtgcaggtatgacttactctccagagtcagtcattaatgtctgtcacctagccacgtataatcatctttgaaaaaggactatattctatcttgggacaataattatggctgttttaatagttcaagagcataatatagcattgatttaccaaaatttttggcctttaacagccagtctatgaaaaccatttagagccccattcctgtctgtagcctaggaaatggaaccatctttaattctttcccacagggaagaatgctgcacctatcacactatgtggtcagggtcactgattgataataaataaataaataatagagcgctcaggggaaacaacactcaccagaccacaacacacagtagaagctaagtgctgagcgtgtactctctggacaacgctggctgcaatgcagactgcaatggctacatgcttttccctctaacaattctctttggctttttcaattgggagggcagattttgcttaacaggcaactagaacaggatctctgcccactaaaaaattatccctatacatagagaaattactacagatgctaagtagtcagaatgctaacattttctacaaacttgattacttattggccaaaatgaaagcaaacagccaatttttaacaacacattcaccacttgaaacaaacagcagcatttacattatatcaaagattcatttctacagaatcgtactaaaaaatcatttttcctgcaagatttagcatgcagcaaaaaatgatcttttcatcctgggaacacctttttactgagttttcggggggaaagaactaaagacatgacagttttgtgggtatttttctatttttagtattctggcagcaaatttgaggttgtacacatttcattatcaactaaacaaaacaagaagcaagcaaatactttaaggttttcacagcctttttcatcacagggaaggaaaaaactgtgtgtgtgtgtgtgtgtgtgtgtgtggtgcgtgtgtgcgtgcgtgtgtcgtctttccaaattcctggccacatcaatagtctagaaagtgcttatcaggacaccaaatatttctgtgttcctgagataggtctgaaatttttacccagtattgaatgtatacctgaagtggtcaaataatacttcttataaaaaagttgttctacctaagattatagttttaactttaaattaaagaatggccacaattaaccaacatgcaaaaattctcagactaaacactgagaaattcttcatacaatgcatttgccaccttattgcatttttaaaatctttattctgtagtgaattggtattcccaatctgcctaagcaaaggcatgcccttctaacaagatttgcttagagcagaggtgatagaaggaagaatccgaagaccctctggcatggcaatctgggagcagcacattgttgatggagtccaagtgagcacatttcacacaattcatttagtgacaagtgggcttgctcccttttcatccaggaaaaaaactactcacagaccactgcccagaatctggaataagaaccctcattttaaggtattcttcccaacaaataaatatctaaatattgaaagggggcatatcagaaaacttaaaagacacaataaccaaaaccaaaaccctcttcaaaacaagtaagcaatgtctgtatttagttcactctaaaacattcttagcttttcttgcagtttgttcctaaaagatttgattgggcacaagaggaacgaaattgttaataaaataaaagcttatttttgttttgctgtggataatcggtacaaaacgtttccagatctgagacttagatggatcttttaaggtgaaaggagaatgccaggttctactgaaataatatctgaaaggaacaaagagccatttgccatgtgctttttctaagtgcccatgctggaaaaaattttctcaataatatgaagatgctggtacaacttttcctattaaacaatgtcttacacaaccacatgcgttacatttatagacagatttacaatttggaaggaaaaaaagttctgtcttaataaaattagttttttttacaaactgtagtccaactaaagttctctgtctcctcacgcagcagaggcattatctccataaggtgtgtgtggtccaggaaaacacttccccgagcagatcctgccagatttggttcattccatgatgtcgactctgcttggagcaccacactaactttagggtcattacagatctgatgccttggtcttctgctgtttgattttttttttcattcatcttcatcatcctcatcttcctctccatcagacagggatgtacacggccggatctgtcggtagcggtcaagccatttttctaccatctgagtgaccagggggtgatttcgccgccgagaactcttctgcatggcaaccagaactcccccctccgtcacacagcagtccagccactccctgagcagtttttcttgctgttcctcattacctagctcctgagcagaaaggaagtgcacatggagtagcttcctttcactgtcaaccagaggcaaaaatgtgatggtgacatcatcatcggtattgagattagcaccagcacctcggttgccatagccatcattttccatggcaaccaaagcagagaagtggcccctcgtataacccagagcaatcggacttttccaacaaaaactctgttcccacaacaaaggcagataaacaccttgaaaccgagtatatcctaaagtttctccccggaaactcttgtaatattttactccataaactataattggtcgtctaagaatatgtgccagtacaaaaatgtgcgtctgctccaagcttgctccaggctgactagcaagagagagtataaatgcccagtcttctgatccaaaggattcgggacctgtaccag

SEQ ID NO: 736635 - DNA, 6097 bp, Homo sapiens
ggtgagcgagcggcgaccctcacctcgcctcccgcctagctcctgcgcagccagcgggtaccgggagctgcggccagcgccgcttctttcctttccttttctctccgttttccttctccttccccggaggagaaaacaaataaagaagagcaaatagccgggaggcgctcggcatccaggacgttccctcccccgatccaagttggaattagcatcctctcggggggttcatagtggcgtcatgcacgcagactcctgcaagttcccctaagttcttagaggactgctttgccttttgatctgagagttgcaaagttccataaagaatggcccttgtggataagcacaaagtcaagagacagcgattggacagaatttgtgaaggtatccgcccccagatcatgaacggccccctgcacccccgccccctggtggcgctgctggacggccgcgactgcactgtggagatgcccatcctgaaggacctggccactgtggccttctgtgacgcgcagtcgacgcaggaaatccacgagaaggttctaaacgaagccgtgggcgccatgatgtaccacaccatcaccctcaccagggaggacctggagaagttcaaggccctgagagtgatcgtgcggataggcagtggctatgacaacgtggacatcaaggctgccggcgagctcggaattgccgtgtgcaacatcccgtctgcagccgtggaagagacagcggactctaccatctgccacatcctcaacctgtaccggaggaacacgtggctgtaccaggcactgcgggaaggcacgcgggttcagagcgtggagcagatccgcgaggtggcctcgggagcggcccgcatccgtggggagacgctgggcctcattggctttggtcgcacggggcaggcggttgcagttcgagccaaggcctttggattcagcgtcatattttatgacccctacttgcaggatgggatcgagcggtccctgggcgtgcagagggtctacaccctgcaggatttgctgtatcagagcgactgcgtctccttgcactgcaatctcaacgaacataaccaccacctcatcaatgactttaccataaagcagatgaggcagggagcattccttgtgaacgcagcccgtggcggcctggtggacgagaaagccttagcacaagccctcaaggagggcaggatacgaggggcagccctcgacgtgcatgagtcagagcccttcagctttgctcagggtccgttgaaagatgccccgaatctcatctgcactcctcacactgcctggtacagtgagcaggcgtcactggagatgagggaggcagctgccaccgagatccgccgagccatcacaggtcgcatcccagaaagcttaagaaattgtgtgaacaaggaattctttgtcacatcagcgccttggtcagtaatagaccagcaagcaattcatcctgagctcaatggtgccacatacagatatccgccaggcatcgtgggtgtggctccaggaggacttcctgcagccatggaagggatcatccctggaggcatcccagtgactcacaacctcccgacagtggcacatccttcccaagcgccctctcccaaccagcccacaaaacacggggacaatcgagagcaccccaacgagcaatagcagagaatgccagaaggtaatcactcagatacacttgggaccaagagacagtgaaaaatagatgaactaagagaaaaagaatcggatggtctttgtaactgattctggacatatgcatcattgatgttgcagtgttgaaactacaagagctagaaaactgaagatgtcgtctgcttacggaagcgctgaaagactaggatgtgatttattaacgaccaacttctgttattgtgtgttaagtttttcatctgtgcatcaaatcacaaaaagaataaatagagctttttcctttatcagtcccttgggcacagcaggtcctgaacaccctgctctacaatgttgcatcaagagttcaaacaacaaaataaaaaatattaagaggaaatccccatcctgtgacttgagtcccttaagtctacaggggctggtgacctctttttgctaataggaaaatcacattactacaaaatggggagaaaactgtttgcctgtggtagacacctgcacgcataggattgaagacagtacaggctgctgtacagagaagcgcctctcacatctgaactgcatactgagcgggcaagtcggttgtaagttcagtaaaaccctctgatgatgcaaaaaaaaaaaaaaaagtattaagtttcacaagctgtttgtactcaaatatattttctcagtttcagatcctctgctattttattgagtggaaagtcttgagctaaaagggttcaagaagaataatgttgcatttccttatgtctcaggaaacactttttatggtaacttgtcagattgtctatgaacaaacccacttttttagacattgataaagtcttcttttcttcacgtgatattttatacaagaacacttcagatgtattagatgtgactgattttaacaaatcctattagatttgtatcaactagttacatgttctattcatagtcttttgtgaatcattgcctttttgtttaaaaagatggcctattttgagcctttgtataggtacattcctgtttttgtgacaaaagaaaaactttaaaattgtcccaaacagaaaaataatggctatcagaagtatgttttgttttagtgtgagttaccgttactgtatttgtttattgtaaaggtggacatttagcgttcagtgcagttttcaataaaaagtaattaaaatttgttaagttctgaaattcaagtacatctcactaatgtaaatgttctctacttgagatgtttaaggcagttgcattgtcaattagccaatttccagctcttgttactacagggttccataaccagactcaagaccgctgacaattaattacctgtgataacaaaaagtttaattgaaaaatcaaaacctcacacaagtccatcattatcacgtcatgccgtccttaagatgcaatggtgggttagtgctaaatcaattcaaaaaaaaacaaagttgctcaacttttagagttctgactttaatctaccccaaagcaaaatgacctggacctggttcaagggagggaagtgaaccttgaaactgttttgccaataacctaacaaacaaaatgatatttacaaagaagtgttgcaaatagtcccatgagttaagagcttgatttaatggatcttctttttaaatagaattaaacctttatactaaaagtatttgcaagtgtcaattaagtccaacaattccaggtatgaaactccctctgagctcttccttatacttcccttcccaattaaaacaaaacaagaaaatcatggtgtcttaaagcctttggcttgcctggccttgtctgctcactcattttaaggtggtggccccatcccaactctaccataaaagtgtctattaacacaagctcacatggagagagacggcgctcatagttactgacctattaccccagggaacaaaaaaggtagtttaacgtcttcgtaaccactcatcaaagaggcaatgaaatatgcgtgaaaaggaggccaagcgcacacagaatatcttaccttcacgaatatgtgaagaagtctgggacacgatgaacctaagagtcaaaaacataaaaggcaggtctgaatccatggtccacctgggttttaattattagatcttggtcgcccaaacaaaaatttatatatatatatataaatttgaccccaaggaagaacaagtcaaaacaaaatgccacgctctgtttgctctagaaaaagaaccatcaagtccacagagtgcaggtatgacttactctccagagtcagtcattaatgtctgtcacctagccacgtataatcatctttgaaaaaggactatattctatcttgggacaataattatggctgttttaatagttcaagagcataatatagcattgatttaccaaaatttttggcctttaacagccagtctatgaaaaccatttagagccccattcctgtctgtagcctaggaaatggaaccatctttaattctttcccacagggaagaatgctgcacctatcacactatgtggtcagggtcactgattgataataaataaataaataatagagcgctcaggggaaacaacactcaccagaccacaacacacagtagaagctaagtgctgagcgtgtactctctggacaacgctggctgcaatgcagactgcaatggctacatgcttttccctctaacaattctctttggctttttcaattgggagggcagattttgcttaacaggcaactagaacaggatctctgcccactaaaaaattatccctatacatagagaaattactacagatgctaagtagtcagaatgctaacattttctacaaacttgattacttattggccaaaatgaaagcaaacagccaatttttaacaacacattcaccacttgaaacaaacagcagcatttacattatatcaaagattcatttctacagaatcgtactaaaaaatcatttttcctgcaagatttagcatgcagcaaaaaatgatcttttcatcctgggaacacctttttactgagttttcggggggaaagaactaaagacatgacagttttgtgggtatttttctatttttagtattctggcagcaaatttgaggttgtacacatttcattatcaactaaacaaaacaagaagcaagcaaatactttaaggttttcacagcctttttcatcacagggaaggaaaaaactgtgtgtgtgtgtgtgtgtgtgtgtgtggtgcgtgtgtgcgtgcgtgtgtcgtctttccaaattcctggccacatcaatagtctagaaagtgcttatcaggacaccaaatatttctgtgttcctgagataggtctgaaatttttacccagtattgaatgtatacctgaagtggtcaaataatacttcttataaaaaagttgttctacctaagattatagttttaactttaaattaaagaatggccacaattaaccaacatgcaaaaattctcagactaaacactgagaaattcttcatacaatgcatttgccaccttattgcatttttaaaatctttattctgtagtgaattggtattcccaatctgcctaagcaaaggcatgcccttctaacaagatttgcttagagcagaggtgatagaaggaagaatccgaagaccctctggcatggcaatctgggagcagcacattgttgatggagtccaagtgagcacatttcacacaattcatttagtgacaagtgggcttgctcccttttcatccaggaaaaaaactactcacagaccactgcccagaatctggaataagaaccctcattttaaggtattcttcccaacaaataaatatctaaatattgaaagggggcatatcagaaaacttaaaagacacaataaccaaaaccaaaaccctcttcaaaacaagtaagcaatgtctgtatttagttcactctaaaacattcttagcttttcttgcagtttgttcctaaaagatttgattgggcacaagaggaacgaaattgttaataaaataaaagcttatttttgttttgctgtggataatcggtacaaaacgtttccagatctgagacttagatggatcttttaaggtgaaaggagaatgccaggttctactgaaataatatctgaaaggaacaaagagccatttgccatgtgctttttctaagtgcccatgctggaaaaaattttctcaataatatgaagatgctggtacaacttttcctattaaacaatgtcttacacaaccacatgcgttacatttatagacagatttacaatttggaaggaaaaaaagttctgtcttaataaaattagttttttttacaaactgtagtccaactaaagttctctgtctcctcacacaccttatggagataatgcctctgctgcgtgaggagacagagaactttagttggactacagttttttttacaaactgta

SEQ ID NO: 736636 - DNA, 7667 bp, Homo sapiens
ggtgagcgagcggcgaccctcacctcgcctcccgcctagctcctgcgcagccagcgggtaccgggagctgcggccagcgccgcttctttcctttccttttctctccgttttccttctccttccccggaggagaaaacaaataaagaagagcaaatagccgggaggcgctcggcatccaggacgttccctcccccgatccaagttggaattagcatcctctcggggggttcatagtggcgtcatgcacgcagactcctgcaagttcccctaagttcttagaggactgctttgccttttgatctgagagttgcaaagttccataaagaatggcccttgtggataagcacaaagtcaagagacagcgattggacagaatttgtgaaggtatccgcccccagatcatgaacggccccctgcacccccgccccctggtggcgctgctggacggccgcgactgcactgtggagatgcccatcctgaaggacctggccactgtggccttctgtgacgcgcagtcgacgcaggaaatccacgagaaggttctaaacgaagccgtgggcgccatgatgtaccacaccatcaccctcaccagggaggacctggagaagttcaaggccctgagagtgatcgtgcggataggcagtggctatgacaacgtggacatcaaggctgccggcgagctcggaattgccgtgtgcaacatcccgtctgcagccgtggaagagacagcggactctaccatctgccacatcctcaacctgtaccggaggaacacgtggctgtaccaggcactgcgggaaggcacgcgggttcagagcgtggagcagatccgcgaggtggcctcgggagcggcccgcatccgtggggagacgctgggcctcattggctttggtcgcacggggcaggcggttgcagttcgagccaaggcctttggattcagcgtcatattttatgacccctacttgcaggatgggatcgagcggtccctgggcgtgcagagggtctacaccctgcaggatttgctgtatcagagcgactgcgtctccttgcactgcaatctcaacgaacataaccaccacctcatcaatgactttaccataaagcagatgaggcagggagcattccttgtgaacgcagcccgtggcggcctggtggacgagaaagccttagcacaagccctcaaggagggcaggatacgaggggcagccctcgacgtgcatgagtcagagcccttcagctttgctcagggtccgttgaaagatgccccgaatctcatctgcactcctcacactgcctggtacagtgagcaggcgtcactggagatgagggaggcagctgccaccgagatccgccgagccatcacaggtcgcatcccagaaagcttaagaaattgtgtgaacaaggaattctttgtcacatcagcgccttggtcagtaatagaccagcaagcaattcatcctgagctcaatggtgccacatacagatatccgccaggcatcgtgggtgtggctccaggaggacttcctgcagccatggaagggatcatccctggaggcatcccagtgactcacaacctcccgacagtggcacatccttcccaagcgccctctcccaaccagcccacaaaacacggggacaatcgagagcaccccaacgagcaatagcagagaatgccagaaggtaatcactcagatacacttgggaccaagagacagtgaaaaatagatgaactaagagaaaaagaatcggatggtctttgtaactgattctggacatatgcatcattgatgttgcagtgttgaaactacaagagctagaaaactgaagatgtcgtctgcttacggaagcgctgaaagactaggatgtgatttattaacgaccaacttctgttattgtgtgttaagtttttcatctgtgcatcaaatcacaaaaagaataaatagagctttttcctttatcagtcccttgggcacagcaggtcctgaacaccctgctctacaatgttgcatcaagagttcaaacaacaaaataaaaaatattaagaggaaatccccatcctgtgacttgagtcccttaagtctacaggggctggtgacctctttttgctaataggaaaatcacattactacaaaatggggagaaaactgtttgcctgtggtagacacctgcacgcataggattgaagacagtacaggctgctgtacagagaagcgcctctcacatctgaactgcatactgagcgggcaagtcggttgtaagttcagtaaaaccctctgatgatgcaaaaaaaaaaaaaaaagtattaagtttcacaagctgtttgtactcaaatatattttctcagtttcagatcctctgctattttattgagtggaaagtcttgagctaaaagggttcaagaagaataatgttgcatttccttatgtctcaggaaacactttttatggtaacttgtcagattgtctatgaacaaacccacttttttagacattgataaagtcttcttttcttcacgtgatattttatacaagaacacttcagatgtattagatgtgactgattttaacaaatcctattagatttgtatcaactagttacatgttctattcatagtcttttgtgaatcattgcctttttgtttaaaaagatggcctattttgagcctttgtataggtacattcctgtttttgtgacaaaagaaaaactttaaaattgtcccaaacagaaaaataatggctatcagaagtatgttttgttttagtgtgagttaccgttactgtatttgtttattgtaaaggtggacatttagcgttcagtgcagttttcaataaaaagtaattaaaatttgttaagttctgaaattcaagtacatctcactaatgtaaatgttctctacttgagatgtttaaggcagttgcattgtcaattagccaatttccagctcttgttactacagggttccataaccagactcaagaccgctgacaattaattacctgtgataacaaaaagtttaattgaaaaatcaaaacctcacacaagtccatcattatcacgtcatgccgtccttaagatgcaatggtgggttagtgctaaatcaattcaaaaaaaaacaaagttgctcaacttttagagttctgactttaatctaccccaaagcaaaatgacctggacctggttcaagggagggaagtgaaccttgaaactgttttgccaataacctaacaaacaaaatgatatttacaaagaagtgttgcaaatagtcccatgagttaagagcttgatttaatggatcttctttttaaatagaattaaacctttatactaaaagtatttgcaagtgtcaattaagtccaacaattccaggtatgaaactccctctgagctcttccttatacttcccttcccaattaaaacaaaacaagaaaatcatggtgtcttaaagcctttggcttgcctggccttgtctgctcactcattttaaggtggtggccccatcccaactctaccataaaagtgtctattaacacaagctcacatggagagagacggcgctcatagttactgacctattaccccagggaacaaaaaaggtagtttaacgtcttcgtaaccactcatcaaagaggcaatgaaatatgcgtgaaaaggaggccaagcgcacacagaatatcttaccttcacgaatatgtgaagaagtctgggacacgatgaacctaagagtcaaaaacataaaaggcaggtctgaatccatggtccacctgggttttaattattagatcttggtcgcccaaacaaaaatttatatatatatatataaatttgaccccaaggaagaacaagtcaaaacaaaatgccacgctctgtttgctctagaaaaagaaccatcaagtccacagagtgcaggtatgacttactctccagagtcagtcattaatgtctgtcacctagccacgtataatcatctttgaaaaaggactatattctatcttgggacaataattatggctgttttaatagttcaagagcataatatagcattgatttaccaaaatttttggcctttaacagccagtctatgaaaaccatttagagccccattcctgtctgtagcctaggaaatggaaccatctttaattctttcccacagggaagaatgctgcacctatcacactatgtggtcagggtcactgattgataataaataaataaataatagagcgctcaggggaaacaacactcaccagaccacaacacacagtagaagctaagtgctgagcgtgtactctctggacaacgctggctgcaatgcagactgcaatggctacatgcttttccctctaacaattctctttggctttttcaattgggagggcagattttgcttaacaggcaactagaacaggatctctgcccactaaaaaattatccctatacatagagaaattactacagatgctaagtagtcagaatgctaacattttctacaaacttgattacttattggccaaaatgaaagcaaacagccaatttttaacaacacattcaccacttgaaacaaacagcagcatttacattatatcaaagattcatttctacagaatcgtactaaaaaatcatttttcctgcaagatttagcatgcagcaaaaaatgatcttttcatcctgggaacacctttttactgagttttcggggggaaagaactaaagacatgacagttttgtgggtatttttctatttttagtattctggcagcaaatttgaggttgtacacatttcattatcaactaaacaaaacaagaagcaagcaaatactttaaggttttcacagcctttttcatcacagggaaggaaaaaactgtgtgtgtgtgtgtgtgtgtgtgtgtggtgcgtgtgtgcgtgcgtgtgtcgtctttccaaattcctggccacatcaatagtctagaaagtgcttatcaggacaccaaatatttctgtgttcctgagataggtctgaaatttttacccagtattgaatgtatacctgaagtggtcaaataatacttcttataaaaaagttgttctacctaagattatagttttaactttaaattaaagaatggccacaattaaccaacatgcaaaaattctcagactaaacactgagaaattcttcatacaatgcatttgccaccttattgcatttttaaaatctttattctgtagtgaattggtattcccaatctgcctaagcaaaggcatgcccttctaacaagatttgcttagagcagaggtgatagaaggaagaatccgaagaccctctggcatggcaatctgggagcagcacattgttgatggagtccaactgtttgattttttttttcattcatcttcatcatcctcatcttcctctccatcagacagggatgtacacggccggatctgtcggtagcggtcaagccatttttctaccatctgagtgaccagggggtgatttcgccgccgagaactcttctgcatggcaaccagaactcccccctccgtcacacagcagtccagccactccctgagcagtttttcttgctgttcctcattacctagctcctgagcagaaaggaagtgcacatggagtagcttcctttcactgtcaaccagaggcaaaaatgtgatggtgacatcatcatcggtattgagattagcaccagcacctcggttgccatagccatcattttccatggcaaccaaagcagagaagtggcccctcgtataacccagagcaatcggacttttccaacaaaaactctgttcccacaacaaaggcagataaacaccttgaaaccgagtatatcctaaagtttctccccggaaactcttgtaatattttactccataaactataattggtcgtctaagaatatgtgccagtacaaaaatgtgcgtctgctccaagcttgctccaggctgactagcaagagagagtataaatgcccagtcttcttgccattgttcttctctcaaggaaaaatgtaaaccaaagctctgagaataccatgattcccaatctttccagcgtgtgtaaaaccaatgtgaacagtcatgcaggctgtcatgcagggctttccgaagcactgagtccttgtcatagatgccccaggtagcttgtagaactgaatcaagtaggcagtctcctgcagtccggttccaaagtgcatacagtcgactgtccaaacgtgtagccaattccaaggaccagttaataattggagattcttcttctaattctttttgaacgtctctatcaagcacctcatcaaataatttttcttggactgttgggggcaaatcttcaatatctgctggcaatgtaaatgttacaaggtcagtcagaatatagcaagcaaaatccccctttctctgatgaagagaggcagctatctctctccggatttgttctgtcagttcaggacacaccattgctggaatacactttgctgcttgttgagacacctctgtaagcaatattgctagcatatcctgcctctgaaaacgtatagccaagtgtacaagagtatagccaacatcaaaggcagaaggacgattcagcaagcgtacttcatctgcggtgagctgacgtgcaatgtctcctcctgatgacttgtatgcttctatggcagctaaatcaccttctacaacccccacacaagcattgaggaagagccaatcagtctttttcatcctgtttttaatttgctttagttttttaaagtctacttcaagttcctccttgcttcccacagcaccagccaattcaatcctctgaaaatccattttcacttcagagtcccgcttcgtagcaggaggtgatctcctttggctattaccactactgcaacttcccctccatcgagctctgtcttgctcatttattattgaagaagcctcttcagtctctgccaattctattgcttcaatgttattaggtctgggatgatcacaaacaacacatcttttagccttggcccagttttcatatgtgcaaacagagcaagtccagtgctgtgtcctagtgttcagtttatttctatcattgtattcctcacaaggatcaacagaaaaagcaactggtcttgagccagatcctgaggactgaggagattctgtaggactcctggtcctacgttgggataagcactgggtacatctgattgctcttggccagttcaaatatgtacacatgtggcatgaccacttatttgcattttccatgctatacgaagatttcacccttggtcttgcactagagtctggacatatcaaaggactacttcctccttcggtgctggaaggatcccaatctctaccaacatcacttgaaccacttttaaatggatcttctgtaataattgttccactaggtctttgggcacgacacatagtacacttgattgcagatggccagttttcatacgtacaatattcacaagcccacttaattccacgttctgacattgtgcacttcttgaagtgagctgtgtcaggcaggaagctggcggcggcggctcctcctccagctcctgctcctcctccccgtccgacgggcgcttggcggcggcggcggcggcggcggcttttatataattatcaactacccgcacaacccgcggctacgagttgagcccagaccctc

SEQ ID NO: 736637 - DNA, 8699 bp, Homo sapiens
ggtgagcgagcggcgaccctcacctcgcctcccgcctagctcctgcgcagccagcgggtaccgggagctgcggccagcgccgcttctttcctttccttttctctccgttttccttctccttccccggaggagaaaacaaataaagaagagcaaatagccgggaggcgctcggcatccaggacgttccctcccccgatccaagttggaattagcatcctctcggggggttcatagtggcgtcatgcacgcagactcctgcaagttcccctaagttcttagaggactgctttgccttttgatctgagagttgcaaagttccataaagaatggcccttgtggataagcacaaagtcaagagacagcgattggacagaatttgtgaaggtatccgcccccagatcatgaacggccccctgcacccccgccccctggtggcgctgctggacggccgcgactgcactgtggagatgcccatcctgaaggacctggccactgtggccttctgtgacgcgcagtcgacgcaggaaatccacgagaaggttctaaacgaagccgtgggcgccatgatgtaccacaccatcaccctcaccagggaggacctggagaagttcaaggccctgagagtgatcgtgcggataggcagtggctatgacaacgtggacatcaaggctgccggcgagctcggaattgccgtgtgcaacatcccgtctgcagccgtggaagagacagcggactctaccatctgccacatcctcaacctgtaccggaggaacacgtggctgtaccaggcactgcgggaaggcacgcgggttcagagcgtggagcagatccgcgaggtggcctcgggagcggcccgcatccgtggggagacgctgggcctcattggctttggtcgcacggggcaggcggttgcagttcgagccaaggcctttggattcagcgtcatattttatgacccctacttgcaggatgggatcgagcggtccctgggcgtgcagagggtctacaccctgcaggatttgctgtatcagagcgactgcgtctccttgcactgcaatctcaacgaacataaccaccacctcatcaatgactttaccataaagcagatgaggcagggagcattccttgtgaacgcagcccgtggcggcctggtggacgagaaagccttagcacaagccctcaaggagggcaggatacgaggggcagccctcgacgtgcatgagtcagagcccttcagctttgctcagggtccgttgaaagatgccccgaatctcatctgcactcctcacactgcctggtacagtgagcaggcgtcactggagatgagggaggcagctgccaccgagatccgccgagccatcacaggtcgcatcccagaaagcttaagaaattgtgtgaacaaggaattctttgtcacatcagcgccttggtcagtaatagaccagcaagcaattcatcctgagctcaatggtgccacatacagatatccgccaggcatcgtgggtgtggctccaggaggacttcctgcagccatggaagggatcatccctggaggcatcccagtgactcacaacctcccgacagtggcacatccttcccaagcgccctctcccaaccagcccacaaaacacggggacaatcgagagcaccccaacgagcaatagcagagaatgccagaaggtaatcactcagatacacttgggaccaagagacagtgaaaaatagatgaactaagagaaaaagaatcggatggtctttgtaactgattctggacatatgcatcattgatgttgcagtgttgaaactacaagagctagaaaactgaagatgtcgtctgcttacggaagcgctgaaagactaggatgtgatttattaacgaccaacttctgttattgtgtgttaagtttttcatctgtgcatcaaatcacaaaaagaataaatagagctttttcctttatcagtcccttgggcacagcaggtcctgaacaccctgctctacaatgttgcatcaagagttcaaacaacaaaataaaaaatattaagaggaaatccccatcctgtgacttgagtcccttaagtctacaggggctggtgacctctttttgctaataggaaaatcacattactacaaaatggggagaaaactgtttgcctgtggtagacacctgcacgcataggattgaagacagtacaggctgctgtacagagaagcgcctctcacatctgaactgcatactgagcgggcaagtcggttgtaagttcagtaaaaccctctgatgatgcaaaaaaaaaaaaaaaagtattaagtttcacaagctgtttgtactcaaatatattttctcagtttcagatcctctgctattttattgagtggaaagtcttgagctaaaagggttcaagaagaataatgttgcatttccttatgtctcaggaaacactttttatggtaacttgtcagattgtctatgaacaaacccacttttttagacattgataaagtcttcttttcttcacgtgatattttatacaagaacacttcagatgtattagatgtgactgattttaacaaatcctattagatttgtatcaactagttacatgttctattcatagtcttttgtgaatcattgcctttttgtttaaaaagatggcctattttgagcctttgtataggtacattcctgtttttgtgacaaaagaaaaactttaaaattgtcccaaacagaaaaataatggctatcagaagtatgttttgttttagtgtgagttaccgttactgtatttgtttattgtaaaggtggacatttagcgttcagtgcagttttcaataaaaagtaattaaaatttgttaagttctgaaattcaagtacatctcactaatgtaaatgttctctacttgagatgtttaaggcagttgcattgtcaattagccaatttccagctcttgttactacagggttccataaccagactcaagaccgctgacaattaattacctgtgataacaaaaagtttaattgaaaaatcaaaacctcacacaagtccatcattatcacgtcatgccgtccttaagatgcaatggtgggttagtgctaaatcaattcaaaaaaaaacaaagttgctcaacttttagagttctgactttaatctaccccaaagcaaaatgacctggacctggttcaagggagggaagtgaaccttgaaactgttttgccaataacctaacaaacaaaatgatatttacaaagaagtgttgcaaatagtcccatgagttaagagcttgatttaatggatcttctttttaaatagaattaaacctttatactaaaagtatttgcaagtgtcaattaagtccaacaattccaggtatgaaactccctctgagctcttccttatacttcccttcccaattaaaacaaaacaagaaaatcatggtgtcttaaagcctttggcttgcctggccttgtctgctcactcattttaaggtggtggccccatcccaactctaccataaaagtgtctattaacacaagctcacatggagagagacggcgctcatagttactgacctattaccccagggaacaaaaaaggtagtttaacgtcttcgtaaccactcatcaaagaggcaatgaaatatgcgtgaaaaggaggccaagcgcacacagaatatcttaccttcacgaatatgtgaagaagtctgggacacgatgaacctaagagtcaaaaacataaaaggcaggtctgaatccatggtccacctgggttttaattattagatcttggtcgcccaaacaaaaatttatatatatatatataaatttgaccccaaggaagaacaagtcaaaacaaaatgccacgctctgtttgctctagaaaaagaaccatcaagtccacagagtgcaggtatgacttactctccagagtcagtcattaatgtctgtcacctagccacgtataatcatctttgaaaaaggactatattctatcttgggacaataattatggctgttttaatagttcaagagcataatatagcattgatttaccaaaatttttggcctttaacagccagtctatgaaaaccatttagagccccattcctgtctgtagcctaggaaatggaaccatctttaattctttcccacagggaagaatgctgcacctatcacactatgtggtcagggtcactgattgataataaataaataaataatagagcgctcaggggaaacaacactcaccagaccacaacacacagtagaagctaagtgctgagcgtgtactctctggacaacgctggctgcaatgcagactgcaatggctacatgcttttccctctaacaattctctttggctttttcaattgggagggcagattttgcttaacaggcaactagaacaggatctctgcccactaaaaaattatccctatacatagagaaattactacagatgctaagtagtcagaatgctaacattttctacaaacttgattacttattggccaaaatgaaagcaaacagccaatttttaacaacacattcaccacttgaaacaaacagcagcatttacattatatcaaagattcatttctacagaatcgtactaaaaaatcatttttcctgcaagatttagcatgcagcaaaaaatgatcttttcatcctgggaacacctttttactgagttttcggggggaaagaactaaagacatgacagttttgtgggtatttttctatttttagtattctggcagcaaatttgaggttgtacacatttcattatcaactaaacaaaacaagaagcaagcaaatactttaaggttttcacagcctttttcatcacagggaaggaaaaaactgtgtgtgtgtgtgtgcgtgcgtgtgtcgtctttccaaattcctggccacatcaatagtctagaaagtgcttatcaggacaccaaatatttctgtgttcctgagataggtctgaaatttttacccagtattgaatgtatacctgaagtggtcaaataatacttcttataaaaaagttgttctacctaagattatagttttaactttaaattaaagaatggccacaattaaccaacatgcaaaaattctcagactaaacactgagaaattcttcatacaatgcatttgccaccttattgcatttttaaaatctttattctgtagtgaattggtattcccaatctgcctaagcaaaggcatgcccttctaacaagatttgcttagagcagaggtgatagaaggaagaatccgaagaccctctggcatggcaatctgggagcagcacattgttgatggagtccaagtgagcacatttcacacaattcatttagtgacaagtgggcttgctcccttttcatccaggaaaaaaactactcacagaccactgcccagaatctggaataagaaccctcattttaaggtattcttcccaacaaataaatatctaaatattgaaagggggcatatcagaaaacttaaaagacacaataaccaaaaccaaaaccctcttcaaaacaagtaagcaatgtctgtatttagttcactctaaaacattcttagcttttcttgcagtttgttcctaaaagatttgattgggcacaagaggaacgaaattgttaataaaataaaagcttatttttgttttgctgtggataatcggtacaaaacgtttccagatctgagacttagatggatcttttaaggtgaaaggagaatgccaggttctactgaaataatatctgaaaggaacaaagagccatttgccatgtgctttttctaagtgcccatgctggaaaaaattttctcaataatatgaagatgctggtacaacttttcctattaaacaatgtcttacacaaccacatgcgttacatttatagacagatttacaatttggaaggaaaaaaagttctgtcttaataaaattagttttttttacaaactgtagtccaactaaagttctctgtctcctcacgcagcagaggcattatctccataaggtgtgtgtggtccaggaaaacacttccccgagcagatcctgccagatttggttcattccatgatgtcgactctgcttggagcaccacactaactttagggtcattacagatctgatgccttggtcttctgctgtttgattttttttttcattcatcttcatcatcctcatcttcctctccatcagacagggatgtacacggccggatctgtcggtagcggtcaagccatttttctaccatctgagtgaccagggggtgatttcgccgccgagaactcttctgcatggcaaccagaactcccccctccgtcacacagcagtccagccactccctgagcagtttttcttgctgttcctcattacctagctcctgagcagaaaggaagtgcacatggagtagcttcctttcactgtcaaccagaggcaaaaatgtgatggtgacatcatcatcggtattgagattagcaccagcacctcggttgccatagccatcattttccatggcaaccaaagcagagaagtggcccctcgtataacccagagcaatcggacttttccaacaaaaactctgttcccacaacaaaggcagataaacaccttgaaaccgagtatatcctaaagtttctccccggaaactcttgtaatattttactccataaactataattggtcgtctaagaatatgtgccagtacaaaaatgtgcgtctgctccaagcttgctccaggctgactagcaagagagagtataaatgcccagtcttcttgccattgttcttctctcaaggaaaaatgtaaaccaaagctctgagaataccatgattcccaatctttccagcgtgtgtaaaaccaatgtgaacagtcatgcaggctgtcatgcagggctttccgaagcactgagtccttgtcatagatgccccaggtagcttgtagaactgaatcaagtaggcagtctcctgcagtccggttccaaagtgcatacagtcgactgtccaaacgtgtagccaattccaaggaccagttaataattggagattcttcttctaattctttttgaacgtctctatcaagcacctcatcaaataatttttcttggactgttgggggcaaatcttcaatatctgctggcaatgtaaatgttacaaggtcagtcagaatatagcaagcaaaatccccctttctctgatgaagagaggcagctatctctctccggatttgttctgtcagttcaggacacaccattgctggaatacactttgctgcttgttgagacacctctgtaagcaatattgctagcatatcctgcctctgaaaacgtatagccaagtgtacaagagtatagccaacatcaaaggcagaaggacgattcagcaagcgtacttcatctgcggtgagctgacgtgcaatgtctcctcctgatgacttgtatgcttctatggcagctaaatcaccttctacaacccccacacaagcattgaggaagagccaatcagtctttttcatcctgtttttaatttgctttagttttttaaagtctacttcaagttcctccttgcttcccacagcaccagccaattcaatcctctgaaaatccattttcacttcagagtcccgcttcgtagcaggaggtgatctcctttggctattaccactactgcaacttcccctccatcgagctctgtcttgctcatttattattgaagaagcctcttcagtctctgccaattctattgcttcaatgttattaggtctgggatgatcacaaacaacacatcttttagccttggcccagttttcatatgtgcaaacagagcaagtccagtgctgtgtcctagtgttcagtttatttctatcattgtattcctcacaaggatcaacagaaaaagcaactggtcttgagccagatcctgaggactgaggagattctgtaggactcctggtcctacgttgggataagcactgggtacatctgattgctcttggccagttcaaatatgtacacatgtggcatgaccacttatttgcattttccatgctatacgaagatttcacccttggtcttgcactagagtctggacatatcaaaggactacttcctccttcggtgctggaaggatcccaatctctaccaacatcacttgaaccacttttaaatggatcttctgtaataattgttccactaggtctttgggcacgacacatagtacacttgattgcagatggccagttttcatacgtacaatattcacaagcccacttaattccacgttctgacattgtgcacttcttgaagtgagctgtgtcaggcaggaagctataaataattaggacatggttattaaaataactacattccacctccaaaaatacgctgcccaaaaagcaagtccttcaacctacaaaatataaatttctcaaaagatgcatgcaacatttcgacattgaattatcctaattttcttttttaatttccatagaaacactggagataaattctcaaagaaaaaatcttagaccctgggatttaataaaactgaactttggaatgcaaaagagataggcaggagatataacgaggtttgatctaagaaggatgagattaacgggaagccactaatagaaatgtttaatttcagggaggccatcaccccgcgtactctgcgttgttaccactgcttaagcc

SEQ ID NO: 736638 - DNA, 3306 bp, Homo sapiens
ggtgagcgagcggcgaccctcacctcgcctcccgcctagctcctgcgcagccagcgggtaccgggagctgcggccagcgccgcttctttcctttccttttctctccgttttccttctccttccccggaggagaaaacaaataaagaagagcaaatagccgggaggcgctcggcatccaggacgttccctcccccgatccaagttggaattagcatcctctcggggggttcatagtggcgtcatgcacgcagactcctgcaagttcccctaagttcttagaggactgctttgccttttgatctgagagttgcaaagttccataaagaatggcccttgtggataagcacaaagtcaagagacagcgattggacagaatttgtgaaggtatccgcccccagatcatgaacggccccctgcacccccgccccctggtggcgctgctggacggccgcgactgcactgtggagatgcccatcctgaaggacctggccactgtggccttctgtgacgcgcagtcgacgcaggaaatccacgagaaggttctaaacgaagccgtgggcgccatgatgtaccacaccatcaccctcaccagggaggacctggagaagttcaaggccctgagagtgatcgtgcggataggcagtggctatgacaacgtggacatcaaggctgccggcgagctcggaattgccgtgtgcaacatcccgtctgcagccgtggaagagacagcggactctaccatctgccacatcctcaacctgtaccggaggaacacgtggctgtaccaggcactgcgggaaggcacgcgggttcagagcgtggagcagatccgcgaggtggcctcgggagcggcccgcatccgtggggagacgctgggcctcattggctttggtcgcacggggcaggcggttgcagttcgagccaaggcctttggattcagcgtcatattttatgacccctacttgcaggatgggatcgagcggtccctgggcgtgcagagggtctacaccctgcaggatttgctgtatcagagcgactgcgtctccttgcactgcaatctcaacgaacataaccaccacctcatcaatgactttaccataaagcagatgaggcagggagcattccttgtgaacgcagcccgtggcggcctggtggacgagaaagccttagcacaagccctcaaggagggcaggatacgaggggcagccctcgacgtgcatgagtcagagcccttcagctttgctcagggtccgttgaaagatgccccgaatctcatctgcactcctcacactgcctggtacagtgagcaggcgtcactggagatgagggaggcagctgccaccgagatccgccgagccatcacaggtcgcatcccagaaagcttaagaaattgtgtgaacaaggaattctttgtcacatcagcgccttggtcagtaatagaccagcaagcaattcatcctgagctcaatggtgccacatacagatatccgccaggcatcgtgggtgtggctccaggaggacttcctgcagccatggaagggatcatccctggaggcatcccagtgactcacaacctcccgacagtggcacatccttcccaagcgccctctcccaaccagcccacaaaacacggggacaatcgagagcaccccaacgagcaatagcagagaatgccagaaggtaatcactcagatacacttgggaccaagagacagtgaaaaatagatgaactaagagaaaaagaatcggatggtctttgtaactgattctggacatatgcatcattgatgttgcagtgttgaaactacaagagctagaaaactgaagatgtcgtctgcttacggaagcgctgaaagactaggatgtgatttattaacgaccaacttctgttattgtgtgttaagtttttcatctgtgcatcaaatcacaaaaagaataaatagagctttttcctttatcagtcccttgggcacagcaggtcctgaacaccctgctctacaatgttgcatcaagagttcaaacaacaaaataaaaaatattaagaggaaatccccatcctgtgacttgagtcccttaagtctacaggggctggtgacctctttttgctaataggaaaatcacattactacaaaatggggagaaaactgtttgcctgtggtagacacctgcacgcataggattgaagacagtacaggctgctgtacagagaagcgcctctcacatctgaactgcatactgagcgggcaagtcggttgtaagttcagtaaaaccctctgatgatgcaaaaaaaaaaaaaaaagtattaagtttcacaagctgtttgtactcaaatatattttctcagtttcagatcctctgctattttattgagtggaaagtcttgagctaaaagggttcaagaagaataatgttgcatttccttatgtctcaggaaacactttttatggtaacttgtcagattgtctatgaacaaacccacttttttagacattgataaagtcttcttttcttcacgtgatattttatacaagaacacttcagatgtattagatgtgactgattttaacaaatcctattagatttgtatcaactagttacatgttctattcatagtcttttgtgaatcattgcctttttgtttaaaaagatggcctattttgagcctttgtataggtacattcctgtttttgtgacaaaagaaaaactttaaaattgtcccaaacagaaaaataatggctatcagaagtatgttttgttttagtgtgagttaccgttactgtatttgtttattgtaaaggtggacatttagcgttcagtgcagttttcaataaaaagtaattaaaatttaaaaaacaaaaaaaaaacaacaacaaaaaaaaaacactcacactaaccaacaaacaaaaaacaacaacaaaaaacaaagggggggggggctaaaaaatattccccgggggggcccatatggcgccccctttttttttcagggggggcccaagggggggctaattaaacgggggggggcgcggatataaaacaggtgggcagggggggaaccagagcagctatgtgatctttggggaaagaacccacttcgtgtcggctgaaatcgggcccccccccccgaatcacgccgggaacataaaatactgtctattggtgaacacgcatgttgcggggaaattgctcgtttttgaagtggtagtcaataaaacagcacgacaggaggagacgaaggtacgtctgcaaggagctcaacaacaatcatgcactgtcacagcagcaaacgacagaacgtatacagca

SEQ ID NO: 736639 - DNA, 2495 bp, Homo sapiens
ggtgagcgagcggcgaccctcacctcgcctcccgcctagctcctgcgcagccagcgggtaccgggagctgcggccagcgccgcttctttcctttccttttctctccgttttccttctccttccccggaggagaaaacaaataaagaagagcaaatagccgggaggcgctcggcatccaggacgttccctcccccgatccaagttggaattagcatcctctcggggggttcatagtggcgtcatgcacgcagactcctgcaagttcccctaagttcttagaggactgctttgccttttgatctgagagttgcaaagttccataaagaatggcccttgtggataagcacaaagtcaagagacagcgattggacagaatttgtgaaggtatccgcccccagatcatgaacggccccctgcacccccgccccctggtggcgctgctggacggccgcgactgcactgtggagatgcccatcctgaaggacctggccactgtggccttctgtgacgcgcagtcgacgcaggaaatccacgagaaggttctaaacgaagccgtgggcgccatgatgtaccacaccatcaccctcaccagggaggacctggagaagttcaaggccctgagagtgatcgtgcggataggcagtggctatgacaacgtggacatcaaggctgccggcgagctcggaattgccgtgtgcaacatcccgtctgcagccgtggaagagacagcggactctaccatctgccacatcctcaacctgtaccggaggaacacgtggctgtaccaggcactgcgggaaggcacgcgggttcagagcgtggagcagatccgcgaggtggcctcgggagcggcccgcatccgtggggagacgctgggcctcattggctttggtcgcacggggcaggcggttgcagttcgagccaaggcctttggattcagcgtcatattttatgacccctacttgcaggatgggatcgagcggtccctgggcgtgcagagggtctacaccctgcaggatttgctgtatcagagcgactgcgtctccttgcactgcaatctcaacgaacataaccaccacctcatcaatgactttaccataaagcagatgaggcagggagcattccttgtgaacgcagcccgtggcggcctggtggacgagaaagccttagcacaagccctcaaggagggcaggatacgaggggcagccctcgacgtgcatgagtcagagcccttcagctttgctcagggtccgttgaaagatgccccgaatctcatctgcactcctcacactgcctggtacagtgagcaggcgtcactggagatgagggaggcagctgccaccgagatccgccgagccatcacaggtcgcatcccagaaagcttaagaaattgtgtgaacaaggaattctttgtcacatcagcgccttggtcagtaatagaccagcaagcaattcatcctgagctcaatggtgccacatacagatatccgccaggcatcgtgggtgtggctccaggaggacttcctgcagccatggaagggatcatccctggaggcatcccagtgactcacaacctcccgacagtggcacatccttcccaagcgccctctcccaaccagcccacaaaacacggggacaatcgagagcaccccaacgagcaatagcagagaatgccagaaggtaatcactcagatacacttgggaccaagagacagtgaaaaatagatgaactaagagaaaaagaatcggatggtctttgtaactgattctggacatatgcatcattgatgttgcagtgttgaaactacaagagctagaaaactgaagatgtcgtctgcttacggaagcgctgaaagactaggatgtgatttattaacgaccaacttctgttattgtgtgttaagtttttcatctgtgcatcaaatcacaaaaagaataaatagagctttttcctttatcagtcccttgggcacagcaggtcctgaacaccctgctctacaatgttgcatcaagagttcaaacaacaaaataaaaaatattaagaggaaatccccatcctgtgacttgagtcccttaagtctacaggggctggtgacctctttttgctaataggaaaatcacattactacaaaatggggagaaaactgtttgcctgtggtagacacctgcacgcataggattgaagacagtacaggctgctgtacagagaagcgcctctcacatctgaactgcatactgagcgggcaagtcggttgtaagttcagtaaaaccctctgatgatgcaaaaaaaaaaaaaaaagtattaagtttcacaagctgtttgtactcaaatatattgtgaaacttaatactttttttttttttttgcctgtggtagacacctgcacgcataggattgaagacagtacaggtctgctgtacagagaagcgcctctcacatctgaactgcatactgagcgggcaagtcggttgtaagttcagtaaaaccctctgat

SEQ ID NO: 736640 - DNA, 2779 bp, Homo sapiens
  misc_feature (2778)..(2778): n is a, c, g, or t
ggtgagcgagcggcgaccctcacctcgcctcccgcctagctcctgcgcagccagcgggtaccgggagctgcggccagcgccgcttctttcctttccttttctctccgttttccttctccttccccggaggagaaaacaaataaagaagagcaaatagccgggaggcgctcggcatccaggacgttccctcccccgatccaagttggaattagcatcctctcggggggttcatagtggcgtcatgcacgcagactcctgcaagttcccctaagttcttagaggactgctttgccttttgatctgagagttgcaaagttccataaagaatggcccttgtggataagcacaaagtcaagagacagcgattggacagaatttgtgaaggtatccgcccccagatcatgaacggccccctgcacccccgccccctggtggcgctgctggacggccgcgactgcactgtggagatgcccatcctgaaggacctggccactgtggccttctgtgacgcgcagtcgacgcaggaaatccacgagaaggttctaaacgaagccgtgggcgccatgatgtaccacaccatcaccctcaccagggaggacctggagaagttcaaggccctgagagtgatcgtgcggataggcagtggctatgacaacgtggacatcaaggctgccggcgagctcggaattgccgtgtgcaacatcccgtctgcagccgtggaagagacagcggactctaccatctgccacatcctcaacctgtaccggaggaacacgtggctgtaccaggcactgcgggaaggcacgcgggttcagagcgtggagcagatccgcgaggtggcctcgggagcggcccgcatccgtggggagacgctgggcctcattggctttggtcgcacggggcaggcggttgcagttcgagccaaggcctttggattcagcgtcatattttatgacccctacttgcaggatgggatcgagcggtccctgggcgtgcagagggtctacaccctgcaggatttgctgtatcagagcgactgcgtctccttgcactgcaatctcaacgaacataaccaccacctcatcaatgactttaccataaagcagatgaggcagggagcattccttgtgaacgcagcccgtggcggcctggtggacgagaaagccttagcacaagccctcaaggagggcaggatacgaggggcagccctcgacgtgcatgagtcagagcccttcagctttgctcagggtccgttgaaagatgccccgaatctcatctgcactcctcacactgcctggtacagtgagcaggcgtcactggagatgagggaggcagctgccaccgagatccgccgagccatcacaggtcgcatcccagaaagcttaagaaattgtgtgaacaaggaattctttgtcacatcagcgccttggtcagtaatagaccagcaagcaattcatcctgagctcaatggtgccacatacagatatccgccaggcatcgtgggtgtggctccaggaggacttcctgcagccatggaagggatcatccctggaggcatcccagtgactcacaacctcccgacagtggcacatccttcccaagcgccctctcccaaccagcccacaaaacacggggacaatcgagagcaccccaacgagcaatagcagagaatgccagaaggtaatcactcagatacacttgggaccaagagacagtgaaaaatagatgaactaagagaaaaagaatcggatggtctttgtaactgattctggacatatgcatcattgatgttgcagtgttgaaactacaagagctagaaaactgaagatgtcgtctgcttacggaagcgctgaaagactaggatgtgatttattaacgaccaacttctgttattgtgtgttaagtttttcatctgtgcatcaaatcacaaaaagaataaatagagctttttcctttatcagtcccttgggcacagcaggtcctgaacaccctgctctacaatgttgcatcaagagttcaaacaacaaaataaaaaatattaagaggaaatccccatcctgtgacttgagtcccttaagtctacaggggctggtgacctctttttgctaataggaaaatcacattactacaaaatggggagaaaactgtttgcctgtggtagacacctgcacgcataggattgaagacagtacaggctgctgtacagagaagcgcctctcacatctgaactgcatactgagcgggcaagtcggttgtaagttcagtaaaaccctctgatgatgcaaaaaaaaacacgaacactccgagggcctcctaagccgggggcgcggacacaccacgtcaccgaactgggcccagggccatagctggttcttggacccaagtttctgtgtacacaccgggtcacatcagcgggtctccttaagggagccgcataatccaagagagcgtttgagccttagaaactaccgacacaaaacacgggcaaaagagccagctcgcgacacgacatcagagtaatcccggcactatcacactcactgcaacaagcgaaaatcatagcaagcacatataagacacaccacaaccactagctcagctacagacaagaataacacactgctaaccgcacgctgctcgcacgcaccatcactcatcagatgccatacctccccaccagtagaagaacacatacacctgcatctctacagaccgcaacttcagtccacctatagtagacaaagcaaatccagagataggtacctctacaactacagna

SEQ ID NO: 736641 - DNA, 8123 bp, Homo sapiens
ggtgagcgagcggcgaccctcacctcgcctcccgcctagctcctgcgcagccagcgggtaccgggagctgcggccagcgccgcttctttcctttccttttctctccgttttccttctccttccccggaggagaaaacaaataaagaagagcaaatagccgggaggcgctcggcatccaggacgttccctcccccgatccaagttggaattagcatcctctcggggggttcatagtggcgtcatgcacgcagactcctgcaagttcccctaagttcttagaggactgctttgccttttgatctgagagttgcaaagttccataaagaatggcccttgtggataagcacaaagtcaagagacagcgattggacagaatttgtgaaggtatccgcccccagatcatgaacggccccctgcacccccgccccctggtggcgctgctggacggccgcgactgcactgtggagatgcccatcctgaaggacctggccactgtggccttctgtgacgcgcagtcgacgcaggaaatccacgagaaggttctaaacgaagccgtgggcgccatgatgtaccacaccatcaccctcaccagggaggacctggagaagttcaaggccctgagagtgatcgtgcggataggcagtggctatgacaacgtggacatcaaggctgccggcgagctcggaattgccgtgtgcaacatcccgtctgcagccgtggaagagacagcggactctaccatctgccacatcctcaacctgtaccggaggaacacgtggctgtaccaggcactgcgggaaggcacgcgggttcagagcgtggagcagatccgcgaggtggcctcgggagcggcccgcatccgtggggagacgctgggcctcattggctttggtcgcacggggcaggcggttgcagttcgagccaaggcctttggattcagcgtcatattttatgacccctacttgcaggatgggatcgagcggtccctgggcgtgcagagggtctacaccctgcaggatttgctgtatcagagcgactgcgtctccttgcactgcaatctcaacgaacataaccaccacctcatcaatgactttaccataaagcagatgaggcagggagcattccttgtgaacgcagcccgtggcggcctggtggacgagaaagccttagcacaagccctcaaggagggcaggatacgaggggcagccctcgacgtgcatgagtcagagcccttcagctttgctcagggtccgttgaaagatgccccgaatctcatctgcactcctcacactgcctggtacagtgagcaggcgtcactggagatgagggaggcagctgccaccgagatccgccgagccatcacaggtcgcatcccagaaagcttaagaaattgtgtgaacaaggaattctttgtcacatcagcgccttggtcagtaatagaccagcaagcaattcatcctgtgacttgagtcccttaagtctacaggggctggtgacctctttttgctaataggaaaatcacattactacaaaatggggagaaaactgtttgcctgtggtagacacctgcacgcataggattgaagacagtacaggctgctgtacagagaagcgcctctcacatctgaactgcatactgagcgggcaagtcggttgtaagttcagtaaaaccctctgatgatgcaaaaaaaaaaaaaaaagtattaagtttcacaagctgtttgtactcaaatatattttctcagtttcagatcctctgctattttattgagtggaaagtcttgagctaaaagggttcaagaagaataatgttgcatttccttatgtctcaggaaacactttttatggtaacttgtcagattgtctatgaacaaacccacttttttagacattgataaagtcttcttttcttcacgtgatattttatacaagaacacttcagatgtattagatgtgactgattttaacaaatcctattagatttgtatcaactagttacatgttctattcatagtcttttgtgaatcattgcctttttgtttaaaaagatggcctattttgagcctttgtataggtacattcctgtttttgtgacaaaagaaaaactttaaaattgtcccaaacagaaaaataatggctatcagaagtatgttttgttttagtgtgagttaccgttactgtatttgtttattgtaaaggtggacatttagcgttcagtgcagttttcaataaaaagtaattaaaatttgttaagttctgaaattcaagtacatctcactaatgtaaatgttctctacttgagatgtttaaggcagttgcattgtcaattagccaatttccagctcttgttactacagggttccataaccagactcaagaccgctgacaattaattacctgtgataacaaaaagtttaattgaaaaatcaaaacctcacacaagtccatcattatcacgtcatgccgtccttaagatgcaatggtgggttagtgctaaatcaattcaaaaaaaaacaaagttgctcaacttttagagttctgactttaatctaccccaaagcaaaatgacctggacctggttcaagggagggaagtgaaccttgaaactgttttgccaataacctaacaaacaaaatgatatttacaaagaagtgttgcaaatagtcccatgagttaagagcttgatttaatggatcttctttttaaatagaattaaacctttatactaaaagtatttgcaagtgtcaattaagtccaacaattccaggtatgaaactccctctgagctcttccttatacttcccttcccaattaaaacaaaacaagaaaatcatggtgtcttaaagcctttggcttgcctggccttgtctgctcactcattttaaggtggtggccccatcccaactctaccataaaagtgtctattaacacaagctcacatggagagagacggcgctcatagttactgacctattaccccagggaacaaaaaaggtagtttaacgtcttcgtaaccactcatcaaagaggcaatgaaatatgcgtgaaaaggaggccaagcgcacacagaatatcttaccttcacgaatatgtgaagaagtctgggacacgatgaacctaagagtcaaaaacataaaaggcaggtctgaatccatggtccacctgggttttaattattagatcttggtcgcccaaacaaaaatttatatatatatatataaatttgaccccaaggaagaacaagtcaaaacaaaatgccacgctctgtttgctctagaaaaagaaccatcaagtccacagagtgcaggtatgacttactctccagagtcagtcattaatgtctgtcacctagccacgtataatcatctttgaaaaaggactatattctatcttgggacaataattatggctgttttaatagttcaagagcataatatagcattgatttaccaaaatttttggcctttaacagccagtctatgaaaaccatttagagccccattcctgtctgtagcctaggaaatggaaccatctttaattctttcccacagggaagaatgctgcacctatcacactatgtggtcagggtcactgattgataataaataaataaataatagagcgctcaggggaaacaacactcaccagaccacaacacacagtagaagctaagtgctgagcgtgtactctctggacaacgctggctgcaatgcagactgcaatggctacatgcttttccctctaacaattctctttggctttttcaattgggagggcagattttgcttaacaggcaactagaacaggatctctgcccactaaaaaattatccctatacatagagaaattactacagatgctaagtagtcagaatgctaacattttctacaaacttgattacttattggccaaaatgaaagcaaacagccaatttttaacaacacattcaccacttgaaacaaacagcagcatttacattatatcaaagattcatttctacagaatcgtactaaaaaatcatttttcctgcaagatttagcatgcagcaaaaaatgatcttttcatcctgggaacacctttttactgagttttcggggggaaagaactaaagacatgacagttttgtgggtatttttctatttttagtattctggcagcaaatttgaggttgtacacatttcattatcaactaaacaaaacaagaagcaagcaaatactttaaggttttcacagcctttttcatcacagggaaggaaaaaactgtgtgtgtgtgtgtgtgtgtgtgtgtggtgcgtgtgtgcgtgcgtgtgtcgtctttccaaattcctggccacatcaatagtctagaaagtgcttatcaggacaccaaatatttctgtgttcctgagataggtctgaaatttttacccagtattgaatgtatacctgaagtggtcaaataatacttcttataaaaaagttgttctacctaagattatagttttaactttaaattaaagaatggccacaattaaccaacatgcaaaaattctcagactaaacactgagaaattcttcatacaatgcatttgccaccttattgcatttttaaaatctttattctgtagtgaattggtattcccaatctgcctaagcaaaggcatgcccttctaacaagatttgcttagagcagaggtgatagaaggaagaatccgaagaccctctggcatggcaatctgggagcagcacattgttgatggagtccaagtgagcacatttcacacaattcatttagtgacaagtgggcttgctcccttttcatccaggaaaaaaactactcacagaccactgcccagaatctggaataagaaccctcattttaaggtattcttcccaacaaataaatatctaaatattgaaagggggcatatcagaaaacttaaaagacacaataaccaaaaccaaaaccctcttcaaaacaagtaagcaatgtctgtatttagttcactctaaaacattcttagcttttcttgcagtttgttcctaaaagatttgattgggcacaagaggaacgaaattgttaataaaataaaagcttatttttgttttgctgtggataatcggtacaaaacgtttccagatctgagacttagatggatcttttaaggtgaaaggagaatgccaggttctactgaaataatatctgaaaggaacaaagagccatttgccatgtgctttttctaagtgcccatgctggaaaaaattttctcaataatatgaagatgctggtacaacttttcctattaaacaatgtcttacacaaccacatgcgttacatttatagacagatttacaatttggaaggaaaaaaagttctgtcttaataaaattagttttttttacaaactgtagtccaactaaagttctctgtctcctcacgcagcagaggcattatctccataaggtgtgtgtggtccaggaaaacacttccccgagcagatcctgccagatttggttcattccatgatgtcgactctgcttggagcaccacactaactttagggtcattacagatctgatgccttggtcttctgctgtttgattttttttttcattcatcttcatcatcctcatcttcctctccatcagacagggatgtacacggccggatctgtcggtagcggtcaagccatttttctaccatctgagtgaccagggggtgatttcgccgccgagaactcttctgcatggcaaccagaactcccccctccgtcacacagcagtccagccactccctgagcagtttttcttgctgttcctcattacctagctcctgagcagaaaggaagtgcacatggagtagcttcctttcactgtcaaccagaggcaaaaatgtgatggtgacatcatcatcggtattgagattagcaccagcacctcggttgccatagccatcattttccatggcaaccaaagcagagaagtggcccctcgtataacccagagcaatcggacttttccaacaaaaactctgttcccacaacaaaggcagataaacaccttgaaaccgagtatatcctaaagtttctccccggaaactcttgtaatattttactccataaactataattggtcgtctaagaatatgtgccagtacaaaaatgtgcgtctgctccaagcttgctccaggctgactagcaagagagagtataaatgcccagtcttcttgccattgttcttctctcaaggaaaaatgtaaaccaaagctctgagaataccatgattcccaatctttccagcgtgtgtaaaaccaatgtgaacagtcatgcaggctgtcatgcagggctttccgaagcactgagtccttgtcatagatgccccaggtagcttgtagaactgaatcaagtaggcagtctcctgcagtccggttccaaagtgcatacagtcgactgtccaaacgtgtagccaattccaaggaccagttaataattggagattcttcttctaattctttttgaacgtctctatcaagcacctcatcaaataatttttcttggactgttgggggcaaatcttcaatatctgctggcaatgtaaatgttacaaggtcagtcagaatatagcaagcaaaatccccctttctctgatgaagagaggcagctatctctctccggatttgttctgtcagttcaggacacaccattgctggaatacactttgctgcttgttgagacacctctgtaagcaatattgctagcatatcctgcctctgaaaacgtatagccaagtgtacaagagtatagccaacatcaaaggcagaaggacgattcagcaagcgtacttcatctgcggtgagctgacgtgcaatgtctcctcctgatgacttgtatgcttctatggcagctaaatcaccttctacaacccccacacaagcattgaggaagagccaatcagtctttttcatcctgtttttaatttgctttagttttttaaagtctacttcaagttcctccttgcttcccacagcaccagccaattcaatcctctgaaaatccattttcacttcagagtcccgcttcgtagcaggaggtgatctcctttggctattaccactactgcaacttcccctccatcgagctctgtcttgctcatttattattgaagaagcctcttcagtctctgccaattctattgcttcaatgttattaggtctgggatgatcacaaacaacacatcttttagccttggcccagttttcatatgtgcaaacagagcaagtccagtgctgtgtcctagtgttcagtttatttctatcattgtattcctcacaaggatcaacagaaaaagcaactggtcttgagccagatcctgaggactgaggagattctgtaggactcctggtcctacgttgggataagcactgggtacatctgattgctcttggccagttcaaatatgtacacatgtggcatgaccacttatttgcattttccatgctatacgaagatttcacccttggtcttgcactagagtctggacatatcaaaggactacttcctccttcggtgctggaaggatcccaatctctaccaacatcacttgaaccacttttaaatggatcttctgtaataattgttccactaggtctttgggcacgacacatagtacacttgattgcagatggccagttttcatacgtacaatattcacaagcccacttaattccacgttctgacattgtgcacttcttgaagtgagctgtgtcaggcaggaagctataaataattaggacatggttattaaaataactacattccacctccaaaaatacgctgcccaaaaagcaagtccttcaacctacaaaatataaatttctcaaaagatgcatgcaacatttcgacattgaattatcctaattttcttttttaatttccatagaaacactggagataaattctcaaagaaaaaatcttagaccctgggatttaataaaactgaactttggaatgcaaaagagataggcaggagatataacgaggtttgatctaagaaggatgagattaacgggaagccactaatagaaatgtttaatttcagggaggccatcaccccgcgtactctgcgttgttaccactgcttaagcc

SEQ ID NO: 736642 - DNA, 8604 bp, Homo sapiens
ggtgagcgagcggcgaccctcacctcgcctcccgcctagctcctgcgcagccagcgggtaccgggagctgcggccagcgccgcttctttcctttccttttctctccgttttccttctccttccccggaggagaaaacaaataaagaagagcaaatagccgggaggcgctcggcatccaggacgttccctcccccgatccaagttggaattagcatcctctcggggggttcatagtggcgtcatgcacgcagactcctgcaagttcccctaagttcttagaggactgctttgccttttgatctgagagttgcaaagttccataaagaatggcccttgtggataagcacaaagtcaagagacagcgattggacagaatttgtgaaggtatccgcccccagatcatgaacggccccctgcacccccgccccctggtggcgctgctggacggccgcgactgcactgtggagatgcccatcctgaaggacctggccactgtggccttctgtgacgcgcagtcgacgcaggaaatccacgagaaggttctaaacgaagccgtgggcgccatgatgtaccacaccatcaccctcaccagggaggacctggagaagttcaaggccctgagagtgatcgtgcggataggcagtggctatgacaacgtggacatcaaggctgccggcgagctcggaattgccgtgtgcaacatcccgtctgcagccgtggaagagacagcggactctaccatctgccacatcctcaacctgtaccggaggaacacgtggctgtaccaggcactgcgggaaggcacgcgggttcagagcgtggagcagatccgcgaggtggcctcgggagcggcccgcatccgtggggagacgctgggcctcattggctttggtcgcacggggcaggcggttgcagttcgagccaaggcctttggattcagcgtcatattttatgacccctacttgcaggatgggatcgagcggtccctgggcgtgcagagggtctacaccctgcaggatttgctgtatcagagcgactgcgtctccttgcactgcaatctcaacgaacataaccaccacctcatcaatgactttaccataaagcagatgaggcagggagcattccttgtgaacgcagcccgtggcggcctggtggacgagaaagccttagcacaagccctcaaggagggcaggatacgaggggcagccctcgacgtgcatgagtcagagcccttcagctttgctcagggtccgttgaaagatgccccgaatctcatctgcactcctcacactgcctggtacagtgagcaggcgtcactggagatgagggaggcagctgccaccgagatccgccgagccatcacagatatccgccaggcatcgtgggtgtggctccaggaggacttcctgcagccatggaagggatcatccctggaggcatcccagtgactcacaacctcccgacagtggcacatccttcccaagcgccctctcccaaccagcccacaaaacacggggacaatcgagagcaccccaacgagcaatagcagagaatgccagaaggtaatcactcagatacacttgggaccaagagacagtgaaaaatagatgaactaagagaaaaagaatcggatggtctttgtaactgattctggacatatgcatcattgatgttgcagtgttgaaactacaagagctagaaaactgaagatgtcgtctgcttacggaagcgctgaaagactaggatgtgatttattaacgaccaacttctgttattgtgtgttaagtttttcatctgtgcatcaaatcacaaaaagaataaatagagctttttcctttatcagtcccttgggcacagcaggtcctgaacaccctgctctacaatgttgcatcaagagttcaaacaacaaaataaaaaatattaagaggaaatccccatcctgtgacttgagtcccttaagtctacaggggctggtgacctctttttgctaataggaaaatcacattactacaaaatggggagaaaactgtttgcctgtggtagacacctgcacgcataggattgaagacagtacaggctgctgtacagagaagcgcctctcacatctgaactgcatactgagcgggcaagtcggttgtaagttcagtaaaaccctctgatgatgcaaaaaaaaaaaaaaaagtattaagtttcacaagctgtttgtactcaaatatattttctcagtttcagatcctctgctattttattgagtggaaagtcttgagctaaaagggttcaagaagaataatgttgcatttccttatgtctcaggaaacactttttatggtaacttgtcagattgtctatgaacaaacccacttttttagacattgataaagtcttcttttcttcacgtgatattttatacaagaacacttcagatgtattagatgtgactgattttaacaaatcctattagatttgtatcaactagttacatgttctattcatagtcttttgtgaatcattgcctttttgtttaaaaagatggcctattttgagcctttgtataggtacattcctgtttttgtgacaaaagaaaaactttaaaattgtcccaaacagaaaaataatggctatcagaagtatgttttgttttagtgtgagttaccgttactgtatttgtttattgtaaaggtggacatttagcgttcagtgcagttttcaataaaaagtaattaaaatttgttaagttctgaaattcaagtacatctcactaatgtaaatgttctctacttgagatgtttaaggcagttgcattgtcaattagccaatttccagctcttgttactacagggttccataaccagactcaagaccgctgacaattaattacctgtgataacaaaaagtttaattgaaaaatcaaaacctcacacaagtccatcattatcacgtcatgccgtccttaagatgcaatggtgggttagtgctaaatcaattcaaaaaaaaacaaagttgctcaacttttagagttctgactttaatctaccccaaagcaaaatgacctggacctggttcaagggagggaagtgaaccttgaaactgttttgccaataacctaacaaacaaaatgatatttacaaagaagtgttgcaaatagtcccatgagttaagagcttgatttaatggatcttctttttaaatagaattaaacctttatactaaaagtatttgcaagtgtcaattaagtccaacaattccaggtatgaaactccctctgagctcttccttatacttcccttcccaattaaaacaaaacaagaaaatcatggtgtcttaaagcctttggcttgcctggccttgtctgctcactcattttaaggtggtggccccatcccaactctaccataaaagtgtctattaacacaagctcacatggagagagacggcgctcatagttactgacctattaccccagggaacaaaaaaggtagtttaacgtcttcgtaaccactcatcaaagaggcaatgaaatatgcgtgaaaaggaggccaagcgcacacagaatatcttaccttcacgaatatgtgaagaagtctgggacacgatgaacctaagagtcaaaaacataaaaggcaggtctgaatccatggtccacctgggttttaattattagatcttggtcgcccaaacaaaaatttatatatatatatataaatttgaccccaaggaagaacaagtcaaaacaaaatgccacgctctgtttgctctagaaaaagaaccatcaagtccacagagtgcaggtatgacttactctccagagtcagtcattaatgtctgtcacctagccacgtataatcatctttgaaaaaggactatattctatcttgggacaataattatggctgttttaatagttcaagagcataatatagcattgatttaccaaaatttttggcctttaacagccagtctatgaaaaccatttagagccccattcctgtctgtagcctaggaaatggaaccatctttaattctttcccacagggaagaatgctgcacctatcacactatgtggtcagggtcactgattgataataaataaataaataatagagcgctcaggggaaacaacactcaccagaccacaacacacagtagaagctaagtgctgagcgtgtactctctggacaacgctggctgcaatgcagactgcaatggctacatgcttttccctctaacaattctctttggctttttcaattgggagggcagattttgcttaacaggcaactagaacaggatctctgcccactaaaaaattatccctatacatagagaaattactacagatgctaagtagtcagaatgctaacattttctacaaacttgattacttattggccaaaatgaaagcaaacagccaatttttaacaacacattcaccacttgaaacaaacagcagcatttacattatatcaaagattcatttctacagaatcgtactaaaaaatcatttttcctgcaagatttagcatgcagcaaaaaatgatcttttcatcctgggaacacctttttactgagttttcggggggaaagaactaaagacatgacagttttgtgggtatttttctatttttagtattctggcagcaaatttgaggttgtacacatttcattatcaactaaacaaaacaagaagcaagcaaatactttaaggttttcacagcctttttcatcacagggaaggaaaaaactgtgtgtgtgtgtgtgtgtgtgtgtgtggtgcgtgtgtgcgtgcgtgtgtcgtctttccaaattcctggccacatcaatagtctagaaagtgcttatcaggacaccaaatatttctgtgttcctgagataggtctgaaatttttacccagtattgaatgtatacctgaagtggtcaaataatacttcttataaaaaagttgttctacctaagattatagttttaactttaaattaaagaatggccacaattaaccaacatgcaaaaattctcagactaaacactgagaaattcttcatacaatgcatttgccaccttattgcatttttaaaatctttattctgtagtgaattggtattcccaatctgcctaagcaaaggcatgcccttctaacaagatttgcttagagcagaggtgatagaaggaagaatccgaagaccctctggcatggcaatctgggagcagcacattgttgatggagtccaagtgagcacatttcacacaattcatttagtgacaagtgggcttgctcccttttcatccaggaaaaaaactactcacagaccactgcccagaatctggaataagaaccctcattttaaggtattcttcccaacaaataaatatctaaatattgaaagggggcatatcagaaaacttaaaagacacaataaccaaaaccaaaaccctcttcaaaacaagtaagcaatgtctgtatttagttcactctaaaacattcttagcttttcttgcagtttgttcctaaaagatttgattgggcacaagaggaacgaaattgttaataaaataaaagcttatttttgttttgctgtggataatcggtacaaaacgtttccagatctgagacttagatggatcttttaaggtgaaaggagaatgccaggttctactgaaataatatctgaaaggaacaaagagccatttgccatgtgctttttctaagtgcccatgctggaaaaaattttctcaataatatgaagatgctggtacaacttttcctattaaacaatgtcttacacaaccacatgcgttacatttatagacagatttacaatttggaaggaaaaaaagttctgtcttaataaaattagttttttttacaaactgtagtccaactaaagttctctgtctcctcacgcagcagaggcattatctccataaggtgtgtgtggtccaggaaaacacttccccgagcagatcctgccagatttggttcattccatgatgtcgactctgcttggagcaccacactaactttagggtcattacagatctgatgccttggtcttctgctgtttgattttttttttcattcatcttcatcatcctcatcttcctctccatcagacagggatgtacacggccggatctgtcggtagcggtcaagccatttttctaccatctgagtgaccagggggtgatttcgccgccgagaactcttctgcatggcaaccagaactcccccctccgtcacacagcagtccagccactccctgagcagtttttcttgctgttcctcattacctagctcctgagcagaaaggaagtgcacatggagtagcttcctttcactgtcaaccagaggcaaaaatgtgatggtgacatcatcatcggtattgagattagcaccagcacctcggttgccatagccatcattttccatggcaaccaaagcagagaagtggcccctcgtataacccagagcaatcggacttttccaacaaaaactctgttcccacaacaaaggcagataaacaccttgaaaccgagtatatcctaaagtttctccccggaaactcttgtaatattttactccataaactataattggtcgtctaagaatatgtgccagtacaaaaatgtgcgtctgctccaagcttgctccaggctgactagcaagagagagtataaatgcccagtcttcttgccattgttcttctctcaaggaaaaatgtaaaccaaagctctgagaataccatgattcccaatctttccagcgtgtgtaaaaccaatgtgaacagtcatgcaggctgtcatgcagggctttccgaagcactgagtccttgtcatagatgccccaggtagcttgtagaactgaatcaagtaggcagtctcctgcagtccggttccaaagtgcatacagtcgactgtccaaacgtgtagccaattccaaggaccagttaataattggagattcttcttctaattctttttgaacgtctctatcaagcacctcatcaaataatttttcttggactgttgggggcaaatcttcaatatctgctggcaatgtaaatgttacaaggtcagtcagaatatagcaagcaaaatccccctttctctgatgaagagaggcagctatctctctccggatttgttctgtcagttcaggacacaccattgctggaatacactttgctgcttgttgagacacctctgtaagcaatattgctagcatatcctgcctctgaaaacgtatagccaagtgtacaagagtatagccaacatcaaaggcagaaggacgattcagcaagcgtacttcatctgcggtgagctgacgtgcaatgtctcctcctgatgacttgtatgcttctatggcagctaaatcaccttctacaacccccacacaagcattgaggaagagccaatcagtctttttcatcctgtttttaatttgctttagttttttaaagtctacttcaagttcctccttgcttcccacagcaccagccaattcaatcctctgaaaatccattttcacttcagagtcccgcttcgtagcaggaggtgatctcctttggctattaccactactgcaacttcccctccatcgagctctgtcttgctcatttattattgaagaagcctcttcagtctctgccaattctattgcttcaatgttattaggtctgggatgatcacaaacaacacatcttttagccttggcccagttttcatatgtgcaaacagagcaagtccagtgctgtgtcctagtgttcagtttatttctatcattgtattcctcacaaggatcaacagaaaaagcaactggtcttgagccagatcctgaggactgaggagattctgtaggactcctggtcctacgttgggataagcactgggtacatctgattgctcttggccagttcaaatatgtacacatgtggcatgaccacttatttgcattttccatgctatacgaagatttcacccttggtcttgcactagagtctggacatatcaaaggactacttcctccttcggtgctggaaggatcccaatctctaccaacatcacttgaaccacttttaaatggatcttctgtaataattgttccactaggtctttgggcacgacacatagtacacttgattgcagatggccagttttcatacgtacaatattcacaagcccacttaattccacgttctgacattgtgcacttcttgaagtgagctgtgtcaggcaggaagctataaataattaggacatggttattaaaataactacattccacctccaaaaatacgctgcccaaaaagcaagtccttcaacctacaaaatataaatttctcaaaagatgcatgcaacatttcgacattgaattatcctaattttcttttttaatttccatagaaacactggagataaattctcaaagaaaaaatcttagaccctgggatttaataaaactgaactttggaatgcaaaagagataggcaggagatataacgaggtttgatctaagaaggatgagattaacgggaagccactaatagaaatgtttaatttcagggaggccatcaccccgcgtactctgcgttgttaccactgcttaagcc

SEQ ID NO: 736643 - DNA, 1256 bp, Homo sapiens
ggtgagcgagcggcgaccctcacctcgcctcccgcctagctcctgcgcagccagcgggtaccgggagctgcggccagcgccgcttctttcctttccttttctctccgttttccttctccttccccggaggagaaaacaaataaagaagagcaaatagccgggaggcgctcggcatccaggacgttccctcccccgatccaagttggaattagcatcctctcggggggttcatagtggcgtcatgcacgcagactcctgcaagttcccctaagttcttagaggactgctttgccttttgatctgagagttgcaaagttccataaagaatggcccttgtggataagcacaaagtcaagagacagcgattggacagaatttgtgaaggtatccgcccccagatcatgaacggccccctgcacccccgccccctggtggcgctgctggacggccgcgactgcactgtggagatgcccatcctgaaggacctggccactgtggccttctgtgacgcgcagtcgacgcaggaaatccacgagaaggttctaaacgaagccgtgggcgccatgatgtaccacaccatcaccctcaccagggaggacctggagaagttcaaggccctgagagtgatcgtgcggataggcagtggctatgacaacgtggacatcaaggctgccggcgagctcggaattgccgtgtgcaacatcccgtctgcagccgtggaagagacagcggactctaccatctgccacatcctcaacctgtaccggaggaacacgtggctgtaccaggcactgcgggaaggcacgcgggttcagagcgtggagcagatccgcgaggtggcctcgggagcggcccgcatccgtggggagacgctgggcctcattggctttggtcgcacggggcaggcggttgcagttcgagccaaggcctttggattcagcgtcatattttatgacccctacttgcaggatgggatcgagcggtccctgggcgtgcagagggtctacaccctgcaggatttgctgtatcagagcgactgcgtctccttgcactgcaatctcaacgaacataaccaccacctcatcaatgactttaccataaagcagatgaggcagggagcattccttgtgaacgcagcccgtggcggcctggtggacgagaaagccttagcacaagccctcaaggagggcagatgagattcgggcatctttcaacgacatgacaaagtgaaggctctactatgcacgtcaggcgcg

SEQ ID NO: 736644 - DNA, 6867 bp, Homo sapiens
ggtgagcgagcggcgaccctcacctcgcctcccgcctagctcctgcgcagccagcgggtaccgggagctgcggccagcgccgcttctttcctttccttttctctccgttttccttctccttccccggaggagaaaacaaataaagaagagcaaatagccgggaggcgctcggcatccaggacgttccctcccccgatccaagttggaattagcatcctctcggggggttcatagtggcgtcatgcacgcagactcctgcaagttcccctaagttcttagaggactgctttgccttttgatctgagagttgcaaagttccataaagaatggcccttgtggataagcacaaagtcaagagacagcgattggacagaatttgtgaaggtatccgcccccagatcatgaacggccccctgcacccccgccccctggtggcgctgctggacggccgcgactgcactgtggagatgcccatcctgaaggacctggccactgtggccttctgtgacgcgcagtcgacgcaggaaatccacgagaaggttctaaacgaagccgtgggcgccatgatgtaccacaccatcaccctcaccagggaggacctggagaagttcaaggccctgagagtgatcgtgcggataggcagtggctatgacaacgtggacatcaaggctgccggcgagctcggaattgccgtgtgcaacatcccgtctgcagccgtggaagagacagcggactctaccatctgccacatcctcaacctgtaccggaggaacacgtggctgtaccaggcactgcgggaaggcacgcgggttcagagcgtggagcagatccgcgaggtggcctcgggagcggcccgcatccgtggggagacgctgggcctcattggctttggatgggatcgagcggtccctgggcgtgcagagggtctacaccctgcaggatttgctgtatcagagcgactgcgtctccttgcactgcaatctcaacgaacataaccaccacctcatcaatgactttaccataaagcagatgaggcagggagcattccttgtgaacgcagcccgtggcggcctggtggacgagaaagccttagcacaagccctcaaggagggcaggatacgaggggcagccctcgacgtgcatgagtcagagcccttcagctttgctcagggtccgttgaaagatgccccgaatctcatctgcactcctcacactgcctggtacagtgagcaggcgtcactggagatgagggaggcagctgccaccgagatccgccgagccatcacaggtcgcatcccagaaagcttaagaaattgtgtgaacaaggaattctttgtcacatcagcgccttggtcagtaatagaccagcaagcaattcatcctgagctcaatggtgccacatacagatatccgccaggcatcgtgggtgtggctccaggaggacttcctgcagccatggaagggatcatccctggaggcatcccagtgactcacaacctcccgacagtggcacatccttcccaagcgccctctcccaaccagcccacaaaacacggggacaatcgagagcaccccaacgagcaatagcagagaatgccagaaggtaatcactcagatacacttgggaccaagagacagtgaaaaatagatgaactaagagaaaaagaatcggatggtctttgtaactgattctggacatatgcatcattgatgttgcagtgttgaaactacaagagctagaaaactgaagatgtcgtctgcttacggaagcgctgaaagactaggatgtgatttattaacgaccaacttctgttattgtgtgttaagtttttcatctgtgcatcaaatcacaaaaagaataaatagagctttttcctttatcagtcccttgggcacagcaggtcctgaacaccctgctctacaatgttgcatcaagagttcaaacaacaaaataaaaaatattaagaggaaatccccatcctgtgacttgagtcccttaagtctacaggggctggtgacctctttttgctaataggaaaatcacattactacaaaatggggagaaaactgtttgcctgtggtagacacctgcacgcataggattgaagacagtacaggctgctgtacagagaagcgcctctcacatctgaactgcatactgagcgggcaagtcggttgtaagttcagtaaaaccctctgatgatgcaaaaaaaaaaaaaaaagtattaagtttcacaagctgtttgtactcaaatatattttctcagtttcagatcctctgctattttattgagtggaaagtcttgagctaaaagggttcaagaagaataatgttgcatttccttatgtctcaggaaacactttttatggtaacttgtcagattgtctatgaacaaacccacttttttagacattgataaagtcttcttttcttcacgtgatattttatacaagaacacttcagatgtattagatgtgactgattttaacaaatcctattagatttgtatcaactagttacatgttctattcatagtcttttgtgaatcattgcctttttgtttaaaaagatggcctattttgagcctttgtataggtacattcctgtttttgtgacaaaagaaaaactttaaaattgtcccaaacagaaaaataatggctatcagaagtatgttttgttttagtgtgagttaccgttactgtatttgtttattgtaaaggtggacatttagcgttcagtgcagttttcaataaaaagtaattaaaatttgttaagttctgaaattcaagtacatctcactaatgtaaatgttctctacttgagatgtttaaggcagttgcattgtcaattagccaatttccagctcttgttactacagggttccataaccagactcaagaccgctgacaattaattacctgtgataacaaaaagtttaattgaaaaatcaaaacctcacacaagtccatcattatcacgtcatgccgtccttaagatgcaatggtgggttagtgctaaatcaattcaaaaaaaaacaaagttgctcaacttttagagttctgactttaatctaccccaaagcaaaatgacctggacctggttcaagggagggaagtgaaccttgaaactgttttgccaataacctaacaaacaaaatgatatttacaaagaagtgttgcaaatagtcccatgagttaagagcttgatttaatggatcttctttttaaatagaattaaacctttatactaaaagtatttgcaagtgtcaattaagtccaacaattccaggtatgaaactccctctgagctcttccttatacttcccttcccaattaaaacaaaacaagaaaatcatggtgtcttaaagcctttggcttgcctggccttgtctgctcactcattttaaggtggtggccccatcccaactctaccataaaagtgtctattaacacaagctcacatggagagagacggcgctcatagttactgacctattaccccagggaacaaaaaaggtagtttaacgtcttcgtaaccactcatcaaagaggcaatgaaatatgcgtgaaaaggaggccaagcgcacacagaatatcttaccttcacgaatatgtgaagaagtctgggacacgatgaacctaagagtcaaaaacataaaaggcaggtctgaatccatggtccacctgggttttaattattagatcttggtcgcccaaacaaaaatttatatatatatatataaatttgaccccaaggaagaacaagtcaaaacaaaatgccacgctctgtttgctctagaaaaagaaccatcaagtccacagagtgcaggtatgacttactctccagagtcagtcattaatgtctgtcacctagccacgtataatcatctttgaaaaaggactatattctatcttgggacaataattatggctgttttaatagttcaagagcataatatagcattgatttaccaaaatttttggcctttaacagccagtctatgaaaaccatttagagccccattcctgtctgtagcctaggaaatggaaccatctttaattctttcccacagggaagaatgctgcacctatcacactatgtggtcagggtcactgattgataataaataaataaataatagagcgctcaggggaaacaacactcaccagaccacaacacacagtagaagctaagtgctgagcgtgtactctctggacaacgctggctgcaatgcagactgcaatggctacatgcttttccctctaacaattctctttggctttttcaattgggagggcagattttgcttaacaggcaactagaacaggatctctgcccactaaaaaattatccctatacatagagaaattactacagatgctaagtagtcagaatgctaacattttctacaaacttgattacttattggccaaaatgaaagcaaacagccaatttttaacaacacattcaccacttgaaacaaacagcagcatttacattatatcaaagattcatttctacagaatcgtactaaaaaatcatttttcctgcaagatttagcatgcagcaaaaaatgatcttttcatcctgggaacacctttttactgagttttcggggggaaagaactaaagacatgacagttttgtgggtatttttctatttttagtattctggcagcaaatttgaggttgtacacatttcattatcaactaaacaaaacaagaagcaagcaaatactttaaggttttcacagcctttttcatcacagggaaggaaaaaactgtgtgtgtgtgtgtgtgtgtgtgtgtggtgcgtgtgtgcgtgcgtgtgtcgtctttccaaattcctggccacatcaatagtctagaaagtgcttatcaggacaccaaatatttctgtgttcctgagataggtctgaaatttttacccagtattgaatgtatacctgaagtggtcaaataatacttcttataaaaaagttgttctacctaagattatagttttaactttaaattaaagaatggccacaattaaccaacatgcaaaaattctcagactaaacactgagaaattcttcatacaatgcatttgccaccttattgcatttttaaaatctttattctgtagtgaattggtattcccaatctgcctaagcaaaggcatgcccttctaacaagatttgcttagagcagaggtgatagaaggaagaatccgaagaccctctggcatggcaatctgggagcagcacattgttgatggagtccaagtgagcacatttcacacaattcatttagtgacaagtgggcttgctcccttttcatccaggaaaaaaactactcacagaccactgcccagaatctggaataagaaccctcattttaaggtattcttcccaacaaataaatatctaaatattgaaagggggcatatcagaaaacttaaaagacacaataaccaaaaccaaaaccctcttcaaaacaagtaagcaatgtctgtatttagttcactctaaaacattcttagcttttcttgcagtttgttcctaaaagatttgattgggcacaagaggaacgaaattgttaataaaataaaagcttatttttgttttgctgtggataatcggtacaaaacgtttccagatctgagacttagatggatcttttaaggtgaaaggagaatgccaggttctactgaaataatatctgaaaggaacaaagagccatttgccatgtgctttttctaagtgcccatgctggaaaaaattttctcaataatatgaagatgctggtacaacttttcctattaaacaatgtcttacacaaccacatgcgttacatttatagacagatttacaatttggaaggaaaaaaagttctgtcttaataaaattagttttttttacaaactgtagtccaactaaagttctctgtctcctcacgcagcagaggcattatctccataaggtgtgtgtggtccaggaaaacacttccccgagcagatcctgccagatttggttcattccatgatgtcgactctgcttggagcaccacactaactttagggtcattacagatctgatgccttggtcttctgctgtttgattttttttttcattcatcttcatcatcctcatcttcctctccatcagacagggatgtacacggccggatctgtcggtagcggtcaagccatttttctaccatctgagtgaccagggggtgatttcgccgccgagaactcttctgcatggcaaccagaactcccccctccgtcacacagcagtccagccactccctgagcagtttttcttgctgttcctcattacctagcttttggaggaatatgaagacaaagggaaaatcatacaacagatcagagacttggtaggaatgtgacatggaaacctacagctggtatgctaactcatgaaaaggccaaagcaatcaacttttcacatggttttgacctcttggaagttttgtgattaaagtccagtttgctctggttaaatttaaaaagacataaatgggaaatttctcagaaaaaaactaaagaggagcacactagagggtaatttgttagataaaataaaaaacaaatgtcctaataaactgatcctggcaagccacagcttcaaacacatgacaaggtaagtttacttagtcaattatgtacaagctgaaattacacaagttacggtctatgaactttttttcttcatgttgtgattataaacgttttataattactagtatattaaataaaagaccaatacttttataagaatactggctttctgaaagagcgttgtttttgtaccttctcaccacctcccctgtctggtctacagcaccctttcactccc

SEQ ID NO: 736645 - DNA, 720 bp, Homo sapiens
ctacattcccaaggctgatttccaacgactcaccggtagccatatggattactatttaagataactgaagacgactgtatcattgagattaagaccacagactcagaaaaaggaatagaaaataaacaacaacaaaaaccaaagaaacaaaaacaaacaaaaaagatcacacagtctgaaaaggaatgcttgggttcaatcccaaatccacctcttactatcagttgaataacttcgggaaagtatttaataacataaactctgcctaatttcctcataacaaaataacaagacctacttcatcaatagctatggtccacagacgaatgccttaaaatcaaagtggtaagatgttattggtaatactcatttccaagtagttttcctacccactctcacatttattcaacaaatatttcatcatttttcagtagtaacttactgagtgacggaaacttgattaactgaaaggacagaaaatggaacaacaaagtgcgttcaagagcaggtacctggggctatgctgggagaagccaagaagtccctccttcctcctctttgcaaattcggaggcggtgaataaaaggatgctgtcagcacgatggagtctctatcccggataaacggcggtaaacatccccacgcattggagcccgatgactcaatcctcccggacccaaaagatggtggcggcctcgctttccggggcggaagtcggct

SEQ ID NO: 736646 - DNA, 722 bp, Homo sapiens; identical to SEQ ID NO: 262127

SEQ ID NO: 736647 - DNA, 1468 bp, Homo sapiens
ttccgctccaggaaggcgaggtcggatctgagatatctcccagggaggttcacttccccggaactctgccttttcccagaaggaggaggggaaaaatgaccaagttccaggaggcagtgacattcaaggatgtggctgtggccttcactgaggaggagctggggctgctggactctgcccagaggaagctgtaccgagatgtgatgctggagaactttaggaacctggtttcagtgggacatcagtccttcaaaccagatatgatatcccagttggagagggaagaaaagctttggatgaaggagcttcaaacccaaagaggtaagcattcagaaacctgaatagagtcaccttgtaataactgggaactcttcccctgaagacacctggttaattcacttgcaacctgtttccagatttgccagcaggacagctcttgatttgaaagggttttgcaactgcagcactactattttggactggccaattctctgttgggggcactgtcctgtgcactgtaggagattttgcagaattcctggatactacccacaaaatgccaatagcacccctctgtcaggtgtgacaaccatttccagacattgccaaatatcttctgggggcgaaatcacccatggttgagaaccagcaatttaaaaggacagaattttgcctgagcagaaagaccagaaaaacctatcctgttttcccagggattagaaaaccttttgtcttcaagagcaaagaaccattttaaaaggtccaaacccttaaacacctgagagcaaagagattctcaagggaactgaagttcagggtcagagagtgcctgtcctcacccactgcaaccaggttcttgaagttctccaccatgacatctcggtacagcttcctctgggtaagatcgagcagtcgcagttcctccctggagaagaccacagccacatccttgaatgtcacagcctcctacaatatcaaacacatgtaacctcaatcttacaaccaaccttcactagaagaagggtggcatcaagaaggaaaagagcaccacaaaaaagttgttatagattccaagagatctcagtcaattttcagctgttacagttttccctgtctcactatctcctacgctcatccccataaagcctgtagtttatcactgttttttgtttttttcttttttgagatggagtctcactctgtcacccgactccagcctgggtgacaggggtgagacactgtcttaaaataaataaatttttagaattaaaataaatagatcataaagtgtttgaaaggatcagatgaatgaatatatgtcaagcacttagaagtgcctagcacaccatacatgctcaataaactcgaacaacgcatatctttatcatctcttttgtcctattttgtgactacatacaacaggattccttggaactgaagatttatctctaaccaatccaaataatgt

SEQ ID NO: 736648 - DNA, 321 bp, Homo sapiens
gtctcgactgtcacccaggctggagtgcagtggcgcaatcttggctcactgcaacctccgcttctccagcctgggtgacaggggtgagacactgtcttaaaataaataaatttttagaattaaaataaatagatcataaagtgtttgaaaggatcagatgaatgaatatatgtcaagcacttagaagtgcctagcacaccatacatgctcaataaactcgaacaacgcatatctttatcatctcttttgtcctattttgtgactacatacaacaggattccttggaactgaagatttatctctaaccaatccaaataatgt

SEQ ID NO: 736649 - DNA, 2240 bp, Homo sapiens
ttttttttttacagaaaatttttagtaattttattcatttttcatagctttacagcttttatgaaaataatgatcactgtaagtataaaatgaaaattaaagaaaagggataataacccaaaactctccctggccaaaaaaccagttagcatatggcaaatatccttccacacattatcttcaggcatatattcacaatgaaaggtgatcatttatattaactagatcttaccaagagagccaccagccctatttctcccctaaatacgagttctattcctgttcatggttctgtgttatcatcttgatggatttgttagaaagattccaagtgtgaacaaacccccttccactctcagtagttttacagggtttaccaccagcatggactagccaaaaacttgaagatgtgcattcagacaaaagttggtaacacatttctcatttctaaagctttttaccagtatggactttctgatgatatgtaagacgtgaacggtgacggaagtccttatcacatatgtcacatttgtatggtttttctccagtgtggactctctgatgggcttcaagacgtgcactctgactgaagcctttaccacactcttcacatttaaagagtttttccctggtgtgaacacccaggtggactcgaagatttgaggggagactgaaggccttaccacactcctcacatatatggggtttctctcccgtgtggaccctctgatgatggcgaagattcaagctcctaccaaagcctttcccacactcttcacatttgtaaggtttttctccagtgtggcctctctgatggtatataaactgcgaactgtatctaaagccctttccacacacatcacatttgtatggcttttcccccgtgtggactctctgatgggattgaagaccagaggactgactgaagcccttaccacagacaccacatttgtatggcttctctccagtatggactctctgatgtacccgaaaatctatggcctgactgaagctcttatcacactgctcacatttatagggtttttctcctgagtgaactctttgatgtgcatgaagatttgatctccaactgaagcccttcccacattcctcacatttatatggtttttctccagtgtgaattacttggtgtagtttaagatttgaactataactgaagtccttaccacacacatcacatctatatggtttctctccagtgtggactcgctgatgggtttgaagctttgaggactgactgaagcccttcccacacgtttcacacttgaatcgtttctccccagtgtggacattctgatggacttgaagatttgaagcctgactgaagcccttaccacactccttacatttatagggtttctctcccgtgtgaactctgaaatgaatatgcagatctgtattacgggtaaagcctttcccacacgcctcacacttgtatggcttctctcctgtgtggactctccgatggcatattaatggtgaattgtggctgaagcccttaccacacacatcacacttgtagggtttctctccagtgtggactctctgatggatgtgaaaatgtgcagcctgagtgaagcccttaccacattcctcacatttatagggcttctcacccctgtggaccctctggtgaacacggagattaacactccaaccgaagcccttaccacactcttcgcatttgtatggtttttcttcagtgtggactcgctgatgttgaataaggctgctctttcgactataagatttcccacactctccacaatcataaggtccttctgcagtgtgatctcgctgatgattactgaagctgacatatctgctaaaggattttccaccatcactgcacacataacatccatctctagtgaaaagtttctggtgtggaataactgagtgtttggtgctgaaggcttttgtgcgttttccacaactgtaattagtttttccctcctgaaagggtgggccatgcatagtttcactgtctgtcttctctacagcagcttcttcttggcacaatcctgaactgggcagaacgtccttcccaaactcgcggaagacaaatggctcctgtgacaccctgagcttacgtttctttacaaacgatgcttctctgacactctttctgtagaatttctctccaatatgctgcttctggtgctgatgaaggtatgcagtgtcatccagttttttccacatgctccagtgtggagaga

SEQ ID NO: 736650 - DNA, 1534 bp, Homo sapiens
ttttttttttacagaaaatttttagtaattttattcatttttcatagctttacagcttttatgaaaataatgatcactgtaagtataaaatgaaaattaaagaaaagggataataacccaaaactctccctggccaaaaaaccagttagcatatggcaaatatccttccacacattatcttcaggcatatattcacaatgaaaggtgatcatttatattaactagatcttaccaagagagccaccagccctatttctcccctaaatacgagttctattcctgttcatggttctgtgttatcatcttgatggatttgttagaaagattccaagtgtgaacaaacccccttccactctcagtagttttacagggtttaccaccagcatggactagccaaaaacttgaagatgtgcattcagacaaaagttggtaacacatttctcatttctaaagctttttaccagtatggactttctgatgatatgtaagacgtgaacggtgacggaagtccttatcacatatgtcacatttgtatggtttttctccagtgtggactctctgatgggcttcaagacgtgcactctgactgaagcctttaccacactcttcacatttaaagagtttttccctggtgtgaacacccaggtggactcgaagatttgaggggagactgaaggccttaccacactcctcacatatatggggtttctctcccgtgtggaccctctgatgatggcgaagattcaagctcctaccaaagcctttcccacactcttcacatttgtaaggtttttctccagtgtggcctctctgatggtatataaactgcgaactgtatctaaagccctttccacacacatcacatttgtatggcttttcccccgtgtggactctctgatgggattgaagaccagaggactgactgaagcccttaccacagacaccacatttgtatggcttctctccagtatggactctctgatgtacccgaaaatctatggcctgactgaagctcttatcacactgctcacatttatagggtttttctcctgagtgaactctttgatgtgcatgaagatttgatctccaactgaagcccttcccacattcctcacatttatatggtttttctccagtgtgaattacttggtgtagtttaagatttgaactataactgaagtccttaccacacacatcacatctatatggtttctctccagtgtggactcgctgatgggtttgaagctttgaggactgactgaagcccttcccacacgtttcacacttgaatcgtttctccccagtgtggacattctgatggacttgaagatttgaagcctgactgaagcccttaccacactccttacatttatagggtttctctcccgttgtggactctctgatggcactgaaaatttgaactttgactaaagcatttaccacattcctcgcatttatagggtttctctccagtatgaagtctacaaatgttaagggttaactgctgattgaaggtcttgccacactcggggca

SEQ ID NO: 736651 - DNA, 3095 bp, Homo sapiens
  misc_feature (2255)..(2255): n is a, c, g, or t
tgtagactgcttggttttatgtgttttaattaaatgtcatttccttgaattcattttaaggcttcttgcaagaatccttttcccagtacaattataatgacgaattggggctgagctcactaaaatattcaaatatatgtcctatatatgatagatttttcctatcaagttaaacaattccagggaagccactatttcttaggtacttgttcaaggtcacgatcatgcagcagtaaacaatgttcctgcatggagcttagattctagtggacacagattttgtcatgtccctcattatacttttgctaaattctgaccttacttatcattttgaaggcttcactcctgcatattgcttattggatgtgaaggttctgattgaaacatattgtatcattctttatagggtttctctgttgtgtgttctcttgacaactgtgacattttgggctctgcttgaaactggtcatattcatacaaaaataggttttcttcaatggaattcagataactataaaaactcagctcatgaattcttaaaacatgacattttataaatattctgtgctgtgtggattttctgaggaaaatgggaagtctaagtcttgaagagcacccctatcacactcatcatgattaatagattcatcaccatcatggactctctgatgaatctgaagacaacgaactcttactaaagcccttaccacacacaaaacatttgtatggtttctctccagtatggactctctgatgggcttgaagatgtgaagtctgactgaagctcttaccacacatgccacatttatagggtttctctcccgtgtggatcctctgatgaacatgaagatatgagttccagatgaagcctttcctacattcttcacatttgtatggtttctctcctgtgtggactctctgatgggcttgaagatgtgaactccaactgaagcctttcccacacacatcacatttgtagggattctctccagtatggacttgctgatggtcttggagatgcgaactctgactaaagcccttcccacatgtctcacatttgtatggcttctctcctttgtgaactctctgatgggcctgaagatgagagatctgactgaagtccttcccacatgtgtcacatttgtagggtttctctcctgtatggactctctgatgggcctgaaggtgggaattacggctgaagttcttatcacacacatcacatttgtagggtttctctccagtgtggattctctgatgggcttgaagatttgaggccttactgaagcccttatcacatacctcacatttatatggtttctctccagtgtgaactctctggtgaagaccagaattcctattaaatatcctgtcacttacttcccatttgtatgtcttgtctctagagtgacctctctgatgggcttgaagttgtgatgtctgactgaagcctttatcatatacatcacatttacaggctctctctccagcactgtctacacagtgaatgtcaaaatctaagctatgatggaagcccttcccacacctgccacatgtacacaacttctctcctgggtgagtaagctcatgagagggaagacaggagttctggttggagctccgggcatatacctgacatctgtagaggttctctcctgtgctgactctctgatgaggttgcagatgtgagccctgactgaagccctcaccactgtcaccattcctatagcatttctctcctatgtggaaacactgatgcctgggaagccctgagctgtaacctatgcccttcccgtactcaacatttacatgaggcttgtctcttaagtgtagttgctggtgaagttcaagattagagccaacacttaagccttttccattttcatcagaggtttgctctcctgattggattatgctatgctgggatgattccttcacacagtcttttccacaattattgtggctaaaagctttctctcttttgtgtactccatgatcatcatgttgatgagcaattctttgcctaacacaatgatcacatttacagagcttattttttacatcaatttgctgacacctactctgataattctgtggttctctcagatacattttcctccagaaatcccaggtggtcctcaatggaagctcttgattttttatgctatttgaactctccccttgtagctttattacatagttctcatcttcagagacctgactagattctcctgtccacacctgacagggggaancaccttgttttagcaacttggacctcttgccttgaagatttattattaggtcttgattactggttaatttacttgtaaattgttcccatatttgccagcatataaggtcttcatatgaaaggaatcttaatcttacttcttgaagggtatctatctcattttgattcttgtgtcatgatctggctatgtggagaatggactggagggaggtagaaggaggaaggtcatgtgcaagctgctgcagtaaaccagggcgatgaattctggggtcttgggccaggctggtggctgaggaggtggtgaggaggagaggactaggctgtaccccgcaaagactcagagctccatggttctcacctgaacacccatctccttggatttctgtctccatcatccgaagcttgtcttcttttcccaactgtaatatcacatctagtttgaagggttgatagcccactgacagcaggttcctgaagttctccagcatcacatcttggtacagctttctctgggcaaggtccagcaaccccagctcctccctggtgaagaccacagccacatccttgaatgtcaccatctcctgaaacttggtcattttctcctgctccttctggggaagggcagggtcctgggaaggcagaactcccagaggggatagatgacggctgcttcgccctcctgcagcggaagtacacaaggttgcaacggcttctgcactacacttcccagaatgcccgagcggaaacaggctaccgcccttatgaatctaggtgctcctgtattgggtgcatatatatttaggatagttagctcttcttgttgcattgatctctttaccat

SEQ ID NO: 736652 - DNA, 412 bp, Homo sapiens
aaagcagttttccagggagtcagagccactgacagcaggttcctgaagttctccagcatcacatcttggtacagctttctctgggcaaggtccagcaaccccagctcctccctggtgaagaccacagccacatccttgaatgtcaccatctcctgaaacttggtcattttctcctgctccttctggggaagggcagggtcctgggaaggcagaactcccagaggggatagatgacggctgcttcgccctcctgcagcggaagtacacaaggttgcaacggcttctgcactacacttcccagaatgcccgagcggaaacaggctaccgcccttatgaatctaggtgctcctgtattgggtgcatatatatttaggatagttagctcttcttgttgcattgatctctttaccat

SEQ ID NO: 736653 - DNA, 3182 bp, Homo sapiens; identical to SEQ ID NO: 262122

SEQ ID NO: 736654 - DNA, 2540 bp, Homo sapiens
ttccgctccaggaaggcgaggtcggatctgagatatctcccagggaggttcacttccccggaactctgccttttcccagaaggaggaggggaaaaatgaccaagttccaggaggcagtgacattcaaggatgtggctgtggccttcactgaggaggagctggggctgctggactctgcccagaggaagctgtaccgagatgtgatgctggagaactttaggaacctggtttcagtgggacatcagtccttcaaaccagatatgatatcccagttggagagggaagaaaagctttggatgaaggagcttcaaacccaaagaggtaagcattcagggtttctctgttgtgtgttctcttgacaactgtgacattttgggctctgcttgaaactggtcatattcatacaaaaataggttttcttcaatggaattcagataactataaaaactcagctcatgaattcttaaaacatgacattttataaatattctgtgctgtgtggattttctgaggaaaatgggaagtctaagtcttgaagagcacccctatcacactcatcatgattaatagattcatcaccatcatggactctctgatgaatctgaagacaacgaactcttactaaagcccttaccacacacaaaacatttgtatggtttctctccagtatggactctctgatgggcttgaagatgtgaagtctgactgaagctcttaccacacatgccacatttatagggtttctctcccgtgtggatcctctgatgaacatgaagatatgagttccagatgaagcctttcctacattcttcacatttgtatggtttctctcctgtgtggactctctgatgggcttgaagatgtgaactccaactgaagcctttcccacacacatcacatttgtagggattctctccagtatggacttgctgatggtcttggagatgcgaactctgactaaagcccttcccacatgtctcacatttgtatggcttctctcctttgtgaactctctgatgggcctgaagatgagagatctgactgaagtccttcccacatgtgtcacatttgtagggtttctctcctgtatggactctctgatgggcctgaaggtgggaattacggctgaagttcttatcacacacatcacatttgtagggtttctctccagtgtggattctctgatgggcttgaagatttgaggccttactgaagcccttatcacatacctcacatttatatggtttctctccagtgtgaactctctggtgaagaccagaattcctattaaatatcctgtcacttacttcccatttgtatgtcttgtctctagagtgacctctctgatgggcttgaagttgtgatgtctgactgaagcctttatcatatacatcacatttacaggctctctctccagcactgtctacacagtgaatgtcaaaatctaagctatgatggaagcccttcccacacctgccacatgtacacaacttctctcctgggtgagtaagctcatgagagggaagacaggagttctggttggagctccgggcatatacctgacatctgtagaggttctctcctgtgctgactctctgatgaggttgcagatgtgagccctgactgaagccctcaccactgtcaccattcctatagcatttctctcctatgtggaaacactgatgcctgggaagccctgagctgtaacctatgcccttcccgtactcaacatttacatgaggcttgtctcttaagtgtagttgctggtgaagttcaagattagagccaacacttaagccttttccattttcatcagaggtttgctctcctgattggattatgctatgctgggatgattccttcacacagtcttttccacaattattgtggctaaaagctttctctcttttgtgtactccatgatcatcatgttgatgagcaattctttgcctgaacacccatctccttggatttctgtctccatcatccgaagcttgtcttcttttcccaactgtaatatcacatctagtttgaagggttgatagcccactgacagcaggttcctgaagttctccagcatcacatcttggtacagctttctctgggcaaggtccagcaaccccagctcctccctggtgaagaccacagccacatccttgaatgtcaccatctcctacaacatcaagcagatgtaatctcaatcttatggccaataactgaaacttggtcattttctcctgctccttctggggaagggcagggtcctgggaaggcagaactgcgagtccaacgcccaggccaggaaagctcgccgtagatgcagaggttccgcgctgactcacctcccagaggggatagatgacggctgcttcgccctcctgcagcggaagtacacaaggttgcaacggcttctgcactacacttcccagaatgcccgagcggaaacaggctaccgcccttatgaatctaggtgctcctgtattgggtgcatatatatttaggatagttagctcttcttgttgcattgatctctttaccat

SEQ ID NO: 736655 - DNA, 2613 bp, Homo sapiens
tgtagactgcttggttttatgtgttttaattaaatgtcatttccttgaattcattttaaggcttcttgcaagaatccttttcccagtacaattataatgacgaattggggctgagctcactaaaatattcaaatatatgtcctatatatgatagatttttcctatcaagttaaacaattccagggaagccactatttcttaggtacttgttcaaggtcacgatcatgcagcagtaaacaatgttcctgcatggagcttagattctagtggacacagattttgtcatgtccctcattatacttttgctaaattctgaccttacttatcattttgaaggcttcactcctgcatattgcttattggatgtgaaggttctgattgaaacatattgtatcattctttatagggtttctctgttgtgtgttctcttgacaactgtgacattttgggctctgcttgaaactggtcatattcatacaaaaataggttttcttcaatggaattcagataactataaaaactcagctcatgaattcttaaaacatgacattttataaatattctgtgctgtgtggattttctgaggaaaatgggaagtctaagtcttgaagagcacccctatcacactcatcatgattaatagattcatcaccatcatggactctctgatgaatctgaagacaacgaactcttactaaagcccttaccacacacaaaacatttgtatggtttctctccagtatggactctctgatgggcttgaagatgtgaagtctgactgaagctcttaccacacatgccacatttatagggtttctctcccgtgtggatcctctgatgaacatgaagatatgagttccagatgaagcctttcctacattcttcacatttgtatggtttctctcctgtgtggactctctgatgggcttgaagatgtgaactccaactgaagcctttcccacacacatcacatttgtagggattctctccagtatggacttgctgatggtcttggagatgcgaactctgactaaagcccttcccacatgtctcacatttgtatggcttctctcctttgtgaactctctgatgggcctgaagatgagagatctgactgaagtccttcccacatgtgtcacatttgtagggtttctctcctgtatggactctctgatgggcctgaaggtgggaattacggctgaagttcttatcacacacatcacatttgtagggtttctctccagtgtggattctctgatgggcttgaagatttgaggccttactgaagcccttatcacatacctcacatttatatggtttctctccagtgtgaactctctggtgaagaccagaattcctattaaatatcctgtcacttacttcccatttgtatgtcttgtctctagagtgacctctctgatgggcttgaagttgtgatgtctgactgaagcctttatcatatacatcacatttacaggctctctctccagcactgtctacacagtgaatgtcaaaatctaagctatgatggaagcccttcccacacctgccacatgtacacaacttctctcctgggtgagtaagctcatgagagggaagacaggagttctggttggagctccgggcatatacctgacatctgtagaggttctctcctgtgctgactctctgatgaggttgcagatgtgagccctgactgaagccctcaccactgtcaccattcctatagcatttctctcctatgtggaaacactgatgcctgggaagccctgagctgtaacctatgcccttcccgtactcaacatttacatgaggcttgtctcttaagtgtagttgctggtgaagttcaagattagagccaacacttaagccttttccattttcatcagaggtttgctctcctgattggattatgctatgctgggatgattccttcacacagtcttttccacaattattgtggctaaaagctttctctcttttgtgtactccatgatcatcatgttgatgagcaattctttgcctgaacacccatctccttggatttctgtctccatcatccgaagcttgtcttcttttcccaactgtaatatcacatctagtttgaagggttgatagcccactgacagcaggttcctgaagttctccagcatcacatcttggtacagctttctctgggcaaggtccagcaaccccagctcctccctggtgaagaccacagccacatccttgaatgtcaccatctcctacaacatcaagcagatgtaatctcaatcttatggccaataactgaaacttggtcattttctcctgctccttctggggaagggcagggtcctgggaaggcagaactgcgagtccaacgcccaggccaggaaagctcgccgtagatgcagaggttccgcgctgactcacctcccagaggggatagatgacggctgcttcgccctcctgcagcggaagtacacaaggttgcaacggcttctgcactacacttcccagaatgcccgagcggaaacaggctaccgcccttatgaatctaggtgctcctgtattgggtgcatatatatttaggatagttagctcttcttgttgcattgatctctttaccat

SEQ ID NO: 736656 - DNA, 3040 bp, Homo sapiens
ttttttttttacagaaaatttttagtaattttattcatttttcatagctttacagcttttatgaaaataatgatcactgtaagtataaaatgaaaattaaagaaaagggataataacccaaaactctccctggccaaaaaaccagttagcatatggcaaatatccttccacacattatcttcaggcatatattcacaatgaaaggtgatcatttatattaactagatcttaccaagagagccaccagccctatttctcccctaaatacgagttctattcctgttcatggttctgtgttatcatcttgatggatttgttagaaagattccaagtgtgaacaaacccccttccactctcagtagttttacagggtttaccaccagcatggactagccaaaaacttgaagatgtgcattcagacaaaagttggtaacacatttctcatttctaaagctttttaccagtatggactttctgatgatatgtaagacgtgaacggtgacggaagtccttatcacatatgtcacatttgtatggtttttctccagtgtggactctctgatgggcttcaagacgtgcactctgactgaagcctttaccacactcttcacatttaaagagtttttccctggtgtgaacacccaggtggactcgaagatttgaggggagactgaaggccttaccacactcctcacatatatggggtttctctcccgtgtggaccctctgatgatggcgaagattcaagctcctaccaaagcctttcccacactcttcacatttgtaaggtttttctccagtgtggcctctctgatggtatataaactgcgaactgtatctaaagccctttccacacacatcacatttgtatggcttttcccccgtgtggactctctgatgggattgaagaccagaggactgactgaagcccttaccacagacaccacatttgtatggcttctctccagtatggactctctgatgtacccgaaaatctatggcctgactgaagctcttatcacactgctcacatttatagggtttttctcctgagtgaactctttgatgtgcatgaagatttgatctccaactgaagcccttcccacattcctcacatttatatggtttttctccagtgtgaattacttggtgtagtttaagatttgaactataactgaagtccttaccacacacatcacatctatatggtttctctccagtgtggactcgctgatgggtttgaagctttgaggactgactgaagcccttcccacacgtttcacacttgaatcgtttctccccagtgtggacattctgatggacttgaagatttgaagcctgactgaagcccttaccacactccttacatttatagggtttctctcccgtgtgaactctgaaatgaatatgcagatctgtattacgggtaaagcctttcccacacgcctcacacttgtatggcttctctcctgtgtggactctccgatggcatattaatggtgaattgtggctgaagcccttaccacacacatcacacttgtagggtttctctccagtgtggactctctgatggatgtgaaaatgtgcagcctgagtgaagcccttaccacattcctcacatttatagggcttctcacccctgtggaccctctggtgaacacggagattaacactccaaccgaagcccttaccacactcttcgcatttgtatggtttttcttcagtgtggactctctgatggcactgaaaatttgaactttgactaaagcatttaccacattcctcgcatttatagggtttctctccagtatgagttctgtaatgaatgataagacccgtgctgctactgaatcccttgccgcaactgtcgcatctataagacttctctcctgtatgattagattgataagaatgaaaagagctcttattgaagcaatcaccagattcatgacatctattgagtttctctcctgggtgaattctctgatgagttcgcagatgtgagctttgactgaagcatttttctcctgtatgaacattcggatgaaggggaagccttgggctataactgaagccccttccacactcaccacatggatggggtttctctcctaagggtaatttctgattggagccatcactaatgattttgccatattcattacctttgcagggttttggttctgtgtcagttttaatatgctcatgaaatggtgatttcttcatgaagtcttcatgtatttgcaggttatttttcacatcaatttgcttacctctactctgaatctgtgactcactcagatatgtattcccgcaagaatgctgggttctccaaaatggaaactcttgattttcaatataaatagagctatctcctttagggttcattatattgttctcattttcagaaacctgaatagagtcaccttgtaataactgggaactcttcccctgaagacacctggttaattcacttgcaacctgtttccagatttgccagcaggacagctcttgatttgaaaggtattttaatgcaaatttttggagtgtttccatcttattttgatgcttgctgcccactgcaaccaggttcttgaagttctccaccatgacatctcggtacagcttcctctgggtaagatcgagcagtcgcagttcctccctggagaagaccacagccacatccttgaatgtcacagcctcctacaatatcaaacacatgtaacctcaatcttacaaccaaccttcactagaagaagggtggcatcaagaaggaaaagagcaccacaaaaaagttgttatagattccaagagatctcagtcaattttcagctgttacagttttccctgtctcactatctcctacgctcatccccataaagcctgtagtttatcactgttttttgtttttttcttttttgagatggagtctcactctgtcacccgacctggagcagtggcgcaatctctgctcactgcaacctccgcctcccgggttcaagagattctcctgccttagcctcccaagtaggtgggatta

SEQ ID NO: 736657 - DNA, 3249 bp, Homo sapiens
ttttttttttacagaaaatttttagtaattttattcatttttcatagctttacagcttttatgaaaataatgatcactgtaagtataaaatgaaaattaaagaaaagggataataacccaaaactctccctggccaaaaaaccagttagcatatggcaaatatccttccacacattatcttcaggcatatattcacaatgaaaggtgatcatttatattaactagatcttaccaagagagccaccagccctatttctcccctaaatacgagttctattcctgttcatggttctgtgttatcatcttgatggatttgttagaaagattccaagtgtgaacaaacccccttccactctcagtagttttacagggtttaccaccagcatggactagccaaaaacttgaagatgtgcattcagacaaaagttggtaacacatttctcatttctaaagctttttaccagtatggactttctgatgatatgtaagacgtgaacggtgacggaagtccttatcacatatgtcacatttgtatggtttttctccagtgtggactctctgatgggcttcaagacgtgcactctgactgaagcctttaccacactcttcacatttaaagagtttttccctggtgtgaacacccaggtggactcgaagatttgaggggagactgaaggccttaccacactcctcacatatatggggtttctctcccgtgtggaccctctgatgatggcgaagattcaagctcctaccaaagcctttcccacactcttcacatttgtaaggtttttctccagtgtggcctctctgatggtatataaactgcgaactgtatctaaagccctttccacacacatcacatttgtatggcttttcccccgtgtggactctctgatgggattgaagaccagaggactgactgaagcccttaccacagacaccacatttgtatggcttctctccagtatggactctctgatgtacccgaaaatctatggcctgactgaagctcttatcacactgctcacatttatagggtttttctcctgagtgaactctttgatgtgcatgaagatttgatctccaactgaagcccttcccacattcctcacatttatatggtttttctccagtgtgaattacttggtgtagtttaagatttgaactataactgaagtccttaccacacacatcacatctatatggtttctctccagtgtggactcgctgatgggtttgaagctttgaggactgactgaagcccttcccacacgtttcacacttgaatcgtttctccccagtgtggacattctgatggacttgaagatttgaagcctgactgaagcccttaccacactccttacatttatagggtttctctcccgtgtgaactctgaaatgaatatgcagatctgtattacgggtaaagcctttcccacacgcctcacacttgtatggcttctctcctgtgtggactctccgatggcatattaatggtgaattgtggctgaagcccttaccacacacatcacacttgtagggtttctctccagtgtggactctctgatggatgtgaaaatgtgcagcctgagtgaagcccttaccacattcctcacatttatagggcttctcacccctgtggaccctctggtgaacacggagattaacactccaaccgaagcccttaccacactcttcgcatttgtatggtttttcttcagtgtggactctctgatggcactgaaaatttgaactttgactaaagcatttaccacattcctcgcatttatagggtttctctccagtatgagttctgtaatgaatgataagacccgtgctgctactgaatcccttgccgcaactgtcgcatctataagacttctctcctgtatgattagattgataagaatgaaaagagctcttattgaagcaatcaccagattcatgacatctattgagtttctctcctgggtgaattctctgatgagttcgcagatgtgagctttgactgaagcatttttctcctgtatgaacattcggatgaaggggaagccttgggctataactgaagccccttccacactcaccacatggatggggtttctctcctaagggtaatttctgattggagccatcactaatgattttgccatattcattacctttgcagggttttggttctgtgtcagttttaatatgctcatgaaatggtgatttcttcatgaagtcttcatgtatttgcaggttatttttcacatcaatttgcttacctctactctgaatctgtgactcactcagatatgtattcccgcaagaatgctgggttctccaaaatggaaactcttgattttcaatataaatagagctatctcctttagggttcattatattgttctcattttcagaaacctgaatagagtcaccttgtaataactgggaactcttcccctgaagacacctggttaattcacttgcaacctgtttccagatttgccagcaggacagctcttgatttgaaaggtattttaatgcaaatttttggagtgtttccatcttattttgatgcttgctgcccactgcaaccaggttcttgaagttctccaccatgacatctcggtacagcttcctctgggtaagatcgagcagtcgcagttcctccctggagaagaccacagccacatccttgaatgtcacagcctcctacaatatcaaacacatgtaacctcaatcttacaaccaaccttcactagaagaagggtggcatcaagaaggaaaagagcaccacaaaaaagttgttatagattccaagagatctcagtcaattttcagctgttacagttttccctgtctcactatctcctacgctcatccccataaagcctgtagtttatcactgttttttgtttttttcttttttgagatggagtctcactctgtcacccgacctgggaagcggaggttgcagtgagccaagatggcgccactgcactccagcctgggtgacaggggtgagacactgtcttaaaataaataaatttttagaattaaaataaatagatcataaagtgtttgaaaggatcagatgaatgaatatatgtcaagcacttagaagtgcctagcacaccatacatgctcaataaactcgaacaacgcatatctttatcatctcttttgtcctattttgtgactacatacaacaggattccttggaactgaagatttatctctaaccaatccaaataatgt

SEQ ID NO: 736658 - DNA, 3325 bp, Homo sapiens
ttttttttttacagaaaatttttagtaattttattcatttttcatagctttacagcttttatgaaaataatgatcactgtaagtataaaatgaaaattaaagaaaagggataataacccaaaactctccctggccaaaaaaccagttagcatatggcaaatatccttccacacattatcttcaggcatatattcacaatgaaaggtgatcatttatattaactagatcttaccaagagagccaccagccctatttctcccctaaatacgagttctattcctgttcatggttctgtgttatcatcttgatggatttgttagaaagattccaagtgtgaacaaacccccttccactctcagtagttttacagggtttaccaccagcatggactagccaaaaacttgaagatgtgcattcagacaaaagttggtaacacatttctcatttctaaagctttttaccagtatggactttctgatgatatgtaagacgtgaacggtgacggaagtccttatcacatatgtcacatttgtatggtttttctccagtgtggactctctgatgggcttcaagacgtgcactctgactgaagcctttaccacactcttcacatttaaagagtttttccctggtgtgaacacccaggtggactcgaagatttgaggggagactgaaggccttaccacactcctcacatatatggggtttctctcccgtgtggaccctctgatgatggcgaagattcaagctcctaccaaagcctttcccacactcttcacatttgtaaggtttttctccagtgtggcctctctgatggtatataaactgcgaactgtatctaaagccctttccacacacatcacatttgtatggcttttcccccgtgtggactctctgatgggattgaagaccagaggactgactgaagcccttaccacagacaccacatttgtatggcttctctccagtatggactctctgatgtacccgaaaatctatggcctgactgaagctcttatcacactgctcacatttatagggtttttctcctgagtgaactctttgatgtgcatgaagatttgatctccaactgaagcccttcccacattcctcacatttatatggtttttctccagtgtgaattacttggtgtagtttaagatttgaactataactgaagtccttaccacacacatcacatctatatggtttctctccagtgtggactcgctgatgggtttgaagctttgaggactgactgaagcccttcccacacgtttcacacttgaatcgtttctccccagtgtggacattctgatggacttgaagatttgaagcctgactgaagcccttaccacactccttacatttatagggtttctctcccgtgtgaactctgaaatgaatatgcagatctgtattacgggtaaagcctttcccacacgcctcacacttgtatggcttctctcctgtgtggactctccgatggcatattaatggtgaattgtggctgaagcccttaccacacacatcacacttgtagggtttctctccagtgtggactctctgatggatgtgaaaatgtgcagcctgagtgaagcccttaccacattcctcacatttatagggcttctcacccctgtggaccctctggtgaacacggagattaacactccaaccgaagcccttaccacactcttcgcatttgtatggtttttcttcagtgtggactctctgatggcactgaaaatttgaactttgactaaagcatttaccacattcctcgcatttatagggtttctctccagtatgagttctgtaatgaatgataagacccgtgctgctactgaatcccttgccgcaactgtcgcatctataagacttctctcctgtatgattagattgataagaatgaaaagagctcttattgaagcaatcaccagattcatgacatctattgagtttctctcctgggtgaattctctgatgagttcgcagatgtgagctttgactgaagcatttttctcctgtatgaacattcggatgaaggggaagccttgggctataactgaagccccttccacactcaccacatggatggggtttctctcctaagggtaatttctgattggagccatcactaatgattttgccatattcattacctttgcagggttttggttctgtgtcagttttaatatgctcatgaaatggtgatttcttcatgaagtcttcatgtatttgcaggttatttttcacatcaatttgcttacctctactctgaatctgtgactcactcagatatgtattcccgcaagaatgctgggttctccaaaatggaaactcttgattttcaatataaatagagctatctcctttagggttcattatattgttctcattttcagaaacctgaatagagtcaccttgtaataactgggaactcttcccctgaagacacctggttaattcacttgcaacctgtttccagatttgccagcaggacagctcttgatttgaaaggtattttaatgcaaatttttggagtgtttccatcttattttgatgcttgctgcccactgcaaccaggttcttgaagttctccaccatgacatctcggtacagcttcctctgggtaagatcgagcagtcgcagttcctccctggagaagaccacagccacatccttgaatgtcacagcctcctgaaacttggtcattttctcctgcttcttctggggaaggtcatagttctgagatggcataactggggctatgctgggagaagccaagaagtccctccttcctcctctttgcaaattcggaggcggtgaataaaaggatgctgtcagcacgatggagtctctatcccggataaacggcggtaaacatccccacgcattggagcccgatgactcaatccttcttaaaaaaaaaaaagatctgtaaaagttcgggaagagctcggtctcctgaaggatacgacagaaaggccatggcataaagccctgacttttcttctctcttcactggagcttccagtaaaaagggcgcttgtgagggaatcactgtatcaatagcaggagccaacccagtatcaggtgccaccactgttctaaggtttgacccgtattatcttgtttaattctaattacaaccctacacagtaacgactatctttattgctattttaaagatgaggaaacaggagcgcggatcataggtaactcgctgtttattatacccacagaactagcggcgctgcttgccaagtgcgggaggagagcaaacttcccgccctcggcctctcggcctccgccgcggccg

SEQ ID NO: 736659 - DNA, 3057 bp, Homo sapiens
ttttttttttacagaaaatttttagtaattttattcatttttcatagctttacagcttttatgaaaataatgatcactgtaagtataaaatgaaaattaaagaaaagggataataacccaaaactctccctggccaaaaaaccagttagcatatggcaaatatccttccacacattatcttcaggcatatattcacaatgaaaggtgatcatttatattaactagatcttaccaagagagccaccagccctatttctcccctaaatacgagttctattcctgttcatggttctgtgttatcatcttgatggatttgttagaaagattccaagtgtgaacaaacccccttccactctcagtagttttacagggtttaccaccagcatggactagccaaaaacttgaagatgtgcattcagacaaaagttggtaacacatttctcatttctaaagctttttaccagtatggactttctgatgatatgtaagacgtgaacggtgacggaagtccttatcacatatgtcacatttgtatggtttttctccagtgtggactctctgatgggcttcaagacgtgcactctgactgaagcctttaccacactcttcacatttaaagagtttttccctggtgtgaacacccaggtggactcgaagatttgaggggagactgaaggccttaccacactcctcacatatatggggtttctctcccgtgtggaccctctgatgatggcgaagattcaagctcctaccaaagcctttcccacactcttcacatttgtaaggtttttctccagtgtggcctctctgatggtatataaactgcgaactgtatctaaagccctttccacacacatcacatttgtatggcttttcccccgtgtggactctctgatgggattgaagaccagaggactgactgaagcccttaccacagacaccacatttgtatggcttctctccagtatggactctctgatgtacccgaaaatctatggcctgactgaagctcttatcacactgctcacatttatagggtttttctcctgagtgaactctttgatgtgcatgaagatttgatctccaactgaagcccttcccacattcctcacatttatatggtttttctccagtgtgaattacttggtgtagtttaagatttgaactataactgaagtccttaccacacacatcacatctatatggtttctctccagtgtggactcgctgatgggtttgaagctttgaggactgactgaagcccttcccacacgtttcacacttgaatcgtttctccccagtgtggacattctgatggacttgaagatttgaagcctgactgaagcccttaccacactccttacatttatagggtttctctcccgtgtgaactctgaaatgaatatgcagatctgtattacgggtaaagcctttcccacacgcctcacacttgtatggcttctctcctgtgtggactctccgatggcatattaatggtgaattgtggctgaagcccttaccacacacatcacacttgtagggtttctctccagtgtggactctctgatggatgtgaaaatgtgcagcctgagtgaagcccttaccacattcctcacatttatagggcttctcacccctgtggaccctctggtgaacacggagattaacactccaaccgaagcccttaccacactcttcgcatttgtatggtttttcttcagtgtggactctctgatggcactgaaaatttgaactttgactaaagcatttaccacattcctcgcatttatagggtttctctccagtatgagttctgtaatgaatgataagacccgtgctgctactgaatcccttgccgcaactgtcgcatctataagacttctctcctgtatgattagattgataagaatgaaaagagctcttattgaagcaatcaccagattcatgacatctattgagtttctctcctgggtgaattctctgatgagttcgcagatgtgagctttgactgaagcatttttctcctgtatgaacattcggatgaaggggaagccttgggctataactgaagccccttccacactcaccacatggatggggtttctctcctaagggtaatttctgattggagccatcactaatgattttgccatattcattacctttgcagggttttggttctgtgtcagttttaatatgctcatgaaatggtgatttcttcatgaagtcttcatgtatttgcaggttatttttcacatcaatttgcttacctctactctgaatctgtgactcactcagatatgtattcccgcaagaatgctgggttctccaaaatggaaactcttgattttcaatataaatagagctatctcctttagggttcattatattgttctcattttcagaaacctgaatagagtcaccttgtaataactgggaactcttcccctgaagacacctggttaattcacttgcaacctgtttccagatttgccagcaggacagctcttgatttgaaaggtattttaatgcaaatttttggagtgtttccatcttattttgatgcttgctgcttctttgggtttctgtttccatcatccaaagcttttcttctgcttccaattgggataccatatctggttggaagggaagatgccccactgcaaccaggttcttgaagttctccaccatgacatctcggtacagcttcctctgggtaagatcgagcagtcgcagttcctccctggagaagaccacagccacatccttgaatgtcacagcctcctgaaacttggtcattttctcctgcttcttctggggaaggtcatagttctgagatggcataactggggctatgctgggagaagccaagaagtccctccttcctcctctttgcaaattcggaggcggtgaataaaaggatgctgtcagcacgatggagtctctatcccggataaacggcggtaaacatccccacgcattggagcccgatgactcaatcctcccggacccaaaagatggtggcggcctcgctttccggggcggaagtcggct

SEQ ID NO: 736660 - DNA, 3135 bp, Homo sapiens
ttttttttttacagaaaatttttagtaattttattcatttttcatagctttacagcttttatgaaaataatgatcactgtaagtataaaatgaaaattaaagaaaagggataataacccaaaactctccctggccaaaaaaccagttagcatatggcaaatatccttccacacattatcttcaggcatatattcacaatgaaaggtgatcatttatattaactagatcttaccaagagagccaccagccctatttctcccctaaatacgagttctattcctgttcatggttctgtgttatcatcttgatggatttgttagaaagattccaagtgtgaacaaacccccttccactctcagtagttttacagggtttaccaccagcatggactagccaaaaacttgaagatgtgcattcagacaaaagttggtaacacatttctcatttctaaagctttttaccagtatggactttctgatgatatgtaagacgtgaacggtgacggaagtccttatcacatatgtcacatttgtatggtttttctccagtgtggactctctgatgggcttcaagacgtgcactctgactgaagcctttaccacactcttcacatttaaagagtttttccctggtgtgaacacccaggtggactcgaagatttgaggggagactgaaggccttaccacactcctcacatatatggggtttctctcccgtgtggaccctctgatgatggcgaagattcaagctcctaccaaagcctttcccacactcttcacatttgtaaggtttttctccagtgtggcctctctgatggtatataaactgcgaactgtatctaaagccctttccacacacatcacatttgtatggcttttcccccgtgtggactctctgatgggattgaagaccagaggactgactgaagcccttaccacagacaccacatttgtatggcttctctccagtatggactctctgatgtacccgaaaatctatggcctgactgaagctcttatcacactgctcacatttatagggtttttctcctgagtgaactctttgatgtgcatgaagatttgatctccaactgaagcccttcccacattcctcacatttatatggtttttctccagtgtgaattacttggtgtagtttaagatttgaactataactgaagtccttaccacacacatcacatctatatggtttctctccagtgtggactcgctgatgggtttgaagctttgaggactgactgaagcccttcccacacgtttcacacttgaatcgtttctccccagtgtggacattctgatggacttgaagatttgaagcctgactgaagcccttaccacactccttacatttatagggtttctctcccgttgtggactctctgatggcactgaaaatttgaactttgactaaagcatttaccacattcctcgcatttatagggtttctctccagtatgagttctgtaatgaatgataagacccgtgctgctactgaatcccttgccgcaactgtcgcatctataagacttctctcctgtatgattagattgataagaatgaaaagagctcttattgaagcaatcaccagattcatgacatctattgagtttctctcctgggtgaattctctgatgagttcgcagatgtgagctttgactgaagcatttttctcctgtatgaacattcggatgaaggggaagccttgggctataactgaagccccttccacactcaccacatggatggggtttctctcctaagggtaatttctgattggagccatcactaatgattttgccatattcattacctttgcagggttttggttctgtgtcagttttaatatgctcatgaaatggtgatttcttcatgaagtcttcatgtatttgcaggttatttttcacatcaatttgcttacctctactctgaatctgtgactcactcagatatgtattcccgcaagaatgctgggttctccaaaatggaaactcttgattttcaatataaatagagctatctcctttagggttcattatattgttctcattttcagaaacctgaatagagtcaccttgtaataactgggaactcttcccctgaagacacctggttaattcacttgcaacctgtttccagatttgccagcaggacagctcttgatttgaaaggtattttaatgcaaatttttggagtgtttccatcttattttgatgcttgctgcttctttgggtttctgtttccatcatccaaagcttttcttctgcttccaattgggataccatatctggttggaagggaagatgccctgagagcaaagagattctcaagggaactgaagttcagggtcagagagtgcctgtcctcacccactgcaaccaggttcttgaagttctccaccatgacatctcggtacagcttcctctgggtaagatcgagcagtcgcagttcctccctggagaagaccacagccacatccttgaatgtcacagcctcctgaaacttggtcattttctcctgcttcttctggggaaggtcatagttctgagatggcataactggggctatgctgggagaagccaagaagtccctccttcctcctctttgcaaattcggaggcggtgaataaaaggatgctgtcagcacgatggagtctctatcccggataaacggcggtaaacatccccacgcattggagcccgatgactcaatccttcttaaaaaaaaaaaagatctgtaaaagttcgggaagagctcggtctcctgaaggatacgacagaaaggccatggcataaagccctgacttttcttctctcttcactggagcttccagtaaaaagggcgcttgtgagggaatcactgtatcaatagcaggagccaacccagtatcaggtgccaccactgttctaaggtttgacccgtattatcttgtttaattctaattacaaccctacacagtaacgactatctttattgctattttaaagatgaggaaacaggagcgcggatcataggtaactcgctgtttattatacccacagaactagcggcgctgcttgccaagtgcgggaggagagcaaacttcccgccctcggcctctcggcctccgccgcggccg

SEQ ID NO: 736661 - DNA, 1088 bp, Homo sapiens
taccccgtatctgcgcatccacatcaatttgcttacctctactctgaatctgtgactcactcagatatgtattcccgcaagaatgctgggttctccaaaatggaaactcttgattttcaatataaatagagctatctcctttagggttcattatattgttctcattttcagaaacctgaatagagtcaccttgtaataactgggaactcttcccctgaagacacctggttaattcacttgcaacctgtttccagatttgccagcaggacagctcttgatttgaaaggtattttaatgcaaatttttggagtgtttccatcttattttgatgcttgctgcccactgcaaccaggttcttgaagttctccaccatgacatctcggtacagcttcctctgggtaagatcgagcagtcgcagttcctccctggagaagaccacagccacatccttgaatgtcacagcctcctgaaacttggtcattttctcctgcttcttctggggaaggtcatagttctgagatggcataactggggctatgctgggagaagccaagaagtccctccttcctcctctttgcaaattcggaggcggtgaataaaaggatgctgtcagcacgatggagtctctatcccggataaacggcggtaaacatccccacgcattggagcccgatgactcaatccttcttaaaaaaaaaaaagatctgtaaaagttcgggaagagctcggtctcctgaaggatacgacagaaaggccatggcataaagccctgacttttcttctctcttcactggagcttccagtaaaaagggcgcttgtgagggaatcactgtatcaatagcaggagccaacccagtatcaggtgccaccactgttctaaggtttgacccgtattatcttgtttaattctaattacaaccctacacagtaacgactatctttattgctattttaaagatgaggaaacaggagcgcggatcataggtaactcgctgtttattatacccacagaactagcggcgctgcttgccaagtgcgggaggagagcaaacttcccgccctcggcctctcggcctccgccgcggccg

SEQ ID NO: 736662 - DNA, 2175 bp, Homo sapiens
cttagggctggtgctcctgctatttcctcttcccaggtaaccatgtgaagtgcctccctctgccctctttccagcctttacttgagtgtcaccttctcagtgaggcctgccctcattcctctttcgctgtttgcaacccatctcctgtcccccttcccagaactccctttcctacttcgtttttcttcacagtacttgatactgcctaacacactccatggtttcttacttgccctgtttattattttcccccaatagacagaatgttccatgatggcagaattctctgttttgtttccttccatgtccccagcacctagaacagtgcctgacgcatctcctaagcaatacgaccaataagtatgtgtctggctgccttccggctgccagtgtctgcctctttcctaggggcagtggttgcgggggtgctttctcacatgtcttagtaggctgtgcaggctggaagtgctcagaagtcacacccccagggagcagcctcagccaacagcaccttggctgtaaatgccccagctccctcgccctcaggtaagcattgctgaggcacacgttccatactcttttccacagttcctccgtgggactgagcaccacccagccacccacaggagcagctaacctgataaccaccagcctcaccctccctgccttacttccccgctcccctttaccacatgctgacctcccagatgcatttcttgctttccggtctctgtctcaggattggctcctggatgaacacaaactaacactatgttcacaaatatatttgggaaatgctggatgaataattatacacatcagacagattactagaaattctcaccaaagggatgcacatgttacctctgcatggtgagatctcaggtgctttttaccccacatagctatcctttggcatttttataattagcaagtgctcactcttccactgtcagtacattctcattcttcttgggcgctggacaagaattcaaccggtgtgtaagccagactcggcccgggcagtctcaaactcctgactccttatataatttctacaaaaattataaagctatttcccactccccaccccacattcatgtaacctgaagcatgagtaaaccaagaatgaggtaggcctctgtcttctaagcaacatcagaactctaagaacatgagggactcttagaaaactctctggagctaaccacagctgggtcactgctcatgtactgaagaccagccagagggttcccctgaaaaggagggaaactgagcaaacattctccagttctcttagtgtgcacatgtttcaggaggtgtgaaccccacatgtagcttgtgtaggcaagaagacaaatagtgctactgtctggtcaaggatttgtttgaagagccatgattatgcccatatggtaagccaccagtgctccccatccctgtaagacacttctttctcattattttctcctctgatggtgtgccaggatgctggccaagagaagccaagtggaaagaaggctgttcagtgacaaggaacctaagacttagtgccaaggactgaaaccaagtaaacttgtaattttccatgatggaaacatctacactttctcattagtggcctctacagcagttgccccaaagaagcgtctcattgtttttttactacatttatgtgaagcatacaggcaaactcagaaagactgtgataaggctcgccagagatgcctgcacaggtgctgggggaaaagcaggaccatcctgaagggagatggtgtctgtggacaaagaactctgcagtggttcttatttgcatgatttctgctggtggaggctgtaaatgtgagctcaaactcccacataagtgagttttcattgtaatccagaatgtttttaaatcaccctacttctattgaacttgcactatcatctgttaacctctactgtatttattaaataaacctgaataggtaaatcacagtacagcaaaaggttctgtgttccccagaattctaatcaaactccaaattcctgaaaaggctctagtcctttcctatatgtcaaatttaaatgataagttttcattttggaacataaagagggattttgaagaccacagcatagccctgggtttttgcatagagataataaacagacaatctcttttcagactga

SEQ ID NO: 736663 - DNA, 1072 bp, Homo sapiens
  misc_feature (814)..(814): n is a, c, g, or t
ggtccggaattccctgcatacaggcgctggccgcagtctgacaggaaagggacggagccaagatggcggcggccgacggcgacgactcgctgtaccccatcgcggtgctcatagacgaactccgcaatgaggacgttcagcttcgcctcaacagcatcaagaagctgtccaccatcgccttggcccttggggttgaaaggacccgaagtgagcttctgcctttccttacagataccatctatgatgaagatgaggtcctcctggccctggcagaacagctgggaaccttcactaccctggtgggaggcccagagtacgtgcactgcctgctgccaccgctggagtcgctggccacagtggaggagacagtggtgcgggacaaggcagtggagtccttacgggccatctcacacgagcactcgccctctgacctggaggcgcactttgtgccgctagtgaagcggctggcgggcggcgactggttcacctcccgcacctcggcctgcggcctcttctccgtctgctacccccgagtgtccagtgctgtgaaggcggaacttcgacagtacttccggaacctgtgctcagatgacacccccatggtgcggcgggccgcagcctccaagctgggggagtttgccaaggtgctggagctggacaacgtcaagagtgagatcatccccatgttctccaacctggcctctgacgagcaggactcggtgcggctgctggcggtggaggcgtgcgtgaacatcgcccagcttctgccccaggaggatctggaggccctggtgatgcccactctgcgccaganaacaaatcccgggcggggggtcccgctataaatggtggggcttgaacaaagtttcccacagagcctccccgaaaaaaccaaggggggggccctgaaaaaactccccaaaaaacaggaaccctgggtccccctggcctcttcccggaacactctgaagaaaaaaaaatgggtgaaggcccccaagggggaagggggggccccagagcctcctccctccagaggtgccaaaagaaagtcctctgcgagaaaaaaccctct

SEQ ID NO: 736664 - DNA, 2201 bp, Homo sapiens
gaattccggttctcactcttgacgttgtccagctccagcaccttggcaactcccccagcttggacggccggcccgccgctccatgggggagtcatctgaggcgctggccgcagtctgacaggaaagggacggagccaagatggcggcggccgacggcgacgactcgctgtaccccatcgcggtgctcatagacgaactccgcaatgaggacgttcagcttcgcctcaacagcatcaagaagctgtccaccatcgccttggcccttggggttgaaaggacccgaagtgagcttctgcctttccttacagataccatctatgatgaagatgaggtcctcctggccctggcagaacagctgggaaccttcactaccctggtgggaggcccagagtacgtgcactgcctgctgccaccgctggagtcgctggccacagtggaggagacagtggtgcgggacaaggcagtggagtccttacgggccatctcacacgagcactcgccctctgacctggaggcgcactttgtgccgctagtgaagcggctggcgggcggcgactggttcacctcccgcacctcggcctgcggcctcttctccgtctgctacccccgagtgtccagtgctgtgaaggcggaacttcgacagtacttccggaacctgtgctcagatgacacccccatggtgcggcgggccgcagcctccaagctgggggagtttgccaaggtgctggagctggacaacgtcaagagtgagatcatccccatgttctccaacctggcctctgacgagcaggactcggtgcggctgctggcggtggaggcgtgcgtgaacatcgcccagcttctgccccaggaggatctggaggccctggtgatgcccactctgcgccaggccgctgaagacaagtcctggcgcgtccgctacatggtgggctgacaagttcacagagctccagaaagcagtggggcctgagatcaccaagacagacctggtccctgccttccagaacctgatgaaagactgtgaggccgaggtgagggccgcagcctcccacaaggtcaaagagttctgtgaaaacctctcagctgactgtcgggagaatgtgatcatgtcccagatcttgccctgcatcaaggagctggtgtccgatgccaaccaacatgtcaagtctgccctggcctcagtcatcatgggtctctctcccatcttgggcaaagacaacaccatcgagcacctcttgcccctcttcctggctcagctgaaggatgagtgccctgaggtacggctgaacatcatctctaacctggactgtgtgaacgaggtgattggcatccggcagctgtcccagtccctgctccctgccattgtggagctggctgaggacgccaagtggcgggtgcggctggccatcattgagtacatgcccctcctggctggacagctgggagtggagttctttgatgagaaacttaactccttgtgcatggcctggcttgtggatcatgtatatgccatccgcgaggcagccaccagcaacctgaagaagctagtggaaaagtttgggaaggagtgggcccatgccacaatcatccccaaggtcttggccatgtccggagaccccaactacctgcaccgcatgactacgctcttctgcatcaatgtgctgtctgaggtctgtgggcaggacatcaccaccaagcacatgctacccacggttctgcgcatggctggggacccggttgccaatgtccgcttcaatgtggccaagtctctgcagaagatagggcccatcctggacaacagcaccttgcagagtgaagtcaagcccatcctagagaagctgacccaggaccaggatgtggacgtcaaatactttgcccaggaggctctgactgttctgtctctcgcctgatgctggaagaggagcaaacactggcctctggtgtccaccctccaacccccacaagtccctctttggggagacactggggggcctttggctgtcactccctgtgcatggtctgaccccaggccccttcccccagcacggttcctcctctccccagcctgggaagatgtctcactgtccacctcccaacgggctaggggagcacggggttggacaggacagtgaccttgggaggaaggggctactccgcatccttaaaagccatggagccggaggtggcaattcaccgaattc

SEQ ID NO: 736665 - DNA, 1256 bp, Homo sapiens
  misc_feature (68)..(68): n is a, c, g, or t
  misc_feature (1184)..(1184): n is a, c, g, or t
ttatcttcactcccacgcgctcggagggggggcgtgagggggcggagacactgtggggggaggggggnggggaaaatacaacaaatggggcgacccacgcgtccgcgctggccgcagtctgacaggaaagggacggagccaagatggcggcggccgacggcgacgactcgctgtaccccatcgcggtgctcatagacgaactccgcaatgaggacgttcagcttcgcctcaacagcatcaagaagctgtccaccatcgccttggcccttggggttgaaaggacccgaagtgagcttctgcctttccttacagataccatctatgatgaagatgaggtcctcctggccctggcagaacagctgggaaccttcactaccctggtgggaggcccagagtacgtgcactgcctgctgccaccgctggagtcgctggccacagtggaggagacagtggtgcgggacaaggcagtggagtccttacgggccatctcacacgagcactcgccctctgacctggaggcgcactttgtgccgctagtgaagcggctggcgggcggcgactggttcacctcccgcacctcggcctgcggcctcttctccgtctgctacccccgagtgtccagtgctgtgaaggcggaacttcgacagtacttccggaacctgtgctcagatgacacccccatggtgcggcgggccgcagcctccaagctgggggagtttgccaaggtgctggagctggacaacgtcaagagtgagatcatccccatgttctccaacctggcctctgacgagcaggactcggtgcggctgctggcggtggaggcgtgcgtgaacatcgcccagcttctgccccaggaggatctggaggccctggtgatgcccactctgcgccaggccgctgaagacaagtcctggcgcgtccgctacatggtgggctgacaagttcacagagctccagaaagcagtggggcctgagatcaccaagacagacctggtccctgccttccagaacctgatgaaagactgtgaggccgaggtgagggccgcagcctcccacaaggtcaaagagttctgtgaaaacctctcagctgactgtcgggagaatgtgatcatgtcccagatcttgccctgcatcaaggaacctgggggtcccaatgccaaccaactggtcaagtcttgcctggncccccaaaacataaggggggtccccctccccccacctgggggcaaaaaaaacccccatggagaccctctttg

SEQ ID NO: 736666 - DNA, 1145 bp, Homo sapiens
  misc_feature (1116)..(1116): n is a, c, g, or t
gtgagttttgcttcctggccctctgctctcccgtccttctggtggttcctgcccatgaaagagaatcccagagctcagcaaggcctctgctgccctcccactgttcctctcctctccctaggactcggtgcggctgctggcggtggaggcgtgcgtgaacatcgcccagcttctgccccaggaggatctggaggccctggtgatgcccactctgcgccaggccgctgaagacaagtcctggcgcgtccgctacatggtgggctgacaagttcacagagctccagaaagcagtggggcctgagatcaccaagacagacctggtccctgccttccagaacctgatgaaagactgtgaggccgaggtgagggccgcagcctcccacaaggtcaaagagttctgtgaaaacctctcagctgactgtcgggagaatgtgatcatgtcccagatcttgccctgcatcaaggagctggtgtccgatgccaaccaacatgtcaagtctgccctggcctcagtcatcatgggtctctctcccatcttgggcaaagacaacaccatcgagcacctcttgcccctcttcctggctcagctgaaggatgagtgccctgaggtacggctgaacatcatctctaacctggactgtgtgaacgaggtgattggcatccggcagctgtcccagtccctgctccctgccattgtggagctggctgaggacgccaagtggcgggtgcggctggccatcattgagtacatgcccctcctggctggacagctgggagtggagttctttgatgagaaacttaactccttgtgcatggcctggcttgtggatcatgtatatgccatccgcgaggcagccaccagcaacctgaagaagctagtggaaaagtttgggaaggagtgggcccatgccacaatcatccccaaggtcttggccatgtccggagaccccaactacctgcaccgcatgactacgctcttctgcatcaatgtgctgtctgaggtctgtgggcaggacatcaccaccaagcacatgctacccacggttctgcgcatggctggggacccggttgccaatgtccgcttcaatgtggccatctcctgccaaaaaaaaatanggggccccatcccggggaaaaaaaggccc

SEQ ID NO: 736667 - DNA, 535 bp, Homo sapiens
  misc_feature (16)..(16): n is a, c, g, or t
  misc_feature (23)..(23): n is a, c, g, or t
  misc_feature (25)..(26): n is a, c, g, or t
  misc_feature (37)..(37): n is a, c, g, or t
  misc_feature (44)..(44): n is a, c, g, or t
  misc_feature (49)..(50): n is a, c, g, or t
  misc_feature (63)..(63): n is a, c, g, or t
  misc_feature (74)..(74): n is a, c, g, or t
gctgactgagctgtcntgtcagntnntgtatataccntcctcgntgcannatccaacgtcttnaagatccgcgnggcaaagtacgggccggcgttttacaatgccacaatcatccccaaggtcttggccatgtccggagaccccaactacctgcaccgcatgactacgctcttctgcatcaatgtgctgtctgaggtctgtgggcaggacatcaccaccaagcacatgctacccacggttctgcgcatggctggggacccggttgccaatgtccgcttcaatgtggccagtctgtccggacagacgccacgtccaccgactgaccggcattgcgcccggtaccagcgttcgataggtcgccggtacggatggcggatggcgcagaaccggcgatcccattcatcgccggcgcaacagattcggcatccagccgatgccttgtgcatgcaggctctggatgtataaccgctccggcgtatcggtcacgccggtggtttccggatatttgccgccgggtcctgcggtcccgtgtata

SEQ ID NO: 736668 - DNA, 527 bp, Homo sapiens; identical to SEQ ID NO: 323249

SEQ ID NO: 736669 - DNA, 1024 bp, Homo sapiens
ggtcctctggccttagtcatcagcttggaggagggggcaccaccccagagccacaacatctgcgcttttctctggagaagatcttgttacaggacccattatacccctatgtcccgaaagaatactctggggatccccccaggagtgctgctggcctttggggtagagggtccatgaggtgctctgggtggtgtcctgtagtgcagttcagattcatagatgtcggccgagtatttggggggttaagagcaggtgccttggaaccagactgcctgggtccaaattgtggctccttcagttaatagacgtgtgactaggagtagcttgttaagtctttatgagctcagttttgtattgtgtaaaatgagagttacagtaatacctagattgcagggtgggtggcgaggaccaagtgaattagtacctggaaagtgtgtaacagtttcaacatgagaagtacacaacatgagaagcagagttagctgtacattgccagagaaccccctgtgggccatttcctgtgttcttgaagaagacttgggcttggaccctgtccccaggaggtctcagagtaatcaggacggtactagggagagaactgtggcaagatagatcagttatctcggtatctattctccccttcctaatgtagaagctctgatttttagctgggcagatgactacatggattcaaggtattttcctagtgtctcttgaaattaggtgtggtattgtgaccaaattctagccaaaaagatgttgaacagaagtggtatatgcagcttctaggaagtgttcttaagggggaaggcgtcatcccccacctttcctccttcctgcactctggaatgtggaccagatggctggagtaggagctgccacctggggccagaaaatgatcttaggcgtgaaggtcaagtaaggcaggacaagagagaaggagcctgcctccccgaggctgtgaagagccatgccagtactgtcacctgggagaattaaactggtcaagtgccagttcgtttag

SEQ ID NO: 736670 - DNA, 1526 bp, Homo sapiens
gtggagcagcccctgtaaactggctcgggcgcccccacgcccgcccttccttcttctcccagcattgcccccccccacgtttcagcacagcgctggccgcagtctgacaggaaagggacggagccaagatggcggcggccgacggcgacgactcgctgtaccccatcgcggtgctcatagacgaactccgcaatgaggacgttcaggtccggaggctacgggggacttggggaagacgcggaggggtacctgggggcacgggcggccctcgcggagaagactcagcgttcgctgggagtggcggaagggggcgacggccaatcagccttcgcctcaacagcatcaagaagctgtccaccatcgccttggcccttggggttgaaaggacccgaagtgagcttctgcctttccttacagataccatctatgatgaagatgaggtcctcctggccctggcagaacagctgggaaccttcactaccctggtgggaggcccagagtacgtgcactgcctgctgccaccgctggagtcgctggccacagtggaggagacagtggtgcgggacaaggcagtggagtccttacgggccatctcacacgagcactcgccctctgacctggaggcgcactttgtgccgctagtgaagcggctggcgggcggcgactggttcacctcccgcacctcggcctgcggcctcttctccgtctgctacccccgagtgtccagtgctgtgaaggcggaacttcgacagtgagtctctgcctccttggaagctccaagctcccatctcagctccaaccttctctaaagcctcagactccttttggtctagctggggcccaaatgcccctgaactctctccactcccactcctgcttaccacctgataggccacatcctcgagagttggtctctggacacggccacgtgtcagtttacccacctctgcccccttgctcacttaggaattgagatgatgacaggtcctccttcccactggttaatgtgaggatttaaaagaattatcacacataaagtgcttagagcaaaatctggaacataaaaactttcagcaacttacatctgatggtatctccagcctgtcccaggtccagtgcctttggcagataaaccacctcagttttcagcctcctgctcgtctactttgcaaacgattgaccgtcaagcccgggtttgagcctgactcactccagaactctggtttatggctgtacacttgcttagatacttacactggcccccaccgcctttgatcgaagcaattgctgctgaaaaataaagcctttctgtggctctagacctgcctcttagttaagcagttttttgtttgtttgttttttgagataggatctcgctctgtcatccaggctgaagtgcactggtgcagtcatagcccactgcagcctcaacctcctgggctcaagcattcctcctgccttagcctctcaaatagctgggaccacaggtgtgcaacaccacgctgggctcattttttatttttggc

SEQ ID NO: 736671 - DNA, 2981 bp, Homo sapiens
  misc_feature (2641)..(2643): n is a, c, g, or t
  misc_feature (2648)..(2648): n is a, c, g, or t
  misc_feature (2652)..(2652): n is a, c, g, or t
  misc_feature (2655)..(2655): n is a, c, g, or t
gtggagcagcccctgtaaactggctcgggcgcccccacgcccgcccttccttcttctcccagcattgcccccccccacgtttcagcacagcgctggccgcagtctgacaggaaagggacggagccaagatggcggcggccgacggcgacgactcgctgtaccccatcgcggtgctcatagacgaactccgcaatgaggacgttcaggtccggaggctacgggggacttggggaagacgcggaggggtacctgggggcacgggcggccctcgcggagaagactcagcgttcgctgggagtggcggaagggggcgacggccaatcagccttcgcctcaacagcatcaagaagctgtccaccatcgccttggcccttggggttgaaaggacccgaagtgagcttctgcctttccttacagataccatctatgatgaagatgaggtcctcctggccctggcagaacagctgggaaccttcactaccctggtgggaggcccagagtacgtgcactgcctgctgccaccgctggagtcgctggccacagtggaggagacagtggtgcgggacaaggcagtggagtccttacgggccatctcacacgagcactcgccctctgacctggaggcgcactttgtgccgctagtgaagcggctggcgggcggcgactggttcacctcccgcacctcggcctgcggcctcttctccgtctgctacccccgagtgtccagtgctgtgaaggcggaacttcgacagtacttccggaacctgtgctcagatgacacccccatggtgcggcgggccgcagcctccaagctgggggagtttgccaaggtgctggagctggacaacgtcaagagtgagatcatccccatgttctccaacctggcctctgacgagcaggactcggtgcggctgctggcggtggaggcgtgcgtgaacatcgcccagcttctgccccaggaggatctggaggccctggtgatgcccactctgcgccaggccgctgaagacaagtcctggcgcgtccgctacatggtgggctgacaagttcacagagctccagaaagcagtggggcctgagatcaccaagacagacctggtccctgccttccagaacctgatgaaagactgtgaggccgaggtgagggccgcagcctcccacaaggtcaaagagttctgtgaaaacctctcagctgactgtcgggagaatgtgatcatgtcccagatcttgccctgcatcaaggagctggtgtccgatgccaaccaacatgtcaagtctgccctggcctcagtcatcatgggtctctctcccatcttgggcaaagacaacaccatcgagcacctcttgcccctcttcctggctcagctgaaggatgagtgccctgaggtacggctgaacatcatctctaacctggactgtgtgaacgaggtgattggcatccggcagctgtcccagtccctgctccctgccattgtggagctggctgaggacgccaagtggcgggtgcggctggccatcattgagtacatgcccctcctggctggacagctgggagtggagttctttgatgagaaacttaactccttgtgcatggcctggcttgtggatcatgtatatgccatccgcgaggcagccaccagcaacctgaagaagctagtggaaaagtttgggaaggagtgggcccatgccacaatcatccccaaggtcttggccatgtccggagaccccaactacctgcaccgcatgactacgctcttctgcatcaatgtgctgtctgaggtctgtgggcaggacatcaccaccaagcacatgctacccacggttctgcgcatggctggggacccggttgccaatgtccgcttcaatgtggccaagtctctgcagaagatagggcccatcctggacaacagcaccttgcagagtgaagtcaagcccatcctagagaagctgacccaggaccaggatgtggacgtcaaatactttgcccaggaggctctgactggtaagacctagaaagcacggagccctagcaggagggtggactttgaggacaggcactgggcctgtgggcagcagcttctgggagggggaggtaccttggcattgtgggcagagagagggctctggttctgattcttgcctgttcctgttttcctagttctgtctctcgcctgatgctggaagaggagcaaacactggcctctggtgtccaccctccaacccccacaagtccctctttggggagacactggggggcctttggctgtcactccctgtgcatggtctgaccccaggccccttcccccagcacggttcctcctctccccagcctgggaagatgtctcactgtccacctcccaacgggctaggggagcacggggttggacaggacagtgaccttgggaggaaggggctactccgcccacgtcagggagagatgtgagcatcccgggtcactggatcctgctgctgtaatgggaacccctcccccatttacttctccacctcccgtcctccccatcattggtttttttttgtgtgtcaactgtgccgtttttattttattccttttattttcccccttttcacagagaaataaaggtctagaagtaaaaaaaaaaaaaaaaaaaaaaaaaaaaannnaaacnaaanaanaaaaagaaaagcagaaagaaagagcgagagagaaccagaaaagaagaaagagagagcgaggaggtgaggggcggggggcggaggacgaagagtgagcagcagaggtggggggagcggcgggggacgaaagacagacgagcgtagggaggagcgagagcaccagcagcggcgcgcggaagaaggagggggggtagcccaaaaagaaagaaagcagaggggggggagagaagagggggggaagaagacaggcagagagacaggggagagaccgcggaggacaacgaaggaggcgggagaacaagggcggagaagtaagtgtcgcggca

SEQ ID NO: 736672 - DNA, 2487 bp, Homo sapiens
gtggagcagcccctgtaaactggctcgggcgcccccacgcccgcccttccttcttctcccagcattgcccccccccacgtttcagcacagcgctggccgcagtctgacaggaaagggacggagccaagatggcggcggccgacggcgacgactcgctgtaccccatcgcggtgctcatagacgaactccgcaatgaggacgttcaggtccggaggctacgggggacttggggaagacgcggaggggtacctgggggcacgggcggccctcgcggagaagactcagcgttcgctgggagtggcggaagggggcgacggccaatcagccttcgcctcaacagcatcaagaagctgtccaccatcgccttggcccttggggttgaaaggacccgaagtgagcttctgcctttccttacagataccatctatgatgaagatgaggtcctcctggccctggcagaacagctgggaaccttcactaccctggtgggaggcccagagtacgtgcactgcctgctgccaccgctggagtcgctggccacagtggaggagacagtggtgcgggacaaggcagtggagtccttacgggccatctcacacgagcactcgccctctgacctggaggcgcactttgtgccgctagtgaagcggctggcgggcggcgactggttcacctcccgcacctcggcctgcggcctcttctccgtctgctacccccgagtgtccagtgctgtgaaggcggaacttcgacagtacttccggaacctgtgctcagatgacacccccatggtgcggcgggccgcagcctccaagctgggggagtttgccaaggtgctggagctggacaacgtcaagagtgagatcatccccatgttctccaacctggcctctgacgagcaggactcggtgcggctgctggcggtggaggcgtgcgtgaacatcgcccagcttctgccccaggaggatctggaggccctggtgatgcccactctgcgccaggccgctgaagacaagtcctggcgcgtccgctacatggtgggctgacaagttcacagagctccagaaagcagtggggcctgagatcaccaagacagacctggtccctgccttccagaacctgatgaaagactgtgaggccgaggtgagggccgcagcctcccacaaggtcaaagagttctgtgaaaacctctcagctgactgtcgggagaatgtgatcatgtcccagatcttgccctgcatcaaggagctggtgtccgatgccaaccaacatgtcaagtctgccctggcctcagtcatcatgggtctctctcccatcttgggcaaagacaacaccatcgagcacctcttgcccctcttcctggctcagctgaaggatgagtgccctgaggtacggctgaacatcatctctaacctggactgtgtgaacgaggtgattggcatccggcagctgtcccagtccctgctccctgccattgtggagctggctgaggacgccaagtggcgggtgcggctggccatcattgagtacatgcccctcctggctggacagctgggagtggagttctttgatgagaaacttaactccttgtgcatggcctggcttgtggatcatgtatatgccatccgcgaggcagccaccagcaacctgaagaagctagtggaaaagtttgggaaggagtgggcccatgccacaatcatccccaaggtcttggccatgtccggagaccccaactacctgcaccgcatgactacgctcttctgcatcaatgtgctgtctgaggtctgtgggcaggacatcaccaccaagcacatgctacccacggttctgcgcatggctggggacccggttgccaatgtccgcttcaatgtggccaagtctctgcagaagatagggcccatcctggacaacagcaccttgcagagtgaagtcaagcccatcctagagaagctgacccaggaccaggatgtggacgtcaaatactttgcccaggaggctctgactgttctgtctctcgcctgatgctggaagaggagcaaacactggcctctggtgtccaccctccaacccccacaagtccctctttggggagacactggggggcctttggctgtcactccctgtgcatggtctgaccccaggccccttcccccagcacggttcctcctctccccagcctgggaagatgtctcactgtccacctcccaacgggctaggggagcacggggttggacaggacagtgaccttgggaggaaggggctactccgcccacgtcagggagagatgtgagcatcccgggtcactggatcctgctgctgtaatgggaacccctcccccatttacttctccacctcccgtcctccccatcattggtttttttttgtgtgtcaactgtgccgtttttattttattccttttattttcccccttttcacagagaaataaaggtctagaagtaaggtcaacacacagaaaccaacaaataaaaa

SEQ ID NO: 736673 - DNA, 2825 bp, Homo sapiens
  misc_feature (2485)..(2487): n is a, c, g, or t
  misc_feature (2492)..(2492): n is a, c, g, or t
  misc_feature (2496)..(2496): n is a, c, g, or t
  misc_feature (2499)..(2499): n is a, c, g, or t
gtggagcagcccctgtaaactggctcgggcgcccccacgcccgcccttccttcttctcccagcattgcccccccccacgtttcagcacagcgctggccgcagtctgacaggaaagggacggagccaagatggcggcggccgacggcgacgactcgctgtaccccatcgcggtgctcatagacgaactccgcaatgaggacgttcaggtccggaggctacgggggacttggggaagacgcggaggggtacctgggggcacgggcggccctcgcggagaagactcagcgttcgctgggagtggcggaagggggcgacggccaatcagccttcgcctcaacagcatcaagaagctgtccaccatcgccttggcccttggggttgaaaggacccgaagtgagcttctgcctttccttacagataccatctatgatgaagatgaggtcctcctggccctggcagaacagctgggaaccttcactaccctggtgggaggcccagagtacgtgcactgcctgctgccaccgctggagtcgctggccacagtggaggagacagtggtgcgggacaaggcagtggagtccttacgggccatctcacacgagcactcgccctctgacctggaggcgcactttgtgccgctagtgaagcggctggcgggcggcgactggttcacctcccgcacctcggcctgcggcctcttctccgtctgctacccccgagtgtccagtgctgtgaaggcggaacttcgacagtacttccggaacctgtgctcagatgacacccccatggtgcggcgggccgcagcctccaagctgggggagtttgccaaggtgctggagctggacaacgtcaagagtgagatcatccccatgttctccaacctggcctctgacgagcaggactcggtgcggctgctggcggtggaggcgtgcgtgaacatcgcccagcttctgccccaggaggatctggaggccctggtgatgcccactctgcgccaggccgctgaagacaagtcctggcgcgtccgctacatggtgggctgacaagttcacagagctccagaaagcagtggggcctgagatcaccaagacagacctggtccctgccttccagaacctgatgaaagactgtgaggccgaggtgagggccgcagcctcccacaaggtcaaagagttctgtgaaaacctctcagctgactgtcgggagaatgtgatcatgtcccagatcttgccctgcatcaaggagctggtgtccgatgccaaccaacatgtcaagtctgccctggcctcagtcatcatgggtctctctcccatcttgggcaaagacaacaccatcgagcacctcttgcccctcttcctggctcagctgaaggatgagtgccctgaggtacggctgaacatcatctctaacctggactgtgtgaacgaggtgattggcatccggcagctgtcccagtccctgctccctgccattgtggagctggctgaggacgccaagtggcgggtgcggctggccatcattgagtacatgcccctcctggctggacagctgggagtggagttctttgatgagaaacttaactccttgtgcatggcctggcttgtggatcatgtatatgccatccgcgaggcagccaccagcaacctgaagaagctagtggaaaagtttgggaaggagtgggcccatgccacaatcatccccaaggtcttggccatgtccggagaccccaactacctgcaccgcatgactacgctcttctgcatcaatgtgctgtctgaggtctgtgggcaggacatcaccaccaagcacatgctacccacggttctgcgcatggctggggacccggttgccaatgtccgcttcaatgtggccaagtctctgcagaagatagggcccatcctggacaacagcaccttgcagagtgaagtcaagcccatcctagagaagctgacccaggaccaggatgtggacgtcaaatactttgcccaggaggctctgactgttctgtctctcgcctgatgctggaagaggagcaaacactggcctctggtgtccaccctccaacccccacaagtccctctttggggagacactggggggcctttggctgtcactccctgtgcatggtctgaccccaggccccttcccccagcacggttcctcctctccccagcctgggaagatgtctcactgtccacctcccaacgggctaggggagcacggggttggacaggacagtgaccttgggaggaaggggctactccgcccacgtcagggagagatgtgagcatcccgggtcactggatcctgctgctgtaatgggaacccctcccccatttacttctccacctcccgtcctccccatcattggtttttttttgtgtgtcaactgtgccgtttttattttattccttttattttcccccttttcacagagaaataaaggtctagaagtaaaaaaaaaaaaaaaaaaaaaaaaaaaaannnaaacnaaanaanaaaaagaaaagcagaaagaaagagcgagagagaaccagaaaagaagaaagagagagcgaggaggtgaggggcggggggcggaggacgaagagtgagcagcagaggtggggggagcggcgggggacgaaagacagacgagcgtagggaggagcgagagcaccagcagcggcgcgcggaagaaggagggggggtagcccaaaaagaaagaaagcagaggggggggagagaagagggggggaagaagacaggcagagagacaggggagagaccgcggaggacaacgaaggaggcgggagaacaagggcggagaagtaagtgtcgcggca

SEQ ID NO: 736674 - DNA, 3740 bp, Homo sapiens
gtggagcagcccctgtaaactggctcgggcgcccccacgcccgcccttccttcttctcccagcattgcccccccccacgtttcagcacagcgctggccgcagtctgacaggaaagggacggagccaagatggcggcggccgacggcgacgactcgctgtaccccatcgcggtgctcatagacgaactccgcaatgaggacgttcaggtccggaggctacgggggacttggggaagacgcggaggggtacctgggggcacgggcggccctcgcggagaagactcagcgttcgctgggagtggcggaagggggcgacggccaatcagccttcgcctcaacagcatcaagaagctgtccaccatcgccttggcccttggggttgaaaggacccgaagtgagcttctgcctttccttacagataccatctatgatgaagatgaggtcctcctggccctggcagaacagctgggaaccttcactaccctggtgggaggcccagagtacgtgcactgcctgctgccaccgctggagtcgctggccacagtggaggagacagtggtgcgggacaaggcagtggagtccttacgggccatctcacacgagcactcgccctctgacctggaggcgcactttgtgccgctagtgaagcggctggcgggcggcgactggttcacctcccgcacctcggcctgcggcctcttctccgtctgctacccccgagtgtccagtgctgtgaaggcggaacttcgacagtacttccggaacctgtgctcagatgacacccccatggtgcggcgggccgcagcctccaagctgggggagtttgccaaggtgctggagctggacaacgtcaagagtgagatcatccccatgttctccaacctggcctctgacgagcaggactcggtgcggctgctggcggtggaggcgtgcgtgaacatcgcccagcttctgccccaggaggatctggaggccctggtgatgcccactctgcgccaggccgctgaagacaagtcctggcgcgtccgctacatggtgggctgacaagttcacagagctccagaaagcagtggggcctgagatcaccaagacagacctggtccctgccttccagaacctgatgaaagactgtgaggccgaggtgagggccgcagcctcccacaaggtcaaagagttctgtgaaaacctctcagctgactgtcgggagaatgtgatcatgtcccagatcttgccctgcatcaaggagctggtgtccgatgccaaccaacatgtcaagtctgccctggcctcagtcatcatgggtctctctcccatcttgggcaaagacaacaccatcgagcacctcttgcccctcttcctggctcagctgaaggatgagtgccctgaggtacggctgaacatcatctctaacctggactgtgtgaacgaggtgattggcatccggcagctgtcccagtccctgctccctgccattgtggagctggctgaggacgccaagtggcgggtgcggctggccatcattgagtacatgcccctcctggctggacagctgggagtggagttctttgatgagaaacttaactccttgtgcatggcctggcttgtggatcatgtatatgccatccgcgaggcagccaccagcaacctgaagaagctagtggaaaagtttgggaaggagtgggcccatgccacaatcatccccaaggtcttggccatgtccggagaccccaactacctgcaccgcatgactacgctcttctgcatcaatgtgctgtctgaggtctgtgggcaggacatcaccaccaagcacatgctacccacggttctgcgcatggctggggacccggttgccaatgtccgcttcaatgtggccaagtctctgcagaagatagggcccatcctggacaacagcaccttgcagagtgaagtcaagcccatcctagagaagctgacccaggaccaggatgtggacgtcaaatactttgcccaggaggctctgactgttctgtctctcgcctgatgctggaagaggagcaaacactggcctctggtgtccaccctccaacccccacaagtccctctttggggagacactggggggcctttggctgtcactccctgtgcatggtctgaccccaggccccttcccccagcacggttcctcctctccccagcctgggaagatgtctcactgtccacctcccaacgggctaggggagcacggggttggacaggacagtgaccttgggaggaaggggctactccgcccacgtcagggagagatgtgagcatcccgggtcactggatcctgctgctgtaatgggaacccctcccccatttacttctccacctcccgtcctccccatcattggtttttttttgtgtgtcaactgtgccgtttttattttattccttttattttcccccttttcacagagaaataaaggtctagaagtaaacaccacaacacacagaaaggacaacaacaacgaaaaccatacacaaaaacgaacacacgaaacaaagaaaacagacaacagcaaagtacagcatacaaaacatacgaaacggggggcgccacaaaacacacgcaggatgacagaatacccattttgtaaagacaaccacagacttcaaacacacgcgcccaaaccgcggacacacgtagtttgtggacctcgggcgtacagacaccacacgcgtaatttttcttcgtgcttctttttctttctcttttcttcatttgttgcttccctctgctcccgtcaagagccacaagaaggagagagaaacagcaacaagaaagagcacagaagaggagaagcacgaaagagagggaaagaaaacaaagaaaaagaaagaaagaagaaaacaaagagagaagagggagagaggaaagcggcgaggacagagggcaaaaagcggagaaaaaaggagagaggaaagagaagaggaaggagaagacgacagacagaggagaaaagaaaaacgaagaagaggaagcgacacagccgaggaggagaagacaaacgaaggtaaggagaaggagagcagagggcgggagagagaagaagacagaagcgaagcgaagacaggagcaggaacgagaacgggaggaagaaagagaggggaagggacaggaggacagcaacaagcacaacagaaagcagagcgggagggaggcgaacggagctgagaggaaagcgcaaacgcagaaagcaaagcagaggagacgaggagaagcggacgagagaagcacagaagagggggccgcagagaaaggaggagaaagacagagagaacaagagagagaaagagaggaagaggagagagagaggcgaggggagggagagcgagggagagaggaagcgcgagagcgcagcaggcggacgagagagcggagcaaagagaggaagagagctggcggccggcgtggaacgaggaacaggatggggcaatgaggacagaagagcaggacgacagcggaagaacagaaagaaggcgaaagacaggcaacgcgacgagacgagaggaagcgcagcacgagagaccagaccacgcagcagacgacaggagagacgagagcgaggcgagagcgcgcagacgcagacaagaacgcgcgcagaacgagagaaacgacgtgaacagcagcaacccgaggagggcaagaacaaggaggagagagaaaacaagagaggcgaagagagagacgcacagaaaagaacgcgaggcacacagagc

SEQ ID NO: 736675 - DNA, 2417 bp, Homo sapiens
gtggagcagcccctgtaaactggctcgggcgcccccacgcccgcccttccttcttctcccagcattgcccccccccacgtttcagcacagcgctggccgcagtctgacaggaaagggacggagccaagatggcggcggccgacggcgacgactcgctgtaccccatcgcggtgctcatagacgaactccgcaatgaggacgttcaggtccggaggctacgggggacttggggaagacgcggaggggtacctgggggcacgggcggccctcgcggagaagactcagcgttcgctgggagtggcggaagggggcgacggccaatcagccttcgcctcaacagcatcaagaagctgtccaccatcgccttggcccttggggttgaaaggacccgaagtgagcttctgcctttccttacagataccatctatgatgaagatgaggtcctcctggccctggcagaacagctgggaaccttcactaccctggtgggaggcccagagtacgtgcactgcctgctgccaccgctggagtcgctggccacagtggaggagacagtggtgcgggacaaggcagtggagtccttacgggccatctcacacgagcactcgccctctgacctggaggcgcactttgtgccgctagtgaagcggctggcgggcggcgactggttcacctcccgcacctcggcctgcggcctcttctccgtctgctacccccgagtgtccagtgctgtgaaggcggaacttcgacagtacttccggaacctgtgctcagatgacacccccatggtgcggcgggccgcagcctccaagctgggggagtttgccaaggtgctggagctggacaacgtcaagagtgagatcatccccatgttctccaacctggcctctgacgagcaggactcggtgcggctgctggcggtggaggcgtgcgtgaacatcgcccagcttctgccccaggaggatctggaggccctggtgatgcccactctgcgccaggccgctgaagacaagtcctggcgcgtccgctacatggtgggctgacaagttcacagagctccagaaagcagtggggcctgagatcaccaagacagacctggtccctgccttccagaacctgatgaaagactgtgaggccgaggtgagggccgcagcctcccacaaggtcaaagagttctgtgaaaacctctcagctgactgtcgggagaatgtgatcatgtcccagatcttgccctgcatcaaggagctggtgtccgatgccaaccaacatgtcaagtctgccctggcctcagtcatcatgggtctctctcccatcttgggcaaagacaacaccatcgagcacctcttgcccctcttcctggctcagctgaaggatgagtgccctgaggtacggctgaacatcatctctaacctggactgtgtgaacgaggtgattggcatccggcagctgtcccagtccctgctccctgccattgtggagctggctgaggacgccaagtggcgggtgcggctggccatcattgagtacatgcccctcctggctggacagctgggagtggagttctttgatgagaaacttaactccttgtgcatggcctggcttgtggatcatgtatatgccatccgcgaggcagccaccagcaacctgaagaagctagtggaaaagtttgggaaggagtgggcccatgccacaatcatccccaaggtcttggccatgtccggagaccccaactacctgcaccgcatgactacgctcttctgcatcaatgtgctgtctgaggtctgtgggcaggacatcaccaccaagcacatgctacccacggttctgcgcatggctggggacccggttgccaatgtccgcttcaatgtggccaagtctctgcagaagatagggcccatcctggacaacagcaccttgcagagtgaagtcaagcccatcctagagaagctgacccaggaccaggatgtggacgtcaaatactttgcccaggaggctctgactgttctgtctctcgcctgatgctggaagaggagcaaacactggcctctggtgtccaccctccaacccccacaagtccctctttggggagacactggggggcctttggctgtcactccctgtgcatggtctgaccccaggccccttcccccagcacggttcctcctctccccagcctgggaagatgtctcactgtccacctcccaacgggctaggggagcacggggttggacaggacagtgaccttgggaggaaggggctactccgcccacgtcagggagagatgtgagcatcccgggtcactggatcctgctgctgtaatgggaacccctcccccatttacttctccacctcccgtcctccccatcattggtttttttttgtgtgtattctgccggaacctctagagtcacctcagc

SEQ ID NO: 736676 - DNA, 2433 bp, Homo sapiens
gtggagcagcccctgtaaactggctcgggcgcccccacgcccgcccttccttcttctcccagcattgcccccccccacgtttcagcacagcgctggccgcagtctgacaggaaagggacggagccaagatggcggcggccgacggcgacgactcgctgtaccccatcgcggtgctcatagacgaactccgcaatgaggacgttcaggtccggaggctacgggggacttggggaagacgcggaggggtacctgggggcacgggcggccctcgcggagaagactcagcgttcgctgggagtggcggaagggggcgacggccaatcagccttcgcctcaacagcatcaagaagctgtccaccatcgccttggcccttggggttgaaaggacccgaagtgagcttctgcctttccttacagataccatctatgatgaagatgaggtcctcctggccctggcagaacagctgggaaccttcactaccctggtgggaggcccagagtacgtgcactgcctgctgccaccgctggagtcgctggccacagtggaggagacagtggtgcgggacaaggcagtggagtccttacgggccatctcacacgagcactcgccctctgacctggaggcgcactttgtgccgctagtgaagcggctggcgggcggcgactggttcacctcccgcacctcggcctgcggcctcttctccgtctgctacccccgagtgtccagtgctgtgaaggcggaacttcgacagtacttccggaacctgtgctcagatgacacccccatggtgcggcgggccgcagcctccaagctgggggagtttgccaaggtgctggagctggacaacgtcaagagtgagatcatccccatgttctccaacctggcctctgacgagcaggactcggtgcggctgctggcggtggaggcgtgcgtgaacatcgcccagcttctgccccaggaggatctggaggccctggtgatgcccactctgcgccaggccgctgaagacaagtcctggcgcgtccgctacatggtgggctgacaagttcacagagctccagaaagcagtggggcctgagatcaccaagacagacctggtccctgccttccagaacctgatgaaagactgtgaggccgaggtgagggccgcagcctcccacaaggtcaaagagttctgtgaaaacctctcagctgactgtcgggagaatgtgatcatgtcccagatcttgccctgcatcaaggagctggtgtccgatgccaaccaacatgtcaagtctgccctggcctcagtcatcatgggtctctctcccatcttgggcaaagacaacaccatcgagcacctcttgcccctcttcctggctcagctgaaggatgagtgccctgaggtacggctgaacatcatctctaacctggactgtgtgaacgaggtgattggcatccggcagctgtcccagtccctgctccctgccattgtggagctggctgaggacgccaagtggcgggtgcggctggccatcattgagtacatgcccctcctggctggacagctgggagtggagttctttgatgagaaacttaactccttgtgcatggcctggcttgtggatcatgtatatgccatccgcgaggcagccaccagcaacctgaagaagctagtggaaaagtttgggaaggagtgggcccatgccacaatcatccccaaggtcttggccatgtccggagaccccaactacctgcaccgcatgactacgctcttctgcatcaatgtgctgtctgaggtctgtgggcaggacatcaccaccaagcacatgctacccacggttctgcgcatggctggggacccggttgccaatgtccgcttcaatgtggccaagtctctgcagaagatagggcccatcctggacaacagcaccttgcagagtgaagtcaagcccatcctagagaagctgacccaggaccaggatgtggacgtcaaatactttgcccaggaggctctgactgttctgtctctcgcctgatgctggaagaggagcaaacactggcctctggtgtccaccctccaacccccacaagtccctctttggggagacactggggggcctttggctgtcactccctgtgcatggtctgaccccaggccccttcccccagcacggttcctcctctccccagcctgggaagatgtctcactgtccacctcccaacgggctaggggagcacggggttggacaggacagtgaccttgggaggaaggggctactccgcccacgtcagggagagatgtgagcatcccgggtcactggatcctgctgctgtaatgggaacccctcccccatttacttctccacctcccgtcctccccatcattggtttttttttgtgtgtaaatggtgtgtcaaaaaaaaagaaaaaaggggggccgatcaagaatt

SEQ ID NO: 736677 - DNA, 2366 bp, Homo sapiens
gtggagcagcccctgtaaactggctcgggcgcccccacgcccgcccttccttcttctcccagcattgcccccccccacgtttcagcacagcgctggccgcagtctgacaggaaagggacggagccaagatggcggcggccgacggcgacgactcgctgtaccccatcgcggtgctcatagacgaactccgcaatgaggacgttcaggtccggaggctacgggggacttggggaagacgcggaggggtacctgggggcacgggcggccctcgcggagaagactcagcgttcgctgggagtggcggaagggggcgacggccaatcagccttcgcctcaacagcatcaagaagctgtccaccatcgccttggcccttggggttgaaaggacccgaagtgagcttctgcctttccttacagataccatctatgatgaagatgaggtcctcctggccctggcagaacagctgggaaccttcactaccctggtgggaggcccagagtacgtgcactgcctgctgccaccgctggagtcgctggccacagtggaggagacagtggtgcgggacaaggcagtggagtccttacgggccatctcacacgagcactcgccctctgacctggaggcgcactttgtgccgctagtgaagcggctggcgggcggcgactggttcacctcccgcacctcggcctgcggcctcttctccgtctgctacccccgagtgtccagtgctgtgaaggcggaacttcgacagtacttccggaacctgtgctcagatgacacccccatggtgcggcgggccgcagcctccaagctgggggagtttgccaaggtgctggagctggacaacgtcaagagtgagatcatccccatgttctccaacctggcctctgacgagcaggactcggtgcggctgctggcggtggaggcgtgcgtgaacatcgcccagcttctgccccaggaggatctggaggccctggtgatgcccactctgcgccaggccgctgaagacaagtcctggcgcgtccgctacatggtgggctgacaagttcacagagctccagaaagcagtggggcctgagatcaccaagacagacctggtccctgccttccagaacctgatgaaagactgtgaggccgaggtgagggccgcagcctcccacaaggtcaaagagttctgtgaaaacctctcagctgactgtcgggagaatgtgatcatgtcccagatcttgccctgcatcaaggagctggtgtccgatgccaaccaacatgtcaagtctgccctggcctcagtcatcatgggtctctctcccatcttgggcaaagacaacaccatcgagcacctcttgcccctcttcctggctcagctgaaggatgagtgccctgaggtacggctgaacatcatctctaacctggactgtgtgaacgaggtgattggcatccggcagctgtcccagtccctgctccctgccattgtggagctggctgaggacgccaagtggcgggtgcggctggccatcattgagtacatgcccctcctggctggacagctgggagtggagttctttgatgagaaacttaactccttgtgcatggcctggcttgtggatcatgtatatgccatccgcgaggcagccaccagcaacctgaagaagctagtggaaaagtttgggaaggagtgggcccatgccacaatcatccccaaggtcttggccatgtccggagaccccaactacctgcaccgcatgactacgctcttctgcatcaatgtgctgtctgaggtctgtgggcaggacatcaccaccaagcacatgctacccacggttctgcgcatggctggggacccggttgccaatgtccgcttcaatgtggccaagtctctgcagaagatagggcccatcctggacaacagcaccttgcagagtgaagtcaagcccatcctagagaagctgacccaggaccaggatgtggacgtcaaatactttgcccaggaggctctgactgttctgtctctcgcctgatgctggaagaggagcaaacactggcctctggtgtccaccctccaacccccacaagtccctctttggggagacactggggggcctttggctgtcactccctgtgcatggtctgaccccaggccccttcccccagcacggttcctcctctccccagcctgggaagatgtctcactgtccacctcccaacgggctaggggagcacggggttggacaggacagtgaccttgggaggaaggggctactccgcccacgtcagggagagatgtgagcatcccgggtcactggatcctgctgctgtaatgggaacccctccccatatctaacaacgtaaatataatatgacagtt

SEQ ID NO: 736678 - DNA, 2389 bp, Homo sapiens
gtggagcagcccctgtaaactggctcgggcgcccccacgcccgcccttccttcttctcccagcattgcccccccccacgtttcagcacagcgctggccgcagtctgacaggaaagggacggagccaagatggcggcggccgacggcgacgactcgctgtaccccatcgcggtgctcatagacgaactccgcaatgaggacgttcaggtccggaggctacgggggacttggggaagacgcggaggggtacctgggggcacgggcggccctcgcggagaagactcagcgttcgctgggagtggcggaagggggcgacggccaatcagccttcgcctcaacagcatcaagaagctgtccaccatcgccttggcccttggggttgaaaggacccgaagtgagcttctgcctttccttacagataccatctatgatgaagatgaggtcctcctggccctggcagaacagctgggaaccttcactaccctggtgggaggcccagagtacgtgcactgcctgctgccaccgctggagtcgctggccacagtggaggagacagtggtgcgggacaaggcagtggagtccttacgggccatctcacacgagcactcgccctctgacctggaggcgcactttgtgccgctagtgaagcggctggcgggcggcgactggttcacctcccgcacctcggcctgcggcctcttctccgtctgctacccccgagtgtccagtgctgtgaaggcggaacttcgacagtacttccggaacctgtgctcagatgacacccccatggtgcggcgggccgcagcctccaagctgggggagtttgccaaggtgctggagctggacaacgtcaagagtgagatcatccccatgttctccaacctggcctctgacgagcaggactcggtgcggctgctggcggtggaggcgtgcgtgaacatcgcccagcttctgccccaggaggatctggaggccctggtgatgcccactctgcgccaggccgctgaagacaagtcctggcgcgtccgctacatggtgggctgacaagttcacagagctccagaaagcagtggggcctgagatcaccaagacagacctggtccctgccttccagaacctgatgaaagactgtgaggccgaggtgagggccgcagcctcccacaaggtcaaagagttctgtgaaaacctctcagctgactgtcgggagaatgtgatcatgtcccagatcttgccctgcatcaaggagctggtgtccgatgccaaccaacatgtcaagtctgccctggcctcagtcatcatgggtctctctcccatcttgggcaaagacaacaccatcgagcacctcttgcccctcttcctggctcagctgaaggatgagtgccctgaggtacggctgaacatcatctctaacctggactgtgtgaacgaggtgattggcatccggcagctgtcccagtccctgctccctgccattgtggagctggctgaggacgccaagtggcgggtgcggctggccatcattgagtacatgcccctcctggctggacagctgggagtggagttctttgatgagaaacttaactccttgtgcatggcctggcttgtggatcatgtatatgccatccgcgaggcagccaccagcaacctgaagaagctagtggaaaagtttgggaaggagtgggcccatgccacaatcatccccaaggtcttggccatgtccggagaccccaactacctgcaccgcatgactacgctcttctgcatcaatgtgctgtctgaggtctgtgggcaggacatcaccaccaagcacatgctacccacggttctgcgcatggctggggacccggttgccaatgtccgcttcaatgtggccaagtctctgcagaagatagggcccatcctggacaacagcaccttgcagagtgaagtcaagcccatcctagagaagctgacccaggaccaggatgtggacgtcaaatactttgcccaggaggctctgactgttctgtctctcgcctgatgctggaagaggagcaaacactggcctctggtgtccaccctccaacccccacaagtccctctttggggagacactggggggcctttggctgtcactccctgtgcatggtctgaccccaggccccttcccccagcacggttcctcctctccccagcctgggaagatgtctcactgtccacctcccaacgggctaggggagcacggggttggacaggacagtgaccttgggaggaaggggctactccgccaaaccggccagtcacgagagaattagcatccggtacaggacccgcggggaaggaaacctcccaataaattaaacccggacccaaaaagggaaaagggcggcgcatatcacctctcccctcgc

SEQ ID NO: 736679 - DNA, 2221 bp, Homo sapiens
  misc_feature (2012)..(2012): n is a, c, g, or t
  misc_feature (2018)..(2018): n is a, c, g, or t
  misc_feature (2039)..(2039): n is a, c, g, or t
  misc_feature (2049)..(2050): n is a, c, g, or t
  misc_feature (2058)..(2058): n is a, c, g, or t
gtggagcagcccctgtaaactggctcgggcgcccccacgcccgcccttccttcttctcccagcattgcccccccccacgtttcagcacagcgctggccgcagtctgacaggaaagggacggagccaagatggcggcggccgacggcgacgactcgctgtaccccatcgcggtgctcatagacgaactccgcaatgaggacgttcaggtccggaggctacgggggacttggggaagacgcggaggggtacctgggggcacgggcggccctcgcggagaagactcagcgttcgctgggagtggcggaagggggcgacggccaatcagccttcgcctcaacagcatcaagaagctgtccaccatcgccttggcccttggggttgaaaggacccgaagtgagcttctgcctttccttacagataccatctatgatgaagatgaggtcctcctggccctggcagaacagctgggaaccttcactaccctggtgggaggcccagagtacgtgcactgcctgctgccaccgctggagtcgctggccacagtggaggagacagtggtgcgggacaaggcagtggagtccttacgggccatctcacacgagcactcgccctctgacctggaggcgcactttgtgccgctagtgaagcggctggcgggcggcgactggttcacctcccgcacctcggcctgcggcctcttctccgtctgctacccccgagtgtccagtgctgtgaaggcggaacttcgacagtacttccggaacctgtgctcagatgacacccccatggtgcggcgggccgcagcctccaagctgggggagtttgccaaggtgctggagctggacaacgtcaagagtgagatcatccccatgttctccaacctggcctctgacgagcaggactcggtgcggctgctggcggtggaggcgtgcgtgaacatcgcccagcttctgccccaggaggatctggaggccctggtgatgcccactctgcgccaggccgctgaagacaagtcctggcgcgtccgctacatggtgggctgacaagttcacagagctccagaaagcagtggggcctgagatcaccaagacagacctggtccctgccttccagaacctgatgaaagactgtgaggccgaggtgagggccgcagcctcccacaaggtcaaagagttctgtgaaaacctctcagctgactgtcgggagaatgtgatcatgtcccagatcttgccctgcatcaaggagctggtgtccgatgccaaccaacatgtcaagtctgccctggcctcagtcatcatgggtctctctcccatcttgggcaaagacaacaccatcgagcacctcttgcccctcttcctggctcagctgaaggatgagtgccctgaggtacggctgaacatcatctctaacctggactgtgtgaacgaggtgattggcatccggcagctgtcccagtccctgctccctgccattgtggagctggctgaggacgccaagtggcgggtgcggctggccatcattgagtacatgcccctcctggctggacagctgggagtggagttctttgatgagaaacttaactccttgtgcatggcctggcttgtggatcatgtatatgccatccgcgaggcagccaccagcaacctgaagaagctagtggaaaagtttgggaaggagtgggcccatgccacaatcatccccaaggtcttggccatgtccggagaccccaactacctgcaccgcatgactacgctcttctgcatcaatgtgctgtctgaggtctgtgggcaggacatcaccaccaagcacatgctacccacggttctgcgcatggctggggacccggttgccaatgtccgcttcaatgtggccaagtctctgcagaagatagggcccatcctggacaacagcaccttgcagagtgaagtcaagcccatcctagagaagctgacccaggaccaggatgtggacgtcaaatactttgcccaggaggctctgactgtctgctctcngctgangcggagaggagcaactggccnggggcacccnnacccaaancccttgggacacgggggctgcggaccgggagggtggccagcctccgaggggcacacacccgggggagtcaggcccacgggggcagggggacaaccggcgagggccccggagagacgcggagcgggagccacccgccggggggccccacaagaggggaggagat

SEQ ID NO: 736680 - DNA, 2048 bp, Homo sapiens
gtggagcagcccctgtaaactggctcgggcgcccccacgcccgcccttccttcttctcccagcattgcccccccccacgtttcagcacagcgctggccgcagtctgacaggaaagggacggagccaagatggcggcggccgacggcgacgactcgctgtaccccatcgcggtgctcatagacgaactccgcaatgaggacgttcaggtccggaggctacgggggacttggggaagacgcggaggggtacctgggggcacgggcggccctcgcggagaagactcagcgttcgctgggagtggcggaagggggcgacggccaatcagccttcgcctcaacagcatcaagaagctgtccaccatcgccttggcccttggggttgaaaggacccgaagtgagcttctgcctttccttacagataccatctatgatgaagatgaggtcctcctggccctggcagaacagctgggaaccttcactaccctggtgggaggcccagagtacgtgcactgcctgctgccaccgctggagtcgctggccacagtggaggagacagtggtgcgggacaaggcagtggagtccttacgggccatctcacacgagcactcgccctctgacctggaggcgcactttgtgccgctagtgaagcggctggcgggcggcgactggttcacctcccgcacctcggcctgcggcctcttctccgtctgctacccccgagtgtccagtgctgtgaaggcggaacttcgacagtacttccggaacctgtgctcagatgacacccccatggtgcggcgggccgcagcctccaagctgggggagtttgccaaggtgctggagctggacaacgtcaagagtgagatcatccccatgttctccaacctggcctctgacgagcaggactcggtgcggctgctggcggtggaggcgtgcgtgaacatcgcccagcttctgccccaggaggatctggaggccctggtgatgcccactctgcgccaggccgctgaagacaagtcctggcgcgtccgctacatggtgggctgacaagttcacagagctccagaaagcagtggggcctgagatcaccaagacagacctggtccctgccttccagaacctgatgaaagactgtgaggccgaggtgagggccgcagcctcccacaaggtcaaagagttctgtgaaaacctctcagctgactgtcgggagaatgtgatcatgtcccagatcttgccctgcatcaaggagctggtgtccgatgccaaccaacatgtcaagtctgccctggcctcagtcatcatgggtctctctcccatcttgggcaaagacaacaccatcgagcacctcttgcccctcttcctggctcagctgaaggatgagtgccctgaggtacggctgaacatcatctctaacctggactgtgtgaacgaggtgattggcatccggcagctgtcccagtccctgctccctgccattgtggagctggctgaggacgccaagtggcgggtgcggctggccatcattgagtacatgcccctcctggctggacagctgggagtggagttctttgatgagaaacttaactccttgtgcatggcctggcttgtggatcatgtatatgccatccgcgaggcagccaccagcaacctgaagaagctagtggaaaagtttgggaaggagtgggcccatgccacaatcatccccaaggtcttggccatgtccggagaccccaactacctgcaccgcatgactacgctcttctgcatcaatgtgctgtctgaggtctgtgggcaggacatcaccaccaagcacatgctacccacggttctgcgcatggctggggacccggttgccaatgtccgcttcaatgtggccaagtctctgcagaagatagggcccatcctggacaacagcaccttgcagagtgaagtcaagcccatcctagagaagctgacccaggaccaggatgtggacgtcaaatactttgcccaggaggctctgactgttctgtctctcgcttgatactggacgacggggatcctctggaacga

SEQ ID NO: 736681 - DNA, 1976 bp, Homo sapiens
gtggagcagcccctgtaaactggctcgggcgcccccacgcccgcccttccttcttctcccagcattgcccccccccacgtttcagcacagcgctggccgcagtctgacaggaaagggacggagccaagatggcggcggccgacggcgacgactcgctgtaccccatcgcggtgctcatagacgaactccgcaatgaggacgttcaggtccggaggctacgggggacttggggaagacgcggaggggtacctgggggcacgggcggccctcgcggagaagactcagcgttcgctgggagtggcggaagggggcgacggccaatcagccttcgcctcaacagcatcaagaagctgtccaccatcgccttggcccttggggttgaaaggacccgaagtgagcttctgcctttccttacagataccatctatgatgaagatgaggtcctcctggccctggcagaacagctgggaaccttcactaccctggtgggaggcccagagtacgtgcactgcctgctgccaccgctggagtcgctggccacagtggaggagacagtggtgcgggacaaggcagtggagtccttacgggccatctcacacgagcactcgccctctgacctggaggcgcactttgtgccgctagtgaagcggctggcgggcggcgactggttcacctcccgcacctcggcctgcggcctcttctccgtctgctacccccgagtgtccagtgctgtgaaggcggaacttcgacagtacttccggaacctgtgctcagatgacacccccatggtgcggcgggccgcagcctccaagctgggggagtttgccaaggtgctggagctggacaacgtcaagagtgagatcatccccatgttctccaacctggcctctgacgagcaggactcggtgcggctgctggcggtggaggcgtgcgtgaacatcgcccagcttctgccccaggaggatctggaggccctggtgatgcccactctgcgccaggccgctgaagacaagtcctggcgcgtccgctacatggtgggctgacaagttcacagagctccagaaagcagtggggcctgagatcaccaagacagacctggtccctgccttccagaacctgatgaaagactgtgaggccgaggtgagggccgcagcctcccacaaggtcaaagagttctgtgaaaacctctcagctgactgtcgggagaatgtgatcatgtcccagatcttgccctgcatcaaggagctggtgtccgatgccaaccaacatgtcaagtctgccctggcctcagtcatcatgggtctctctcccatcttgggcaaagacaacaccatcgagcacctcttgcccctcttcctggctcagctgaaggatgagtgccctgaggtacggctgaacatcatctctaacctggactgtgtgaacgaggtgattggcatccggcagctgtcccagtccctgctccctgccattgtggagctggctgaggacgccaagtggcgggtgcggctggccatcattgagtacatgcccctcctggctggacagctgggagtggagttctttgatgagaaacttaactccttgtgcatggcctggcttgtggatcatgtatatgccatccgcgaggcagccaccagcaacctgaagaagctagtggaaaagtttgggaaggagtgggcccatgccacaatcatccccaaggtcttggccatgtccggagaccccaactacctgcaccgcatgactacgctcttctgcatcaatgtgctgtctgaggtctgtgggcaggacatcaccaccaagcacatgctacccacggttctgcgcatggctggggacccggttgccaatgtccgcttcaatgtggccaagtctctgcagaagatagggcccatcctggacaacagcaccttgcagagtgaagtcaagcccatccgagcagtgtaaggatccgctagagtacctcagcacac

SEQ ID NO: 736682 - DNA, 1947 bp, Homo sapiens
gtggagcagcccctgtaaactggctcgggcgcccccacgcccgcccttccttcttctcccagcattgcccccccccacgtttcagcacagcgctggccgcagtctgacaggaaagggacggagccaagatggcggcggccgacggcgacgactcgctgtaccccatcgcggtgctcatagacgaactccgcaatgaggacgttcaggtccggaggctacgggggacttggggaagacgcggaggggtacctgggggcacgggcggccctcgcggagaagactcagcgttcgctgggagtggcggaagggggcgacggccaatcagccttcgcctcaacagcatcaagaagctgtccaccatcgccttggcccttggggttgaaaggacccgaagtgagcttctgcctttccttacagataccatctatgatgaagatgaggtcctcctggccctggcagaacagctgggaaccttcactaccctggtgggaggcccagagtacgtgcactgcctgctgccaccgctggagtcgctggccacagtggaggagacagtggtgcgggacaaggcagtggagtccttacgggccatctcacacgagcactcgccctctgacctggaggcgcactttgtgccgctagtgaagcggctggcgggcggcgactggttcacctcccgcacctcggcctgcggcctcttctccgtctgctacccccgagtgtccagtgctgtgaaggcggaacttcgacagtacttccggaacctgtgctcagatgacacccccatggtgcggcgggccgcagcctccaagctgggggagtttgccaaggtgctggagctggacaacgtcaagagtgagatcatccccatgttctccaacctggcctctgacgagcaggactcggtgcggctgctggcggtggaggcgtgcgtgaacatcgcccagcttctgccccaggaggatctggaggccctggtgatgcccactctgcgccaggccgctgaagacaagtcctggcgcgtccgctacatggtgggctgacaagttcacagagctccagaaagcagtggggcctgagatcaccaagacagacctggtccctgccttccagaacctgatgaaagactgtgaggccgaggtgagggccgcagcctcccacaaggtcaaagagttctgtgaaaacctctcagctgactgtcgggagaatgtgatcatgtcccagatcttgccctgcatcaaggagctggtgtccgatgccaaccaacatgtcaagtctgccctggcctcagtcatcatgggtctctctcccatcttgggcaaagacaacaccatcgagcacctcttgcccctcttcctggctcagctgaaggatgagtgccctgaggtacggctgaacatcatctctaacctggactgtgtgaacgaggtgattggcatccggcagctgtcccagtccctgctccctgccattgtggagctggctgaggacgccaagtggcgggtgcggctggccatcattgagtacatgcccctcctggctggacagctgggagtggagttctttgatgagaaacttaactccttgtgcatggcctggcttgtggatcatgtatatgccatccgcgaggcagccaccagcaacctgaagaagctagtggaaaagtttgggaaggagtgggcccatgccacaatcatccccaaggtcttggccatgtccggagaccccaactacctgcaccgcatgactacgctcttctgcatcaatgtgctgtctgaggtctgtgggcaggacatcaccaccaagcacatgctacccacggttctgcgcatggctggggacccggttgccaatgtccgcttcaatgtggccaagtctctgcagaagatagggcccatcctggacaacagtccgatttccagtttatgggtcctctagatcgacctg

SEQ ID NO: 736683 - DNA, 2453 bp, Homo sapiens
  misc_feature (2113)..(2115): n is a, c, g, or t
  misc_feature (2120)..(2120): n is a, c, g, or t
  misc_feature (2124)..(2124): n is a, c, g, or t
  misc_feature (2127)..(2127): n is a, c, g, or t
gtggagcagcccctgtaaactggctcgggcgcccccacgcccgcccttccttcttctcccagcattgcccccccccacgtttcagcacagcgctggccgcagtctgacaggaaagggacggagccaagatggcggcggccgacggcgacgactcgctgtaccccatcgcggtgctcatagacgaactccgcaatgaggacgttcaggtccggaggctacgggggacttggggaagacgcggaggggtacctgggggcacgggcggccctcgcggagaagactcagcgttcgctgggagtggcggaagggggcgacggccaatcagccttcgcctcaacagcatcaagaagctgtccaccatcgccttggcccttggggttgaaaggacccgaagtgagcttctgcctttccttacagataccatctatgatgaagatgaggtcctcctggccctggcagaacagctgggaaccttcactaccctggtgggaggcccagagtacgtgcactgcctgctgccaccgctggagtcgctggccacagtggaggagacagtggtgcgggacaaggcagtggagtccttacgggccatctcacacgagcactcgccctctgacctggaggcgcactttgtgccgctagtgaagcggctggcgggcggcgactggttcacctcccgcacctcggcctgcggcctcttctccgtctgctacccccgagtgtccagtgctgtgaaggcggaacttcgacagtacttccggaacctgtgctcagatgacacccccatggtgcggcgggccgcagcctccaagctgggggagtttgccaaggtgctggagctggacaacgtcaagagtgagatcatccccatgttctccaacctggcctctgacgagcaggactcggtgcggctgctggcggtggaggcgtgcgtgaacatcgcccagcttctgccccaggaggatctggaggccctggtgatgcccactctgcgccaggccgctgaagacaagtcctggcgcgtccgctacatggtgggctgacaagttcacagagctccagaaagcagtggggcctgagatcaccaagacagacctggtccctgccttccagaacctgatgaaagactgtgaggccgaggtgagggccgcagcctcccacaaggtcaaagagttctgtgaaaacctctcagctgactgtcgggagaatgtgatcatgtcccagatcttgccctgcatcaaggagctggtgtccgatgccaaccaacatgtcaagtctgccctggcctcagtcatcatgggtctctctcccatcttgggcaaagacaacaccatcgagcacctcttgcccctcttcctggctcagctgaaggatgagtgccctgaggtacggctgaacatcatctctaacctggactgtgtgaacgaggtgattggcatccggcagctgtcccagtccctgctccctgccattgtggagctggctgaggacgccaagtggcgggtgcggctggccatcattgagtacatgcccctcctggctggacagctgggagtggagttctttgatgagaaacttaactccttgtgcatggcctggcttgtggatcatgtatatgccatccgcgaggcagccaccagcaacctgaagaagctagtggaaaagtttgggaaggagtgggcccatgccacaatcatccccaaggtcttggccatgtccggagaccccaactacctgcaccgcatgactacgctcttctgcatcaatgtgctgtctgaggtctgtgggcaggacatcaccaccaagcacatgctacccacggttctgcgcatggctggggacccggttgccaatgtccgcttcaatgtggccaagtctctgcagaagatagggcccatcctggacaacagcacggttcctcctctccccagcctgggaagatgtctcactgtccacctcccccatttacttctccacctcccgtcctccccatcattggtttttttttgtgtgtcaactgtgccgtttttattttattccttttattttcccccttttcacagagaaataaaggtctagaagtaaaaaaaaaaaaaaaaaaaaaaaaaaaaannnaaacnaaanaanaaaaagaaaagcagaaagaaagagcgagagagaaccagaaaagaagaaagagagagcgaggaggtgaggggcggggggcggaggacgaagagtgagcagcagaggtggggggagcggcgggggacgaaagacagacgagcgtagggaggagcgagagcaccagcagcggcgcgcggaagaaggagggggggtagcccaaaaagaaagaaagcagaggggggggagagaagagggggggaagaagacaggcagagagacaggggagagaccgcggaggacaacgaaggaggcgggagaacaagggcggagaagtaagtgtcgcggca

SEQ ID NO: 736684 - DNA, 1737 bp, Homo sapiens
gtggagcagcccctgtaaactggctcgggcgcccccacgcccgcccttccttcttctcccagcattgcccccccccacgtttcagcacagcgctggccgcagtctgacaggaaagggacggagccaagatggcggcggccgacggcgacgactcgctgtaccccatcgcggtgctcatagacgaactccgcaatgaggacgttcaggtccggaggctacgggggacttggggaagacgcggaggggtacctgggggcacgggcggccctcgcggagaagactcagcgttcgctgggagtggcggaagggggcgacggccaatcagccttcgcctcaacagcatcaagaagctgtccaccatcgccttggcccttggggttgaaaggacccgaagtgagcttctgcctttccttacagataccatctatgatgaagatgaggtcctcctggccctggcagaacagctgggaaccttcactaccctggtgggaggcccagagtacgtgcactgcctgctgccaccgctggagtcgctggccacagtggaggagacagtggtgcgggacaaggcagtggagtccttacgggccatctcacacgagcactcgccctctgacctggaggcgcactttgtgccgctagtgaagcggctggcgggcggcgactggttcacctcccgcacctcggcctgcggcctcttctccgtctgctacccccgagtgtccagtgctgtgaaggcggaacttcgacagtacttccggaacctgtgctcagatgacacccccatggtgcggcgggccgcagcctccaagctgggggagtttgccaaggtgctggagctggacaacgtcaagagtgagatcatccccatgttctccaacctggcctctgacgagcaggactcggtgcggctgctggcggtggaggcgtgcgtgaacatcgcccagcttctgccccaggaggatctggaggccctggtgatgcccactctgcgccaggccgctgaagacaagtcctggcgcgtccgctacatggtgggctgacaagttcacagagctccagaaagcagtggggcctgagatcaccaagacagacctggtccctgccttccagaacctgatgaaagactgtgaggccgaggtgagggccgcagcctcccacaaggtcaaagagttctgtgaaaacctctcagctgactgtcgggagaatgtgatcatgtcccagatcttgccctgcatcaaggagctggtgtccgatgccaaccaacatgtcaagtctgccctggcctcagtcatcatgggtctctctcccatcttgggcaaagacaacaccatcgagcacctcttgcccctcttcctggctcagctgaaggatgagtgccctgaggtacggctgaacatcatctctaacctggactgtgtgaacgaggtgattggcatccggcagctgtcccagtccctgctccctgccattgtggagctggctgaggacgccaagtggcgggtgcggctggccatcattgagtacatgcccctcctggctggacagctgggagtggagttctttgatgagaaacttaactccttgtgcatggcctggcttgtggatcatgtatatgccatccgcgaggcagccattaaaaagacggccagtcgtatgggcggccgagggaagatgcgggggaaagtgcagccaagcctcgcgatgttgcccatgcacggagagcgattaaccagc

SEQ ID NO: 736685 - DNA, 1758 bp, Homo sapiens
  misc_feature (1559)..(1559): n is a, c, g, or t
  misc_feature (1577)..(1577): n is a, c, g, or t
  misc_feature (1605)..(1605): n is a, c, g, or t
  misc_feature (1607)..(1607): n is a, c, g, or t
  misc_feature (1610)..(1610): n is a, c, g, or t
  misc_feature (1612)..(1614): n is a, c, g, or t
  misc_feature (1618)..(1618): n is a, c, g, or t
  misc_feature (1621)..(1621): n is a, c, g, or t
  misc_feature (1624)..(1624): n is a, c, g, or t
  misc_feature (1636)..(1636): n is a, c, g, or t
  misc_feature (1639)..(1639): n is a, c, g, or t
  misc_feature (1647)..(1649): n is a, c, g, or t
  misc_feature (1653)..(1653): n is a, c, g, or t
  misc_feature (1664)..(1664): n is a, c, g, or t
  misc_feature (1666)..(1666): n is a, c, g, or t
  misc_feature (1671)..(1671): n is a, c, g, or t
gtggagcagcccctgtaaactggctcgggcgcccccacgcccgcccttccttcttctcccagcattgcccccccccacgtttcagcacagcgctggccgcagtctgacaggaaagggacggagccaagatggcggcggccgacggcgacgactcgctgtaccccatcgcggtgctcatagacgaactccgcaatgaggacgttcaggtccggaggctacgggggacttggggaagacgcggaggggtacctgggggcacgggcggccctcgcggagaagactcagcgttcgctgggagtggcggaagggggcgacggccaatcagccttcgcctcaacagcatcaagaagctgtccaccatcgccttggcccttggggttgaaaggacccgaagtgagcttctgcctttccttacagataccatctatgatgaagatgaggtcctcctggccctggcagaacagctgggaaccttcactaccctggtgggaggcccagagtacgtgcactgcctgctgccaccgctggagtcgctggccacagtggaggagacagtggtgcgggacaaggcagtggagtccttacgggccatctcacacgagcactcgccctctgacctggaggcgcactttgtgccgctagtgaagcggctggcgggcggcgactggttcacctcccgcacctcggcctgcggcctcttctccgtctgctacccccgagtgtccagtgctgtgaaggcggaacttcgacagtacttccggaacctgtgctcagatgacacccccatggtgcggcgggccgcagcctccaagctgggggagtttgccaaggtgctggagctggacaacgtcaagagtgagatcatccccatgttctccaacctggcctctgacgagcaggactcggtgcggctgctggcggtggaggcgtgcgtgaacatcgcccagcttctgccccaggaggatctggaggccctggtgatgcccactctgcgccaggccgctgaagacaagtcctggcgcgtccgctacatggtgggctgacaagttcacagagctccagaaagcagtggggcctgagatcaccaagacagacctggtccctgccttccagaacctgatgaaagactgtgaggccgaggtgagggccgcagcctcccacaaggtcaaagagttctgtgaaaacctctcagctgactgtcgggagaatgtgatcatgtcccagatcttgccctgcatcaaggagctggtgtccgatgccaaccaacatgtcaagtctgccctggcctcagtcatcatgggtctctctcccatcttgggcaaagacaacaccatcgagcacctcttgcccctcttcctggctcagctgaaggatgagtgccctgaggtacggctgaacatcatctctaacctggactgtgtgaacgaggtgattggcatccggcagctgtcccagtccctgctccctgccattgtggagctggctgaggacgccaagtggcgggtgcggctggccatcattgagtacatgcccctcctggctggacagctgggagtggnattccttgatgaagaacntaactcccttgggcatgggcctggcctngnggnannntggnatntgnccatcccccganggnagcccccnnncaancctggaaaaancntaggngggaaaaagattttgggaaaagaaatggggggcccccagtgcccacaaatcggttccgccacagggtccctgtgggccatgtgttcc

SEQ ID NO: 736686 - DNA, 2332 bp, Homo sapiens
  misc_feature (1992)..(1994): n is a, c, g, or t
  misc_feature (1999)..(1999): n is a, c, g, or t
  misc_feature (2003)..(2003): n is a, c, g, or t
  misc_feature (2006)..(2006): n is a, c, g, or t
gtggagcagcccctgtaaactggctcgggcgcccccacgcccgcccttccttcttctcccagcattgcccccccccacgtttcagcacagcgctggccgcagtctgacaggaaagggacggagccaagatggcggcggccgacggcgacgactcgctgtaccccatcgcggtgctcatagacgaactccgcaatgaggacgttcaggtccggaggctacgggggacttggggaagacgcggaggggtacctgggggcacgggcggccctcgcggagaagactcagcgttcgctgggagtggcggaagggggcgacggccaatcagccttcgcctcaacagcatcaagaagctgtccaccatcgccttggcccttggggttgaaaggacccgaagtgagcttctgcctttccttacagataccatctatgatgaagatgaggtcctcctggccctggcagaacagctgggaaccttcactaccctggtgggaggcccagagtacgtgcactgcctgctgccaccgctggagtcgctggccacagtggaggagacagtggtgcgggacaaggcagtggagtccttacgggccatctcacacgagcactcgccctctgacctggaggcgcactttgtgccgctagtgaagcggctggcgggcggcgactggttcacctcccgcacctcggcctgcggcctcttctccgtctgctacccccgagtgtccagtgctgtgaaggcggaacttcgacagtacttccggaacctgtgctcagatgacacccccatggtgcggcgggccgcagcctccaagctgggggagtttgccaaggtgctggagctggacaacgtcaagagtgagatcatccccatgttctccaacctggcctctgacgagcaggactcggtgcggctgctggcggtggaggcgtgcgtgaacatcgcccagcttctgccccaggaggatctggaggccctggtgatgcccactctgcgccaggccgctgaagacaagtcctggcgcgtccgctacatggtgggctgacaagttcacagagctccagaaagcagtggggcctgagatcaccaagacagacctggtccctgccttccagaacctgatgaaagactgtgaggccgaggtgagggccgcagcctcccacaaggtcaaagagttctgtgaaaacctctcagctgactgtcgggagaatgtgatcatgtcccagatcttgccctgcatcaaggagctggtgtccgatgccaaccaacatgtcaagtctgccctggcctcagtcatcatgggtctctctcccatcttgggcaaagacaacaccatcgagcacctcttgcccctcttcctggctcagctgaaggatgagtgccctgaggtacggctgaacatcatctctaacctggactcaccttgcagagtgaagtcaagcccatcctagagaagctgacccaggaccaggatgtggacgtcaaatactttgcccaggaggctctgactgttctgtctctcgcctgatgctggaagaggagcaaacactggcctctggtgtccaccctccaacccccacaagtccctctttggggagacactggggggcctttggctgtcactccctgtgcatggtctgaccccaggccccttcccccagcacggttcctcctctccccagcctgggaagatgtctcactgtccacctcccaacgggctaggggagcacggggttggacaggacagtgaccttgggaggaaggggctactccgcccacgtcagggagagatgtgagcatcccgggtcactggatcctgctgctgtaatgggaacccctcccccatttacttctccacctcccgtcctccccatcattggtttttttttgtgtgtcaactgtgccgtttttattttattccttttattttcccccttttcacagagaaataaaggtctagaagtaaaaaaaaaaaaaaaaaaaaaaaaaaaaannnaaacnaaanaanaaaaagaaaagcagaaagaaagagcgagagagaaccagaaaagaagaaagagagagcgaggaggtgaggggcggggggcggaggacgaagagtgagcagcagaggtggggggagcggcgggggacgaaagacagacgagcgtagggaggagcgagagcaccagcagcggcgcgcggaagaaggagggggggtagcccaaaaagaaagaaagcagaggggggggagagaagagggggggaagaagacaggcagagagacaggggagagaccgcggaggacaacgaaggaggcgggagaacaagggcggagaagtaagtgtcgcggca

SEQ ID NO: 736687 - DNA, 1403 bp, Homo sapiens
  misc_feature (1250)..(1250): n is a, c, g, or t
  misc_feature (1253)..(1253): n is a, c, g, or t
  misc_feature (1255)..(1255): n is a, c, g, or t
gtggagcagcccctgtaaactggctcgggcgcccccacgcccgcccttccttcttctcccagcattgcccccccccacgtttcagcacagcgctggccgcagtctgacaggaaagggacggagccaagatggcggcggccgacggcgacgactcgctgtaccccatcgcggtgctcatagacgaactccgcaatgaggacgttcaggtccggaggctacgggggacttggggaagacgcggaggggtacctgggggcacgggcggccctcgcggagaagactcagcgttcgctgggagtggcggaagggggcgacggccaatcagccttcgcctcaacagcatcaagaagctgtccaccatcgccttggcccttggggttgaaaggacccgaagtgagcttctgcctttccttacagataccatctatgatgaagatgaggtcctcctggccctggcagaacagctgggaaccttcactaccctggtgggaggcccagagtacgtgcactgcctgctgccaccgctggagtcgctggccacagtggaggagacagtggtgcgggacaaggcagtggagtccttacgggccatctcacacgagcactcgccctctgacctggaggcgcactttgtgccgctagtgaagcggctggcgggcggcgactggttcacctcccgcacctcggcctgcggcctcttctccgtctgctacccccgagtgtccagtgctgtgaaggcggaacttcgacagtacttccggaacctgtgctcagatgacacccccatggtgcggcgggccgcagcctccaagctgggggagtttgccaaggtgctggagctggacaacgtcaagagtgagatcatccccatgttctccaacctggcctctgacgagcaggactcggtgcggctgctggcggtggaggcgtgcgtgaacatcgcccagcttctgccccaggaggatctggaggccctggtgatgcccactctgcgccaggccgctgaagacaagtcctggcgcgtccgctacatggtgggctgacaagttcacagagctccagaaagcagtggggcctgagatcaccaagacagacctggtccctgccttccagaacctgatgaaagactgtgaggccgaggtgagggccgcagcctcccacaaggtcaaagagttctgtgaaaacctctcagctgactgtcgggagaatgtgatcatgtcccagatcttgccctgcatcaagggaacctnggngntcccgaatgcccaacccaacctggccaagatctggccccgtggctcctcaaagcctctttgggggggccgcctttccccacaccttctgggggtaaagagacaaacacaatcctccggagacacccctctttttgggccccctccttt

SEQ ID NO: 736688 - DNA, 2942 bp, Homo sapiens
  misc_feature (2602)..(2604): n is a, c, g, or t
  misc_feature (2609)..(2609): n is a, c, g, or t
  misc_feature (2613)..(2613): n is a, c, g, or t
  misc_feature (2616)..(2616): n is a, c, g, or t
gtggagcagcccctgtaaactggctcgggcgcccccacgcccgcccttccttcttctcccagcattgcccccccccacgtttcagcacagcgctggccgcagtctgacaggaaagggacggagccaagatggcggcggccgacggcgacgactcgctgtaccccatcgcggtgctcatagacgaactccgcaatgaggacgttcaggtccggaggctacgggggacttggggaagacgcggaggggtacctgggggcacgggcggccctcgcggagaagactcagcgttcgctgggagtggcggaagggggcgacggccaatcagccttcgcctcaacagcatcaagaagctgtccaccatcgccttggcccttggggttgaaaggacccgaagtgagcttctgcctttccttacagataccatctatgatgaagatgaggtcctcctggccctggcagaacagctgggaaccttcactaccctggtgggaggcccagagtacgtgcactgcctgctgccaccgctggagtcgctggccacagtggaggagacagtggtgcgggacaaggcagtggagtccttacgggccatctcacacgagcactcgccctctgacctggaggcgcactttgtgccgctagtgaagcggctggcgggcggcgactggttcacctcccgcacctcggcctgcggcctcttctccgtctgctacccccgagtgtccagtgctgtgaaggcggaacttcgacagtacttccggaacctgtgctcagatgacacccccatggtgcggcgggccgcagcctccaagctgggggagtttgccaaggtgctggagctggacaacgtcaagagtgagatcatccccatgttctccaacctggcctctgacgagcaggactcggtgcggctgctggcggtggaggcgtgcgtgaacatcgcccagcttctgccccaggaggatctggaggccctggtgatgcccactctgcgccaggccgctgaagacaagtcctggcgcgtccgctacatggtgggctgacaagttcacagagctccagaaagcagtggggcctgagatcaccaagacagacctggtccctgccttccagaacctgatgaaagactgtgagttctgtgaaaacctctcagctgactgtcgggagaatgtgatcatgtcccagatcttgccctgcatcaaggagctggtgtccgatgccaaccaacatgtcaagtctgccctggcctcagtcatcatgggtctctctcccatcttgggcaaagacaacaccatcgagcacctcttgcccctcttcctggctcagctgaaggatgagtgccctgaggtacggctgaacatcatctctaacctggactgtgtgaacgaggtgattggcatccggcagctgtcccagtccctgctccctgccattgtggagctggctgaggacgccaagtggcgggtgcggctggccatcattgagtacatgcccctcctggctggacagctgggagtggagttctttgatgagaaacttaactccttgtgcatggcctggcttgtggatcatgtatatgccatccgcgaggcagccaccagcaacctgaagaagctagtggaaaagtttgggaaggagtgggcccatgccacaatcatccccaaggtcttggccatgtccggagaccccaactacctgcaccgcatgactacgctcttctgcatcaatgtgctgtctgaggtctgtgggcaggacatcaccaccaagcacatgctacccacggttctgcgcatggctggggacccggttgccaatgtccgcttcaatgtggccaagtctctgcagaagatagggcccatcctggacaacagcaccttgcagagtgaagtcaagcccatcctagagaagctgacccaggaccaggatgtggacgtcaaatactttgcccaggaggctctgactggtaagacctagaaagcacggagccctagcaggagggtggactttgaggacaggcactgggcctgtgggcagcagcttctgggagggggaggtaccttggcattgtgggcagagagagggctctggttctgattcttgcctgttcctgttttcctagttctgtctctcgcctgatgctggaagaggagcaaacactggcctctggtgtccaccctccaacccccacaagtccctctttggggagacactggggggcctttggctgtcactccctgtgcatggtctgaccccaggccccttcccccagcacggttcctcctctccccagcctgggaagatgtctcactgtccacctcccaacgggctaggggagcacggggttggacaggacagtgaccttgggaggaaggggctactccgcccacgtcagggagagatgtgagcatcccgggtcactggatcctgctgctgtaatgggaacccctcccccatttacttctccacctcccgtcctccccatcattggtttttttttgtgtgtcaactgtgccgtttttattttattccttttattttcccccttttcacagagaaataaaggtctagaagtaaaaaaaaaaaaaaaaaaaaaaaaaaaaannnaaacnaaanaanaaaaagaaaagcagaaagaaagagcgagagagaaccagaaaagaagaaagagagagcgaggaggtgaggggcggggggcggaggacgaagagtgagcagcagaggtggggggagcggcgggggacgaaagacagacgagcgtagggaggagcgagagcaccagcagcggcgcgcggaagaaggagggggggtagcccaaaaagaaagaaagcagaggggggggagagaagagggggggaagaagacaggcagagagacaggggagagaccgcggaggacaacgaaggaggcgggagaacaagggcggagaagtaagtgtcgcggca

SEQ ID NO: 736689 - DNA, 2434 bp, Homo sapiens
  misc_feature (18)..(18): n is a, c, g, or t
gattcttgggttccgcgngtagtttcggaaggagacatcgaagcagggcgaggcgcagagggcgttgcggactcatgccccagtcggcagtgcggggtcccaagccctgcagtgctacagctttgagcacacctactttggcccctttgacctcagggccatgaagctgcccagcatctcctgtcctcatgagtgctttgaggctatcctgtctctggacaccgggtatcgcgcgccggtgaccctggtgcggaagggctgctggaccgggcctcctgcgggccagacgcaatcgaacccggacgcgctgccgccagactactcggtggtgcgcggctgcacaactgacaaatgcaacgcccacctcatgactcatgacgccctccccaacctgagccaagcacccgacccgccgacgctcagcggcgccgagtgctacgcctgtatcggggtccaccaggatgactgcgctatcggcaggtcccgacgagtccagtgtcaccaggaccagaccgcctgcttccagggcaatggcagaatgacagttggcaatttctcagtccctgtgtacatcagaacctgccaccggccctcctgcaccaccgagggcaccaccagcccctggacagccatcgacctccagggctcctgctgtgaggggtacctctgcaacaggaaatccatgacccagcccttcaccagtgcttcagccaccacccctccccgagcactacaggtcctggccctgctcctcccagtcctcctgctggtggggctctcagcatagaccgcccctccaggatgctggggacagggctcacacacctcattcttgctgcttcagcccctatcacatagctcactggaaaatgatgttaaagtaagaattgcactcctgtccctctggccttccatctctcccgcccttgtgccccacaacctggccaacagtactggaagaaactggacacagtcaccagcatcccaggggagggcaaaacagccatgtcgtgccctgatgaagagcaattctgatcacagctgttactcactgagcaccagccaggcaccaggcacccccataacacggcttcctgtgctctccctccagagcctgtcgcagctctaggagggagctatacaatgatgtctttattagtgtcatcatgagaagcccaataagcagtatgccctaacagttagtaggccaggctctggagctaagctgcatgggttcaaatcccagctccaccattcagcctgcagagaccatgagcgagttacttaagccaggctctggagctaagctgcatgggttcaaatcccagctccagcattcagcctacagagaccatgggtgagttacttaagccaggctctggagctaagctgcatgggttcaaatcccagctccaccattcagcctgcagagactgtgggtgagttacttgagctctctgtgccaatattttctcacctataaggtggaggtgaaaataaactctataacatgacaagaactacttcacagtagttgcagtgaggattcaacgagatgaacatttagtacttgggacacagcagtggcccagtgtaaatgggctacttgtcataagccctaagtcacaggtcaacaaactgagaggcaaaagcacttggttgagcttgtgtatctagtgagtatggattcagggaccagattcccagccccacgaactgctaagcaaccccacctcctaaacacatgagtgccgattaacttcacagaaaaacacacaaggcaaagttcagcgaggtgaaattctccaagctataaagatcagggaagacttcctggaggaattcacccttgagcaaaatcctaaaggatcaatagtagctggcaaaaagaagcaggaggaagcgcattctaggtagaggagacagcctggacaaaggtctgagggaggaaggaacacaaggagtgcaggacactttcataactgcatgaacttcatagagatgggatcctttagcatgttctctgtgcacatgcttgaccatgttctttcacatgctttttgccacttgatctttccagcaactcagtgagagaagcaaaaaagtaagttgcatcctgctattgtctgaatgtttgtgtctccccaaaattcatcttttgaaacctaattaccaaagtgatattactgggaggtggggcctttgggaggtggtgagatcatgagggtggagcccccatgaataggattagtgcccttataaaagaggccctggagagctgccttgccccttccaccacatgagaacacagccagcaggtgcctataagcaagaaagtgggttctcaccagccatcgaatctgctggtgcattgattgcagacttcccagactccagagctatgagacataaatttctgttgtgtataagccat

SEQ ID NO: 736690 - DNA, 2449 bp, Homo sapiens
agctgtcccaggtggcccagctcagcaatggcaatgggggtccccagagtcattctgctctgcctctttggggctgcgctctgcctgacagggtcccaagccctgcagtgctacagctttgagcacacctactttggcccctttgacctcagggccatgaagctgcccagcatctcctgtcctcatgagtgctttgaggctatcctgtctctggacaccgggtatcgcgcgccggtgaccctggtgcggaagggctgctggaccgggcctcctgcgggccagacgcaatcgaacccggacgcgctgccgccagactactcggtggtgcgcggctgcacaactgacaaatgcaacgcccacctcatgactcatgacgccctccccaacctgagccaagcacccgacccgccgacgctcagcggcgccgagtgctacgcctgtatcggggtccaccaggatgactgcgctatcggcaggtcccgacgagtccagtgtcaccaggaccagaccgcctgcttccagggcaatggcagaatgacagttggcaatttctcagtccctgtgtacatcagaacctgccaccggccctcctgcaccaccgagggcaccaccagcccctggacagccatcgacctccagggctcctgctgtgaggggtacctctgcaacaggaaatccatgacccagcccttcaccagtgcttcagccaccacccctccccgagcactacaggtcctggccctgctcctcccagtcctcctgctggtggggctctcagcatagaccgcccctccaggatgctggggacagggctcacacacctcattcttgctgcttcagcccctatcacatagctcactggaaaatgatgttaaagtaagaattgcactcctgtccctctggccttccatctctcccgcccttgtgccccacaacctggccaacagtactggaagaaactggacacagtcaccagcatcccaggggagggcaaaacagccatgtcgtgccctgatgaagagcaattctgatcacagctgttactcactgagcaccagccaggcaccaggcacccccataacacggcttcctgtgctctccctccagagcctgtcgcagctctaggagggagctatacaatgatgtctttattagtgtcatcatgagaagcccaataagcagtatgccctaacagttagtaggccaggctctggagctaagctgcatgggttcaaatcccagctccaccattcagcctgcagagaccatgagcgagttacttaagccaggctctggagctaagctgcatgggttcaaatcccagctccagcattcagcctacagagaccatgggtgagttacttaagccaggctctggagctaagctgcatgggttcaaatcccagctccaccattcagcctgcagagactgtgggtgagttacttgagctctctgtgccaatattttctcacctataaggtggaggtgaaaataaactctataacatgacaagaactacttcacagtagttgcagtgaggattcaacgagatgaacatttagtacttgggacacagcagtggcccagtgtaaatgggctacttgtcataagccctaagtcacaggtcaacaaactgagaggcaaaagcacttggttgagcttgtgtatctagtgagtatggattcagggaccagattcccagccccacgaactgctaagcaaccccacctcctaaacacatgagtgccgattaacttcacagaaaaacacacaaggcaaagttcagcgaggtgaaattctccaagctataaagatcagggaagacttcctggaggaattcacccttgagcaaaatcctaaaggatcaatagtagctggcaaaaagaagcaggaggaagcgcattctaggtagaggagacagcctggacaaaggtctgagggaggaaggaacacaaggagtgcaggacactttcatgagtgcaggacactttcataactgcatgaacttcatagagatgggatcctttagcatgttctctgtgcacatgcttgaccatgttctttcacatgctttttgccacttgatctttccagcaactcagtgagagaagcaaaaaagtaagttgcatcctgctattgtctgaatgtttgtgtctccccaaaattcatcttttgaaacctaattaccaaagtgatattactgggaggtggggcctttgggaggtggtgagatcatgagggtggagcccccatgaataggattagtgcccttataaaagaggccctggagagctgccttgccccttccaccacatgagaacacagccagcaggtgcctataagcaagaaagtgggttctcaccagccatcgaatctgctggtgcattgattgcagacttcccagactccagagctatgagacataaatttctgttgtgtataagccat

SEQ ID NO: 736691 - DNA, 973 bp, Homo sapiens
ttttaaaatgaaagggtgactcatgggagaagcctctggaactgcctttgaaaaacaaccagccaagacatgagaaattagttcctctgccatttgggggtttcctgccaactgctgggttttccttttgcacagcagggaggaaggacgcctgtttcccttggtcccggtgaggccaggcctcagcttcctgcccacccgccactgctgctggggcagggaggcagtttccggctgtggggacccagacaatgcctggccaaggcaccatcgtcctcttcctggacacagctcccgcctcatcccagggtctggcctgggacacgccctagaggccctcagccctgagtcactgcaccatgcagatccaccctgattctggtccctgcagagcaggctcctacacaaggcaagaagatgctccagggacaagccaaggtgtatgcaaggcccaggtgcctgagaaacacgtctcaccgaccttggggcaggggctgttacaagaggcttatagtctagtggcagagacaaaaaccacactcaaatcattagtgtacggtatgcactgctcagggactcaaatatgtgacaggaggctccaaacaagagcggagacaaggcgtaaatagccccctgtggactggatgttctgactcctggatggcctccagaaggatgccttttacggtctgtgaaagagctcagggaccaagatgctcaaagcccttcatgcccaagagcccctcctcaggctgggacacgggaagcagagctcggaggtggaactcgtgactgtgtatgggcacatgtgagtgcgtgtgtgtggacagccaggcttagtgtagacaacgtgtgaggctcagaccccaagtgctgactacacctatgcacatccccacctgcgtgtgaaagaagatgctagaaaagaacaaaaataacttaaaaaataaatccaataagatggctggaacat

SEQ ID NO: 736692 - DNA, 403 bp, Homo sapiens; identical to SEQ ID NO: 62192
  misc_feature (299)..(299): n is a, c, g, or t
  misc_feature (310)..(310): n is a, c, g, or t
  misc_feature (332)..(332): n is a, c, g, or t
  misc_feature (371)..(371): n is a, c, g, or t

SEQ ID NO: 736693 - DNA, 585 bp, Homo sapiens
  misc_feature (294)..(294): n is a, c, g, or t
tcccggaggcccaagaaggtctgcatcgtgaaggtggtggggacacggaacctgtggaagaacattgtggtcctgtgtgtgaactcgctgacggggtacgggatccaccactgctttgccaggagcatgatgggccacgaggtgaaggtgccgctcctggagaacttctatgctgactactataccacggccagcatcgcgctggtgtcctgcctggccatgtgcgtggtggtccgattcctcgggcgcaggggagggctgctgctcttcatgatcctcaccgccctggcctcnctcctgcagctcggcctcctcaacctgattggaaagtacagccagcacccagactcagggatgagtgacagcgtcaaggacaaattttccatcgcgttttccatcgtgggcatgtttgcctcccatgcggtggggagcctcagcgtgttcttctgtgcggagatcaccccgacggtgataaggtgtggcgggctggggctggtgctggccagcgcgggcttcggcatgctgacggcacccatcatcgagctgcacaaccagaaaggctacttcctgcaccacatcatcttt

SEQ ID NO: 736694 - DNA, 1892 bp, Homo sapiens
aacctgggatgtgcaccaaccccggagagcgagatcaaagggattggaaacagactggggactggcggggggagggggccggccagcctgtggagtcctccctgagaagcggagggcccggcttccaccgtgactccagcggcctgcttggggttttaattattattttgaaatttctgaatcgagctagagcgagagagcgagagatctccgtagactgcgactcgctggctttcgctccgagatgatgcagagtgcgactgtccccgcggaaggggctgtcaaggggctcccggagatgctaggtgtgccgatgcaacagattccccagtgcgctggctgcaaccagcacatcctggacaagttcatcctgaaggtcctggacagacactggcacagctcctgcctcaagtgtgcagactgccagatgcagctggcggacaggtgcttctccagggctgggagcgtctactgcaaggaggacttcttcaagcgcttcggcacaaaatgcacggcctgccagcagggtatccccccaacccaggtggtccgcaaggcccaggactttgtctaccacctgcactgctttgcttgcatcatctgcaaccggcagctggccacgggggacgaattctacctcatggaggacgggcggctggtgtgcaaggaagactacgagacagccaagcagaacgatgactcagaggctggagctaagcggccccggaccaccatcacagccaagcagctggagacattaaagaatgcatacaagaactcccccaagcctgcccggcacgtgagggagcagctgtcctcagagacaggcctggacatgagggtcgtacaggtttggtttcagaacagaagggccaaagagaaacgcctgaagaaggatgcagggcggcaccgctgggggcagttctataagagcgtcaagaggagccggggcagcagcaagcaggagaaggagagctctgcagaggactgtggggttagtgacagtgagctgagcttccgagaggatcaaattctctcagaacttggccacaccaataggatttatggcaacgtgggggacgttacaggcggacagttaatgaatgggagcttctccatggacgggacaggacaatcctatcaggacttgagggatgggagcccctatggaatcccccagtctccatcctccatatcgtccctgccatcccacgctcctttgctcaatgggctggattacacggtggacagtaatttgggcatcattgcgcatgcagggcagggagtaagccagacgctgagagccatggctgggggacccacctctgacatctccacaggaagcagtgtaggctatcccgactttccaactagcccaggctcttggctcgatgaaatggatcatcctcctttttaaacttctctcctccccaccctacctgcccccctggcttgagagaatatcttcaaggatcaaaagagacttgccttttaaggatcgaaagtacgccaatgtgaatttccattattttcaatggaagtcctccgctgattcctagaaggctgtgagaccacactagggcattgtttccctggggaagcagtgggagagcagactcatctcagaacacagcacagggggtaatggcctagagctctagggacactggcttgttgggtctctcccctgctgttctgcttaggggcttggctgctcagtgctttggtagcacaaggtgactgtgataggcccccttggcctttgggaactttgctccaactggtgtgtctcacacaatgcctcccaaaacactgctctcaccagaactgagactcctaaggtagaggcctcacagcccttgagtaaaataaaagtgatttctggaccatcc

SEQ ID NO: 736695 - DNA, 1626 bp, Homo sapiens
ctgttgggtgcaggtgggtccctgggctgacctatcattggtttctctgggaataatttctcaaagactaaaactgctcacctctgttggagagagaaattctttcaagtggcaaagattccattagatccccttaatgaaattctttaagaaaaaagaaggttcatttgccttaatcaagtcaattctttgtccccagtgaagagcttattgaatacagacagaaaccaagtcctttgatattgaacctctcttccagatagaccagaaggattttgtacagatgtctaagagtggtcctcagcttccctgaccatatgggcctgcttgcttcccaatcaactaaaccaagccctttctcagcttgaaagctttcagggtaaatgttgtcagcatgtagtttccatttgtgatgtggagacatctgacccacccagccttaggcattcatcctcctcagtgtagccagagtattagtacacgagccacaagggaccaacgagctcaccaaacatttgtccatccttctgggacctgggaatttagtctttgcaggtgtttcttgtttttctccttggcctgggttggcctctggatatcaggctgccatattggtgtgtctgacccatgcttggctgcaaggcagctgccatccttgggcatctttcctggtcatgtgtgttcctaggttgtgaagagcaggggaccatcagagtcctggcagctgacaataaatctccgttcttttgtccacagaggatcaaattctctcagaacttggccacaccaataggatttatggcaacgtgggggacgttacaggcggacagttaatgaatgggagcttctccatggacgggacaggacaatcctatcaggacttgagggatgggagcccctatggaatcccccagtctccatcctccatatcgtccctgccatcccacgctcctttgctcaatgggctggattacacggtggacagtaatttgggcatcattgcgcatgcagggcagggagtaagccagacgctgagagccatggctgggggacccacctctgacatctccacaggaagcagtgtaggctatcccgactttccaactagcccaggctcttggctcgatgaaatggatcatcctcctttttaaacttctctcctccccaccctacctgcccccctggcttgagagaatatcttcaaggatcaaaagagacttgccttttaaggatcgaaagtacgccaatgtgaatttccattattttcaatggaagtcctccgctgattcctagaaggctgtgagaccacactagggcattgtttccctggggaagcagtgggagagcagactcatctcagaacacagcacagggggtaatggcctagagctctagggacactggcttgttgggtctctcccctgctgttctgcttaggggcttggctgctcagtgctttggtagcacaaggtgactgtgataggcccccttggcctttgggaactttgctccaactggtgtgtctcacacaatgcctcccaaaacactgctctcaccagaactgagactcctaaggtagaggcctcacagcccttgagtaaaataaaagtgatttctggaccatcc

SEQ ID NO: 736696 - DNA, 1065 bp, Homo sapiens
  misc_feature (230)..(230): n is a, c, g, or t
  misc_feature (260)..(260): n is a, c, g, or t
  misc_feature (545)..(545): n is a, c, g, or t
tgtggaattgggtacattcaatctgatgagacttctgtgcagctgggctggcaggggagggttgaggcagggagctgagcagagaaaggactgctgtcctcacttttcagtggcttgggaaggcccgtggtgcaggagtcagtgccatgagagtggggacctctccactctgatgtcccctgtgcctcgcgctgtcctgcctacagcaggcaggcttaggtgcagaaagnatggaagggagggtgtgggaggaggcgcanctgctgcagataggccgaagccagtaagcagtggtttttccttgcagatgactcagaggctggagctaagcggccccggaccaccatcacagccaagcagctggagacattaaagaatgcatacaagaactcccccaagcctgcccggcacgtgagggagcagctgtcctcagagacaggcctggacatgagggtcgtacaggtgagatgccagcactcctgtgccctccggggatcccaggcccgggacaggggtggaaggtatcctgagtgacatcagctcangggtggttgggctcagggcttgaccccagggcttttgccagaactgaagacagagttctgaggcccacctggggaaaaaggggtggggccgcatcgcactccccaagacctgtgctcccattcaggcttcagtctgcttcccagccgcccgccctagggggtccctgggggctttgggtttgtggtggacgccccctgagtatgtcccttgtgcttgtgtggcaggtttggtttcagaacagaagggccaaagagaaacgcctgaagaaggatgcagggcggcaccgctgggggcagttctataagagcgtcaagaggagccggggcagcagcaagcaggagaaggagagctctgcagaggactgtggggttagtgacagtgagctgagcttccgaggtgagcagggctggaggggccagccgaggccttaggaaagtcccctgggaatctgtaatccctggcactcaggagggatctttcttgaggccttggcaactccctcctgaacacaggcttttc

SEQ ID NO: 736697 - DNA, 1450 bp, Homo sapiens; identical to SEQ ID NO: 62632

SEQ ID NO: 736698 - DNA, 304 bp, Homo sapiens
gagcttgcctgccagaagctcctctcccagcctgcgagcatttccaggctcttgtttcccatcagcctctgggtccaaactaaccacaggtctctgggtccttttccggtgtccttaaggttcttggactctgcatgtgctgccaggttgccagatttctaagaaggagtttgaagaggagaaaaggatttttgcatgtttagaaatcaaggttcaggagaatcttgacagtgaatgtgtctcattacattgaataacagctacaggatgttcgagagctgatttggagtcaaaaacgtatgag

SEQ ID NO: 736699 - DNA, 1674 bp, Homo sapiens
gagcttgcctgccagaagctcctctcccagcctgcgagcatttccaggctcttgtttcccatcagcctctgggtccaaactaaccacaggtctctgggtccttttccggtgtccttaaggttcttggactctgcatggttccctttagcctgtcttcgggcctgccacaattaaatgaccgcaagaaagaagtctatgctaagccccataatgaacgtttcaagcaagaaggatgagaattttagatctggaagtgtccgcgggacaggatcttgtcaagacctgatggggaagttctagagtgctgccaggttgccagatttctaagaaggagtttgaagaggagaaaaggatttttgcatgtttagaaatcaaggttcaggagaatcttgacagtgaatgtgtctcattacattgaataacagctacaggatgttcgagagctgttctggcttttctggattctgtgcttcaccaatagaggaatcccatggagcattaattagttcttgcaattccagaaccatgactgatgggttggtgacattcagggatgtggccatcgacttctctcaggaggagtgggaatgcctggaccctgctcagagggacttgtacgtggatgtaatgttggagaactatagtaacttggtgtcactgggtaaggtcatctgcctgaaataatttagagtctcctctttgcatcatcagttttctgcactggaaattacagggctatctttgaagaaaccaggtgaatttcttctcccccttcccaagggcatgcttttatacttgctgggttagaaatgggtttgttaaacacgttgatcttccccatccctcagtgagctttacaccattctcgggccctccctgcaatcacctctctcctttaatggccaaggggctggatttgcattatagaacatttatttcataactatggcaaagaaaccagatttcataaattctgcaaatattatattgaatatctactcctggccagccttgtgctgagcactgtcaattgaatcatgaacaagctttgataacttgcccattttcgtgcagtttactttgtagtaaagcagaaacatcaaataagtaaatttataaatagataaatagtatgtaatgaagcaaattctttggaaaaggtaaacagcataagggaatagaaaatgatgaggactgacagggctaatttaggtaagacagtcggggaacgctttcttgaacagagatgtggagcctgggatctctatgtgaatatctggcggaggaacagatcagtcacagtgaacagcaaatgcaaagaccctgttgttggaaaggaactttaccagaactctagagtagagttattaaaggaacatgtactaagaaattaggccagggagataggaaggggccagataatacattgttttgttgttcttgtttgtggaatttggattgtttagtctctttcagtctgaaacagttcacatgtctttccttgacttgcgtatatgtctgtgatgcttttgaagattacaggccagctattttgtatagtgttcctgaatgtgggtttgtctgctatttcttcatgattagatttagaatatggatctttggcaggattatcacagaattgatgctgcgttcttctccctgcattttgttggg

SEQ ID NO: 736700 - DNA, 1610 bp, Homo sapiens
gagcttgcctgccagaagctcctctcccagcctgcgagcatttccaggctcttgtttcccatcagcctctgggtccaaactaaccacaggtctctgggtccttttccggtgtccttaaggttcttggactctgcatggttccctttagcctgtcttcgggcctgccacaattaaatgaccgcaagaaagaagtctatgctaagccccataatgaacgtttcaagcaagaaggatgagaattttagatctggaagtgtccgcgggacaggatcttgtcaagacctgatggggaagttctagagtgctgccaggttgccagatttctaagaaggagtttgaagaggagaaaaggatttttgcatgtttagaaatcaaggttcagttctggcttttctggattctgtgcttcaccaatagaggaatcccatggagcattaattagttcttgcaattccagaaccatgactgatgggttggtgacattcagggatgtggccatcgacttctctcaggaggagtgggaatgcctggaccctgctcagagggacttgtacgtggatgtaatgttggagaactatagtaacttggtgtcactgggtaaggtcatctgcctgaaataatttagagtctcctctttgcatcatcagttttctgcactggaaattacagggctatctttgaagaaaccaggtgaatttcttctcccccttcccaagggcatgcttttatacttgctgggttagaaatgggtttgttaaacacgttgatcttccccatccctcagtgagctttacaccattctcgggccctccctgcaatcacctctctcctttaatggccaaggggctggatttgcattatagaacatttatttcataactatggcaaagaaaccagatttcataaattctgcaaatattatattgaatatctactcctggccagccttgtgctgagcactgtcaattgaatcatgaacaagctttgataacttgcccattttcgtgcagtttactttgtagtaaagcagaaacatcaaataagtaaatttataaatagataaatagtatgtaatgaagcaaattctttggaaaaggtaaacagcataagggaatagaaaatgatgaggactgacagggctaatttaggtaagacagtcggggaacgctttcttgaacagagatgtggagcctgggatctctatgtgaatatctggcggaggaacagatcagtcacagtgaacagcaaatgcaaagaccctgttgttggaaaggaactttaccagaactctagagtagagttattaaaggaacatgtactaagaaattaggccagggagataggaaggggccagataatacattgttttgttgttcttgtttgtggaatttggattgtttagtctctttcagtctgaaacagttcacatgtctttccttgacttgcgtatatgtctgtgatgcttttgaagattacaggccagctattttgtatagtgttcctgaatgtgggtttgtctgctatttcttcatgattagatttagaatatggatctttggcaggattatcacagaattgatgctgcgttcttctccctgcattttgttggg

SEQ ID NO: 736701 - DNA, 694 bp, Homo sapiens
  misc_feature (685)..(686): n is a, c, g, or t
  misc_feature (688)..(688): n is a, c, g, or t
  misc_feature (690)..(693): n is a, c, g, or t
gagcttgcctgccagaagctcctctcccagcctgcgagcatttccaggctcttgtttcccatcagcctctgggtccaaactaaccacaggtctctgggtccttttccggtgtccttaaggttcttggactctgcatgtgctgccaggttgccagatttctaagaaggagtttgaagaggagaaaaggatttttgcatgtttagaaatcaaggttcaggagaatcttgacagtgaatgtgtctcattacattgaataacagctacaggatgttcgagagctgatggagtctcgctctgtcgcccaggctggagtgcagtggtgcgatcttggctcactgcaagctccgcctcctgggttcacgctattctcctgcctcagcctcctgagtagctgggactacagttctggcttttctggattctgtgcttcaccaatagaggaatcccatggagcattaattagttcttgcaattccagaaccatgactgatgggttggtgacattcagggatgtggccatcgacttctctcaggaggagtgggaatgcctggaccctgctcagagggacttttttctgcactggaaattacagggctatctttgaagaaaccagatggagtcttgctctgtcacccaggctggagtgcagtggtgtgatctcggctcactgcaagctctgcctcnntngnnnng

SEQ ID NO: 736702 - DNA, 1981 bp, Homo sapiens; identical to SEQ ID NO: 56809

SEQ ID NO: 736703 - DNA, 730 bp, Homo sapiens
ccctcgaggccaataatgcggcacgaggcttcgctttgcctctgggcagccctcgaatccccctcccggcgcagcagagctcggaggcccgtgtcatccgcgtcagcatcgacaatgaccacgggaacctgtatcgaagcatcttgctgaccagtcaggacaaagcccccagcgtggtccggcgagccttgcagaagcacaatgtgccccagccctgggcctgtgactatcagctctttcaagtccttcctggggaccgggtgctcctgattcctgacaatgccaacgtcttctatgccatgagtccagtcgcccccagagacttcatgctgcggcggaaagaggggacccggaacactctgtctgtctccccaagctgaggcagccctgtcctctccacaagacacaagtcccacaggcaagcttgcgactcttctcctggaaagctgccatcccccagtagaggccactgtgctgtgtatcccaggaccaccacccaactgtagcccattggaccccatctctttttctgactctgttggtactagatccatattccaaagacatcagcccatgggtggctggtggagagctcaatcccataaatgtagaaagaggtggggcatggatacgtcaaatccctccccagagaaatcttataaatgttagagacgcatcagaagtgacagatgcggatgaaaatagtgaccagagttatgaaaaaaaaaaa

SEQ ID NO: 736704 - DNA, 1010 bp, Homo sapiens
agcggcgccactgagagggacgggcgccggccatggagcgcacagcaggcaaagagctggccctggcaccgctgcaggactggggtgaagagaccgaggacggcgcggtgtacagtgtctccctgcggcggcagcgcagtcagcgcaggagcccggcggagggccccgggggcagccaggctcccagccccattgccaataccttcctccactatcgaaccagcaaggtgagggtgctgagggcagcgcgcctggagcggctggtgggagagttggtgtttggagaccgtgagcaggaccccagcttcatgcccgccttcctggccacctaccggacctttgtacccactgcctgcctgctgggctttctgctgccaccaatgccaccgcccccacctcccgggtcagtagcgaaccataacctccgtattctccaccctagaaccccaactgggcacccccctccacctcctcaggtgtggaacctggaaacacctcccagacccagagccctcttcctaagcccccttctaggttcccccttcttcacctgctggggggcctcttcccagggtagagatcaagaagacagcggtacaagatctgagcttcaacaagaacctgaggtgggtccttcatccagataggggagtgcggggagggaaatccaagaggtcaaaggttagcagtcggactggggttttgaaaattgcaggttgggtaataagagactgggagtcaggtggggcgtggtggctcatgcctgtaatcccaacactttgggaggccgaggcaggtggatcactggaggtcaggagttagagaccatcctggccaatatggcgaaaccctgtctctactaaaaatacaacaacaacaaaaaaaggtagctgggtgtggtggcgcatgcctgtagtcccagctactcgggaggctgaggttgcagtgagtcaagatcaggccattgcactgcagccttggtgacacagtaagactctatctcaaaaaaa

SEQ ID NO: 736705 - DNA, 669 bp, Homo sapiens
agcggcgccactgagagggacgggcgccggccatggagcgcacagcaggcaaagagctggccctggcaccgctgcaggactggggtgaagagaccgaggacggcgcggtgtacagtgtctccctgcggcggcagcgcagtcagcgcaggagcccggcggagggccccgggggcagccaggctcccagccccattgccaataccttcctccactatcgaaccagcaaggtgagggtgctgagggcagcgcgcctggagcggctggtgggagagttggtgtttggagaccgtgagcaggaccccagcttcatgcccgccttcctggccacctaccggacctttgtacccactgcctgcctgctgggctttctgctgccaccaatgccaccgcccccacctcccgggtcagtagcgaaccataacctccgtattctccaccctagaaccccaactgggcacccccctccacctcctcaggtagagatcaagaagacagcggtacaagatctgagcttcaacaagaacctgagggctgtggtgtcagtgctgggctcctggctgcaggaccaccctcaggatttccgagaccaccctgcccattcggacctgggcagtgtccgaacctttctgggctgggcggccccagggagtgctgaggctcaaaaagcag

SEQ ID NO: 736706 - DNA, 5817 bp, Homo sapiens
agcggcgccactgagagggacgggcgccggccatggagcgcacagcaggcaaagagctggccctggcaccgctgcaggactggggtgaagagaccgaggacggcgcggtgtacagtgtctccctgcggcggcagcgcagtcagcgcaggagcccggcggagggccccgggggcagccaggctcccagccccattgccaataccttcctccactatcgaaccagcaaggtgagggtgctgagggcagcgcgcctggagcggctggtgggagagttggtgtttggagaccgtgagcaggaccccagcttcatgcccgccttcctggccacctaccggacctttgtacccactgcctgcctgctgggctttctgctgccaccaatgccaccgcccccacctcccgggtagagatcaagaagacagcggtacaagatctgagcttcaacaagaacctgagggctgtggtgtcagtgctgggctcctggctgcaggaccaccctcaggatttccgagacccccctgcccattcggacctgggcagtgtccgaacctttctgggctgggcggccccagggagtgctgaggctcaaaaagcagagaagcttctggaagattttttggaggaggctgagcgagagcaggaagaggagccgcctcaggtgtggacaggacctcccagagttgcccaaacttctgacccagactcttcagaggcctgcgcggaggaagaggaagggctcatgcctcaaggtccccagctcctggacttcagcgtggacgaggtggccgagcagctgaccctcatagacttggagctcttctccaaggtgaggctctacgagtgcttgggctccgtgtggtcgcagagggaccggccgggggctgcaggcgcctcccccactgtgcgcgccaccgtggcccagttcaacaccgtgaccggctgtgtgctgggttccgtgctcggagcaccgggcttggccgccccgcagagggcgcagcggctggagaagtggatccgcatcgcccagcgctgccgagaactgcggaacttctcctccttgcgcgccatcctgtccgccctgcaatctaaccccatctaccggctcaagcgcagctggggggcagtgagccgggaaccgctatctactttcaggaaactttcgcagattttctccgatgagaacaaccacctcagcagcagagagattcttttccaggaggaggccactgagggatcccaagaagaggacaacaccccaggcagcctgccctcaaaaccacccccaggccctgtcccctaccttggcaccttccttacggacctggttatgctggacacagccctgccggatatgttggagggggatctcattaactttgagaagaggaggaaggagtgggagatcctggcccgcatccagcagctgcagaggcgctgtcagagctacaccctgagcccccacccgcccatcctggctgccctgcatgcccagaaccagctcaccgaggagcagagctaccggctctcccgggtcattgagccaccagctgcctcctgccccagctccccacgcatccgacggcggatcagcctcaccaagcgtctcagtgcgaagcttgcccgagagaaaagctcatcacctagtgggagtcccggggacccctcatcccccacctccagtgtgtccccagggtcacccccctcaagtcctagaagcagagatgctcctgctggcagtcccccggcctctccagggccccagggccccagcaccaagctgcccctgagcctggacctgcccagcccccggcccttcgctttgcctctgggcagccctcgaatccccctcccggcgcagcagagctcggaggcccgtgtcatccgcgtcagcatcgacaatgaccacgggaacctgtatcgaagcatcttgctgaccagtcaggacaaagcccccagcgtggtccggcgagccttgcagaagcacaatgtgccccagccctgggcctgtgactatcagctctttcaagtccttcctggggaccggggctgggaagagatgctgatttctgcgataaaatcagtaggtacattttttggaatgttcgctatgtgccaggctagattttacagatgagaagtctgaagctcaggtaaggtaagtcacctgtccagggccacaaagaaaaaaaaaacgtgtgtctgaagccagaacgggagctgttgcggcccaactccctcccctgcccccaagcggcctctgggctcgggaagggcccctgcctcctcccgccaggcacttatctctacccaggctgagtgctggccccgccccctcggggatctgccacttagaggcgcctggtcgggaagggcctggtcagctgcgtccggcggaggcagctgctgacccagctgtggactgtgccgggggcgggggacggaggggcaggagccctgggctccccgtggcgggggctgtatcatggaccacctcggggcgtccctctggccccaggtcggctccctttgtctcctgctcgctggggccgcctgggcgcccccgcctaacctcccggaccccaagttcgagagcaaaggtaaggatgagctgcgtgtggacccctacgctggagcctgcaggaccatgctggggcctgaactcccagcctaggtcctgggggccatgcctgtttctggacttcctgaccgggtcctgggggccaagctggcatctgaacccttagactgggtcctggatgggtggggggcggggtggggtatgttaggatccaagactcctgatcgcgtcccgggcaagagctagagtgggcttaacattcccgttttaccttttcagggagtctgggacatgctaaatcctaagggggctgacttggtgctaaggtccctggggggtggggaccaagccgaccctccctaggggagggagggtaaagcccgggtccgagttagaggggccaagccacaggctactgtaaacacggtttgtgtgagggcgccagatcacttgcccggcccggtggagggagggaggcggggggcacggttggcgctatcggttggcggggagcctgccggggccgatagggggcccgcctctccgcacacacccccagccgcgcgcgtgtcctaggctggggcggggctggcagtcccgagctcgaggtcttgaacgccgcgcccagctcagctggccgctgggtgggcaggtgtgcgccagtggtgacggcgggggacagtaaggcgagaaacttgcccctgggaattaggggggcaccacctctgcggacccctccaagggacccgcttgggaagatggcagggcggggcttttttcttatcgggtccgcccaggctgcgggagggaagaggagggggctgtctcccgaggatagagctcagacccccatgcccttcctttgtcgcccctccccagcggccttgctggcggcccgggggcccgaagagcttctgtgcttcaccgagcggttggaggacttggtgtgtttctgggaggaagcggcgagcgctggggtgggcccgggcaactacagcttctcctaccagctcgatttgaggcccgacggcgcctccagtcgtggtcactggagggaaacctgcgggtccagggctggcacgccctctatgggccggggcgcgaacactcccgcgatcaccgctggaacgcgaccccaaacatcaggctgggataacaacgcctccaaatcgaggggatgagccatggaagctgtgtcgcctgcaccaggctcccacggctcgtggtgcggtgcgcttctggtgttcgctgcctacagccgacacgtcgagcttcgtgcccctagagttgcgcgtcacagcagcctccggcgctccgcgatatcaccgtgtcatccacatcaatgaagtagtgctcctagacgcccccgtggggctggtggcgcggttggctgacgagagcggccacgtagtgttgcgctggctcccgccgcctgagacacccatgacgtctcacatccgctacgaggtggacgtctcggccggcaacggcgcagggagcgtacagagggtggagatcctggagggccgcaccgagtgtgtgctgagcaacctgcggggccggacgcgctacaccttcgccgtccgcgcgcgtatggctgagccgagcttcggcggcttctggagcgcctggtcggagcctgtgtcgctgctgacgcctagcgacctggaccccctcatcctgacgctctccctcatcctcgtggtcatcctggtgctgctgaccgtgctcgcgctgctctcccaccgccgggctctgaagcagaagatctggcctggcatcccgagcccagagagcgagtttgaaggcctcttcaccacccacaagggtaacttccagctgtggctgtaccagaatgatggctgcctgtggtggagcccctgcacccccttcacggaggacccacctgcttccctggaagtcctctcagagcgctgctgggggacgatgcaggcagtggagccggggacagatgatgagggccccctgctggagccagtgggcagtgagcatgcccaggatacctatctggtgctggacaaatggttgctgccccggaacccgcccagtgaggacctcccagggcctggtggcagtgtggacatagtggccatggatgaaggctcagaagcatcctcctgctcatctgctttggcctcgaagcccagcccagagggagcctctgctgccagctttgagtacactatcctggaccccagctcccagctcttgcgtccatggacactgtgccctgagctgccccctaccccaccccacctaaagtacctgtaccttgtggtatctgactctggcatctcaactgactacagctcaggggactcccagggagcccaagggggcttatccgatggcccctactccaacccttatgagaacagccttatcccagccgctgagcctctgccccccagctatgtggcttgctcttaggacaccaggctgcagatgatcagggatccaatatgactcagagaaccagtgcagactcaagacttatggaacagggatggcgaggcctctctcaggagcaggggcattgctgattttgtctgcccaatccatcctgctcaggaaaccacaaccttgcagtatttttaaatatgtatagtttttttttgtatctatatatatatatacacatatgtatgtaagtttttctaccatgatttctacaaacaccctttaagtcccatcttcccctgggcataggccatagggatagaagttaaagttcttgagcttattcagaagctggatctgcaatctgaatgctactcataacataacaaaatagtatgttaaacagctcttaaatcttactggcttaccacattaaatgatttctctctcctaactcagctcaaatgggcagccatccatgggatgagtcagaggttcagactcttccagtctgtagctctaccttctcttagggtacttagatggatcccctgttctacaaactgccagtcagcaagggaagaaaaagggcagcaatgaccctcaatgggccatttgagggatctggcctggaaatgggcttcctctcttcttctcacacctcactggctggaaacagtcacatgaccccagtcacatgaaaggccaggaaacttagtttagctgtacacccaggaagggcaaagctgtttaagggccactagctagtctctgccactaataataataaaagtaattctgaatcagccatgttctaa

SEQ ID NO: 736707 - DNA, 1572 bp, Homo sapiens
agcggcgccactgagagggacgggcgccggccatggagcgcacagcaggcaaagagctggccctggcaccgctgcaggactggggtgaagagaccgaggacggcgcggtgtacagtgtctccctgcggcggcagcgcagtcagcgcaggagcccggcggagggccccgggggcagccaggctcccagccccattgccaataccttcctccactatcgaaccagcaaggtgagggtgctgagggcagcgcgcctggagcggctggtgggagagttggtgtttggagaccgtgagcaggaccccagcttcatgcccgccttcctggccacctaccggacctttgtacccactgcctgcctgctgggctttctgctgccaccaatgccaccgcccccacctcccgggtcagtagcgaaccataacctccgtattctccaccctagaaccccaactgggcacccccctccacctcctcaggtgtggaacctggaaacacctcccagacccagagccctcttcctaagcccccttctaggttcccccttcttcacctgctggggggcctcttcccagggtagagatcaagaagacagcggtacaagatctgagcttcaacaagaacctgagggctgtggtgtcagtgctgggctcctggctgcaggaccaccctcaggatttccgagacccccctgcccattcggacctgggcagtgtccgaacctttctgggctgggcggccccagggagtgctgaggctcaaaaagcagagaagcttctggaagattttttggaggaggctgagcgagagcaggaagaggagccgcctcaggtgtggacaggacctcccagagttgcccaaacttctgacccagactcttcagaggcctgcgcggaggaagaggaagggctcatgcctcaaggtccccagctcctggacttcagcgtggacgaggtggccgagcagctgaccctcatagacttggagctcttctccaaggtgaggctctacgagtgcttgggctccgtgtggtcgcagagggaccggccgggggctgcaggcgcctcccccactgtgcgcgccaccgtggcccagttcaacaccgtgaccggctgtgtgctgggttccgtgctcggagcaccgggcttggccgccccgcagagggcgcagcggctggagaagtggatccgcatcgcccagcgctgccgagaactgcggaacttctcctccttgcgcgccatcctgtccgccctgcaatctaaccccatctaccggctcaagcgcagctggggggcagtgagccgggaaccgctatctactttcaggaaactttcgcagattttctccgatgagaacaaccacctcagcagcagagagattcttttccaggaggaggccactgagggatcccaagaagaggacaacaccccaggcagcctgccctcaaaaccacccccaggccctgtcccctaccttggcaccttccttacggacctggttatgctggacacagccctgccggatatgttggaggtctgacccctgacccttgacccctgaccccagctccacttg

SEQ ID NO: 736708 - DNA, 1967 bp, Homo sapiens
agcggcgccactgagagggacgggcgccggccatggagcgcacagcaggcaaagagctggccctggcaccgctgcaggactggggtgaagagaccgaggacggcgcggtgtacagtgtctccctgcggcggcagcgcagtcagcgcaggagcccggcggagggccccgggggcagccaggctcccagccccattgccaataccttcctccactatcgaaccagcaaggtgagggtgctgagggcagcgcgcctggagcggctggtgggagagttggtgtttggagaccgtgagcaggaccccagcttcatgcccgccttcctggccacctaccggacctttgtacccactgcctgcctgctgggctttctgctgccaccaatgccaccgcccccacctcccgggtcagtagcgaaccataacctccgtattctccaccctagaaccccaactgggcacccccctccacctcctcaggtgtggaacctggaaacacctcccagacccagagccctcttcctaagcccccttctaggttcccccttcttcacctgctggggggcctcttcccagggtagagatcaagaagacagcggtacaagatctgagcttcaacaagaacctgagggctgtggtgtcagtgctgggctcctggctgcaggaccaccctcaggatttccgagacccccctgcccattcggacctgggcagtgtccgaacctttctgggctgggcggccccagggagtgctgaggctcaaaaagcagagaagcttctggaagattttttggaggaggctgagcgagagcaggaagaggagccgcctcaggtgtggacaggacctcccagagttgcccaaacttctgacccagactcttcagaggcctgcgcggaggaagaggaagggctcatgcctcaaggtccccagctcctggacttcagcgtggacgaggtggccgagcagctgaccctcatagacttggagctcttctccaaggtgaggctctacgagtgcttgggctccgtgtggtcgcagagggaccggccgggggctgcaggcgcctcccccactgtgcgcgccaccgtggcccagttcaacaccgtgaccggctgtgtgctgggttccgtgctcggagcaccgggcttggccgccccgcagagggcgcagcggctggagaagtggatccgcatcgcccagcgctgccgagaactgcggaacttctcctccttgcgcgccatcctgtccgccctgcaatctaaccccatctaccggctcaagcgcagctggggggcagtgagccgggaaccgctatctactttcaggaaactttcgcagattttctccgatgagaacaaccacctcagcagcagagagattcttttccaggaggaggccactgagggatcccaagaagaggacaacaccccaggcagcctgccctcaaaaccacccccaggccctgtcccctaccttggcaccttccttacggacctggttatgctggacacagccctgccggatatgttggagggggatctcattaactttgagaagaggaggaaggagtgggagatcctggcccgcatccagcagctgcagaggcgctgtcagagctacaccctgagcccccacccgcccatcctggctgccctgcatgcccagaaccagctcaccgaggagcagaggtgaccaccctgtagcctgtcccagccccaccccagctgagcctgggtcaccaactggattccacccactccatacacacctccagctcctcccaagaccccctcttgagccctgatcccccactacaacctgtgaccttgcagtatctccagtcgaatcaaatagactgggcctggtggtttactcgtgtaatcccagcacttgggaggccaaggtgggtggatcacttgagcccaggatttcgagaccagcctgggcaacatggcgaaaccccatatcta

SEQ ID NO: 736709 - DNA, 2684 bp, Homo sapiens
agcggcgccactgagagggacgggcgccggccatggagcgcacagcaggcaaagagctggccctggcaccgctgcaggactggggtgaagagaccgaggacggcgcggtgtacagtgtctccctgcggcggcagcgcagtcagcgcaggagcccggcggagggccccgggggcagccaggctcccagccccattgccaataccttcctccactatcgaaccagcaaggtgagggtgctgagggcagcgcgcctggagcggctggtgggagagttggtgtttggagaccgtgagcaggaccccagcttcatgcccgccttcctggccacctaccggacctttgtacccactgcctgcctgctgggctttctgctgccaccaatgccaccgcccccacctcccgggtcagtagcgaaccataacctccgtattctccaccctagaaccccaactgggcacccccctccacctcctcaggtgtggaacctggaaacacctcccagacccagagccctcttcctaagcccccttctaggttcccccttcttcacctgctggggggcctcttcccagggtagagatcaagaagacagcggtacaagatctgagcttcaacaagaacctgagggctgtggtgtcagtgctgggctcctggctgcaggaccaccctcaggatttccgagacccccctgcccattcggacctgggcagtgtccgaacctttctgggctgggcggccccagggagtgctgaggctcaaaaagcagagaagcttctggaagattttttggaggaggctgagcgagagcaggaagaggagccgcctcaggtgtggacaggacctcccagagttgcccaaacttctgacccagactcttcagaggcctgcgcggaggaagaggaagggctcatgcctcaaggtccccagctcctggacttcagcgtggacgaggtggccgagcagctgaccctcatagacttggagctcttctccaaggtgaggctctacgagtgcttgggctccgtgtggtcgcagagggaccggccgggggctgcaggcgcctcccccactgtgcgcgccaccgtggcccagttcaacaccgtgaccggctgtgtgctgggttccgtgctcggagcaccgggcttggccgccccgcagagggcgcagcggctggagaagtggatccgcatcgcccagcgctgccgagaactgcggaacttctcctccttgcgcgccatcctgtccgccctgcaatctaaccccatctaccggctcaagcgcagctggggggcagtgagccgggaaccgctatctactttcaggaaactttcgcagattttctccgatgagaacaaccacctcagcagcagagagattcttttccaggaggaggccactgagggatcccaagaagaggacaacaccccaggcagcctgccctcaaaaccacccccaggccctgtcccctaccttggcaccttccttacggacctggttatgctggacacagccctgccggatatgttggagggggatctcattaactttgagaagaggaggaaggagtgggagatcctggcccgcatccagcagctgcagaggcgctgtcagagctacaccctgagcccccacccgcccatcctggctgccctgcatgcccagaaccagctcaccgaggagcagagctaccggctctcccgggtcattgagccaccagctgcctcctgccccagctccccacgcatccgacggcggatcagcctcaccaagcgtctcagtgcgaagcttgcccgagagaaaagctcatcacctagtgggagtcccggggacccctcatcccccacctccagtgtgtccccagggtcacccccctcaagtcctagaagcagagatgctcctgctggcagtcccccggcctctccagggccccagggccccagcaccaagctgcccctgagcctggacctgcccagcccccggcccttcgctttgcctctgggcagccctcgaatccccctcccggcgcagcagagctcggaggcccgtgtcatccgcgtcagcatcgacaatgaccacgggaacctgtatcgaagcatcttgctgaccagtcaggacaaagcccccagcgtggtccggcgagccttgcagaagcacaatgtgccccagccctgggcctgtgactatcagctctttcaagtccttcctggggaccgggtgctcctgattcctgacaatgccaacgtcttctatgccatgagtccagtcgcccccagagacttcatgctgcggcggaaagaggggacccggaacactctgtctgtctccccaagctgaggcagccctgtcctctccacaagacacaagtcccacaggcaagcttgcgactcttctcctggaaagctgccatcccccagtagaggccactgtgctgtgtatcccaggaccaccacccaactgtagcccattggaccccatctctttttctgactctgttggtactagatccatattccaaagacatcagcccatgggtggctggtggagagctcaatcccataaatgtagaaagaggtggggcatggatacgtcaaatccctccccagagaaatcttataaatgttagagacgcatcagaagtgacagatgcggatgaaaatagtgaccagagttatgaaaaaaaaaaa

SEQ ID NO: 736710 - DNA, 2757 bp, Homo sapiens
agcggcgccactgagagggacgggcgccggccatggagcgcacagcaggcaaagagctggccctggcaccgctgcaggactggggtgaagagaccgaggacggcgcggtgtacagtgtctccctgcggcggcagcgcagtcagcgcaggagcccggcggagggccccgggggcagccaggctcccagccccattgccaataccttcctccactatcgaaccagcaaggtgagggtgctgagggcagcgcgcctggagcggctggtgggagagttggtgtttggagaccgtgagcaggaccccagcttcatgcccgccttcctggccacctaccggacctttgtacccactgcctgcctgctgggctttctgctgccaccaatgccaccgcccccacctcccgggtcagtagcgaaccataacctccgtattctccaccctagaaccccaactgggcacccccctccacctcctcaggtgtggaacctggaaacacctcccagacccagagccctcttcctaagcccccttctaggttcccccttcttcacctgctggggggcctcttcccagggtagagatcaagaagacagcggtacaagatctgagcttcaacaagaacctgagggctgtggtgtcagtgctgggctcctggctgcaggaccaccctcaggatttccgagacccccctgcccattcggacctgggcagtgtccgaacctttctgggctgggcggccccagggagtgctgaggctcaaaaagcagagaagcttctggaagattttttggaggaggctgagcgagagcaggaagaggagccgcctcaggtgtggacaggacctcccagagttgcccaaacttctgacccagactcttcagaggcctgcgcggaggaagaggaagggctcatgcctcaaggtccccagctcctggacttcagcgtggacgaggtggccgagcagctgaccctcatagacttggagctcttctccaaggtgaggctctacgagtgcttgggctccgtgtggtcgcagagggaccggccgggggctgcaggcgcctcccccactgtgcgcgccaccgtggcccagttcaacaccgtgaccggctgtgtgctgggttccgtgctcggagcaccgggcttggccgccccgcagagggcgcagcggctggagaagtggatccgcatcgcccagcgctgccgagaactgcggaacttctcctccttgcgcgccatcctgtccgccctgcaatctaaccccatctaccggctcaagcgcagctggggggcagtgagccgggaaccgctatctactttcaggaaactttcgcagattttctccgatgagaacaaccacctcagcagcagagagattcttttccaggaggaggccactgagggatcccaagaagaggacaacaccccaggcagcctgccctcaaaaccacccccaggccctgtcccctaccttggcaccttccttacggacctggttatgctggacacagccctgccggatatgttggagggggatctcattaactttgagaagaggaggaaggagtgggagatcctggcccgcatccagcagctgcagaggcgctgtcagagctacaccctgagcccccacccgcccatcctggctgccctgcatgcccagaaccagctcaccgaggagcagagctaccggctctcccgggtcattgagccaccagctgcctcctgccccagctccccacgcatccgacggcggatcagcctcaccaagcgtctcagtgcgaagcttgcccgagagaaaagctcatcacctagtgggagtcccggggacccctcatcccccacctccagtgtgtccccagggtcacccccctcaagtcctagaagcagagatgctcctgctggcagtcccccggcctctccagggccccagggccccagcaccaagctgcccctgagcctggacctgcccagcccccggcccttcgctttgcctctgggcagccctcgaatccccctcccggcgcagcagagctcggaggcccgtgtcatccgcgtcagcatcgacaatgaccacgggaacctgtatcgaagcatcttgctgaccagtcaggacaaagcccccagcgtggtccggcgagccttgcagaagcacaatgtgccccagccctgggcctgtgactatcagctctttcaagtccttcctggggaccggggttcccagtgacagcagaatgagcttggcttggcagtagctgcagagggacccatggctgttcaggttcgcggtgctcctgattcctgacaatgccaacgtcttctatgccatgagtccagtcgcccccagagacttcatgctgcggcggaaagaggggacccggaacactctgtctgtctccccaagctgaggcagccctgtcctctccacaagacacaagtcccacaggcaagcttgcgactcttctcctggaaagctgccatcccccagtagaggccactgtgctgtgtatcccaggaccaccacccaactgtagcccattggaccccatctctttttctgactctgttggtactagatccatattccaaagacatcagcccatgggtggctggtggagagctcaatcccataaatgtagaaagaggtggggcatggatacgtcaaatccctccccagagaaatcttataaatgttagagacgcatcagaagtgacagatgcggatgaaaatagtgaccagagttatgaaaaaaaaaaa

SEQ ID NO: 736711 - DNA, 2993 bp, Homo sapiens
agcggcgccactgagagggacgggcgccggccatggagcgcacagcaggcaaagagctggccctggcaccgctgcaggactggggtgaagagaccgaggacggcgcggtgtacagtgtctccctgcggcggcagcgcagtcagcgcaggagcccggcggagggccccgggggcagccaggctcccagccccattgccaataccttcctccactatcgaaccagcaaggtgagggtgctgagggcagcgcgcctggagcggctggtgggagagttggtgtttggagaccgtgagcaggaccccagcttcatgcccgccttcctggccacctaccggacctttgtacccactgcctgcctgctgggctttctgctgccaccaatgccaccgcccccacctcccgggtcagtagcgaaccataacctccgtattctccaccctagaaccccaactgggcacccccctccacctcctcaggtgtggaacctggaaacacctcccagacccagagccctcttcctaagcccccttctaggttcccccttcttcacctgctggggggcctcttcccagggtagagatcaagaagacagcggtacaagatctgagcttcaacaagaacctgagggctgtggtgtcagtgctgggctcctggctgcaggaccaccctcaggatttccgagacccccctgcccattcggacctgggcagtgtccgaacctttctgggctgggcggccccagggagtgctgaggctcaaaaagcagagaagcttctggaagattttttggaggaggctgagcgagagcaggaagaggagccgcctcaggtgtggacaggacctcccagagttgcccaaacttctgacccagactcttcagaggcctgcgcggaggaagaggaagggctcatgcctcaaggtccccagctcctggacttcagcgtggacgaggtggccgagcagctgaccctcatagacttggagctcttctccaaggtgaggctctacgagtgcttgggctccgtgtggtcgcagagggaccggccgggggctgcaggcgcctcccccactgtgcgcgccaccgtggcccagttcaacaccgtgaccggctgtgtgctgggttccgtgctcggagcaccgggcttggccgccccgcagagggcgcagcggctggagaagtggatccgcatcgcccagcgctgccgagaactgcggaacttctcctccttgcgcgccatcctgtccgccctgcaatctaaccccatctaccggctcaagcgcagctggggggcagtgagccgggaaccgctatctactttcaggaaactttcgcagattttctccgatgagaacaaccacctcagcagcagagagattcttttccaggaggaggccactgagggatcccaagaagaggacaacaccccaggcagcctgccctcaaaaccacccccaggccctgtcccctaccttggcaccttccttacggacctggttatgctggacacagccctgccggatatgttggagggggatctcattaactttgagaagaggaggaaggagtgggagatcctggcccgcatccagcagctgcagaggcgctgtcagagctacaccctgagcccccacccgcccatcctggctgccctgcatgcccagaaccagctcaccgaggagcagagctaccggctctcccgggtcattgagccaccagctgcctcctgccccagctccccacgcatccgacggcggatcagcctcaccaagcgtctcagtgcgaagcttgcccgagagaaaagctcatcacctagtgggagtcccggggacccctcatcccccacctccagtgtgtccccagggtcacccccctcaagtcctagaagcagagatgctcctgctggcagtcccccggcctctccagggccccagggccccagcaccaagctgcccctgagcctggacctgcccagcccccggcccttcgctttgcctctgggcagccctcgaatccccctcccggcgcagcagagctcggaggcccgtgtcatccgcgtcagcatcgacaatgaccacgggaacctgtatcgaagcatcttgctgaccagtcaggacaaagcccccagcgtggtccggcgagccttgcagaagcacaatgtgccccagccctgggcctgtgactatcagctctttcaagtccttcctggggaccggggctgggaagagatgctgatttctgcgataaaatcagtaggtacattttttggaatgttcgctatgtgccaggctagattttacagatgagaagtctgaagctcaggtaaggtaagtcacctgtccagggccacaaagaaaaaaaaaacgtgtgtctgaagccagaacgggagctgttgcggcccaactccctcccctgcccccaagcggcctctgggctcgggaagggcccctgcctcctcccgccaggcacttatctctacccaggctgagtgctggccccgccccctcggggatctgccacttagaggcgcctggtcgggaagggcctggtcagctgcgtccggcggaggcagctgctgacccagctgtggactgtgccgggggcgggggacggaggggcaggagccctgggctccccgtggcgggggctgtatcatggaccacctcggggcgtccctctggccccaggtcggctccctttgtctcctgctcgctggggccgcctgggcgcccccgcctaacctcccggaccccaagttcgagagcaaagcggccttgctggcggcccgggggcccgaagagcttctgtgcttcaccgagcggttggaggacttggtgtgtttctgggaggaagcggcgagcgctggggtgggcccgggcaactacagcttctcctaccagctcgagtgagtccgatccggcgggtgcctccaagggcggagggagggggtggggcagagctccctggaggtcgtagcctcgtatgtcccctgctg

SEQ ID NO: 736712 - DNA, 3509 bp, Homo sapiens
agcggcgccactgagagggacgggcgccggccatggagcgcacagcaggcaaagagctggccctggcaccgctgcaggactggggtgaagagaccgaggacggcgcggtgtacagtgtctccctgcggcggcagcgcagtcagcgcaggagcccggcggagggccccgggggcagccaggctcccagccccattgccaataccttcctccactatcgaaccagcaaggtgagggtgctgagggcagcgcgcctggagcggctggtgggagagttggtgtttggagaccgtgagcaggaccccagcttcatgcccgccttcctggccacctaccggacctttgtacccactgcctgcctgctgggctttctgctgccaccaatgccaccgcccccacctcccgggtcagtagcgaaccataacctccgtattctccaccctagaaccccaactgggcacccccctccacctcctcaggtgtggaacctggaaacacctcccagacccagagccctcttcctaagcccccttctaggttcccccttcttcacctgctggggggcctcttcccagggtagagatcaagaagacagcggtacaagatctgagcttcaacaagaacctgagggctgtggtgtcagtgctgggctcctggctgcaggaccaccctcaggatttccgagacccccctgcccattcggacctgggcagtgtccgaacctttctgggctgggcggccccagggagtgctgaggctcaaaaagcagagaagcttctggaagattttttggaggaggctgagcgagagcaggaagaggagccgcctcaggtgtggacaggacctcccagagttgcccaaacttctgacccagactcttcagaggcctgcgcggaggaagaggaagggctcatgcctcaaggtccccagctcctggacttcagcgtggacgaggtggccgagcagctgaccctcatagacttggagctcttctccaaggtgaggctctacgagtgcttgggctccgtgtggtcgcagagggaccggccgggggctgcaggcgcctcccccactgtgcgcgccaccgtggcccagttcaacaccgtgaccggctgtgtgctgggttccgtgctcggagcaccgggcttggccgccccgcagagggcgcagcggctggagaagtggatccgcatcgcccagcgctgccgagaactgcggaacttctcctccttgcgcgccatcctgtccgccctgcaatctaaccccatctaccggctcaagcgcagctggggggcagtgagccgggaaccgctatctactttcaggaaactttcgcagattttctccgatgagaacaaccacctcagcagcagagagattcttttccaggaggaggccactgagggatcccaagaagaggacaacaccccaggcagcctgccctcaaaaccacccccaggccctgtcccctaccttggcaccttccttacggacctggttatgctggacacagccctgccggatatgttggagggggatctcattaactttgagaagaggaggaaggagtgggagatcctggcccgcatccagcagctgcagaggcgctgtcagagctacaccctgagcccccacccgcccatcctggctgccctgcatgcccagaaccagctcaccgaggagcagagctaccggctctcccgggtcattgagccaccagctgcctcctgccccagctccccacgcatccgacggcggatcagcctcaccaagcgtctcagtgcgaagcttgcccgagagaaaagctcatcacctagtgggagtcccggggacccctcatcccccacctccagtgtgtccccagggtcacccccctcaagtcctagaagcagagatgctcctgctggcagtcccccggcctctccagggccccagggccccagcaccaagctgcccctgagcctggacctgcccagcccccggcccttcgctttgcctctgggcagccctcgaatccccctcccggcgcagcagagctcggaggcccgtgtcatccgcgtcagcatcgacaatgaccacgggaacctgtatcgaagcatcttgctgaccagtcaggacaaagcccccagcgtggtccggcgagccttgcagaagcacaatgtgccccagccctgggcctgtgactatcagctctttcaagtccttcctggggaccggggctgggaagagatgctgatttctgcgataaaatcagtaggtacattttttggaatgttcgctatgtgccaggctagattttacagatgagaagtctgaagctcaggtaaggtaagtcacctgtccagggccacaaagaaaaaaaaaacgtgtgtctgaagccagaacgggagctgttgcggcccaactccctcccctgcccccaagcggcctctgggctcgggaagggcccctgcctcctcccgccaggcacttatctctacccaggctgagtgctggccccgccccctcggggatctgccacttagaggcgcctggtcgggaagggcctggtcagctgcgtccggcggaggcagctgctgacccagctgtggactgtgccgggggcgggggacggaggggcaggagccctgggctccccgtggcgggggctgtatcatggaccacctcggggcgtccctctggccccaggtcggctccctttgtctcctgctcgctggggccgcctgggcgcccccgcctaacctcccggaccccaagttcgagagcaaagcggccttgctggcggcccgggggcccgaagagcttctgtgcttcaccgagcggttggaggacttggtgtgtttctgggaggaagcggcgagcgctggggtgggcccgggcaactacagcttctcctaccagctcgaggatgagccatggaagctgtgtcgcctgcaccaggctcccacggctcgtggtgcggtgcgcttctggtgttcgctgcctacagccgacacgtcgagcttcgtgcccctagagttgcgcgtcacagcagcctccggcgctccgcgatatcaccgtgtcatccacatcaatgaagtagtgctcctagacgcccccgtggggctggtggcgcggttggctgacgagagcggccacgtagtgttgcgctggctcccgccgcctgagacacccatgacgtctcacatccgctacgaggtggacgtctcggccggcaacggcgcagggagcgtacagagggtgaggccagcccctacggcccagcccccaaagctccactgactacggcccagccacgcctctcgaggtcgcgcccggtgccgctttcagggccggtccgtaacatcccacatcccattaccctggtgctgaagaccgttccacgcccacagacacaccccctttcctaatgtcctcgcaagcctgttgaaccccaacttcttctccctccggcccgtaaccctagacccctttagcgcccgggtccctctacgagtgctagcccagatatt

SEQ ID NO: 736713 - DNA, 4207 bp, Homo sapiens
agcggcgccactgagagggacgggcgccggccatggagcgcacagcaggcaaagagctggccctggcaccgctgcaggactggggtgaagagaccgaggacggcgcggtgtacagtgtctccctgcggcggcagcgcagtcagcgcaggagcccggcggagggccccgggggcagccaggctcccagccccattgccaataccttcctccactatcgaaccagcaaggtgagggtgctgagggcagcgcgcctggagcggctggtgggagagttggtgtttggagaccgtgagcaggaccccagcttcatgcccgccttcctggccacctaccggacctttgtacccactgcctgcctgctgggctttctgctgccaccaatgccaccgcccccacctcccgggtcagtagcgaaccataacctccgtattctccaccctagaaccccaactgggcacccccctccacctcctcaggtgtggaacctggaaacacctcccagacccagagccctcttcctaagcccccttctaggttcccccttcttcacctgctggggggcctcttcccagggtagagatcaagaagacagcggtacaagatctgagcttcaacaagaacctgagggctgtggtgtcagtgctgggctcctggctgcaggaccaccctcaggatttccgagacccccctgcccattcggacctgggcagtgtccgaacctttctgggctgggcggccccagggagtgctgaggctcaaaaagcagagaagcttctggaagattttttggaggaggctgagcgagagcaggaagaggagccgcctcaggtgtggacaggacctcccagagttgcccaaacttctgacccagactcttcagaggcctgcgcggaggaagaggaagggctcatgcctcaaggtccccagctcctggacttcagcgtggacgaggtggccgagcagctgaccctcatagacttggagctcttctccaaggtgaggctctacgagtgcttgggctccgtgtggtcgcagagggaccggccgggggctgcaggcgcctcccccactgtgcgcgccaccgtggcccagttcaacaccgtgaccggctgtgtgctgggttccgtgctcggagcaccgggcttggccgccccgcagagggcgcagcggctggagaagtggatccgcatcgcccagcgctgccgagaactgcggaacttctcctccttgcgcgccatcctgtccgccctgcaatctaaccccatctaccggctcaagcgcagctggggggcagtgagccgggaaccgctatctactttcaggaaactttcgcagattttctccgatgagaacaaccacctcagcagcagagagattcttttccaggaggaggccactgagggatcccaagaagaggacaacaccccaggcagcctgccctcaaaaccacccccaggccctgtcccctaccttggcaccttccttacggacctggttatgctggacacagccctgccggatatgttggagggggatctcattaactttgagaagaggaggaaggagtgggagatcctggcccgcatccagcagctgcagaggcgctgtcagagctacaccctgagcccccacccgcccatcctggctgccctgcatgcccagaaccagctcaccgaggagcagagctaccggctctcccgggtcattgagccaccagctgcctcctgccccagctccccacgcatccgacggcggatcagcctcaccaagcgtctcagtgcgaagcttgcccgagagaaaagctcatcacctagtgggagtcccggggacccctcatcccccacctccagtgtgtccccagggtcacccccctcaagtcctagaagcagagatgctcctgctggcagtcccccggcctctccagggccccagggccccagcaccaagctgcccctgagcctggacctgcccagcccccggcccttcgctttgcctctgggcagccctcgaatccccctcccggcgcagcagagctcggaggcccgtgtcatccgcgtcagcatcgacaatgaccacgggaacctgtatcgaagcatcttgctgaccagtcaggacaaagcccccagcgtggtccggcgagccttgcagaagcacaatgtgccccagccctgggcctgtgactatcagctctttcaagtccttcctggggaccggggctgggaagagatgctgatttctgcgataaaatcagtaggtacattttttggaatgttcgctatgtgccaggctagattttacagatgagaagtctgaagctcaggtaaggtaagtcacctgtccagggccacaaagaaaaaaaaaacgtgtgtctgaagccagaacgggagctgttgcggcccaactccctcccctgcccccaagcggcctctgggctcgggaagggcccctgcctcctcccgccaggcacttatctctacccaggctgagtgctggccccgccccctcggggatctgccacttagaggcgcctggtcgggaagggcctggtcagctgcgtccggcggaggcagctgctgacccagctgtggactgtgccgggggcgggggacggaggggcaggagccctgggctccccgtggcgggggctgtatcatggaccacctcggggcgtccctctggccccaggtcggctccctttgtctcctgctcgctggggccgcctgggcgcccccgcctaacctcccggaccccaagttcgagagcaaagcggccttgctggcggcccgggggcccgaagagcttctgtgcttcaccgagcggttggaggacttggtgtgtttctgggaggaagcggcgagcgctggggtgggcccgggcaactacagcttctcctaccagctcgaggatgagccatggaagctgtgtcgcctgcaccaggctcccacggctcgtggtgcggtgcgcttctggtgttcgctgcctacagccgacacgtcgagcttcgtgcccctagagttgcgcgtcacagcagcctccggcgctccgcgatatcaccgtgtcatccacatcaatgaagtagtgctcctagacgcccccgtggggctggtggcgcggttggctgacgagagcggccacgtagtgttgcgctggctcccgccgcctgagacacccatgacgtctcacatccgctacgaggtggacgtctcggccggcaacggcgcagggagcgtacagaggggcaccgttttcctttcccctgattggctcagttccaccagggcccgcccccacgtcatctatttttgtctgctacgcgtccctcgccctgattccgcccccaggtggagatcctggagggccgcaccgagtgtgtgctgagcaacctgcggggccggacgcgctacaccttcgccgtccgcgcgcgtatggctgagccgagcttcggcggcttctggagcgcctggtcggagcctgtgtcgctgctgacgcctagcggtgaggccccaggcgggggtgtaggaggagccagggcgaatcacggggcaagcccaccgccctgacctcctccccgcctcttagacctggaccccctcatcctgacgctctccctcatcctcgtggtcatcctggtgctgctgaccgtgctcgcgctgctctcccaccgccggtgagctccccatttgggcgctgggcccagactcctccccgccaacggtcctctttcactatggaaacctaggctcagagagagacacgcacttgcccaaggtcacgcagtaaggattcacatcagtggcagggctgggatgcatgccagactagacccagactcttcgttaacattttctgctcttggggactttcacctgattttccttctacatcaggggctgccatttcttgggtccctttgttagttcctttccccagtgtcatcacctttgtaaaatcaactagatggatttagtgaaagaatttaagaccctgaatgcctccgcacccctgcggtcaagcttctcagacactatgatcagactagccgttctgaggtatttgtaattccaagcacacactaggtggtttcacacccccaagcttttgcccatgctgttccctctgcctggaatgcccttcctgccttgtctgctaagcaatcttctagtcgtctttcatggccctgttcatttacttggttggaaaatacaaa

SEQ ID NO: 736714 - DNA, 5250 bp, Homo sapiens
agcggcgccactgagagggacgggcgccggccatggagcgcacagcaggcaaagagctggccctggcaccgctgcaggactggggtgaagagaccgaggacggcgcggtgtacagtgtctccctgcggcggcagcgcagtcagcgcaggagcccggcggagggccccgggggcagccaggctcccagccccattgccaataccttcctccactatcgaaccagcaaggtgagggtgctgagggcagcgcgcctggagcggctggtgggagagttggtgtttggagaccgtgagcaggaccccagcttcatgcccgccttcctggccacctaccggacctttgtacccactgcctgcctgctgggctttctgctgccaccaatgccaccgcccccacctcccgggtcagtagcgaaccataacctccgtattctccaccctagaaccccaactgggcacccccctccacctcctcaggtgtggaacctggaaacacctcccagacccagagccctcttcctaagcccccttctaggttcccccttcttcacctgctggggggcctcttcccagggtagagatcaagaagacagcggtacaagatctgagcttcaacaagaacctgagggctgtggtgtcagtgctgggctcctggctgcaggaccaccctcaggatttccgagacccccctgcccattcggacctgggcagtgtccgaacctttctgggctgggcggccccagggagtgctgaggctcaaaaagcagagaagcttctggaagattttttggaggaggctgagcgagagcaggaagaggagccgcctcaggtgtggacaggacctcccagagttgcccaaacttctgacccagactcttcagaggcctgcgcggaggaagaggaagggctcatgcctcaaggtccccagctcctggacttcagcgtggacgaggtggccgagcagctgaccctcatagacttggagctcttctccaaggtgaggctctacgagtgcttgggctccgtgtggtcgcagagggaccggccgggggctgcaggcgcctcccccactgtgcgcgccaccgtggcccagttcaacaccgtgaccggctgtgtgctgggttccgtgctcggagcaccgggcttggccgccccgcagagggcgcagcggctggagaagtggatccgcatcgcccagcgctgccgagaactgcggaacttctcctccttgcgcgccatcctgtccgccctgcaatctaaccccatctaccggctcaagcgcagctggggggcagtgagccgggaaccgctatctactttcaggaaactttcgcagattttctccgatgagaacaaccacctcagcagcagagagattcttttccaggaggaggccactgagggatcccaagaagaggacaacaccccaggcagcctgccctcaaaaccacccccaggccctgtcccctaccttggcaccttccttacggacctggttatgctggacacagccctgccggatatgttggagggggatctcattaactttgagaagaggaggaaggagtgggagatcctggcccgcatccagcagctgcagaggcgctgtcagagctacaccctgagcccccacccgcccatcctggctgccctgcatgcccagaaccagctcaccgaggagcagagctaccggctctcccgggtcattgagccaccagctgcctcctgccccagctccccacgcatccgacggcggatcagcctcaccaagcgtctcagtgcgaagcttgcccgagagaaaagctcatcacctagtgggagtcccggggacccctcatcccccacctccagtgtgtccccagggtcacccccctcaagtcctagaagcagagatgctcctgctggcagtcccccggcctctccagggccccagggccccagcaccaagctgcccctgagcctggacctgcccagcccccggcccttcgctttgcctctgggcagccctcgaatccccctcccggcgcagcagagctcggaggcccgtgtcatccgcgtcagcatcgacaatgaccacgggaacctgtatcgaagcatcttgctgaccagtcaggacaaagcccccagcgtggtccggcgagccttgcagaagcacaatgtgccccagccctgggcctgtgactatcagctctttcaagtccttcctggggaccggggctgggaagagatgctgatttctgcgataaaatcagtaggtacattttttggaatgttcgctatgtgccaggctagattttacagatgagaagtctgaagctcaggtaaggtaagtcacctgtccagggccacaaagaaaaaaaaaacgtgtgtctgaagccagaacgggagctgttgcggcccaactccctcccctgcccccaagcggcctctgggctcgggaagggcccctgcctcctcccgccaggcacttatctctacccaggctgagtgctggccccgccccctcggggatctgccacttagaggcgcctggtcgggaagggcctggtcagctgcgtccggcggaggcagctgctgacccagctgtggactgtgccgggggcgggggacggaggggcaggagccctgggctccccgtggcgggggctgtatcatggaccacctcggggcgtccctctggccccaggtcggctccctttgtctcctgctcgctggggccgcctgggcgcccccgcctaacctcccggaccccaagttcgagagcaaagcggccttgctggcggcccgggggcccgaagagcttctgtgcttcaccgagcggttggaggacttggtgtgtttctgggaggaagcggcgagcgctggggtgggcccgggcaactacagcttctcctaccagctcgaggatgagccatggaagctgtgtcgcctgcaccaggctcccacggctcgtggtgcggtgcgcttctggtgttcgctgcctacagccgacacgtcgagcttcgtgcccctagagttgcgcgtcacagcagcctccggcgctccgcgatatcaccgtgtcatccacatcaatgaagtagtgctcctagacgcccccgtggggctggtggcgcggttggctgacgagagcggccacgtagtgttgcgctggctcccgccgcctgagacacccatgacgtctcacatccgctacgaggtggacgtctcggccggcaacggcgcagggagcgtacagaggggcaccgttttcctttcccctgattggctcagttccaccagggcccgcccccacgtcatctatttttgtctgctacgcgtccctcgccctgattccgcccccaggtggagatcctggagggccgcaccgagtgtgtgctgagcaacctgcggggccggacgcgctacaccttcgccgtccgcgcgcgtatggctgagccgagcttcggcggcttctggagcgcctggtcggagcctgtgtcgctgctgacgcctagcggtgaggccccaggcgggggtgtaggaggagccagggcgaatcacggggcaagcccaccgccctgacctcctccccgcctcttagacctggaccccctcatcctgacgctctccctcatcctcgtggtcatcctggtgctgctgaccgtgctcgcgctgctctcccaccgccgggctctgaagcagaagatctggcctggcatcccgagcccagagagcgagtttgaaggcctcttcaccacccacaagggtaacttccaggtaggtggcctggttgtcccctcagtgcctgggcttccctgcttcttgcagccaaactgcaggcctctctgagcaggttggtgctatttcttcagctgtggctgtaccagaatgatggctgcctgtggtggagcccctgcacccccttcacggaggacccacctgcttccctggaagtcctctcagagcgctgctgggggacgatgcaggcagtggagccggggacagatgatgagggccccctgctggagccagtgggcagtgagcatgcccaggatacctatctggtgctggacaaatggttgctgccccggaacccgcccagtgaggacctcccagggcctggtggcagtgtggacatagtggccatggatgaaggctcagaagcatcctcctgctcatctgctttggcctcgaagcccagcccagagggagcctctgctgccagctttgagtacactatcctggaccccagctcccagctcttgcgtccatggacactgtgccctgagctgccccctaccccaccccacctaaagtacctgtaccttgtggtatctgactctggcatctcaactgactacagctcaggggactcccagggagcccaagggggcttatccgatggcccctactccaacccttatgagaacagccttatcccagccgctgagcctctgccccccagctatgtggcttgctcttaggacaccaggctgcagatgatcagggatccaatatgactcagagaaccagtgcagactcaagacttatggaacagggatggcgaggcctctctcaggagcaggggcattgctgattttgtctgcccaatccatcctgctcaggaaaccacaaccttgcagtatttttaaatatgtatagtttttttttgtatctatatatatatatacacatatgtatgtaagtttttctaccatgatttctacaaacaccctttaagtcccatcttcccctgggcataggccatagggatagaagttaaagttcttgagcttattcagaagctggatctgcaatctgaatgctactcataacataacaaaatagtatgttaaacagctcttaaatcttactggcttaccacattaaatgatttctctctcctaactcagctcaaatgggcagccatccatgggatgagtcagaggttcagactcttccagtctgtagctctaccttctcttagggtacttagatggatcccctgttctacaaactgccagtcagcaagggaagaaaaagggcagcaatgaccctcaatgggccatttgagggatctggcctggaaatgggcttcctctcttcttctcacacctcactggctggaaacagtcacatgaccccagtcacatgaaaggccaggaaacttagtttagctgtacacccaggaagggcaaagctgtttaagggccactagctagtctctgccactaataataataaaagtaattctgaatcagccatgttctaa

SEQ ID NO: 736715 - DNA, 5155 bp, Homo sapiens
agcggcgccactgagagggacgggcgccggccatggagcgcacagcaggcaaagagctggccctggcaccgctgcaggactggggtgaagagaccgaggacggcgcggtgtacagtgtctccctgcggcggcagcgcagtcagcgcaggagcccggcggagggccccgggggcagccaggctcccagccccattgccaataccttcctccactatcgaaccagcaaggtgagggtgctgagggcagcgcgcctggagcggctggtgggagagttggtgtttggagaccgtgagcaggaccccagcttcatgcccgccttcctggccacctaccggacctttgtacccactgcctgcctgctgggctttctgctgccaccaatgccaccgcccccacctcccgggtcagtagcgaaccataacctccgtattctccaccctagaaccccaactgggcacccccctccacctcctcaggtgtggaacctggaaacacctcccagacccagagccctcttcctaagcccccttctaggttcccccttcttcacctgctggggggcctcttcccagggtagagatcaagaagacagcggtacaagatctgagcttcaacaagaacctgagggctgtggtgtcagtgctgggctcctggctgcaggaccaccctcaggatttccgagacccccctgcccattcggacctgggcagtgtccgaacctttctgggctgggcggccccagggagtgctgaggctcaaaaagcagagaagcttctggaagattttttggaggaggctgagcgagagcaggaagaggagccgcctcaggtgtggacaggacctcccagagttgcccaaacttctgacccagactcttcagaggcctgcgcggaggaagaggaagggctcatgcctcaaggtccccagctcctggacttcagcgtggacgaggtggccgagcagctgaccctcatagacttggagctcttctccaaggtgaggctctacgagtgcttgggctccgtgtggtcgcagagggaccggccgggggctgcaggcgcctcccccactgtgcgcgccaccgtggcccagttcaacaccgtgaccggctgtgtgctgggttccgtgctcggagcaccgggcttggccgccccgcagagggcgcagcggctggagaagtggatccgcatcgcccagcgctgccgagaactgcggaacttctcctccttgcgcgccatcctgtccgccctgcaatctaaccccatctaccggctcaagcgcagctggggggcagtgagccgggaaccgctatctactttcaggaaactttcgcagattttctccgatgagaacaaccacctcagcagcagagagattcttttccaggaggaggccactgagggatcccaagaagaggacaacaccccaggcagcctgccctcaaaaccacccccaggccctgtcccctaccttggcaccttccttacggacctggttatgctggacacagccctgccggatatgttggagggggatctcattaactttgagaagaggaggaaggagtgggagatcctggcccgcatccagcagctgcagaggcgctgtcagagctacaccctgagcccccacccgcccatcctggctgccctgcatgcccagaaccagctcaccgaggagcagagctaccggctctcccgggtcattgagccaccagctgcctcctgccccagctccccacgcatccgacggcggatcagcctcaccaagcgtctcagtgcgaagcttgcccgagagaaaagctcatcacctagtgggagtcccggggacccctcatcccccacctccagtgtgtccccagggtcacccccctcaagtcctagaagcagagatgctcctgctggcagtcccccggcctctccagggccccagggccccagcaccaagctgcccctgagcctggacctgcccagcccccggcccttcgctttgcctctgggcagccctcgaatccccctcccggcgcagcagagctcggaggcccgtgtcatccgcgtcagcatcgacaatgaccacgggaacctgtatcgaagcatcttgctgaccagtcaggacaaagcccccagcgtggtccggcgagccttgcagaagcacaatgtgccccagccctgggcctgtgactatcagctctttcaagtccttcctggggaccggggctgggaagagatgctgatttctgcgataaaatcagtaggtacattttttggaatgttcgctatgtgccaggctagattttacagatgagaagtctgaagctcaggtaaggtaagtcacctgtccagggccacaaagaaaaaaaaaacgtgtgtctgaagccagaacgggagctgttgcggcccaactccctcccctgcccccaagcggcctctgggctcgggaagggcccctgcctcctcccgccaggcacttatctctacccaggctgagtgctggccccgccccctcggggatctgccacttagaggcgcctggtcgggaagggcctggtcagctgcgtccggcggaggcagctgctgacccagctgtggactgtgccgggggcgggggacggaggggcaggagccctgggctccccgtggcgggggctgtatcatggaccacctcggggcgtccctctggccccaggtcggctccctttgtctcctgctcgctggggccgcctgggcgcccccgcctaacctcccggaccccaagttcgagagcaaagcggccttgctggcggcccgggggcccgaagagcttctgtgcttcaccgagcggttggaggacttggtgtgtttctgggaggaagcggcgagcgctggggtgggcccgggcaactacagcttctcctaccagctcgaggatgagccatggaagctgtgtcgcctgcaccaggctcccacggctcgtggtgcggtgcgcttctggtgttcgctgcctacagccgacacgtcgagcttcgtgcccctagagttgcgcgtcacagcagcctccggcgctccgcgatatcaccgtgtcatccacatcaatgaagtagtgctcctagacgcccccgtggggctggtggcgcggttggctgacgagagcggccacgtagtgttgcgctggctcccgccgcctgagacacccatgacgtctcacatccgctacgaggtggacgtctcggccggcaacggcgcagggagcgtacagaggggcaccgttttcctttcccctgattggctcagttccaccagggcccgcccccacgtcatctatttttgtctgctacgcgtccctcgccctgattccgcccccaggtggagatcctggagggccgcaccgagtgtgtgctgagcaacctgcggggccggacgcgctacaccttcgccgtccgcgcgcgtatggctgagccgagcttcggcggcttctggagcgcctggtcggagcctgtgtcgctgctgacgcctagcggtgaggccccaggcgggggtgtaggaggagccagggcgaatcacggggcaagcccaccgccctgacctcctccccgcctcttagacctggaccccctcatcctgacgctctccctcatcctcgtggtcatcctggtgctgctgaccgtgctcgcgctgctctcccaccgccgggctctgaagcagaagatctggcctggcatcccgagcccagagagcgagtttgaaggcctcttcaccacccacaagggtaacttccagctgtggctgtaccagaatgatggctgcctgtggtggagcccctgcacccccttcacggaggacccacctgcttccctggaagtcctctcagagcgctgctgggggacgatgcaggcagtggagccggggacagatgatgagggccccctgctggagccagtgggcagtgagcatgcccaggatacctatctggtgctggacaaatggttgctgccccggaacccgcccagtgaggacctcccagggcctggtggcagtgtggacatagtggccatggatgaaggctcagaagcatcctcctgctcatctgctttggcctcgaagcccagcccagagggagcctctgctgccagctttgagtacactatcctggaccccagctcccagctcttgcgtccatggacactgtgccctgagctgccccctaccccaccccacctaaagtacctgtaccttgtggtatctgactctggcatctcaactgactacagctcaggggactcccagggagcccaagggggcttatccgatggcccctactccaacccttatgagaacagccttatcccagccgctgagcctctgccccccagctatgtggcttgctcttaggacaccaggctgcagatgatcagggatccaatatgactcagagaaccagtgcagactcaagacttatggaacagggatggcgaggcctctctcaggagcaggggcattgctgattttgtctgcccaatccatcctgctcaggaaaccacaaccttgcagtatttttaaatatgtatagtttttttttgtatctatatatatatatacacatatgtatgtaagtttttctaccatgatttctacaaacaccctttaagtcccatcttcccctgggcataggccatagggatagaagttaaagttcttgagcttattcagaagctggatctgcaatctgaatgctactcataacataacaaaatagtatgttaaacagctcttaaatcttactggcttaccacattaaatgatttctctctcctaactcagctcaaatgggcagccatccatgggatgagtcagaggttcagactcttccagtctgtagctctaccttctcttagggtacttagatggatcccctgttctacaaactgccagtcagcaagggaagaaaaagggcagcaatgaccctcaatgggccatttgagggatctggcctggaaatgggcttcctctcttcttctcacacctcactggctggaaacagtcacatgaccccagtcacatgaaaggccaggaaacttagtttagctgtacacccaggaagggcaaagctgtttaagggccactagctagtctctgccactaataataataaaagtaattctgaatcagccatgttctaa

SEQ ID NO: 736716 - DNA, 5174 bp, Homo sapiens
agcggcgccactgagagggacgggcgccggccatggagcgcacagcaggcaaagagctggccctggcaccgctgcaggactggggtgaagagaccgaggacggcgcggtgtacagtgtctccctgcggcggcagcgcagtcagcgcaggagcccggcggagggccccgggggcagccaggctcccagccccattgccaataccttcctccactatcgaaccagcaaggtgagggtgctgagggcagcgcgcctggagcggctggtgggagagttggtgtttggagaccgtgagcaggaccccagcttcatgcccgccttcctggccacctaccggacctttgtacccactgcctgcctgctgggctttctgctgccaccaatgccaccgcccccacctcccgggtcagtagcgaaccataacctccgtattctccaccctagaaccccaactgggcacccccctccacctcctcaggtgtggaacctggaaacacctcccagacccagagccctcttcctaagcccccttctaggttcccccttcttcacctgctggggggcctcttcccagggtagagatcaagaagacagcggtacaagatctgagcttcaacaagaacctgagggctgtggtgtcagtgctgggctcctggctgcaggaccaccctcaggatttccgagacccccctgcccattcggacctgggcagtgtccgaacctttctgggctgggcggccccagggagtgctgaggctcaaaaagcagagaagcttctggaagattttttggaggaggctgagcgagagcaggaagaggagccgcctcaggtgtggacaggacctcccagagttgcccaaacttctgacccagactcttcagaggcctgcgcggaggaagaggaagggctcatgcctcaaggtccccagctcctggacttcagcgtggacgaggtggccgagcagctgaccctcatagacttggagctcttctccaaggtgaggctctacgagtgcttgggctccgtgtggtcgcagagggaccggccgggggctgcaggcgcctcccccactgtgcgcgccaccgtggcccagttcaacaccgtgaccggctgtgtgctgggttccgtgctcggagcaccgggcttggccgccccgcagagggcgcagcggctggagaagtggatccgcatcgcccagcgctgccgagaactgcggaacttctcctccttgcgcgccatcctgtccgccctgcaatctaaccccatctaccggctcaagcgcagctggggggcagtgagccgggaaccgctatctactttcaggaaactttcgcagattttctccgatgagaacaaccacctcagcagcagagagattcttttccaggaggaggccactgagggatcccaagaagaggacaacaccccaggcagcctgccctcaaaaccacccccaggccctgtcccctaccttggcaccttccttacggacctggttatgctggacacagccctgccggatatgttggagggggatctcattaactttgagaagaggaggaaggagtgggagatcctggcccgcatccagcagctgcagaggcgctgtcagagctacaccctgagcccccacccgcccatcctggctgccctgcatgcccagaaccagctcaccgaggagcagagctaccggctctcccgggtcattgagccaccagctgcctcctgccccagctccccacgcatccgacggcggatcagcctcaccaagcgtctcagtgcgaagcttgcccgagagaaaagctcatcacctagtgggagtcccggggacccctcatcccccacctccagtgtgtccccagggtcacccccctcaagtcctagaagcagagatgctcctgctggcagtcccccggcctctccagggccccagggccccagcaccaagctgcccctgagcctggacctgcccagcccccggcccttcgctttgcctctgggcagccctcgaatccccctcccggcgcagcagagctcggaggcccgtgtcatccgcgtcagcatcgacaatgaccacgggaacctgtatcgaagcatcttgctgaccagtcaggacaaagcccccagcgtggtccggcgagccttgcagaagcacaatgtgccccagccctgggcctgtgactatcagctctttcaagtccttcctggggaccggggctgggaagagatgctgatttctgcgataaaatcagtaggtacattttttggaatgttcgctatgtgccaggctagattttacagatgagaagtctgaagctcaggtaaggtaagtcacctgtccagggccacaaagaaaaaaaaaacgtgtgtctgaagccagaacgggagctgttgcggcccaactccctcccctgcccccaagcggcctctgggctcgggaagggcccctgcctcctcccgccaggcacttatctctacccaggctgagtgctggccccgccccctcggggatctgccacttagaggcgcctggtcgggaagggcctggtcagctgcgtccggcggaggcagctgctgacccagctgtggactgtgccgggggcgggggacggaggggcaggagccctgggctccccgtggcgggggctgtatcatggaccacctcggggcgtccctctggccccaggtcggctccctttgtctcctgctcgctggggccgcctgggcgcccccgcctaacctcccggaccccaagttcgagagcaaagcggccttgctggcggcccgggggcccgaagagcttctgtgcttcaccgagcggttggaggacttggtgtgtttctgggaggaagcggcgagcgctggggtgggcccgggcaactacagcttctcctaccagctcgaggatgagccatggaagctgtgtcgcctgcaccaggctcccacggctcgtggtgcggtgcgcttctggtgttcgctgcctacagccgacacgtcgagcttcgtgcccctagagttgcgcgtcacagcagcctccggcgctccgcgatatcaccgtgtcatccacatcaatgaagtagtgctcctagacgcccccgtggggctggtggcgcggttggctgacgagagcggccacgtagtgttgcgctggctcccgccgcctgagacacccatgacgtctcacatccgctacgaggtggacgtctcggccggcaacggcgcagggagcgtacagaggggcaccgttttcctttcccctgattggctcagttccaccagggcccgcccccacgtcatctatttttgtctgctacgcgtccctcgccctgattccgcccccaggtggagatcctggagggccgcaccgagtgtgtgctgagcaacctgcggggccggacgcgctacaccttcgccgtccgcgcgcgtatggctgagccgagcttcggcggcttctggagcgcctggtcggagcctgtgtcgctgctgacgcctagcggtgaggccccaggcgggggtgtaggaggagccagggcgaatcacggggcaagcccaccgccctgacctcctccccgcctcttagacctggaccccctcatcctgacgctctccctcatcctcgtggtcatcctggtgctgctgaccgtgctcgcgctgctctcccaccgccgggctctgaagcagaagatctggcctggcatcccgagcccagagagcgagtttgaaggcctcttcaccacccacaagggtaacttccaggttggtgctatttcttcagctgtggctgtaccagaatgatggctgcctgtggtggagcccctgcacccccttcacggaggacccacctgcttccctggaagtcctctcagagcgctgctgggggacgatgcaggcagtggagccggggacagatgatgagggccccctgctggagccagtgggcagtgagcatgcccaggatacctatctggtgctggacaaatggttgctgccccggaacccgcccagtgaggacctcccagggcctggtggcagtgtggacatagtggccatggatgaaggctcagaagcatcctcctgctcatctgctttggcctcgaagcccagcccagagggagcctctgctgccagctttgagtacactatcctggaccccagctcccagctcttgcgtccatggacactgtgccctgagctgccccctaccccaccccacctaaagtacctgtaccttgtggtatctgactctggcatctcaactgactacagctcaggggactcccagggagcccaagggggcttatccgatggcccctactccaacccttatgagaacagccttatcccagccgctgagcctctgccccccagctatgtggcttgctcttaggacaccaggctgcagatgatcagggatccaatatgactcagagaaccagtgcagactcaagacttatggaacagggatggcgaggcctctctcaggagcaggggcattgctgattttgtctgcccaatccatcctgctcaggaaaccacaaccttgcagtatttttaaatatgtatagtttttttttgtatctatatatatatatacacatatgtatgtaagtttttctaccatgatttctacaaacaccctttaagtcccatcttcccctgggcataggccatagggatagaagttaaagttcttgagcttattcagaagctggatctgcaatctgaatgctactcataacataacaaaatagtatgttaaacagctcttaaatcttactggcttaccacattaaatgatttctctctcctaactcagctcaaatgggcagccatccatgggatgagtcagaggttcagactcttccagtctgtagctctaccttctcttagggtacttagatggatcccctgttctacaaactgccagtcagcaagggaagaaaaagggcagcaatgaccctcaatgggccatttgagggatctggcctggaaatgggcttcctctcttcttctcacacctcactggctggaaacagtcacatgaccccagtcacatgaaaggccaggaaacttagtttagctgtacacccaggaagggcaaagctgtttaagggccactagctagtctctgccactaataataataaaagtaattctgaatcagccatgttctaa

SEQ ID NO: 736717 - DNA, 5071 bp, Homo sapiens
agcggcgccactgagagggacgggcgccggccatggagcgcacagcaggcaaagagctggccctggcaccgctgcaggactggggtgaagagaccgaggacggcgcggtgtacagtgtctccctgcggcggcagcgcagtcagcgcaggagcccggcggagggccccgggggcagccaggctcccagccccattgccaataccttcctccactatcgaaccagcaaggtgagggtgctgagggcagcgcgcctggagcggctggtgggagagttggtgtttggagaccgtgagcaggaccccagcttcatgcccgccttcctggccacctaccggacctttgtacccactgcctgcctgctgggctttctgctgccaccaatgccaccgcccccacctcccgggtcagtagcgaaccataacctccgtattctccaccctagaaccccaactgggcacccccctccacctcctcaggtgtggaacctggaaacacctcccagacccagagccctcttcctaagcccccttctaggttcccccttcttcacctgctggggggcctcttcccagggtagagatcaagaagacagcggtacaagatctgagcttcaacaagaacctgagggctgtggtgtcagtgctgggctcctggctgcaggaccaccctcaggatttccgagacccccctgcccattcggacctgggcagtgtccgaacctttctgggctgggcggccccagggagtgctgaggctcaaaaagcagagaagcttctggaagattttttggaggaggctgagcgagagcaggaagaggagccgcctcaggtgtggacaggacctcccagagttgcccaaacttctgacccagactcttcagaggcctgcgcggaggaagaggaagggctcatgcctcaaggtccccagctcctggacttcagcgtggacgaggtggccgagcagctgaccctcatagacttggagctcttctccaaggtgaggctctacgagtgcttgggctccgtgtggtcgcagagggaccggccgggggctgcaggcgcctcccccactgtgcgcgccaccgtggcccagttcaacaccgtgaccggctgtgtgctgggttccgtgctcggagcaccgggcttggccgccccgcagagggcgcagcggctggagaagtggatccgcatcgcccagcgctgccgagaactgcggaacttctcctccttgcgcgccatcctgtccgccctgcaatctaaccccatctaccggctcaagcgcagctggggggcagtgagccgggaaccgctatctactttcaggaaactttcgcagattttctccgatgagaacaaccacctcagcagcagagagattcttttccaggaggaggccactgagggatcccaagaagaggacaacaccccaggcagcctgccctcaaaaccacccccaggccctgtcccctaccttggcaccttccttacggacctggttatgctggacacagccctgccggatatgttggagggggatctcattaactttgagaagaggaggaaggagtgggagatcctggcccgcatccagcagctgcagaggcgctgtcagagctacaccctgagcccccacccgcccatcctggctgccctgcatgcccagaaccagctcaccgaggagcagagctaccggctctcccgggtcattgagccaccagctgcctcctgccccagctccccacgcatccgacggcggatcagcctcaccaagcgtctcagtgcgaagcttgcccgagagaaaagctcatcacctagtgggagtcccggggacccctcatcccccacctccagtgtgtccccagggtcacccccctcaagtcctagaagcagagatgctcctgctggcagtcccccggcctctccagggccccagggccccagcaccaagctgcccctgagcctggacctgcccagcccccggcccttcgctttgcctctgggcagccctcgaatccccctcccggcgcagcagagctcggaggcccgtgtcatccgcgtcagcatcgacaatgaccacgggaacctgtatcgaagcatcttgctgaccagtcaggacaaagcccccagcgtggtccggcgagccttgcagaagcacaatgtgccccagccctgggcctgtgactatcagctctttcaagtccttcctggggaccggggctgggaagagatgctgatttctgcgataaaatcagtaggtacattttttggaatgttcgctatgtgccaggctagattttacagatgagaagtctgaagctcaggtaaggtaagtcacctgtccagggccacaaagaaaaaaaaaacgtgtgtctgaagccagaacgggagctgttgcggcccaactccctcccctgcccccaagcggcctctgggctcgggaagggcccctgcctcctcccgccaggcacttatctctacccaggctgagtgctggccccgccccctcggggatctgccacttagaggcgcctggtcgggaagggcctggtcagctgcgtccggcggaggcagctgctgacccagctgtggactgtgccgggggcgggggacggaggggcaggagccctgggctccccgtggcgggggctgtatcatggaccacctcggggcgtccctctggccccaggtcggctccctttgtctcctgctcgctggggccgcctgggcgcccccgcctaacctcccggaccccaagttcgagagcaaagcggccttgctggcggcccgggggcccgaagagcttctgtgcttcaccgagcggttggaggacttggtgtgtttctgggaggaagcggcgagcgctggggtgggcccgggcaactacagcttctcctaccagctcgaggatgagccatggaagctgtgtcgcctgcaccaggctcccacggctcgtggtgcggtgcgcttctggtgttcgctgcctacagccgacacgtcgagcttcgtgcccctagagttgcgcgtcacagcagcctccggcgctccgcgatatcaccgtgtcatccacatcaatgaagtagtgctcctagacgcccccgtggggctggtggcgcggttggctgacgagagcggccacgtagtgttgcgctggctcccgccgcctgagacacccatgacgtctcacatccgctacgaggtggacgtctcggccggcaacggcgcagggagcgtacagaggggcaccgttttcctttcccctgattggctcagttccaccagggcccgcccccacgtcatctatttttgtctgctacgcgtccctcgccctgattccgcccccaggtggagatcctggagggccgcaccgagtgtgtgctgagcaacctgcggggccggacgcgctacaccttcgccgtccgcgcgcgtatggctgagccgagcttcggcggcttctggagcgcctggtcggagcctgtgtcgctgctgacgcctagcgacctggaccccctcatcctgacgctctccctcatcctcgtggtcatcctggtgctgctgaccgtgctcgcgctgctctcccaccgccgggctctgaagcagaagatctggcctggcatcccgagcccagagagcgagtttgaaggcctcttcaccacccacaagggtaacttccagctgtggctgtaccagaatgatggctgcctgtggtggagcccctgcacccccttcacggaggacccacctgcttccctggaagtcctctcagagcgctgctgggggacgatgcaggcagtggagccggggacagatgatgagggccccctgctggagccagtgggcagtgagcatgcccaggatacctatctggtgctggacaaatggttgctgccccggaacccgcccagtgaggacctcccagggcctggtggcagtgtggacatagtggccatggatgaaggctcagaagcatcctcctgctcatctgctttggcctcgaagcccagcccagagggagcctctgctgccagctttgagtacactatcctggaccccagctcccagctcttgcgtccatggacactgtgccctgagctgccccctaccccaccccacctaaagtacctgtaccttgtggtatctgactctggcatctcaactgactacagctcaggggactcccagggagcccaagggggcttatccgatggcccctactccaacccttatgagaacagccttatcccagccgctgagcctctgccccccagctatgtggcttgctcttaggacaccaggctgcagatgatcagggatccaatatgactcagagaaccagtgcagactcaagacttatggaacagggatggcgaggcctctctcaggagcaggggcattgctgattttgtctgcccaatccatcctgctcaggaaaccacaaccttgcagtatttttaaatatgtatagtttttttttgtatctatatatatatatacacatatgtatgtaagtttttctaccatgatttctacaaacaccctttaagtcccatcttcccctgggcataggccatagggatagaagttaaagttcttgagcttattcagaagctggatctgcaatctgaatgctactcataacataacaaaatagtatgttaaacagctcttaaatcttactggcttaccacattaaatgatttctctctcctaactcagctcaaatgggcagccatccatgggatgagtcagaggttcagactcttccagtctgtagctctaccttctcttagggtacttagatggatcccctgttctacaaactgccagtcagcaagggaagaaaaagggcagcaatgaccctcaatgggccatttgagggatctggcctggaaatgggcttcctctcttcttctcacacctcactggctggaaacagtcacatgaccccagtcacatgaaaggccaggaaacttagtttagctgtacacccaggaagggcaaagctgtttaagggccactagctagtctctgccactaataataataaaagtaattctgaatcagccatgttctaa

SEQ ID NO: 736718 - DNA, 4967 bp, Homo sapiens
agcggcgccactgagagggacgggcgccggccatggagcgcacagcaggcaaagagctggccctggcaccgctgcaggactggggtgaagagaccgaggacggcgcggtgtacagtgtctccctgcggcggcagcgcagtcagcgcaggagcccggcggagggccccgggggcagccaggctcccagccccattgccaataccttcctccactatcgaaccagcaaggtgagggtgctgagggcagcgcgcctggagcggctggtgggagagttggtgtttggagaccgtgagcaggaccccagcttcatgcccgccttcctggccacctaccggacctttgtacccactgcctgcctgctgggctttctgctgccaccaatgccaccgcccccacctcccgggtcagtagcgaaccataacctccgtattctccaccctagaaccccaactgggcacccccctccacctcctcaggtgtggaacctggaaacacctcccagacccagagccctcttcctaagcccccttctaggttcccccttcttcacctgctggggggcctcttcccagggtagagatcaagaagacagcggtacaagatctgagcttcaacaagaacctgagggctgtggtgtcagtgctgggctcctggctgcaggaccaccctcaggatttccgagacccccctgcccattcggacctgggcagtgtccgaacctttctgggctgggcggccccagggagtgctgaggctcaaaaagcagagaagcttctggaagattttttggaggaggctgagcgagagcaggaagaggagccgcctcaggtgtggacaggacctcccagagttgcccaaacttctgacccagactcttcagaggcctgcgcggaggaagaggaagggctcatgcctcaaggtccccagctcctggacttcagcgtggacgaggtggccgagcagctgaccctcatagacttggagctcttctccaaggtgaggctctacgagtgcttgggctccgtgtggtcgcagagggaccggccgggggctgcaggcgcctcccccactgtgcgcgccaccgtggcccagttcaacaccgtgaccggctgtgtgctgggttccgtgctcggagcaccgggcttggccgccccgcagagggcgcagcggctggagaagtggatccgcatcgcccagcgctgccgagaactgcggaacttctcctccttgcgcgccatcctgtccgccctgcaatctaaccccatctaccggctcaagcgcagctggggggcagtgagccgggaaccgctatctactttcaggaaactttcgcagattttctccgatgagaacaaccacctcagcagcagagagattcttttccaggaggaggccactgagggatcccaagaagaggacaacaccccaggcagcctgccctcaaaaccacccccaggccctgtcccctaccttggcaccttccttacggacctggttatgctggacacagccctgccggatatgttggagggggatctcattaactttgagaagaggaggaaggagtgggagatcctggcccgcatccagcagctgcagaggcgctgtcagagctacaccctgagcccccacccgcccatcctggctgccctgcatgcccagaaccagctcaccgaggagcagagctaccggctctcccgggtcattgagccaccagctgcctcctgccccagctccccacgcatccgacggcggatcagcctcaccaagcgtctcagtgcgaagcttgcccgagagaaaagctcatcacctagtgggagtcccggggacccctcatcccccacctccagtgtgtccccagggtcacccccctcaagtcctagaagcagagatgctcctgctggcagtcccccggcctctccagggccccagggccccagcaccaagctgcccctgagcctggacctgcccagcccccggcccttcgctttgcctctgggcagccctcgaatccccctcccggcgcagcagagctcggaggcccgtgtcatccgcgtcagcatcgacaatgaccacgggaacctgtatcgaagcatcttgctgaccagtcaggacaaagcccccagcgtggtccggcgagccttgcagaagcacaatgtgccccagccctgggcctgtgactatcagctctttcaagtccttcctggggaccggggctgggaagagatgctgatttctgcgataaaatcagtaggtacattttttggaatgttcgctatgtgccaggctagattttacagatgagaagtctgaagctcaggtaaggtaagtcacctgtccagggccacaaagaaaaaaaaaacgtgtgtctgaagccagaacgggagctgttgcggcccaactccctcccctgcccccaagcggcctctgggctcgggaagggcccctgcctcctcccgccaggcacttatctctacccaggctgagtgctggccccgccccctcggggatctgccacttagaggcgcctggtcgggaagggcctggtcagctgcgtccggcggaggcagctgctgacccagctgtggactgtgccgggggcgggggacggaggggcaggagccctgggctccccgtggcgggggctgtatcatggaccacctcggggcgtccctctggccccaggtcggctccctttgtctcctgctcgctggggccgcctgggcgcccccgcctaacctcccggaccccaagttcgagagcaaagcggccttgctggcggcccgggggcccgaagagcttctgtgcttcaccgagcggttggaggacttggtgtgtttctgggaggaagcggcgagcgctggggtgggcccgggcaactacagcttctcctaccagctcgaggatgagccatggaagctgtgtcgcctgcaccaggctcccacggctcgtggtgcggtgcgcttctggtgttcgctgcctacagccgacacgtcgagcttcgtgcccctagagttgcgcgtcacagcagcctccggcgctccgcgatatcaccgtgtcatccacatcaatgaagtagtgctcctagacgcccccgtggggctggtggcgcggttggctgacgagagcggccacgtagtgttgcgctggctcccgccgcctgagacacccatgacgtctcacatccgctacgaggtggacgtctcggccggcaacggcgcagggagcgtacagagggtggagatcctggagggccgcaccgagtgtgtgctgagcaacctgcggggccggacgcgctacaccttcgccgtccgcgcgcgtatggctgagccgagcttcggcggcttctggagcgcctggtcggagcctgtgtcgctgctgacgcctagcgacctggaccccctcatcctgacgctctccctcatcctcgtggtcatcctggtgctgctgaccgtgctcgcgctgctctcccaccgccgggctctgaagcagaagatctggcctggcatcccgagcccagagagcgagtttgaaggcctcttcaccacccacaagggtaacttccagctgtggctgtaccagaatgatggctgcctgtggtggagcccctgcacccccttcacggaggacccacctgcttccctggaagtcctctcagagcgctgctgggggacgatgcaggcagtggagccggggacagatgatgagggccccctgctggagccagtgggcagtgagcatgcccaggatacctatctggtgctggacaaatggttgctgccccggaacccgcccagtgaggacctcccagggcctggtggcagtgtggacatagtggccatggatgaaggctcagaagcatcctcctgctcatctgctttggcctcgaagcccagcccagagggagcctctgctgccagctttgagtacactatcctggaccccagctcccagctcttgcgtccatggacactgtgccctgagctgccccctaccccaccccacctaaagtacctgtaccttgtggtatctgactctggcatctcaactgactacagctcaggggactcccagggagcccaagggggcttatccgatggcccctactccaacccttatgagaacagccttatcccagccgctgagcctctgccccccagctatgtggcttgctcttaggacaccaggctgcagatgatcagggatccaatatgactcagagaaccagtgcagactcaagacttatggaacagggatggcgaggcctctctcaggagcaggggcattgctgattttgtctgcccaatccatcctgctcaggaaaccacaaccttgcagtatttttaaatatgtatagtttttttttgtatctatatatatatatacacatatgtatgtaagtttttctaccatgatttctacaaacaccctttaagtcccatcttcccctgggcataggccatagggatagaagttaaagttcttgagcttattcagaagctggatctgcaatctgaatgctactcataacataacaaaatagtatgttaaacagctcttaaatcttactggcttaccacattaaatgatttctctctcctaactcagctcaaatgggcagccatccatgggatgagtcagaggttcagactcttccagtctgtagctctaccttctcttagggtacttagatggatcccctgttctacaaactgccagtcagcaagggaagaaaaagggcagcaatgaccctcaatgggccatttgagggatctggcctggaaatgggcttcctctcttcttctcacacctcactggctggaaacagtcacatgaccccagtcacatgaaaggccaggaaacttagtttagctgtacacccaggaagggcaaagctgtttaagggccactagctagtctctgccactaataataataaaagtaattctgaatcagccatgttctaa

SEQ ID NO: 736719 - DNA, 2349 bp, Homo sapiens
agcggcgccactgagagggacgggcgccggccatggagcgcacagcaggcaaagagctggccctggcaccgctgcaggactggggtgaagagaccgaggacggcgcggtgtacagtgtctccctgcggcggcagcgcagtcagcgcaggagcccggcggagggccccgggggcagccaggctcccagccccattgccaataccttcctccactatcgaaccagcaaggtgagggtgctgagggcagcgcgcctggagcggctggtgggagagttggtgtttggagaccgtgagcaggaccccagcttcatgcccgccttcctggccacctaccggacctttgtacccactgcctgcctgctgggctttctgctgccaccaatgccaccgcccccacctcccgggtcagtagcgaaccataacctccgtattctccaccctagaaccccaactgggcacccccctccacctcctcaggtgtggaacctggaaacacctcccagacccagagccctcttcctaagcccccttctaggttcccccttcttcacctgctggggggcctcttcccagggtagagatcaagaagacagcggtacaagatctgagcttcaacaagaacctgagggctgtggtgtcagtgctgggctcctggctgcaggaccaccctcaggatttccgagacccccctgcccattcggacctgggcagtgtccgaacctttctgggctgggcggccccagggagtgctgaggctcaaaaagcagagaagcttctggaagattttttggaggaggctgagcgagagcaggaagaggagccgcctcaggtgtggacaggacctcccagagttgcccaaacttctgacccagactcttcagaggcctgcgcggaggaagaggaagggctcatgcctcaaggtccccagctcctggacttcagcgtggacgaggtggccgagcagctgaccctcatagacttggagctcttctccaaggtgaggctctacgagtgcttgggctccgtgtggtcgcagagggaccggccgggggctgcaggcgcctcccccactgtgcgcgccaccgtggcccagttcaacaccgtgaccggctgtgtgctgggttccgtgctcggagcaccgggcttggccgccccgcagagggcgcagcggctggagaagtggatccgcatcgcccagcgctgccgagaactgcggaacttctcctccttgcgcgccatcctgtccgccctgcaatctaaccccatctaccggctcaagcgcagctggggggcagtgagccgggaaccgctatctactttcaggaaactttcgcagattttctccgatgagaacaaccacctcagcagcagagagattcttttccaggaggaggccactgagggatcccaagaagaggacaacaccccaggcagcctgccctcaaaaccacccccaggccctgtcccctaccttggcaccttccttacggacctggttatgctggacacagccctgccggatatgttggagggggatctcattaactttgagaagaggaggaaggagtgggagatcctggcccgcatccagcagctgcagaggcgctgtcagagctacaccctgagcccccacccgcccatcctggctgccctgcatgcccagaaccagctcaccgaggagcagagctaccggctctcccgggtcattgagccaccagctgcctcctgccccagctccccacgcatccgacggcggatcagcctcaccaagcgtctcagtgcgaagcttgcccgagagaaaagctcatcacctagtgggagtcccggggacccctcatcccccacctccagtgtgtccccagggtcacccccctcaagtcctagaagcagagatgctcctgctggcagtcccccggcctctccagggccccagggccccagcaccaagctgcccctgagcctggacctgcccagcccccggcccttcgctttgcctctgggcagccctcgaatccccctcccggcgcagcagagctcggaggcccgtgtcatccgcgtcagcatcgacaatgaccacgggaacctgtatcgaagcatcttgctgaccagtcaggacaaagcccccagcgtggtccggcgagccttgcagaagcacaatgtgccccagccctgggcctgtgactatcagctctttcaagtccttcctggggaccggggctgggaagagatgctgatttctgcgataaaatcagtaggtacattttttggaatgttcgctatgtgccaggctagattttacagatgagaagtctgaagctcaggtaaggtctgcaataaagattgagtttgc

SEQ ID NO: 736720 - DNA, 2369 bp, Homo sapiens
agcggcgccactgagagggacgggcgccggccatggagcgcacagcaggcaaagagctggccctggcaccgctgcaggactggggtgaagagaccgaggacggcgcggtgtacagtgtctccctgcggcggcagcgcagtcagcgcaggagcccggcggagggccccgggggcagccaggctcccagccccattgccaataccttcctccactatcgaaccagcaaggtgagggtgctgagggcagcgcgcctggagcggctggtgggagagttggtgtttggagaccgtgagcaggaccccagcttcatgcccgccttcctggccacctaccggacctttgtacccactgcctgcctgctgggctttctgctgccaccaatgccaccgcccccacctcccgggtcagtagcgaaccataacctccgtattctccaccctagaaccccaactgggcacccccctccacctcctcaggtgtggaacctggaaacacctcccagacccagagccctcttcctaagcccccttctaggttcccccttcttcacctgctggggggcctcttcccagggtagagatcaagaagacagcggtacaagatctgagcttcaacaagaacctgagggctgtggtgtcagtgctgggctcctggctgcaggaccaccctcaggatttccgagacccccctgcccattcggacctgggcagtgtccgaacctttctgggctgggcggccccagggagtgctgaggctcaaaaagcagagaagcttctggaagattttttggaggaggctgagcgagagcaggaagaggagccgcctcaggtgtggacaggacctcccagagttgcccaaacttctgacccagactcttcagaggcctgcgcggaggaagaggaagggctcatgcctcaaggtccccagctcctggacttcagcgtggacgaggtggccgagcagctgaccctcatagacttggagctcttctccaaggtgaggctctacgagtgcttgggctccgtgtggtcgcagagggaccggccgggggctgcaggcgcctcccccactgtgcgcgccaccgtggcccagttcaacaccgtgaccggctgtgtgctgggttccgtgctcggagcaccgggcttggccgccccgcagagggcgcagcggctggagaagtggatccgcatcgcccagcgctgccgagaactgcggaacttctcctccttgcgcgccatcctgtccgccctgcaatctaaccccatctaccggctcaagcgcagctggggggcagtgagccgggaaccgctatctactttcaggaaactttcgcagattttctccgatgagaacaaccacctcagcagcagagagattcttttccaggaggaggccactgagggatcccaagaagaggacaacaccccaggcagcctgccctcaaaaccacccccaggccctgtcccctaccttggcaccttccttacggacctggttatgctggacacagccctgccggatatgttggagggggatctcattaactttgagaagaggaggaaggagtgggagatcctggcccgcatccagcagctgcagaggcgctgtcagagctacaccctgagcccccacccgcccatcctggctgccctgcatgcccagaaccagctcaccgaggagcagagctaccggctctcccgggtcattgagccaccagctgcctcctgccccagctccccacgcatccgacggcggatcagcctcaccaagcgtctcagtgcgaagcttgcccgagagaaaagctcatcacctagtgggagtcccggggacccctcatcccccacctccagtgtgtccccagggtcacccccctcaagtcctagaagcagagatgctcctgctggcagtcccccggcctctccagggccccagggccccagcaccaagctgcccctgagcctggacctgcccagcccccggcccttcgctttgcctctgggcagccctcgaatccccctcccggcgcagcagagctcggaggcccgtgtcatccgcgtcagcatcgacaatgaccacgggaacctgtatcgaagcatcttgctgaccagtcaggacaaagcccccagcgtggtccggcgagccttgcagaagcacaatgtgccccagccctgggcctgtgactatcagctctttcaagtccttcctggggaccggggctgggaagagatgctgatttctgcgataaaatcagtaggtacattttttggaatgttcgctatgtgccaggctagattttacagatgggagaagactgcgcctcttcatgtataaaatccctgttctttctctgccaccctggcgtagattat

SEQ ID NO: 736721 - DNA, 2636 bp, Homo sapiens
agcggcgccactgagagggacgggcgccggccatggagcgcacagcaggcaaagagctggccctggcaccgctgcaggactggggtgaagagaccgaggacggcgcggtgtacagtgtctccctgcggcggcagcgcagtcagcgcaggagcccggcggagggccccgggggcagccaggctcccagccccattgccaataccttcctccactatcgaaccagcaaggtgagggtgctgagggcagcgcgcctggagcggctggtgggagagttggtgtttggagaccgtgagcaggaccccagcttcatgcccgccttcctggccacctaccggacctttgtacccactgcctgcctgctgggctttctgctgccaccaatgccaccgcccccacctcccgggtcagtagcgaaccataacctccgtattctccaccctagaaccccaactgggcacccccctccacctcctcaggtgtggaacctggaaacacctcccagacccagagccctcttcctaagcccccttctaggttcccccttcttcacctgctggggggcctcttcccagggtagagatcaagaagacagcggtacaagatctgagcttcaacaagaacctgagggctgtggtgtcagtgctgggctcctggctgcaggaccaccctcaggatttccgagacccccctgcccattcggacctgggcagtgtccgaacctttctgggctgggcggccccagggagtgctgaggctcaaaaagcagagaagcttctggaagattttttggaggaggctgagcgagagcaggaagaggagccgcctcaggtgtggacaggacctcccagagttgcccaaacttctgacccagactcttcagaggcctgcgcggaggaagaggaagggctcatgcctcaaggtccccagctcctggacttcagcgtggacgaggtggccgagcagctgaccctcatagacttggagctcttctccaaggtgaggctctacgagtgcttgggctccgtgtggtcgcagagggaccggccgggggctgcaggcgcctcccccactgtgcgcgccaccgtggcccagttcaacaccgtgaccggctgtgtgctgggttccgtgctcggagcaccgggcttggccgccccgcagagggcgcagcggctggagaagtggatccgcatcgcccagcgctgccgagaactgcggaacttctcctccttgcgcgccatcctgtccgccctgcaatctaaccccatctaccggctcaagcgcagctggggggcagtgagccgggaaccgctatctactttcaggaaactttcgcagattttctccgatgagaacaaccacctcagcagcagagagattcttttccaggaggaggccactgagggatcccaagaagaggacaacaccccaggcagcctgccctcaaaaccacccccaggccctgtcccctaccttggcaccttccttacggacctggttatgctggacacagccctgccggatatgttggagggggatctcattaactttgagaagaggaggaaggagtgggagatcctggcccgcatccagcagctgcagaggcgctgtcagagctacaccctgagcccccacccgcccatcctggctgccctgcatgcccagaaccagctcaccgaggagcagagctaccggctctcccgggtcattgagccaccagctgcctcctgccccagctccccacgcatccgacggcggatcagcctcaccaagcgtctcagtgcgaagcttgcccgagagaaaagctcatcacctagtgggagtcccggggacccctcatcccccacctccagtgtgtccccagggtcacccccctcaagtcctagaagcagagatgctcctgctggcagtcccccggcctctccagggccccagggccccagcaccaagctgcccctgagcctggacctgcccagcccccggcccttcgctttgcctctgggcagccctcgaatccccctcccggcgcagcagagctcggaggcccgtgtcatccgcgtcagcatcgacaatgaccacgggaacctgtatcgaagcatcttgctgaccagtcaggacaaagcccccagcgtggtccggcgagccttgcagaagcacaatgtgccccagccctgggcctgtgactatcagctctttcaagtccttcctggggaccgggtcgcccccagagacttcatgctgcggcggaaagaggggacccggaacactctgtctgtctccccaagctgaggcagccctgtcctctccacaagacacaagtcccacaggcaagcttgcgactcttctcctggaaagctgccatcccccagtagaggccactgtgctgtgtatcccaggaccaccacccaactgtagcccattggaccccatctctttttctgactctgttggtactagatccatattccaaagacatcagcccatgggtggctggtggagagctcaatcccataaatgtagaaagaggtggggcatggatacgtcaaatccctccccagagaaatcttataaatgttagagacgcatcagaagtgacagatgcggatgaaaatagtgaccagagttatgaaaaaaaaaaa

SEQ ID NO: 736722 - DNA, 2209 bp, Homo sapiens
agcggcgccactgagagggacgggcgccggccatggagcgcacagcaggcaaagagctggccctggcaccgctgcaggactggggtgaagagaccgaggacggcgcggtgtacagtgtctccctgcggcggcagcgcagtcagcgcaggagcccggcggagggccccgggggcagccaggctcccagccccattgccaataccttcctccactatcgaaccagcaaggtgagggtgctgagggcagcgcgcctggagcggctggtgggagagttggtgtttggagaccgtgagcaggaccccagcttcatgcccgccttcctggccacctaccggacctttgtacccactgcctgcctgctgggctttctgctgccaccaatgccaccgcccccacctcccgggtcagtagcgaaccataacctccgtattctccaccctagaaccccaactgggcacccccctccacctcctcaggtgtggaacctggaaacacctcccagacccagagccctcttcctaagcccccttctaggttcccccttcttcacctgctggggggcctcttcccagggtagagatcaagaagacagcggtacaagatctgagcttcaacaagaacctgagggctgtggtgtcagtgctgggctcctggctgcaggaccaccctcaggatttccgagacccccctgcccattcggacctgggcagtgtccgaacctttctgggctgggcggccccagggagtgctgaggctcaaaaagcagagaagcttctggaagattttttggaggaggctgagcgagagcaggaagaggagccgcctcaggtgtggacaggacctcccagagttgcccaaacttctgacccagactcttcagaggcctgcgcggaggaagaggaagggctcatgcctcaaggtccccagctcctggacttcagcgtggacgaggtggccgagcagctgaccctcatagacttggagctcttctccaaggtgaggctctacgagtgcttgggctccgtgtggtcgcagagggaccggccgggggctgcaggcgcctcccccactgtgcgcgccaccgtggcccagttcaacaccgtgaccggctgtgtgctgggttccgtgctcggagcaccgggcttggccgccccgcagagggcgcagcggctggagaagtggatccgcatcgcccagcgctgccgagaactgcggaacttctcctccttgcgcgccatcctgtccgccctgcaatctaaccccatctaccggctcaagcgcagctggggggcagtgagccgggaaccgctatctactttcaggaaactttcgcagattttctccgatgagaacaaccacctcagcagcagagagattcttttccaggaggaggccactgagggatcccaagaagaggacaacaccccaggcagcctgccctcaaaaccacccccaggccctgtcccctaccttggcaccttccttacggacctggttatgctggacacagccctgccggatatgttggagggggatctcattaactttgagaagaggaggaaggagtgggagatcctggcccgcatccagcagctgcagaggcgctgtcagagctacaccctgagcccccacccgcccatcctggctgccctgcatgcccagaaccagctcaccgaggagcagagctaccggctctcccgggtcattgagccaccagctgcctcctgccccagctccccacgcatccgacggcggatcagcctcaccaagcgtctcagtgcgaagcttgcccgagagaaaagctcatcacctagtgggagtcccggggacccctcatcccccacctccagtgtgtccccagggtcacccccctcaagtcctagaagcagagatgctcctgctggcagtcccccggcctctccagggccccagggccccagcaccaagctgtgccctgagcctgtgacctgctccagatcgcccggcccgttcgtctttggcctctgtggcagcacctcagaatcccccatcccgggtgcagtagagtctcggatggcccgatgtcatcgcgcgatcacggatcgaacagatgaccagcgggagaccatgtgatctgacagcatacttgcatgaccagagtcaggacgagaagctccgccattagtgagtcgcggctgagcccttgctagtagagcaacacattgtagca

SEQ ID NO: 736723 - DNA, 1677 bp, Homo sapiens
agcggcgccactgagagggacgggcgccggccatggagcgcacagcaggcaaagagctggccctggcaccgctgcaggactggggtgaagagaccgaggacggcgcggtgtacagtgtctccctgcggcggcagcgcagtcagcgcaggagcccggcggagggccccgggggcagccaggctcccagccccattgccaataccttcctccactatcgaaccagcaaggtgagggtgctgagggcagcgcgcctggagcggctggtgggagagttggtgtttggagaccgtgagcaggaccccagcttcatgcccgccttcctggccacctaccggacctttgtacccactgcctgcctgctgggctttctgctgccaccaatgccaccgcccccacctcccgggtcagtagcgaaccataacctccgtattctccaccctagaaccccaactgggcacccccctccacctcctcaggtgtggaacctggaaacacctcccagacccagagccctcttcctaagcccccttctaggttcccccttcttcacctgctggggggcctcttcccagggtagagatcaagaagacagcggtacaagatctgagcttcaacaagaacctgagggctgtggtgtcagtgctgggctcctggctgcaggaccaccctcaggatttccgagacccccctgcccattcggacctgggcagtgtccgaacctttctgggctgggcggccccagggagtgctgaggctcaaaaagcagagaagcttctggaagattttttggaggaggctgagcgagagcaggaagaggagccgcctcaggtgtggacaggacctcccagagttgcccaaacttctgacccagactcttcagaggcctgcgcggaggaagaggaagggctcatgcctcaaggtccccagctcctggacttcagcgtggacgaggtggccgagcagctgaccctcatagacttggagctcttctccaaggtgaggctctacgagtgcttgggctccgtgtggtcgcagagggaccggccgggggctgcaggcgcctcccccactgtgcgcgccaccgtggcccagttcaacaccgtgaccggctgtgtgctgggttccgtgctcggagcaccgggcttggccgccccgcagagggcgcagcggctggagaagtggatccgcatcgcccagcgctgccgagaactgcggaacttctcctccttgcgcgccatcctgtccgccctgcaatctaaccccatctaccggctcaagcgcagctggggggcagtgagccgggaaccgctatctactttcaggaaactttcgcagattttctccgatgagaacaaccacctcagcagcagagagattcttttccaggaggaggccactgagggatcccaagaagaggacaacaccccaggcagcctgccctcaaaaccacccccaggccctgtcccctaccttggcaccttccttacggacctggttatgctggacacagccctgccggatatgttggagggggatctcattaactttgagaagaggaggaaggagtgggagatcctggcccgcatccagcagctgcagaggcgctgtcagagctacaccctgagcccacagtcgaacgggatactctagagtcagccggaccgatcaactcgccgc

SEQ ID NO: 736724 - DNA, 5827 bp, Homo sapiens
agcggcgccactgagagggacgggcgccggccatggagcgcacagcaggcaaagagctggccctggcaccgctgcaggactggggtgaagagaccgaggacggcgcggtgtacagtgtctccctgcggcggcagcgcagtcagcgcaggagcccggcggagggccccgggggcagccaggctcccagccccattgccaataccttcctccactatcgaaccagcaaggtgagggtgctgagggcagcgcgcctggagcggctggtgggagagttggtgtttggagaccgtgagcaggaccccagcttcatgcccgccttcctggccacctaccggacctttgtacccactgcctgcctgctgggctttctgctgccaccaatgccaccgcccccacctcccgggtcagtagcgaaccataacctccgtattctccaccctagaaccccaactgggcacccccctccacctcctcaggtgtggaacctggaaacacctcccagacccagagccctcttcctaagcccccttctaggttcccccttcttcacctgctggggggcctcttcccagggtagagatcaagaagacagcggtacaagatctgagcttcaacaagaacctgagggctgtggtgtcagtgctgggctcctggctgcaggaccaccctcaggatttccgagacccccctgcccattcggacctgggcagtgtccgaacctttctgggctgggcggccccagggagtgctgaggctcaaaaagcagagaagcttctggaagattttttggaggaggctgagcgagagcaggaagaggagccgcctcaggtgtggacaggacctcccagagttgcccaaacttctgacccagactcttcagaggcctgcgcggaggaagaggaagggctcatgcctcaaggtccccagctcctggacttcagcgtggacgaggtggccgagcagctgaccctcatagacttggagctcttctccaaggtgaggctctacgagtgcttgggctccgtgtggtcgcagagggaccggccgggggctgcaggcgcctcccccactgtgcgcgccaccgtggcccagttcaacaccgtgaccggctgtgtgctgggttccgtgctcggagcaccgggcttggccgccccgcagagggcgcagcggctggagaagtggatccgcatcgcccagggaaccgctatctactttcaggaaactttcgcagattttctccgatgagaacaaccacctcagcagcagagagattcttttccaggaggaggccactgagggatcccaagaagaggacaacaccccaggcagcctgccctcaaaaccacccccaggccctgtcccctaccttggcaccttccttacggacctggttatgctggacacagccctgccggatatgttggagggggatctcattaactttgagaagaggaggaaggagtgggagatcctggcccgcatccagcagctgcagaggcgctgtcagagctacaccctgagcccccacccgcccatcctggctgccctgcatgcccagaaccagctcaccgaggagcagagctaccggctctcccgggtcattgagccaccagctgcctcctgccccagctccccacgcatccgacggcggatcagcctcaccaagcgtctcagtgcgaagcttgcccgagagaaaagctcatcacctagtgggagtcccggggacccctcatcccccacctccagtgtgtccccagggtcacccccctcaagtcctagaagcagagatgctcctgctggcagtcccccggcctctccagggccccagggccccagcaccaagctgcccctgagcctggacctgcccagcccccggcccttcgctttgcctctgggcagccctcgaatccccctcccggcgcagcagagctcggaggcccgtgtcatccgcgtcagcatcgacaatgaccacgggaacctgtatcgaagcatcttgctgaccagtcaggacaaagcccccagcgtggtccggcgagccttgcagaagcacaatgtgccccagccctgggcctgtgactatcagctctttcaagtccttcctggggaccggggctgggaagagatgctgatttctgcgataaaatcagtaggtacattttttggaatgttcgctatgtgccaggctagattttacagatgagaagtctgaagctcaggtaaggtaagtcacctgtccagggccacaaagaaaaaaaaaacgtgtgtctgaagccagaacgggagctgttgcggcccaactccctcccctgcccccaagcggcctctgggctcgggaagggcccctgcctcctcccgccaggcacttatctctacccaggctgagtgctggccccgccccctcggggatctgccacttagaggcgcctggtcgggaagggcctggtcagctgcgtccggcggaggcagctgctgacccagctgtggactgtgccgggggcgggggacggaggggcaggagccctgggctccccgtggcgggggctgtatcatggaccacctcggggcgtccctctggccccaggtcggctccctttgtctcctgctcgctggggccgcctgggcgcccccgcctaacctcccggaccccaagttcgagagcaaaggtaaggatgagctgcgtgtggacccctacgctggagcctgcaggaccatgctggggcctgaactcccagcctaggtcctgggggccatgcctgtttctggacttcctgaccgggtcctgggggccaagctggcatctgaacccttagactgggtcctggatgggtggggggcggggtggggtatgttaggatccaagactcctgatcgcgtcccgggcaagagctagagtgggcttaacattcccgttttaccttttcagggagtctgggacatgctaaatcctaagggggctgacttggtgctaaggtccctggggggtggggaccaagccgaccctccctaggggagggagggtaaagcccgggtccgagttagaggggccaagccacaggctactgtaaacacggtttgtgtgagggcgccagatcacttgcccggcccggtggagggagggaggcggggggcacggttggcgctatcggttggcggggagcctgccggggccgatagggggcccgcctctccgcacacacccccagccgcgcgcgtgtcctaggctggggcggggctggcagtcccgagctcgaggtcttgaacgccgcgcccagctcagctggccgctgggtgggcaggtgtgcgccagtggtgacggcgggggacagtaaggcgagaaacttgcccctgggaattaggggggcaccacctctgcggacccctccaagggacccgcttgggaagatggcagggcggggcttttttcttatcgggtccgcccaggctgcgggagggaagaggagggggctgtctcccgaggatagagctcagacccccatgcccttcctttgtcgcccctccccagcggccttgctggcggcccgggggcccgaagagcttctgtgcttcaccgagcggttggaggacttggtgtgtttctgggaggaagcggcgagcgctggggtgggcccgggcaactacagcttctcctaccagctcgaggatgagccatggaagctgtgtcgcctgcaccaggctcccacggctcgtggtgcggtgcgcttctggtgttcgctgcctacagccgacacgtcgagcttcgtgcccctagagttgcgcgtcacagcagcctccggcgctccgcgatatcaccgtgtcatccacatcaatgaagtagtgctcctagacgcccccgtggggctggtggcgcggttggctgacgagagcggccacgtagtgttgcgctggctcccgccgcctgagacacccatgacgtctcacatccgctacgaggtggacgtctcggccggcaacggcgcagggagcgtacagaggggcaccgttttcctttcccctgattggctcagttccaccagggcccgcccccacgtcatctatttttgtctgctacgcgtccctcgccctgattccgcccccaggtggagatcctggagggccgcaccgagtgtgtgctgagcaacctgcggggccggacgcgctacaccttcgccgtccgcgcgcgtatggctgagccgagcttcggcggcttctggagcgcctggtcggagcctgtgtcgctgctgacgcctagcgacctggaccccctcatcctgacgctctccctcatcctcgtggtcatcctggtgctgctgaccgtgctcgcgctgctctcccaccgccgggctctgaagcagaagatctggcctggcatcccgagcccagagagcgagtttgaaggcctcttcaccacccacaagggtaacttccagctgtggctgtaccagaatgatggctgcctgtggtggagcccctgcacccccttcacggaggacccacctgcttccctggaagtcctctcagagcgctgctgggggacgatgcaggcagtggagccggggacagatgatgagggccccctgctggagccagtgggcagtgagcatgcccaggatacctatctggtgctggacaaatggttgctgccccggaacccgcccagtgaggacctcccagggcctggtggcagtgtggacatagtggccatggatgaaggctcagaagcatcctcctgctcatctgctttggcctcgaagcccagcccagagggagcctctgctgccagctttgagtacactatcctggaccccagctcccagctcttgcgtccatggacactgtgccctgagctgccccctaccccaccccacctaaagtacctgtaccttgtggtatctgactctggcatctcaactgactacagctcaggggactcccagggagcccaagggggcttatccgatggcccctactccaacccttatgagaacagccttatcccagccgctgagcctctgccccccagctatgtggcttgctcttaggacaccaggctgcagatgatcagggatccaatatgactcagagaaccagtgcagactcaagacttatggaacagggatggcgaggcctctctcaggagcaggggcattgctgattttgtctgcccaatccatcctgctcaggaaaccacaaccttgcagtatttttaaatatgtatagtttttttttgtatctatatatatatatacacatatgtatgtaagtttttctaccatgatttctacaaacaccctttaagtcccatcttcccctgggcataggccatagggatagaagttaaagttcttgagcttattcagaagctggatctgcaatctgaatgctactcataacataacaaaatagtatgttaaacagctcttaaatcttactggcttaccacattaaatgatttctctctcctaactcagctcaaatgggcagccatccatgggatgagtcagaggttcagactcttccagtctgtagctctaccttctcttagggtacttagatggatcccctgttctacaaactgccagtcagcaagggaagaaaaagggcagcaatgaccctcaatgggccatttgagggatctggcctggaaatgggcttcctctcttcttctcacacctcactggctggaaacagtcacatgaccccagtcacatgaaaggccaggaaacttagtttagctgtacacccaggaagggcaaagctgtttaagggccactagctagtctctgccactaataataataaaagtaattctgaatcagccatgttctaa

SEQ ID NO: 736725 - DNA, 592 bp, Homo sapiens; identical to SEQ ID NO: 92303

SEQ ID NO: 736726 - DNA, 6881 bp, Homo sapiens
  misc_feature (1255)..(1255): n is a, c, g, or t
gcggccgccgcgggccggggcagtgagtccacccgcccgccgaggtccgcccgcccgccgagacccgcccgccgccgctgccatggccgaagtgcgcaaattcaccaaacggctcagcaagcctggcacggcggctgagctccggcagagcgtgtctgaggccgtgcggggctccgtggtgctggaaaaggccaaagttgttgagcccctggactatgagaatgttattgcccaaagaaaaacccagatttacagcgaccccctccgagatctgcttatgttcccaatggaagatatatctatctcggtgataggtcgtcaacgcagaacggtgcagtctactgtaccagaagatgctgaaaagagggcccagagtttatttgttaaagagtgtattaaaacctatagcacagattggcacgtggtaaactacaagtatgaggacttctctggggactttcgaatgttgccatgtaaatctttgagaccagaaaagattcctaatcatgtatttgagatagatgaagactgtgagaaagatgaggactcatcttctttatgttctcagaagggtggtgtgataaaacaaggctggttgcataaagcaaatgtaaatagtaccatcacagtaaccatgaaggtattcaagagacgatatttttacttgacccaacttcctgacggttcatatattctcaattcctataaagatgagaaaaattcaaaagaatcgaaaggttgcatctacttggacgcctgcattgatgttgttcagtgccccaaaatgcgccgtcatgcttttgaactcaagatgttagataaatatagccattatctggctgctgaaactgagcaggaaatggaggaatggttgataactttgaaaaagattattcagatcaacaccgacagtttagttcaagaaaaaaaggagacggtagaaacagcacaagatgatgaaactagcagccaaggaaaagccgagaacatcatggcaagtttggaaaggagcatgcatccggaactgatgaagtatggaagagaaactgaacaactaaacaaactcagtagaggagatggaagacagaatctcttttcttttgattcagaagttcagaggttggacttttcaggaattgaacctgatataaagccatttgaagaaaaatgcaataaacgtttcctggtgaattgccatgatttaactttcaatatcttgggccaaattggagacaatgcaaaaggaccacccacnaatgttgagcccttttttatcaatcttgccttatttgatgtaaagaacaattgtaagatttcagcagactttcatgtagacctgaatcccccatctgtccgtgaaatgctgtggggctcttcaacccaactggccagtgacggtagcccaaagggctcttcacccgaatcttacattcatggaattgccgaatctcagttacgctacatacaacagggaattttctcagtgacgaatccacatcctgaaatttttctagttgccagaattgaaaaggtactacagggaaacattacacactgtgcagaaccctatatcaaaaattctgatccagtaaagacggcccagaaggtgcacaggacagctaaacaagtgtgtagccgccttggacaatacagaatgcccttcgcttgggctgccagacccattttcaaagatactcaaggctctcttgatctggatgggagattttctcctctgtataaacaagacagtagcaagctttcaagtgaagacattctcaagttgctctcagaatataagaagccagaaaagaccaaactgcagattattcctgggcagctaaacatcacagtagaatgtgttcctgtggatttatcaactgtttttttccctgctatagattgtattacttcttcatatgtgcccttgaagccttttgaaaagaattgccaaaatattactgtggaggttgaagagtttgttccagaaatgacaaaatattgttatccatttactatttacaaaaaccatctgtatgtatatcccctgcaattaaaatacgatagccagaaaacatttgccaaggcaaggaacattgcagtctgtgtggaattccgggattcagatgaaagtgacgctagtgccctaaagtgtatttatggaaaacctgcagggtctgtttttaccacaaatgcttatgctgttgtctcgcatcacaaccaaaatccagagttctatgatgagattaaaattgagcttcccattcacctacatcaaaaacatcatttgcttttcactttttatcatgtaagttgtgaaattaacacaaagggaacaaccaaaaagcaagacacagttgaaactccagttgggtttgcctgggtacctttgctgaaagatggtagaatcatcacatttgagcagcagctgccagtttccgccaatcttcccccaggctacttgaatctgaatgatcaatgtaacgtggatattaaatgggtagatggtgcaaagcctttgttgaagattaaaagccacttagaatctaccatttacactcaagatctgcatgtgcacaaattcttccatcattgccagctgattcagtcaggctcgaaagaagttccaggggagctcattaaatatttaaagtgtttgcatgccatggagatccaagtcatgatacagtttctacctgtaattcttatgcaactcttccgagttctcacaaatatgacccatgaagatgacgttcctatcaactgcaccatggttctcttacatattgtatcaaagtgccatgaagaaggcttggatagttatctaagatcattcataaagtatagcttccgacctgaaaaaccgagtgctcctcaggcccagctgatacatgaaaccctggctactacgatgatagcaatattgaaacagtctgcagattttttatcaataaacaaattgctaaagtactcatggtttttctttgaaataattgcaaagtcaatggccacatacttgttggaagagaataagattaagcttccccgaggccagagatttcccgagacatatcatcatgtcttacattcactgcttcttgcaataattccccatgtgactattcggtatgcggagattcccgatgagtccagaaatgtgaactatagtttggctagcttcctgaagcgctgtttgacactaatggatagaggatttattttcaatttaataaatgactatatatctggattcagccccaaagatcctaaggttctggctgaatacaagtttgaatttctgcaaacaatttgcaatcacgaacattacattcctctgaacttgccaatggcatttgcaaaacctaaactgcagcgggttcaagattcaaatcttgaatacagtttatcagatgagtattgcaagcatcacttcttggttggtctacttctgagggaaacttccattgctcttcaggacaattatgagatcagatatacagctatctctgttataaagaatcttttgataaaacatgcatttgacacaagataccagcacaagaaccaacaagccaaaatagcacaattgtacctcccctttgttggactacttttggaaaatatacagcgattagcaggtcgagataccttgtattcttgtgcagccatgcctaattctgcatccagagatgagtttccatgtggctttacttcacctgccaatagagggagtctgagcactgacaaagacaccgcttatgggtcttttcaaaatggacatggaattaagagagaagattcaagaggttccctcatcccagaaggagcaacaggatttccagatcagggcaacactggtgaaaatacccgacagagttctacaaggagtagtgtatcccagtataaccgcctggatcagtatgaaatcagaagcctcctgatgtgctacctgtatatagtaaaaatgatttcagaagatactctcttaacttactggaataaagtatcacctcaggagctcataaacattcttatacttttagaagtatgcttgtttcactttagatatatggggaaaagaaacatagcaagggtgcatgatgcctggctgtcaaaacacttcggaatagaccgaaaatcgcaaaccatgcctgctcttcgaaacagatcaggagtaatgcaggcccggcttcagcatcttagtagcctagaaagttcatttacacttaatcacagttctacaacaactgaagcagacattttccaccaggcacttcttgaaggcaatacagctactgaagtttccctaacagtactagacaccatatcatttttcactcagtgcttcaagacccaacttttaaataatgatggccataacccattaatgaaaaaagtgtttgatatacatcttgcttttcttaaaaatggacaatctgaagtgtcgctgaaacatgtatttgcctcactgagagctttcatcagtaagtttccttcagcatttttcaaaggaagagtaaacatgtgtgctgcattttgctatgaggttttaaagtgctgcacatcgaagattagctcaaccaggaatgaagcatctgcacttttgtatcttttgatgagaaacaactttgagtataccaaaaggaaaacctttttgaggacacatctacagataataattgctgtaagccaactgatagctgatgtagcactaagcggaggatcaagatttcaggagtctttattcattatcaataattttgcaaatagtgacagacctatgaaggcaactgcctttcccgcagaagtcaaagacttgaccaagagaatccgcactgttcttatggccactgcccaaatgaaggagcatgagaaagaccctgaaatgctaattgatctccagtatagcttagccaagtcctatgcaagcaccccagagctcaggaaaacctggcttgatagcatggccaagattcatgtaaaaaatggagatttttcagaggctgcgatgtgttatgtccatgtagcagctctagttgcagagtttcttcatcgaaaaaaattatttcctaacggatgttcagcgttcaagaaaattactcccaatatagatgaagaaggagcaatgaaagaagatgctgggatgatggatgtccattatagtgaagaggtcttgctggagttgctagaacaatgtgtggatggcttatggaaggcagaacgttatgaaataatttctgagatttccaagttgatcgttccaatttatgagaaacgtcgtgagtttgagaaacttactcaagtttatagaactcttcatggagcttacacaaaaattctggaagttatgcatacaaaaaagagacttttaggcactttcttcagagttgccttttatggccaatctttttttgaagaagaagatggaaaggagtacatctataaagaaccaaagctcactggcctctcagaaatttccttgagacttgttaaactttatggtgaaaagtttggtacggagaatgtcaaaataattcaggattcagacaaggtaaatgccaaagagcttgatccaaaatatgctcatatacaagttacttatgtgaagccttactttgatgacaaagaactcacagaaaggaagaccgagtttgaaagaaatcataatatcagcagatttgtttttgaggccccttacactttatcaggcaaaaaacagggctgtatagaagaacagtgcaaacgccgtacaatcttgacaacttcaaactcgtttccttacgtgaagaagaggattcctattaactgtgaacagcagattaatttaaaaccaattgatgttgccactgatgaaataaaagataaaactgcagagctgcaaaagctttgctcctctactgacgtggacatgattcagctccaacttaaattgcagggctgtgtttctgtgcaggtcaatgctggtccattagcatatgcaagagctttcttaaatgacagccaagctagcaagtatccacctaagaaagtgagtgagttgaaagacatgtttaggaaatttatacaagcatgcagcattgcacttgaactaaatgagcggctaattaaagaagatcaagttgagtaccatgaagggctaaagtcaaatttcagagacatggtaaaagaattatctgacattatccatgagcagatattacaagaagacacaatgcattctccctggatgagcaacacattacatgtattttgtgcaattagtggtacatcaagtgaccgaggttatggttccccaagatacgctgaagtgtgaggaaatgcagatgtacgtgacaatgagactgacctttctcaggaatatttggagctgtgcaaatgttaaaatttaaagatttgatatacatggagtgtttcttctcgacaccaaaattttcatgtgttccaacagggtgcttacatatttgtaaataagcaacttgaaagtgcctggaaaattgcaccactgtgcttggtttgtacttttttaggtaaatctatatgctgaaaagtagagctcaaaaacagtagttcaatttgcttaattattgcttaaaataatggtactatgtaaaattgtataatggaatacaataaaaggtaaaacttatttgtaattagaagtgaaagaaataatactttgaacttagcatttttcttgacaagaagctcaattcattatcatactaatccttggtaggaggagaagaaaattgataacatttccgtaatacacggatatttaaaattggggagatcatttgaatccttgccaattagtagtcaaggctgggctaaaggaaccaaaagcattatttcacagaaaatttcaaaaggaaaggatatat

SEQ ID NO: 736727 - DNA, 6692 bp, Homo sapiens
  misc_feature (1255)..(1255): n is a, c, g, or t
gcggccgccgcgggccggggcagtgagtccacccgcccgccgaggtccgcccgcccgccgagacccgcccgccgccgctgccatggccgaagtgcgcaaattcaccaaacggctcagcaagcctggcacggcggctgagctccggcagagcgtgtctgaggccgtgcggggctccgtggtgctggaaaaggccaaagttgttgagcccctggactatgagaatgttattgcccaaagaaaaacccagatttacagcgaccccctccgagatctgcttatgttcccaatggaagatatatctatctcggtgataggtcgtcaacgcagaacggtgcagtctactgtaccagaagatgctgaaaagagggcccagagtttatttgttaaagagtgtattaaaacctatagcacagattggcacgtggtaaactacaagtatgaggacttctctggggactttcgaatgttgccatgtaaatctttgagaccagaaaagattcctaatcatgtatttgagatagatgaagactgtgagaaagatgaggactcatcttctttatgttctcagaagggtggtgtgataaaacaaggctggttgcataaagcaaatgtaaatagtaccatcacagtaaccatgaaggtattcaagagacgatatttttacttgacccaacttcctgacggttcatatattctcaattcctataaagatgagaaaaattcaaaagaatcgaaaggttgcatctacttggacgcctgcattgatgttgttcagtgccccaaaatgcgccgtcatgcttttgaactcaagatgttagataaatatagccattatctggctgctgaaactgagcaggaaatggaggaatggttgataactttgaaaaagattattcagatcaacaccgacagtttagttcaagaaaaaaaggagacggtagaaacagcacaagatgatgaaactagcagccaaggaaaagccgagaacatcatggcaagtttggaaaggagcatgcatccggaactgatgaagtatggaagagaaactgaacaactaaacaaactcagtagaggagatggaagacagaatctcttttcttttgattcagaagttcagaggttggacttttcaggaattgaacctgatataaagccatttgaagaaaaatgcaataaacgtttcctggtgaattgccatgatttaactttcaatatcttgggccaaattggagacaatgcaaaaggaccacccacnaatgttgagcccttttttatcaatcttgccttatttgatgtaaagaacaattgtaagatttcagcagactttcatgtagacctgaatcccccatctgtccgtgaaatgctgtggggctcttcaacccaactggccagtgacggtagcccaaagggctcttcacccgaatcttacattcatggaattgccgaatctcagttacgctacatacaacagggaattttctcagtgacgaatccacatcctgaaatttttctagttgccagaattgaaaaggtactacagggaaacattacacactgtgcagaaccctatatcaaaaattctgatccagtaaagacggcccagaaggtgcacaggacagctaaacaagtgtgtagccgccttggacaatacagaatgcccttcgcttgggctgccagacccattttcaaagatactcaaggctctcttgatctggatgggagattttctcctctgtataaacaagacagtagcaagctttcaagtgaagacattctcaagttgctctcagaatataagaagccagaaaagaccaaactgcagattattcctgggcagctaaacatcacagtagaatgtgttcctgtggatttatcaactgtttttttccctgctatagattgtattacttcttcatatgtgcccttgaagccttttgaaaagaattgccaaaatattactgtggaggttgaagagtttgttccagaaatgacaaaatattgttatccatttactatttacaaaaaccatctgtatgtatatcccctgcaattaaaatacgatagccagaaaacatttgccaaggcaaggaacattgcagtctgtgtggaattccgggattcagatgaaagtgacgctagtgccctaaagtgtatttatggaaaacctgcagggtctgtttttaccacaaatgcttatgctgttgtctcgcatcacaaccaaaatccagagttctatgatgagattaaaattgagcttcccattcacctacatcaaaaacatcatttgcttttcactttttatcatgtaagttgtgaaattaacacaaagggaacaaccaaaaagcaagacacagttgaaactccagttgggtttgcctgggtacctttgctgaaagatggtagaatcatcacatttgagcagcagctgccagtttccgccaatcttcccccaggctacttgaatctgaatgatcaatgtaacgtggatattaaatgggtagatggtgcaaagcctttgttgaagattaaaagccacttagaatctaccatttacactcaagatctgcatgtgcacaaattcttccatcattgccagctgattcagtcaggctcgaaagaagttccaggggagctcattaaatatttaaagtgtttgcatgccatggagatccaagtcatgatacagtttctacctgtaattcttatgcaactcttccgagttctcacaaatatgacccatgaagatgacgttcctatcaactgcaccatggttctcttacatattgtatcaaagtgccatgaagaaggcttggatagttatctaagatcattcataaagtatagcttccgacctgaaaaaccgagtgctcctcaggcccagctgatacatgaaaccctggctactacgatgatagcaatattgaaacagtctgcagattttttatcaataaacaaattgctaaagtactcatggtttttctttgaaataattgcaaagtcaatggccacatacttgttggaagagaataagattaagcttccccgaggccagagatttcccgagacatatcatcatgtcttacattcactgcttcttgcaataattccccatgtgactattcggtatgcggagattcccgatgagtccagaaatgtgaactatagtttggctagcttcctgaagcgctgtttgacactaatggatagaggatttattttcaatttaataaatgactatatatctggattcagccccaaagatcctaaggttctggctgaatacaagtttgaatttctgcaaacaatttgcaatcacgaacattacattcctctgaacttgccaatggcatttgcaaaacctaaactgcagcgggttcaagattcaaatcttgaatacagtttatcagatgagtattgcaagcatcacttcttggttggtctacttctgagggaaacttccattgctcttcaggacaattatgagatcagatatacagctatctctgttataaagaatcttttgataaaacatgcatttgacacaagataccagcacaagaaccaacaagccaaaatagcacaattgtacctcccctttgttggactacttttggaaaatatacagcgattagcaggtcgagataccttgtattcttgtgcagccatgcctaattctgcatccagagatgagtttccatgtggctttacttcacctgccaatagagggagtctgagcactgacaaagacaccgcttatgggtcttttcaaaatggacatggaattaagagagaagattcaagaggttccctcatcccagaaggagcaacaggatttccagatcagggcaacactggtgaaaatacccgacagagttctacaaggagtagtgtatcccagtataaccgcctggatcagtatgaaatcagaagcctcctgatgtgctacctgtatatagtaaaaatgatttcagaagatactctcttaacttactggaataaagtatcacctcaggagctcataaacattcttatacttttagaagtatgcttgtttcactttagatatatggggaaaagaaacatagcaagggtgcatgatgcctggctgtcaaaacacttcggaatagaccgaaaatcgcaaaccatgcctgctcttcgaaacagatcaggagtaatgcaggcccggcttcagcatcttagtagcctagaaagttcatttacacttaatcacagttctacaacaactgaagcagacattttccaccaggcacttcttgaaggcaatacagctactgaagtttccctaacagtactagacaccatatcatttttcactcagtgcttcaagacccaacttttaaataatgatggccataacccattaatgaaaaaagtgtttgatatacatcttgcttttcttaaaaatggacaatctgaagtgtcgctgaaacatgtatttgcctcactgagagctttcatcagtaagtttccttcagcatttttcaaaggaagagtaaacatgtgtgctgcattttgctatgaggttttaaagtgctgcacatcgaagattagctcaaccaggaatgaagcatctgcacttttgtatcttttgatgagaaacaactttgagtataccaaaaggaaaacctttttgaggacacatctacagataataattgctgtaagccaactgatagctgatgtagcactaagcggaggatcaagatttcaggagtctttattcattatcaataattttgcaaatagtgacagacctatgaaggcaactgcctttcccgcagaagtcaaagacttgaccaagagaatccgcactgttcttatggccactgcccaaatgaaggagcatgagaaagaccctgaaatgctaattgatctccagtatagcttagccaagtcctatgcaagcaccccagagctcaggaaaacctggcttgatagcatggccaagattcatgtaaaaaatggagatttttcagaggctgcgatgtgttatgtccatgtagcagctctagttgcagagtttcttcatcgaaaaaaattatttcctaacggatgttcagcgttcaagaaaattactcccaatatagatgaagaaggagcaatgaaagaagatgctgggatgatggatgtccattatagtgaagaggtcttgctggagttgctagaacaatgtgtggatggcttatggaaggcagaacgttatgaaataatttctgagatttccaagttgatcgttccaatttatgagaaacgtcgtgagtttgagaaacttactcaagtttatagaactcttcatggagcttacacaaaaattctggaagttatgcatacaaaaaagagacttttaggcactttcttcagagttgccttttatggccaatctttttttgaagaagaagatggaaaggagtacatctataaagaaccaaagctcactggcctctcagaaatttccttgagacttgttaaactttatggtgaaaagtttggtacggagaatgtcaaaataattcaggattcagacaaggtaaatgccaaagagcttgatccaaaatatgctcatatacaagttacttatgtgaagccttactttgatgacaaagaactcacagaaaggaagaccgagtttgaaagaaatcataatatcagcagatttgtttttgaggccccttacactttatcaggcaaaaaacagggctgtatagaagaacagtgcaaacgccgtacaatcttgacaacttcaaactcgtttccttacgtgaagaagaggattcctattaactgtgaacagcagattaatttaaaaccaattgatgttgccactgatgaaataaaagataaaactgcagagctgcaaaagctttgctcctctactgacgtggacatgattcagctccaacttaaattgcagggctgtgtttctgtgcaggtcaatgctggtccattagcatatgcaagagctttcttaaatgacagccaagctagcaagtatccacctaagaaagtgagtgagttgaaagacatgtttaggaaatttatacaagcatgcagcattgcacttgaactaaatgagcggctaattaaagaagatcaagttgagtaccatgaagggctaaagtcaaatttcagagacatggtaaaagaattatctgacattatccatgagcagatattacaagaagacacaatgcattctccctggatgagcaacacattacatgtattttgtgcaattagtggtacatcaagtgaccgaggttatggttccccaagatacgctgaagtgtgaggaaatgcagatgtacgtgacaatgagactgacctttctcaggaatatttggagctgtgcaaatgttaaaatttaaagatttgatatacatggagtgtttcttctcgacaccaaaattttcatgtgttccaacagggtgcttacatatttgtaaataagcaacttgaaagtgcctggaaaattgcaccactgtgcttggtttgtacttttttaggtaaatctatatgctgaaaagtagagctcaaaaacagtagttcaatttgcttaattattgcttaaaataatggtactatgtaaaattgtataatggaatacaataaaaggtaaaacttatttgtaattagaagtgaaagaaaaaaaaaaagtcgacgcggccgcgaat

SEQ ID NO: 736728 - DNA, 6896 bp, Homo sapiens
  misc_feature (1255)..(1255): n is a, c, g, or t
gcggccgccgcgggccggggcagtgagtccacccgcccgccgaggtccgcccgcccgccgagacccgcccgccgccgctgccatggccgaagtgcgcaaattcaccaaacggctcagcaagcctggcacggcggctgagctccggcagagcgtgtctgaggccgtgcggggctccgtggtgctggaaaaggccaaagttgttgagcccctggactatgagaatgttattgcccaaagaaaaacccagatttacagcgaccccctccgagatctgcttatgttcccaatggaagatatatctatctcggtgataggtcgtcaacgcagaacggtgcagtctactgtaccagaagatgctgaaaagagggcccagagtttatttgttaaagagtgtattaaaacctatagcacagattggcacgtggtaaactacaagtatgaggacttctctggggactttcgaatgttgccatgtaaatctttgagaccagaaaagattcctaatcatgtatttgagatagatgaagactgtgagaaagatgaggactcatcttctttatgttctcagaagggtggtgtgataaaacaaggctggttgcataaagcaaatgtaaatagtaccatcacagtaaccatgaaggtattcaagagacgatatttttacttgacccaacttcctgacggttcatatattctcaattcctataaagatgagaaaaattcaaaagaatcgaaaggttgcatctacttggacgcctgcattgatgttgttcagtgccccaaaatgcgccgtcatgcttttgaactcaagatgttagataaatatagccattatctggctgctgaaactgagcaggaaatggaggaatggttgataactttgaaaaagattattcagatcaacaccgacagtttagttcaagaaaaaaaggagacggtagaaacagcacaagatgatgaaactagcagccaaggaaaagccgagaacatcatggcaagtttggaaaggagcatgcatccggaactgatgaagtatggaagagaaactgaacaactaaacaaactcagtagaggagatggaagacagaatctcttttcttttgattcagaagttcagaggttggacttttcaggaattgaacctgatataaagccatttgaagaaaaatgcaataaacgtttcctggtgaattgccatgatttaactttcaatatcttgggccaaattggagacaatgcaaaaggaccacccacnaatgttgagcccttttttatcaatcttgccttatttgatgtaaagaacaattgtaagatttcagcagactttcatgtagacctgaatcccccatctgtccgtgaaatgctgtggggctcttcaacccaactggccagtgacggtagcccaaagggctcttcacccgaatcttacattcatggaattgccgaatctcagttacgctacatacaacagggaattttctcagtgacgaatccacatcctgaaatttttctagttgccagaattgaaaaggtactacagggaaacattacacactgtgcagaaccctatatcaaaaattctgatccagtaaagacggcccagaaggtgcacaggacagctaaacaagtgtgtagccgccttggacaatacagaatgcccttcgcttgggctgccagacccattttcaaagatactcaaggctctcttgatctggatgggagattttctcctctgtataaacaagacagtagcaagctttcaagtgaagacattctcaagttgctctcagaatataagaagccagaaaagaccaaactgcagattattcctgggcagctaaacatcacagtagaatgtgttcctgtggatttatcaactgtttttttccctgctatagattgtattacttcttcatatgtgcccttgaagccttttgaaaagaattgccaaaatattactgtggaggttgaagagtttgttccagaaatgacaaaatattgttatccatttactatttacaaaaaccatctgtatgtatatcccctgcaattaaaatacgatagccagaaaacatttgccaaggcaaggaacattgcagtctgtgtggaattccgggattcagatgaaagtgacgctagtgccctaaagtgtatttatggaaaacctgcagggtctgtttttaccacaaatgcttatgctgttgtctcgcatcacaaccaaaatccagagttctatgatgagattaaaattgagcttcccattcacctacatcaaaaacatcatttgcttttcactttttatcatgtaagttgtgaaattaacacaaagggaacaaccaaaaagcaagacacagttgaaactccagttgggtttgcctgggtacctttgctgaaagatggtagaatcatcacatttgagcagcagctgccagtttccgccaatcttcccccaggctacttgaatctgaatgatcaatgtaacgtggatattaaatgggtagatggtgcaaagcctttgttgaagattaaaagccacttagaatctaccatttacactcaagatctgcatgtgcacaaattcttccatcattgccagctgattcagtcaggctcgaaagaagttccaggggagctcattaaatatttaaagtgtttgcatgccatggagatccaagtcatgatacagtttctacctgtaattcttatgcaactcttccgagttctcacaaatatgacccatgaagatgacgttcctatcaactgcaccatggttctcttacatattgtatcaaagtgccatgaagaaggcttggatagttatctaagatcattcataaagtatagcttccgacctgaaaaaccgagtgctcctcaggcccagctgatacatgaaaccctggctactacgatgatagcaatattgaaacagtctgcagattttttatcaataaacaaattgctaaagtactcatggtttttctttgaaataattgcaaagtcaatggccacatacttgttggaagagaataagattaagcttccccgaggccagagatttcccgagacatatcatcatgtcttacattcactgcttcttgcaataattccccatgtgactattcggtatgcggagattcccgatgagtccagaaatgtgaactatagtttggctagcttcctgaagcgctgtttgacactaatggatagaggatttattttcaatttaataaatgactatatatctggattcagccccaaagatcctaaggttctggctgaatacaagtttgaatttctgcaaacaatttgcaatcacgaacattacattcctctgaacttgccaatggcatttgcaaaacctaaactgcagcgggttcaagattcaaatcttgaatacagtttatcagatgagtattgcaagcatcacttcttggttggtctacttctgagggaaacttccattgctcttcaggacaattatgagatcagatatacagctatctctgttataaagaatcttttgataaaacatgcatttgacacaagataccagcacaagaaccaacaagccaaaatagcacaattgtacctcccctttgttggactacttttggaaaatatacagcgattagcaggtcgagataccttgtattcttgtgcagccatgcctaattctcttatgggtcttttcaaaatggacatggaattaagagagaagattcaagaggttccctcatcccagaaggagcaacaggatttccagatcagggcaacactggtgaaaatccatgattattttaaaattttaccactaaaacacatggcatatgagaatgaaacacagtattcatggctatatctttgtgaagactccaagacccgacagagttctacaaggagtagtgtatcccagtataaccgcctggatcagtatgaaatcagaagcctcctgatgtgctacctgtatatagtaaaaatgatttcagaagatactctcttaacttactggaataaagtatcacctcaggagctcataaacattcttatacttttagaagtatgcttgtttcactttagatatatggggaaaagaaacatagcaagggtgcatgatgcctggctgtcaaaacacttcggaatagaccgaaaatcgcaaaccatgcctgctcttcgaaacagatcaggagtaatgcaggcccggcttcagcatcttagtagcctagaaagttcatttacacttaatcacagttctacaacaactgaagcagacattttccaccaggcacttcttgaaggcaatacagctactgaagtttccctaacagtactagacaccatatcatttttcactcagtgcttcaagacccaacttttaaataatgatggccataacccattaatgaaaaaagtgtttgatatacatcttgcttttcttaaaaatggacaatctgaagtgtcgctgaaacatgtatttgcctcactgagagctttcatcagtaagtttccttcagcatttttcaaaggaagagtaaacatgtgtgctgcattttgctatgaggttttaaagtgctgcacatcgaagattagctcaaccaggaatgaagcatctgcacttttgtatcttttgatgagaaacaactttgagtataccaaaaggaaaacctttttgaggacacatctacagataataattgctgtaagccaactgatagctgatgtagcactaagcggaggatcaagatttcaggagtctttattcattatcaataattttgcaaatagtgacagacctatgaaggcaactgcctttcccgcagaagtcaaagacttgaccaagagaatccgcactgttcttatggccactgcccaaatgaaggagcatgagaaagaccctgaaatgctaattgatctccagtatagcttagccaagtcctatgcaagcaccccagagctcaggaaaacctggcttgatagcatggccaagattcatgtaaaaaatggagatttttcagaggctgcgatgtgttatgtccatgtagcagctctagttgcagagtttcttcatcgaaaaaaattatttcctaacggatgttcagcgttcaagaaaattactcccaatatagatgaagaaggagcaatgaaagaagatgctgggatgatggatgtccattatagtgaagaggtcttgctggagttgctagaacaatgtgtggatggcttatggaaggcagaacgttatgaaataatttctgagatttccaagttgatcgttccaatttatgagaaacgtcgtgagtttgagaaacttactcaagtttatagaactcttcatggagcttacacaaaaattctggaagttatgcatacaaaaaagagacttttaggcactttcttcagagttgccttttatggccaatctttttttgaagaagaagatggaaaggagtacatctataaagaaccaaagctcactggcctctcagaaatttccttgagacttgttaaactttatggtgaaaagtttggtacggagaatgtcaaaataattcaggattcagacaaggtaaatgccaaagagcttgatccaaaatatgctcatatacaagttacttatgtgaagccttactttgatgacaaagaactcacagaaaggaagaccgagtttgaaagaaatcataatatcagcagatttgtttttgaggccccttacactttatcaggcaaaaaacagggctgtatagaagaacagtgcaaacgccgtacaatcttgacaacttcaaactcgtttccttacgtgaagaagaggattcctattaactgtgaacagcagattaatttaaaaccaattgatgttgccactgatgaaataaaagataaaactgcagagctgcaaaagctttgctcctctactgacgtggacatgattcagctccaacttaaattgcagggctgtgtttctgtgcaggtcaatgctggtccattagcatatgcaagagctttcttaaatgacagccaagctagcaagtatccacctaagaaagtgagtgagttgaaagacatgtttaggaaatttatacaagcatgcagcattgcacttgaactaaatgagcggctaattaaagaagatcaagttgagtaccatgaagggctaaagtcaaatttcagagacatggtaaaagaattatctgacattatccatgagcagatattacaagaagacacaatgcattctccctggatgagcaacacattacatgtattttgtgcaattagtggtacatcaagtgaccgaggttatggttccccaagatacgctgaagtgtgaggaaatgcagatgtacgtgacaatgagactgacctttctcaggaatatttggagctgtgcaaatgttaaaatttaaagatttgatatacatggagtgtttcttctcgacaccaaaattttcatgtgttccaacagggtgcttacatatttgtaaataagcaacttgaaagtgcctggaaaattgcaccactgtgcttggtttgtacttttttaggtaaatctatatgctgaaaagtagagctcaaaaacagtagttcaatttgcttaattattgcttaaaataatggtactatgtaaaattgtataatggaatacaataaaaggtaaaacttatttgtaattagaagtgaaagaaataatactttgaacttagcatttttcttgacaagaagctcaattcattatcatactaatccttggtaggaggagaagaaaattgataacatttccgtaatacacggatatttaaaattggggagatcatttgaatccttgccaattagtagtcaaggctgggctaaaggaaccaaaagcattatttcacagaaaatttcaaaaggaaaggatatat

SEQ ID NO: 736729 - DNA, 6782 bp, Homo sapiens
  misc_feature (1255)..(1255): n is a, c, g, or t
gcggccgccgcgggccggggcagtgagtccacccgcccgccgaggtccgcccgcccgccgagacccgcccgccgccgctgccatggccgaagtgcgcaaattcaccaaacggctcagcaagcctggcacggcggctgagctccggcagagcgtgtctgaggccgtgcggggctccgtggtgctggaaaaggccaaagttgttgagcccctggactatgagaatgttattgcccaaagaaaaacccagatttacagcgaccccctccgagatctgcttatgttcccaatggaagatatatctatctcggtgataggtcgtcaacgcagaacggtgcagtctactgtaccagaagatgctgaaaagagggcccagagtttatttgttaaagagtgtattaaaacctatagcacagattggcacgtggtaaactacaagtatgaggacttctctggggactttcgaatgttgccatgtaaatctttgagaccagaaaagattcctaatcatgtatttgagatagatgaagactgtgagaaagatgaggactcatcttctttatgttctcagaagggtggtgtgataaaacaaggctggttgcataaagcaaatgtaaatagtaccatcacagtaaccatgaaggtattcaagagacgatatttttacttgacccaacttcctgacggttcatatattctcaattcctataaagatgagaaaaattcaaaagaatcgaaaggttgcatctacttggacgcctgcattgatgttgttcagtgccccaaaatgcgccgtcatgcttttgaactcaagatgttagataaatatagccattatctggctgctgaaactgagcaggaaatggaggaatggttgataactttgaaaaagattattcagatcaacaccgacagtttagttcaagaaaaaaaggagacggtagaaacagcacaagatgatgaaactagcagccaaggaaaagccgagaacatcatggcaagtttggaaaggagcatgcatccggaactgatgaagtatggaagagaaactgaacaactaaacaaactcagtagaggagatggaagacagaatctcttttcttttgattcagaagttcagaggttggacttttcaggaattgaacctgatataaagccatttgaagaaaaatgcaataaacgtttcctggtgaattgccatgatttaactttcaatatcttgggccaaattggagacaatgcaaaaggaccacccacnaatgttgagcccttttttatcaatcttgccttatttgatgtaaagaacaattgtaagatttcagcagactttcatgtagacctgaatcccccatctgtccgtgaaatgctgtggggctcttcaacccaactggccagtgacggtagcccaaagggctcttcacccgaatcttacattcatggaattgccgaatctcagttacgctacatacaacagggaattttctcagtgacgaatccacatcctgaaatttttctagttgccagaattgaaaaggtactacagggaaacattacacactgtgcagaaccctatatcaaaaattctgatccagtaaagacggcccagaaggtgcacaggacagctaaacaagtgtgtagccgccttggacaatacagaatgcccttcgcttgggctgccagacccattttcaaagatactcaaggctctcttgatctggatgggagattttctcctctgtataaacaagacagtagcaagctttcaagtgaagacattctcaagttgctctcagaatataagaagccagaaaagaccaaactgcagattattcctgggcagctaaacatcacagtagaatgtgttcctgtggatttatcaactgtttttttccctgctatagattgtattacttcttcatatgtgcccttgaagccttttgaaaagaattgccaaaatattactgtggaggttgaagagtttgttccagaaatgacaaaatattgttatccatttactatttacaaaaaccatctgtatgtatatcccctgcaattaaaatacgatagccagaaaacatttgccaaggcaaggaacattgcagtctgtgtggaattccgggattcagatgaaagtgacgctagtgccctaaagtgtatttatggaaaacctgcagggtctgtttttaccacaaatgcttatgctgttgtctcgcatcacaaccaaaatccagagttctatgatgagattaaaattgagcttcccattcacctacatcaaaaacatcatttgcttttcactttttatcatgtaagttgtgaaattaacacaaagggaacaaccaaaaagcaagacacagttgaaactccagttgggtttgcctgggtacctttgctgaaagatggtagaatcatcacatttgagcagcagctgccagtttccgccaatcttcccccaggctacttgaatctgaatgatcaatgtaacgtggatattaaatgggtagatggtgcaaagcctttgttgaagattaaaagccacttagaatctaccatttacactcaagatctgcatgtgcacaaattcttccatcattgccagctgattcagtcaggctcgaaagaagttccaggggagctcattaaatatttaaagtgtttgcatgccatggagatccaagtcatgatacagtttctacctgtaattcttatgcaactcttccgagttctcacaaatatgacccatgaagatgacgttcctatcaactgcaccatggttctcttacatattgtatcaaagtgccatgaagaaggcttggatagttatctaagatcattcataaagtatagcttccgacctgaaaaaccgagtgctcctcaggcccagctgatacatgaaaccctggctactacgatgatagcaatattgaaacagtctgcagattttttatcaataaacaaattgctaaagtactcatggtttttctttgaaataattgcaaagtcaatggccacatacttgttggaagagaataagattaagcttccccgaggccagagatttcccgagacatatcatcatgtcttacattcactgcttcttgcaataattccccatgtgactattcggtatgcggagattcccgatgagtccagaaatgtgaactatagtttggctagcttcctgaagcgctgtttgacactaatggatagaggatttattttcaatttaataaatgactatatatctggattcagccccaaagatcctaaggttctggctgaatacaagtttgaatttctgcaaacaatttgcaatcacgaacattacattcctctgaacttgccaatggcatttgcaaaacctaaactgcagcgggttcaagattcaaatcttgaatacagtttatcagatgagtattgcaagcatcacttcttggttggtctacttctgagggaaacttccattgctcttcaggacaattatgagatcagatatacagctatctctgttataaagaatcttttgataaaacatgcatttgacacaagataccagcacaagaaccaacaagccaaaatagcacaattgtacctcccctttgttggactacttttggaaaatatacagcgattagcaggtcgagataccttgtattcttgtgcagccatgcctaattctcttatgggtcttttcaaaatggacatggaattaagagagaagattcaagaggttccctcatcccagaaggagcaacaggatttccagatcagggcaacactggtgaaaatccatgattattttaaaattttaccactaaaacacatggcatatgagaatgaaacacagtattcatggctatatctttgtgaagactccaagacccgacagagttctacaaggagtagtgtatcccagtataaccgcctggatcagtatgaaatcagaagcctcctgatgtgctacctgtatatagtaaaaatgatttcagaagatactctcttaacttactggaataaagtatcacctcaggagctcataaacattcttatacttttagaagtatgcttgtttcactttagatatatggggaaaagaaacatagcaagggtgcatgatgcctggctgtcaaaacacttcggaatagaccgaaaatcgcaaaccatgcctgctcttcgaaacagatcaggagtaatgcaggcccggcttcagcatcttagtagcctagaaagttcatttacacttaatcacagttctacaacaactgaagcagacattttccaccaggcacttcttgaaggcaatacagctactgaagtttccctaacagtactagacaccatatcatttttcactcagtgcttcaagacccaacttttaaataatgatggccataacccattaatgaaaaaagtgtttgatatacatcttgcttttcttaaaaatggacaatctgaagtgtcgctgaaacatgtatttgcctcactgagagctttcatcagtaagtttccttcagcatttttcaaaggaagagtaaacatgtgtgctgcattttgctatgaggttttaaagtgctgcacatcgaagattagctcaaccaggaatgaagcatctgcacttttgtatcttttgatgagaaacaactttgagtataccaaaaggaaaacctttttgaggacacatctacagataataattgctgtaagccaactgatagctgatgtagcactaagcggaggatcaagatttcaggagtctttattcattatcaataattttgcaaatagtgacagacctatgaaggcaactgcctttcccgcagaagtcaaagacttgaccaagagaatccgcactgttcttatggccactgcccaaatgaaggagcatgagaaagaccctgaaatgctaattgatctccagtatagcttagccaagtcctatgcaagcaccccagagctcaggaaaacctggcttgatagcatggccaagattcatgtaaaaaatggagatttttcagaggctgcgatgtgttatgtccatgtagcagctctagttgcagagtttcttcatcgaaaaaaattatttcctaacggatgttcagcgttcaagaaaattactcccaatatagatgaagaaggagcaatgaaagaagatgctgggatgatggatgtccattatagtgaagaggtcttgctggagttgctagaacaatgtgtggatggcttatggaaggcagaacgttatgaaataatttctgagatttccaagttgatcgttccaatttatgagaaacgtcgtgagtttgagtctttttttgaagaagaagatggaaaggagtacatctataaagaaccaaagctcactggcctctcagaaatttccttgagacttgttaaactttatggtgaaaagtttggtacggagaatgtcaaaataattcaggattcagacaaggtaaatgccaaagagcttgatccaaaatatgctcatatacaagttacttatgtgaagccttactttgatgacaaagaactcacagaaaggaagaccgagtttgaaagaaatcataatatcagcagatttgtttttgaggccccttacactttatcaggcaaaaaacagggctgtatagaagaacagtgcaaacgccgtacaatcttgacaacttcaaactcgtttccttacgtgaagaagaggattcctattaactgtgaacagcagattaatttaaaaccaattgatgttgccactgatgaaataaaagataaaactgcagagctgcaaaagctttgctcctctactgacgtggacatgattcagctccaacttaaattgcagggctgtgtttctgtgcaggtcaatgctggtccattagcatatgcaagagctttcttaaatgacagccaagctagcaagtatccacctaagaaagtgagtgagttgaaagacatgtttaggaaatttatacaagcatgcagcattgcacttgaactaaatgagcggctaattaaagaagatcaagttgagtaccatgaagggctaaagtcaaatttcagagacatggtaaaagaattatctgacattatccatgagcagatattacaagaagacacaatgcattctccctggatgagcaacacattacatgtattttgtgcaattagtggtacatcaagtgaccgaggttatggttccccaagatacgctgaagtgtgaggaaatgcagatgtacgtgacaatgagactgacctttctcaggaatatttggagctgtgcaaatgttaaaatttaaagatttgatatacatggagtgtttcttctcgacaccaaaattttcatgtgttccaacagggtgcttacatatttgtaaataagcaacttgaaagtgcctggaaaattgcaccactgtgcttggtttgtacttttttaggtaaatctatatgctgaaaagtagagctcaaaaacagtagttcaatttgcttaattattgcttaaaataatggtactatgtaaaattgtataatggaatacaataaaaggtaaaacttatttgtaattagaagtgaaagaaataatactttgaacttagcatttttcttgacaagaagctcaattcattatcatactaatccttggtaggaggagaagaaaattgataacatttccgtaatacacggatatttaaaattggggagatcatttgaatccttgccaattagtagtcaaggctgggctaaaggaaccaaaagcattatttcacagaaaatttcaaaaggaaaggatatat

SEQ ID NO: 736730 - DNA, 6829 bp, Homo sapiens
  misc_feature (1203)..(1203): n is a, c, g, or t
gcggccgccgcgggccggggcagtgagtccacccgcccgccgaggtccgcccgcccgccgagacccgcccgccgccgctgccatggccgaagtgcgcaaattcaccaaacggctcagcaagcctggcacggcggctgagctccggcagagcgtgtctgaggccgtgcggggctccgtggtgctggaaaaggccaaagttgttgagcccctggactatgagaatgttattgcccaaagaaaaacccagatatctcggtgataggtcgtcaacgcagaacggtgcagtctactgtaccagaagatgctgaaaagagggcccagagtttatttgttaaagagtgtattaaaacctatagcacagattggcacgtggtaaactacaagtatgaggacttctctggggactttcgaatgttgccatgtaaatctttgagaccagaaaagattcctaatcatgtatttgagatagatgaagactgtgagaaagatgaggactcatcttctttatgttctcagaagggtggtgtgataaaacaaggctggttgcataaagcaaatgtaaatagtaccatcacagtaaccatgaaggtattcaagagacgatatttttacttgacccaacttcctgacggttcatatattctcaattcctataaagatgagaaaaattcaaaagaatcgaaaggttgcatctacttggacgcctgcattgatgttgttcagtgccccaaaatgcgccgtcatgcttttgaactcaagatgttagataaatatagccattatctggctgctgaaactgagcaggaaatggaggaatggttgataactttgaaaaagattattcagatcaacaccgacagtttagttcaagaaaaaaaggagacggtagaaacagcacaagatgatgaaactagcagccaaggaaaagccgagaacatcatggcaagtttggaaaggagcatgcatccggaactgatgaagtatggaagagaaactgaacaactaaacaaactcagtagaggagatggaagacagaatctcttttcttttgattcagaagttcagaggttggacttttcaggaattgaacctgatataaagccatttgaagaaaaatgcaataaacgtttcctggtgaattgccatgatttaactttcaatatcttgggccaaattggagacaatgcaaaaggaccacccacnaatgttgagcccttttttatcaatcttgccttatttgatgtaaagaacaattgtaagatttcagcagactttcatgtagacctgaatcccccatctgtccgtgaaatgctgtggggctcttcaacccaactggccagtgacggtagcccaaagggctcttcacccgaatcttacattcatggaattgccgaatctcagttacgctacatacaacagggaattttctcagtgacgaatccacatcctgaaatttttctagttgccagaattgaaaaggtactacagggaaacattacacactgtgcagaaccctatatcaaaaattctgatccagtaaagacggcccagaaggtgcacaggacagctaaacaagtgtgtagccgccttggacaatacagaatgcccttcgcttgggctgccagacccattttcaaagatactcaaggctctcttgatctggatgggagattttctcctctgtataaacaagacagtagcaagctttcaagtgaagacattctcaagttgctctcagaatataagaagccagaaaagaccaaactgcagattattcctgggcagctaaacatcacagtagaatgtgttcctgtggatttatcaactgtttttttccctgctatagattgtattacttcttcatatgtgcccttgaagccttttgaaaagaattgccaaaatattactgtggaggttgaagagtttgttccagaaatgacaaaatattgttatccatttactatttacaaaaaccatctgtatgtatatcccctgcaattaaaatacgatagccagaaaacatttgccaaggcaaggaacattgcagtctgtgtggaattccgggattcagatgaaagtgacgctagtgccctaaagtgtatttatggaaaacctgcagggtctgtttttaccacaaatgcttatgctgttgtctcgcatcacaaccaaaatccagagttctatgatgagattaaaattgagcttcccattcacctacatcaaaaacatcatttgcttttcactttttatcatgtaagttgtgaaattaacacaaagggaacaaccaaaaagcaagacacagttgaaactccagttgggtttgcctgggtacctttgctgaaagatggtagaatcatcacatttgagcagcagctgccagtttccgccaatcttcccccaggctacttgaatctgaatgatcaatgtaacgtggatattaaatgggtagatggtgcaaagcctttgttgaagattaaaagccacttagaatctaccatttacactcaagatctgcatgtgcacaaattcttccatcattgccagctgattcagtcaggctcgaaagaagttccaggggagctcattaaatatttaaagtgtttgcatgccatggagatccaagtcatgatacagtttctacctgtaattcttatgcaactcttccgagttctcacaaatatgacccatgaagatgacgttcctatcaactgcaccatggttctcttacatattgtatcaaagtgccatgaagaaggcttggatagttatctaagatcattcataaagtatagcttccgacctgaaaaaccgagtgctcctcaggcccagctgatacatgaaaccctggctactacgatgatagcaatattgaaacagtctgcagattttttatcaataaacaaattgctaaagtactcatggtttttctttgaaataattgcaaagtcaatggccacatacttgttggaagagaataagattaagcttccccgaggccagagatttcccgagacatatcatcatgtcttacattcactgcttcttgcaataattccccatgtgactattcggtatgcggagattcccgatgagtccagaaatgtgaactatagtttggctagcttcctgaagcgctgtttgacactaatggatagaggatttattttcaatttaataaatgactatatatctggattcagccccaaagatcctaaggttctggctgaatacaagtttgaatttctgcaaacaatttgcaatcacgaacattacattcctctgaacttgccaatggcatttgcaaaacctaaactgcagcgggttcaagattcaaatcttgaatacagtttatcagatgagtattgcaagcatcacttcttggttggtctacttctgagggaaacttccattgctcttcaggacaattatgagatcagatatacagctatctctgttataaagaatcttttgataaaacatgcatttgacacaagataccagcacaagaaccaacaagccaaaatagcacaattgtacctcccctttgttggactacttttggaaaatatacagcgattagcaggtcgagataccttgtattcttgtgcagccatgcctaattctgcatccagagatgagtttccatgtggctttacttcacctgccaatagagggagtctgagcactgacaaagacaccgcttatgggtcttttcaaaatggacatggaattaagagagaagattcaagaggttccctcatcccagaaggagcaacaggatttccagatcagggcaacactggtgaaaatacccgacagagttctacaaggagtagtgtatcccagtataaccgcctggatcagtatgaaatcagaagcctcctgatgtgctacctgtatatagtaaaaatgatttcagaagatactctcttaacttactggaataaagtatcacctcaggagctcataaacattcttatacttttagaagtatgcttgtttcactttagatatatggggaaaagaaacatagcaagggtgcatgatgcctggctgtcaaaacacttcggaatagaccgaaaatcgcaaaccatgcctgctcttcgaaacagatcaggagtaatgcaggcccggcttcagcatcttagtagcctagaaagttcatttacacttaatcacagttctacaacaactgaagcagacattttccaccaggcacttcttgaaggcaatacagctactgaagtttccctaacagtactagacaccatatcatttttcactcagtgcttcaagacccaacttttaaataatgatggccataacccattaatgaaaaaagtgtttgatatacatcttgcttttcttaaaaatggacaatctgaagtgtcgctgaaacatgtatttgcctcactgagagctttcatcagtaagtttccttcagcatttttcaaaggaagagtaaacatgtgtgctgcattttgctatgaggttttaaagtgctgcacatcgaagattagctcaaccaggaatgaagcatctgcacttttgtatcttttgatgagaaacaactttgagtataccaaaaggaaaacctttttgaggacacatctacagataataattgctgtaagccaactgatagctgatgtagcactaagcggaggatcaagatttcaggagtctttattcattatcaataattttgcaaatagtgacagacctatgaaggcaactgcctttcccgcagaagtcaaagacttgaccaagagaatccgcactgttcttatggccactgcccaaatgaaggagcatgagaaagaccctgaaatgctaattgatctccagtatagcttagccaagtcctatgcaagcaccccagagctcaggaaaacctggcttgatagcatggccaagattcatgtaaaaaatggagatttttcagaggctgcgatgtgttatgtccatgtagcagctctagttgcagagtttcttcatcgaaaaaaattatttcctaacggatgttcagcgttcaagaaaattactcccaatatagatgaagaaggagcaatgaaagaagatgctgggatgatggatgtccattatagtgaagaggtcttgctggagttgctagaacaatgtgtggatggcttatggaaggcagaacgttatgaaataatttctgagatttccaagttgatcgttccaatttatgagaaacgtcgtgagtttgagaaacttactcaagtttatagaactcttcatggagcttacacaaaaattctggaagttatgcatacaaaaaagagacttttaggcactttcttcagagttgccttttatggccaatctttttttgaagaagaagatggaaaggagtacatctataaagaaccaaagctcactggcctctcagaaatttccttgagacttgttaaactttatggtgaaaagtttggtacggagaatgtcaaaataattcaggattcagacaaggtaaatgccaaagagcttgatccaaaatatgctcatatacaagttacttatgtgaagccttactttgatgacaaagaactcacagaaaggaagaccgagtttgaaagaaatcataatatcagcagatttgtttttgaggccccttacactttatcaggcaaaaaacagggctgtatagaagaacagtgcaaacgccgtacaatcttgacaacttcaaactcgtttccttacgtgaagaagaggattcctattaactgtgaacagcagattaatttaaaaccaattgatgttgccactgatgaaataaaagataaaactgcagagctgcaaaagctttgctcctctactgacgtggacatgattcagctccaacttaaattgcagggctgtgtttctgtgcaggtcaatgctggtccattagcatatgcaagagctttcttaaatgacagccaagctagcaagtatccacctaagaaagtgagtgagttgaaagacatgtttaggaaatttatacaagcatgcagcattgcacttgaactaaatgagcggctaattaaagaagatcaagttgagtaccatgaagggctaaagtcaaatttcagagacatggtaaaagaattatctgacattatccatgagcagatattacaagaagacacaatgcattctccctggatgagcaacacattacatgtattttgtgcaattagtggtacatcaagtgaccgaggttatggttccccaagatacgctgaagtgtgaggaaatgcagatgtacgtgacaatgagactgacctttctcaggaatatttggagctgtgcaaatgttaaaatttaaagatttgatatacatggagtgtttcttctcgacaccaaaattttcatgtgttccaacagggtgcttacatatttgtaaataagcaacttgaaagtgcctggaaaattgcaccactgtgcttggtttgtacttttttaggtaaatctatatgctgaaaagtagagctcaaaaacagtagttcaatttgcttaattattgcttaaaataatggtactatgtaaaattgtataatggaatacaataaaaggtaaaacttatttgtaattagaagtgaaagaaataatactttgaacttagcatttttcttgacaagaagctcaattcattatcatactaatccttggtaggaggagaagaaaattgataacatttccgtaatacacggatatttaaaattggggagatcatttgaatccttgccaattagtagtcaaggctgggctaaaggaaccaaaagcattatttcacagaaaatttcaaaaggaaaggatatat

SEQ ID NO: 736731 - DNA, 780 bp, Homo sapiens; identical to SEQ ID NO: 36153

SEQ ID NO: 736732 - DNA, 522 bp, Homo sapiens; identical to SEQ ID NO: 36154

SEQ ID NO: 736733 - DNA, 755 bp, Homo sapiens
ctgtcctgattagaattaattttcataaagagaacaagaatcttgactggttcacccttcaattccttgtgcccgcaacagtgaccggcacatggaaagcattcagggaataaaagcacaatggaaaattaaaacatactcactgcatgcctgccacctatagaaccaaattaaatcactgccaatatgcatggggaaaaccttcccatttttctggaataatgttacaaaggatggaaaataagtgcacatcacctggatggcatttaataaacgctgtgacccagtagtgtacatttcagtgaatattgccaaaggaagtaggccaacatcaggtaatctgagttaactttcctgtacattgtgtattcgtttcctgatgatcaaaactggattaattagtctacaatgtatctttcctgttagatacgaagattatctgctctatccaatttgtgttttcttagctgagaaatcactgttgaattttaaaagcagcttgcctggtcctcatttcctggtcttctgatggaaatggtttatggaaaaaaaaatatttactagagtcagataattagaacattttatgtattttgcatatgctaatgcgtttgagttcctttgagggagagccgcatggcataaagcagaatgaaaaggatgattcaaatttcttcacccagcctcctcccctggccagatttagcacttcctatataccaccacctcacagcttagcttggctgggagctcct

SEQ ID NO: 736734 - DNA, 692 bp, Homo sapiens
tggccttgggcaatgtgatcagcgccttaggggaccagagcaagaaggtggtgcacgttccctacagggactccaagctcactcggctcctccaggattcgctggggggcaacagccagaccatcatgatcgcctgtgtgagcccctcagaccgagatttcatggagaccctcaacacactcaaatatgccaatcgggcccgcaacatcaagaacaaggtggtagtgaaccaggacaagaccagccagcaaatcagtgcactgcgggctgagattgctcggctgcagatggagctgatggagtataaggcgggcaagcgagtgataggagaggatggcgctgagggctatagtgatctgttccgagagaatgccatgctacagaaggagaatggggccctgcggctgcgggtgaaagccatgcaggaggccatcgatgccatcaacaaccgcgtcacccagctcatgagccaggaggccaacctgctgctagccaaggccggcgatggcaatgaggccattggtgcgctgatccagaactacatccgggagatcgaggagctacggactaagcttctagagagtgaagccatgaacgagtccctgcgccgcagcctctcacgggcctcggctaggagcccctactccctgggtgcttctccagccgccccggccttcgggggcagccctgcc

SEQ ID NO: 736735 - DNA, 368 bp, Homo sapiens; identical to SEQ ID NO: 117527

SEQ ID NO: 736736 - DNA, 634 bp, Homo sapiens
agcactagaattgctgagcatctgggcgatagccagagcttgggtagaatgctggccgattatcgagccagaggaggaagaattcagcccaaaaattcagacccttttgctcattcaaaggatgcatcaagtacttcaagtggcaaatcaggaagcaaaaacgagggtgatgaagagagagggcttattctgagtgatgctgtgtggtcaacaaaggtggactgtctgaatcccattaatcaccagagactttgtgtgctcttcagcagctcttctgcccagtccagcaatgctcctagtgcctgtgtcagtccttggattgtaacaatggaattttatggaaagaatgatcttacattaggaatatttttagagagatactgtttcaggccttcttatcagtgtccaagcatgttctgtgatacccccatggtacatcatattcggcgctttgttcatggccaaggctgtgtgcagataatcctgaaggagttggattctccagtacctggatatcagcatacaattcttacatattcctggtgtagaatctgcaaacaggtaacaccagttgttgctctttccaatgagtcctggtctatgtcatttgcaaaataccttgaacttaggtttt

SEQ ID NO: 736737 - DNA, 909 bp, Homo sapiens; identical to SEQ ID NO: 117529

SEQ ID NO: 736738 - DNA, 2479 bp, Homo sapiens
gtggctcgctggacaaagctggccgtgcaggcgctcaggcgtgcagggtagccagtgccccggccaggaatggacagcctccaggacacagtggccctggaccatgggggctgctgccctgccctcagcaggctggttcccagaggctttgggactgagatgtggactctctttgccctttctggacccctgttcctgttccaggtgctgacttttatgatctacatcgtgagcactgtgttctgcgggcacctgggcaaggtggagctggcatcggtgaccctcgcggtggcctttgtcaatgtctgcggagtttctgtaggagttggtttgtcttcggcatgtgacaccttgatgtctcagagcttcggcagccccaacaagaagcacgtgggcgtgatcctgcagcggggagcgctggtcctgctcctctgctgcctcccttgctgggcgctcttcctcaacacccagcacatcctgctgctcttccggcaggacccggacgtgtccaggttgacccaggactatgtaatgattttcattccaggacttccggtgatttttctttacaatctgctggcaaaatatttgcaaaatcagaagatcacctggccccaagtcctcagtggtgtggtgggcaactgtgtcaacggtgtggccaactatgccctggtttctgtgctgaacctgggggtcaggggctccgcctatgccaacatcatctcccagtttgcacagaccgtcttcctccttctctacattgtgctgaagaagctgcaccttggagacgtgggcaggttggtccagccagtgcctgcaggactggggccccttcttctccctggctgtccccagcatgctcatgatctgtgttgagtggtgggcctatgagatcgggagcttcctcatggggctgctcagtgtggtggatctctctgcccaggctgtcatctacgaggtggccactgtgacctacatgattcccttggggctcagcatcggggtctgtgtccgagtggggatggctctgggggctgcggatactgtgcaggccaagcgctcggccgtctcgggcgtgctcagcatagttggcatttccctggtcctgggcaccctgataagcatcctgaaaaatcagctggggcatatttttaccaatgatgagtagagatgtcattgccctggtgagccaggtcttgccggtttatagtgtctttcacgtgtttgaggccatctgtgtctatcctggagaatgctgcatgtgagacccaaggaatgtcattgtgttggttaagtaacttgcttagactgattctgtgactcctgtctcctctacaatgtacagctgctgatgtctcttgctcagttttttcccccttgttcttatttttttaagtctagctttctagtttaaaatgttctttctaggattaaaaatgtctgcagagcttagtgttcagccaattactggtcagagactgtgttcaacacctctgatagctagcaaagcttccattctctgctgacagatccatgtgtgggctagagacgtattcagagttccagctgttttcaatgtgtctatggcggagttctgagaggaactgggaagcaggcctttggtgccgctgtgaatgccatcacatattacatcatcggcctaccactgggcatccttctgacctttgtggtcagaatgagaatcatgggcctctggctgggcatgctggcctgtgtcttcctggcaactgctgcctttgttgcttatactgcccggctggactggaagcttgctgcagaggaggctaagaaacattcaggccggcagcagcagcagagagcagagagcactgcaaccagactggctacaggcagttcccctggcattaccttgacaacgtattcaaggtctgagtgccacgtggacttcttcaggactccagaggaggcccacgccctttcagctcctaccagcagactatcagtgaaacagctggtcatccgccgtggggctgctctgggggcggcgtcagccacactgatggtggggctcacggtcaggatcctagccaccaggcactagcaaagaagcttggaaatagaaagccaggagtggctgtccccagtatgcaaacacaccacggtctgccctgcaaaaacaccaatggggtctagtgcaggtggacactttgaaccactcctcaaaaaaagaactttggctgattccttgtggtgacactcagaggggtctgaacagacttgacaattctgttctggtcaagctggagttttcttctgtgacttggactgctctacagaagacatcagccaactgcacgagtcagagtccagggattgtcactattattaataatgtaaatggcttcaaatgggacactgcagataaaatcacaaaaaccactgttatattaaagattacacatttcctgggcacagcctgctgctcaagtctgtcata

SEQ ID NO: 736739 - DNA, 924 bp, Homo sapiens
gtggctcgctggacaaagctggccgtgcaggcgctcaggcgtgcagggtagccagtgccccggccaggaatggacagcctccaggacacagtggccctggaccatgggggctgctgccctgccctcagcaggctggttcccagaggctttgggactgagatgtggactctctttgccctttctggacccctgttcctgttccaggtgctgacttttatgatctacatcgtgagcactgtgttctgcgggcacctgggcaaggtggagctggcatcggtgaccctcgcggtggccgtgagtacccagcttggcccagagcagggacgttctctccccaggcttctccaccgggttcccgggtgggcccgtcttgggtggctggtcagggatgggaagacacagcccacgtggctggacagctgccttcacaggtggaacctgagggccggagatggaggcggtctggccctggggcacacagcacatgaggctgctgagcagagcctctgccaccgctgcctgctgggcagcatttcctgaccctggctcagcccagatgcaggggcctctcttcaggcctcacctgacaagctcttgtttcctcctgtgtgtggcgccagtttgtcaatgtctgcggagtttctgtaggagttggtttgtcttcggcatgtgacaccttgatgtctcaggtgggtggcctcctggagctgggcaggaagccaggcaagggcagagccaattccacaggtgccatggagatggcaggtgggaggggcgcagccaggtgatctgggagcaatgggccctggggtcagctgcccctgccctacctccaaggaccacaggctgtcagggaaacagaccctcccctttgaaagagtctgggccaggagaaaggggtggagatggtggagacagttctct

SEQ ID NO: 736740 - DNA, 2492 bp, Homo sapiens
agaaaatgtaggaatgcattggcttctatcacaaaaatcctgggaatgttcctgagaagggattttggagatgctcggcctaggactggccctcgggaagatgacccgacctttgtcctgtgcagctgagtgctgaacactggtcagctctggataaagcctgatgtcaccgagctgatggcggggcgtctgcactgaacaccttccagcttggtgggggcacgggaaccagctgtcctcattaaaagtgacctggagtgagatggattcttctgcctatacctccacgtgtgggctccctgaacacccccatcgccatgggctcccaagaagtattgcttctggctgcagggctcactgcaatgctgcgacaggaggtgacaggccaaggccagcaggtgactgctctccccagaggccctgtcagctggaagcagctggtttcacataacagagaccccaggcccaggtcccctggatgcaggaggatttgcggctgcccttttggaagagttcctgttccaggtgctgacttttatgatctacatcgtgagcactgtgttctgcgggcacctgggcaaggtggagctggcatcggtgaccctcgcggtggcctttgtcaatgtctgcggagtttctgtaggagttggtttgtcttcggcatgtgacaccttgatgtctcagagcttcggcagccccaacaagaagcacgtgggcgtgatcctgcagcggggagcgctggtcctgctcctctgctgcctcccttgctgggcgctcttcctcaacacccagcacatcctgctgctcttccggcaggacccggacgtgtccaggttgacccaggactatgtaatgattttcattccaggacttccggtgatttttctttacaatctgctggcaaaatatttgcaaaatcagaagatcacctggccccaagtcctcagtggtgtggtgggcaactgtgtcaacggtgtggccaactatgccctggtttctgtgctgaacctgggggtcaggggctccgcctatgccaacatcatctcccagtttgcacagaccgtcttcctccttctctacattgtgctgaagaagctgcaccttggagacgtgggcaggttggtccagccagtgcctgcaggactggggccccttcttctccctggctgtccccagcatgctcatgatctgtgttgagtggtgggcctatgagatcgggagcttcctcatggggctgctcagtgtggtggatctctctgcccaggctgtcatctacgaggtggccactgtgacctacatgattcccttggggctcagcatcggggtctgtgtccgagtggggatggctctgggggctgcggatactgtgcaggccaagcgctcggccgtctcgggcgtgctcagcatagttggcatttccctggtcctgggcaccctgataagcatcctgaaaaatcagctggggcatatttttaccaatgatgagtagagatgtcattgccctggtgagccaggtcttgccggtttatagtgtctttcacgtgtttgaggccatctgttgtgtctatggcggagttctgagaggaactgggaagcaggcctttggtgccgctgtgaatgccatcacatattacatcatcggcctaccactgggcatccttctgacctttgtggtcagaatgagaatcatgggcctctggctgggcatgctggcctgtgtcttcctggcaactgctgcctttgttgcttatactgcccggctggactggaagcttgctgcagaggaggctaagaaacattcaggccggcagcagcagcagagagcagagagcactgcaaccagacctgggcctgagaaagcagtcctatcttcagtggctacaggcagttcccctggcattaccttgacaacgtattcaaggtctgagtgccacgtggacttcttcaggactccagaggaggcccacgccctttcagctcctaccagcagactatcagtgaaacagctggtcatccgccgtggggctgctctgggggcggcgtcagccacactgatggtggggctcacggtcaggatcctagccaccaggcactagcaaagaagcttggaaatagaaagccaggagtggctgtccccagtatgcaaacacaccacggtctgccctgcaaaaacaccaatggggtctagtgcaggtggacactttgaaccactcctcaaaaaaagaactttggctgattccttgtggtgacactcagaggggtctgaacagacttgacaattctgttctggtcaagctggagttttcttctgtgacttggactgctctacagaagacatcagccaactgcacgagtcagagtccagggattgtcactattattaataatgtaaatggcttcaaatgggacactgcagataaaatcacaaaaaccactgttatattaaagattacacatttcctgggcacagcctgctgctcaagtctgtcata

SEQ ID NO: 736741 - DNA, 2171 bp, Homo sapiens
gtggctcgctggacaaagctggccgtgcaggcgctcaggcgtgcagggtagccagtgccccggccaggaatggacagcctccaggacacagtggccctggaccatgggggctgctgccctgccctcagcaggctggttcccagaggctttgggactgagatgtggactctctttgccctttctggacccctgttcctgttccaggtgctgacttttatgatctacatcgtgagcactgtgttctgcgggcacctgggcaaggtggagctggcatcggtgaccctcgcggtggcctttgtcaatgtctgcggagtttctgtaggagttggtttgtcttcggcatgtgacaccttgatgtctcagagcttcggcagccccaacaagaagcacgtgggcgtgatcctgcagcggggagcgctggtcctgctcctctgctgcctcccttgctgggcgctcttcctcaacacccagcacatcctgctgctcttccggcaggacccggacgtgtccaggttgacccaggactatgtaatgattttcattccaggacttccggtgatttttctttacaatctgctggcaaaatatttgcaaaatcagaagatcacctggccccaagtcctcagtggtgtggtgggcaactgtgtcaacggtgtggccaactatgccctggtttctgtgctgaacctgggggtcaggggctccgcctatgccaacatcatctcccagtttgcacagaccgtcttcctccttctctacattgtgctgaagaagctgcaccttggagacgtgggcaggttggtccagccagtgcctgcaggactggggccccttcttctccctggctgtccccagcatgctcatgatctgtgttgagtggtgggcctatgagatcgggagcttcctcatggggctgctcagtgtggtggatctctctgcccaggctgtcatctacgaggtggccactgtgacctacatgattcccttggggctcagcatcggggtctgtgtccgagtggggatggctctgggggctgcggatactgtgcaggccaagcgctcggccgtctcgggcgtgctcagcatagttggcatttccctggtcctgggcaccctgataagcatcctgaaaaatcagctggggcatatttttaccaatgatgagtagagatgtcattgccctggtgagccaggtcttgccggtttatagtgtctttcacgtgtttgaggccatctgttgtgtctatggcggagttctgagaggaactgggaagcaggcctttggtgccgctgtgaatgccatcacatattacatcatcggcctaccactgggcatccttctgacctttgtggtcagaatgagaatcatgggcctctggctgggcatgctggcctgtgtcttcctggcaactgctgcctttgttgcttatactgcccggctggactggaagcttgctgcagaggaggctaagaaacattcaggccggcagcagcagcagagagcagagagcactgcaaccagacctgggcctgagaaagcagtcctatcttcagtggctacaggcagttcccctggcattaccttgacaacgtattcaaggtctgagtgccacgtggacttcttcaggactccagaggaggcccacgccctttcagctcctaccagcagactatcagtgaaacagctggtcatccgccgtggggctgctctgggggcggcgtcagccacactgatggtggggctcacggtcaggatcctagccaccaggcactagcaaagaagcttggaaatagaaagccaggagtggctgtccccagtatgcaaacacaccacggtctgccctgcaaaaacaccaatggggtctagtgcaggtggacactttgaaccactcctcaaaaaaagaactttggctgattccttgtggtgacactcagaggggtctgaacagacttgacaattctgttctggtcaagctggagttttcttctgtgacttggactgctctacagaagacatcagccaactgcacgagtcagagtccagggattgtcactattattaataatgtaaatggcttcaaatgggacactgcagataaaatcacaaaaaccactgttatattaaagattacacatttcctgggcacagcctgctgctcaagtctgtcata

SEQ ID NO: 736742 - DNA, 2279 bp, Homo sapiens
gtggctcgctggacaaagctggccgtgcaggcgctcaggcgtgcagggtagccagtgccccggccaggaatggacagcctccaggacacagtggccctggaccatgggggctgctgccctgccctcagcaggctggttcccagaggctttgggactgagatgtggactctctttgccctttctggacccctgttcctgttccaggtgctgacttttatgatctacatcgtgagcactgtgttctgcgggcacctgggcaaggtggagctggcatcggtgaccctcgcggtggcctttgtcaatgtctgcggagtttctgtaggagttggtttgtcttcggcatgtgacaccttgatgtctcagagcttcggcagccccaacaagaagcacgtgggcgtgatcctgcagcggggagcgctggtcctgctcctctgctgcctcccttgctgggcgctcttcctcaacacccagcacatcctgctgctcttccggcaggacccggacgtgtccaggttgacccaggactatgtaatgattttcattccaggacttccggtgatttttctttacaatctgctggcaaaatatttgcaaaatcagggatggctgaaggggcaggaggaggagtccccattccaaaccccgggtttgtccatcctccatccatctcactcacaccttagcagggccagttttcatttatttcagaagatcacctggccccaagtcctcagtggtgtggtgggcaactgtgtcaacggtgtggccaactatgccctggtttctgtgctgaacctgggggtcaggggctccgcctatgccaacatcatctcccagtttgcacagaccgtcttcctccttctctacattgtgctgaagaagctgcaccttggagacgtgggcaggttggtccagccagtgcctgcaggactggggccccttcttctccctggctgtccccagcatgctcatgatctgtgttgagtggtgggcctatgagatcgggagcttcctcatggggctgctcagtgtggtggatctctctgcccaggctgtcatctacgaggtggccactgtgacctacatgattcccttggggctcagcatcggggtctgtgtccgagtggggatggctctgggggctgcggatactgtgcaggccaagcgctcggccgtctcgggcgtgctcagcatagttggcatttccctggtcctgggcaccctgataagcatcctgaaaaatcagctggggcatatttttaccaatgatgagtagagatgtcattgccctggtgagccaggtcttgccggtttatagtgtctttcacgtgtttgaggccatctgttgtgtctatggcggagttctgagaggaactgggaagcaggcctttggtgccgctgtgaatgccatcacatattacatcatcggcctaccactgggcatccttctgacctttgtggtcagaatgagaatcatgggcctctggctgggcatgctggcctgtgtcttcctggcaactgctgcctttgttgcttatactgcccggctggactggaagcttgctgcagaggaggctaagaaacattcaggccggcagcagcagcagagagcagagagcactgcaaccagacctgggcctgagaaagcagtcctatcttcagtggctacaggcagttcccctggcattaccttgacaacgtattcaaggtctgagtgccacgtggacttcttcaggactccagaggaggcccacgccctttcagctcctaccagcagactatcagtgaaacagctggtcatccgccgtggggctgctctgggggcggcgtcagccacactgatggtggggctcacggtcaggatcctagccaccaggcactagcaaagaagcttggaaatagaaagccaggagtggctgtccccagtatgcaaacacaccacggtctgccctgcaaaaacaccaatggggtctagtgcaggtggacactttgaaccactcctcaaaaaaagaactttggctgattccttgtggtgacactcagaggggtctgaacagacttgacaattctgttctggtcaagctggagttttcttctgtgacttggactgctctacagaagacatcagccaactgcacgagtcagagtccagggattgtcactattattaataatgtaaatggcttcaaatgggacactgcagataaaatcacaaaaaccactgttatattaaagattacacatttcctgggcacagcctgctgctcaagtctgtcata

SEQ ID NO: 736743 - DNA, 2137 bp, Homo sapiens
gctgtacgcccttcggatatcgggatccggcaggaatggacagcctccaggacacagtggccctggaccatgggggctgctgccctgccctcagcaggctggttcccagaggctttgggactgagatgtggactctctttgccctttctggacccctgttcctgttccaggtgctgacttttatgatctacatcgtgagcactgtgttctgcgggcacctgggcaaggtggagctggcatcggtgaccctcgcggtggcctttgtcaatgtctgcggagtttctgtaggagttggtttgtcttcggcatgtgacaccttgatgtctcagagcttcggcagccccaacaagaagcacgtgggcgtgatcctgcagcggggagcgctggtcctgctcctctgctgcctcccttgctgggcgctcttcctcaacacccagcacatcctgctgctcttccggcaggacccggacgtgtccaggttgacccaggactatgtaatgattttcattccaggacttccggtgatttttctttacaatctgctggcaaaatatttgcaaaatcagaagatcacctggccccaagtcctcagtggtgtggtgggcaactgtgtcaacggtgtggccaactatgccctggtttctgtgctgaacctgggggtcaggggctccgcctatgccaacatcatctcccagtttgcacagaccgtcttcctccttctctacattgtgctgaagaagctgcaccttggagacgtgggcaggttggtccagccagtgcctgcaggactggggccccttcttctccctggctgtccccagcatgctcatgatctgtgttgagtggtgggcctatgagatcgggagcttcctcatggggctgctcagtgtggtggatctctctgcccaggctgtcatctacgaggtggccactgtgacctacatgattcccttggggctcagcatcggggtctgtgtccgagtggggatggctctgggggctgcggatactgtgcaggccaagcgctcggccgtctcgggcgtgctcagcatagttggcatttccctggtcctgggcaccctgataagcatcctgaaaaatcagctggggcatatttttaccaatgatgagtagagatgtcattgccctggtgagccaggtcttgccggtttatagtgtctttcacgtgtttgaggccatctgttgtgtctatggcggagttctgagaggaactgggaagcaggcctttggtgccgctgtgaatgccatcacatattacatcatcggcctaccactgggcatccttctgacctttgtggtcagaatgagaatcatgggcctctggctgggcatgctggcctgtgtcttcctggcaactgctgcctttgttgcttatactgcccggctggactggaagcttgctgcagaggaggctaagaaacattcaggccggcagcagcagcagagagcagagagcactgcaaccagacctgggcctgagaaagcagtcctatcttcagtggctacaggcagttcccctggcattaccttgacaacgtattcaaggtctgagtgccacgtggacttcttcaggactccagaggaggcccacgccctttcagctcctaccagcagactatcagtgaaacagctggtcatccgccgtggggctgctctgggggcggcgtcagccacactgatggtggggctcacggtcaggatcctagccaccaggcactagcaaagaagcttggaaatagaaagccaggagtggctgtccccagtatgcaaacacaccacggtctgccctgcaaaaacaccaatggggtctagtgcaggtggacactttgaaccactcctcaaaaaaagaactttggctgattccttgtggtgacactcagaggggtctgaacagacttgacaattctgttctggtcaagctggagttttcttctgtgacttggactgctctacagaagacatcagccaactgcacgagtcagagtccagggattgtcactattattaataatgtaaatggcttcaaatgggacactgcagataaaatcacaaaaaccactgttatattaaagattacacatttcctgggcacagcctgctgctcaagtctgtcata

SEQ ID NO: 736744 - DNA, 1208 bp, Homo sapiens
aactgaagacagaaaaaggaaactagaggagcttcttaattctgttggtcaaaaggtatcagaactcaaagaaaaatttcagagcaggacttcagaagctgccaaacttgaggctgaagtaagcaaggcaccagaaacaatcaaagctgcagaagtcttaattaatcagcttgacagagaacataagagatggaatgcacaggttgtagagataacagaggaattagctactcttcctaaaagagctcaacttgctgctgcatttattacatatctttctgctgctcctgaatctctgagaaaaacctgtttggaagaatggaccaagtcagctggtcttgagaaatttgatctgaggagatttctttgtactgaaagtgagcagttaatttggaaaagtgaaggcctaccatcagatgacctttccatagaaaatgctcttgtaatattacagagtcgagtgtgcccatttcttatagatccttcttcccaagctacagagtggttaaaaacacatttgaaagactcacgtttagaagttatcaatcagcaggatagtaactttatcacagctcttgaattagcagtacgttttgggaaaacccttattatacaagagatggatggtgtagaacctgttctttatccattattgagacgagatctggttgctcaaggaccacgttatgtggtacaaataggtgacaaaattattgactacaatgaagaattccgcctctttttgtcaacaagaaacccaaatccttttattccaccggatgcagcttccattgttactgaggttaactttactacaacaagaagtggattacgagggcagcttttagctttaaccattcagcatgagaaacctgatttagaagaacagaaaacaaaactattacaacaggaagaagataagaaaatacagctagccaagctcgaagaatctcttctagagacacttgccacatctcaaggcaatatcttgggaaaataaggatttgattgagtctttgaatcagacaaaagcaagcagtgcacttattcaagagtcacttaaagaatcttacaaactccaaatttcccttgatcaagaacgggatgcctatctccccctggctgagagtgccagcaagatgtacttcattatttctgatttgtccaaaattaataacatgtaccgttttagtttggctgcttttctc

SEQ ID NO: 736745 - DNA, 1428 bp, Homo sapiens
  misc_feature (1027)..(1027): n is a, c, g, or t
  misc_feature (1059)..(1059): n is a, c, g, or t
  misc_feature (1083)..(1083): n is a, c, g, or t
  misc_feature (1095)..(1096): n is a, c, g, or t
  misc_feature (1393)..(1393): n is a, c, g, or t
aactgaagacagaaaaaggaaactagaggagcttcttaattctgttggtcaaaaggtatcagaactcaaagaaaaatttcagagcaggacttcagaagctgccaaacttgaggctgaagtaagcaaggcaccagaaacaatcaaagctgcagaagtcttaattaatcagcttgacagagaacataagagatggaatgcacaggttgtagagataacagaggaattagctactcttcctaaaagagctcaacttgctgctgcatttattacatatctttctgctgctcctgaatctctgagaaaaacctgtttggaagaatggaccaagtcagctggtcttgagaaatttgatctgaggagatttctttgtactgaaagtgagcagttaatttggaaaagtgaaggcctaccatcagatgacctttccatagaaaatgctcttgtaatattacagagtcgagtgtgcccatttcttatagatccttcttcccaagctacagagtggttaaaaacacatttgaaagactcacgtttagaagttatcaatcagcaggatagtaactttatcacagctcttgaattagcagtacgttttgggaaaacccttattatacaagagatggatggtgtagaacctgttctttatccattattgagacgagatctggttgctcaaggaccacgttatgtggtacaaataggtgacaaaattattgactacaatgaagaattccgcctctttttgtcaacaagaaacccaaatccttttattccaccggatgcagcttccattgttactgaggttaactttactacaacaagaagtggattacgagggcagcttttagctttaaccattcagcatgagaaacctgatttagaagaacagaaaacaaaactattacaacaggaagaagataagaaaatacagctagccaagctcgaagaatctcttctagagacacttgccacatctcaaggcaatatcttgggaaaataaggatttgattgagtctttgattagacntgatcatgaacggatgctatctcccctgctgnagtgcacgacacgtccgtcatatnctgattgtcaannatatacatgacccgttagttggctgctttttgacttttcacgagtctacaacaaccagatctgaaatctgacagggatccagcctattagtatttcacattgatatgaatttatgccgtgccattaagtgatagtatgtccttgcattgttaagatgctctgactcttagaaagatgggatcgttagggcggctgtggaaatgtcgaaggtccttaacacatacgagaagtccgctggatatagaataattggccggcacctaagatggttccaactttaaaccttgttagagcctnttggggcgttttaaatcaagtgggaaagtcctttt

SEQ ID NO: 736746 - DNA, 224 bp, Homo sapiens
tgatcgagctggtaccaggtcaggctcagaaagttgtccgaacagacagcctgaaggggcggcggggccggctaccttcaaaacccaagcagcccccagatgcctcccctgccaatctcctcacttccctggtccgtgcacacctggactcagggcccagcactgccaaactggactactccaagttccaggagctggtgctgggccctgagtccaggtgtgca

SEQ ID NO: 736747 - DNA, 628 bp, Homo sapiens
  misc_feature (515)..(516): n is a, c, g, or t
tgggcgtcagggggttgactggttctcaggagggcactgtcccagggagtttggtgggccgggatctagcactttctgggcccctgcactgccccgggctcatgccagcagtaaagtagggaccataggaattgcagatgggctcagctgcatccagctctaaagcgcaagacagcctttggtcccagactgtcaggatccagactgcaggtgtcatgtatgtggcctagggtattggcttgtttttaaaaccttcctgtcaattatgctgcatatagaaaagtacacaaatggtaaattttcataaaccgcacttacccaaccagcgccttggtcaagaaagagcacataactgccccccagaacccattattgtgcccccttccagtcatttgccctccccaagggtaaccactactttttatttaaatattttaaaaataagatgggaatctcactatgttgcccgagctggtctcgaactcctgggctcaaatgatcctcctgtaatcccnncactttgggaggccgaggtgggtgggtggatcacctgacgtagagagtccaaggcctgacaaacatggagaaatgtcatccctatttaaaaaaataaaaaaattagccaaga

SEQ ID NO: 736748 - DNA, 763 bp, Homo sapiens
  misc_feature (507)..(507): n is a, c, g, or t
  misc_feature (526)..(526): n is a, c, g, or t
  misc_feature (553)..(553): n is a, c, g, or t
  misc_feature (571)..(571): n is a, c, g, or t
  misc_feature (603)..(603): n is a, c, g, or t
  misc_feature (622)..(622): n is a, c, g, or t
  misc_feature (626)..(626): n is a, c, g, or t
  misc_feature (634)..(634): n is a, c, g, or t
  misc_feature (645)..(645): n is a, c, g, or t
  misc_feature (708)..(708): n is a, c, g, or t
ctcgtgccgaattcggcacgagccaccttctcacctgctccaggaggtttgcagggagctcaagcccttggggagggggatgccttcatgggggtgaccccacgatttgtcttatcccccccagcctggccccggcctttatgttttttgtaagataaaccgtttttaacacatagcgccgtgctgtaaataagcccagtgctgctgtaaatacaggaagaaagagcttgaggtgggagcggggctgggaggaagggatgggccccgccttcctgggcagcctttccagcctcctgctggctctctcttcctaccctccttccacatgtacataaactgtcactctaggaagaagacaaatgacagattctgacatttatatttgtgtattttcctggatttatagtatgtgacttttctgattaatatatttaatatattgaataaaaaatagacatgtaaaaaaaaaaaaaaaaaaaaactcgagggggggcccggtacccaatncgccctatagtgagtcgtnttacaattcactggccgtcgttttaancgtcgtgactgggaaaancctggcgttacccaacttaatcgcctggcagnacatccccctttcgccagntggngtaatagngaagaggcccnaccgatcgccctcccaacagtgggcagcctgaatggggattggaaattgtaagcgtaatattnggtaaaatccggtaaatttgggtaatcagtcatttttaaccaataggcgaatcgg

SEQ ID NO: 736749 - DNA, 4608 bp, Homo sapiens
  misc_feature (4352)..(4352): n is a, c, g, or t
  misc_feature (4371)..(4371): n is a, c, g, or t
  misc_feature (4398)..(4398): n is a, c, g, or t
  misc_feature (4416)..(4416): n is a, c, g, or t
  misc_feature (4448)..(4448): n is a, c, g, or t
  misc_feature (4467)..(4467): n is a, c, g, or t
  misc_feature (4471)..(4471): n is a, c, g, or t
  misc_feature (4479)..(4479): n is a, c, g, or t
  misc_feature (4490)..(4490): n is a, c, g, or t
  misc_feature (4553)..(4553): n is a, c, g, or t
ggcgcgggggcggggggcgccgcgcggccggaactgcgggcggggggcttcccgggggcggggggcgctgagcggctgcggcgcggctgcaggagcgcgaggaggaggtggcggcggcggcggaactggcgggggtcccctcgcggcgcccgggacccccggcctccaggcatgggcgcccctgcggtgcagagcagctcagggccggctggtgcgcgaccccggaaagcgggggtggagaggcgagcggagcccgcggggccaggcctccaccatggacagaggccaggccctgcccctcccaggcagcctggctccttctgctgggccctgaaggcagacgggataatgtggttggccaaggcctgttggtccatccagagtgagatgccctgtatccaagcccaatatgggacaccagcaccgagtccgggaccccgtgaccacctggcaagcgaccccctgacccctgagttcatcaagcccaccatggacctggccagccccgaggcagcccccgctgcccccactgccctgcccagcttcagcaccttcatggacggctacacaggagagtttgacaccttcctctaccagctgccaggaacagtccagccatgctcctcagcctcctcctcggcctcctccacatcctcgtcctcagccacctcccctgcctctgcctccttcaagttcgaggacttccaggtgtacggctgctaccccggccccctgagcggcccagtggatgaggccctgtcctccagtggctctgactactatggcagcccctgctcggccccgtcgccctccacgcccagcttccagccgccccagctctctccctgggatggctccttcggccacttctcgcccagccagacttacgaaggcctgcgggcatggacagagcagctgcccaaagcctctgggcccccacagcctccagccttcttttccttcagtcctcccaccggccccagccccagcctggcccagagccccctgaagttgttcccctcacaggccacccaccagctgggggagggagagagctattccatgcctacggccttcccaggtttggcacccacttctccacaccttgagggctcggggatactggatacacccgtgacctcaaccaaggcccggagcggggccccaggtggaagtgaaggccgctgtgctgtgtgtggggacaacgcttcatgccagcattatggtgtccgcacatgtgagggctgcaagggcttcttcaaggtaccgcgcagccccaggtggggccttttgttggaaatggagagaggctggcctcatcccattgggacctgtggtctccccctgggttctcctcctagctaagtcctgtcctgcagggtgggatcagccctgccaggtgggccgccttcctggagacccgtagatgccagggctggaagctttcatttgccgggacactcgggcccatgggattgcacagagctggagggaggggtgagataggggcagataggagctgcaggggtgcctggcgagcctctggttttcctctgctcctctgcctgtcctctcccaactcaaggttctagtgggaaggggtgcccccaggctctcatgttcctggcgtgagatgaaaggatccctgcggagggtttggttcttgagggctgggggtggacttgggaacaggctgtgtgtttgtcccagcgatggtgcctgcttagcttcccgtccccaccccccagccccttggccctctcctgtctgccctagggagaaggcaggtggacaagggcccatgaaaaaatacaggtgtctagactgccagggagaccctggcccccagtagtgtgtcctggggacttcctcagagcgagaaacctcccccaatgtcttcaagacttttctctccccccgcccaaccccgtctctccctcccttgccacccaaatgttagaaaaatagctgtgaacagagagcgcttttgtctgcaatggcagcaggatctggacggtcccctcccctaagttcccccctccccaccccacactctgacagcttgttccgtgttgcccccccacccagcgcacagtgcagaaaaacgccaagtacatctgcctggctaacaaggactgccctgtggacaagaggcggcgaaaccgctgccagttctgccgcttccagaagtgcctggcggtgggcatggtgaaggaaggtgtgtggctggggtgcggcccagcggggcaagggtaggcttgagtggagtgggaccagcagggcccccaggcttctgccctggaggacccagaggagggcacgtcttatttccaccccacctctgaaccccaggccttggagggaggcagcctacacctgcctggattgtgagggtggtggcagggggaggttcctatagggtaccttggatctcagggactctgggtcctagggactcggtggggcgcgtctcagcagtggtgtgcacggcttgggctgagaggcccttcctcagatcccttccttcctcacccctacccattcctttgcagttgtccgaacagacagcctgaaggggcggcggggccggctaccttcaaaacccaagcagcccccagatgcctcccctgccaatctcctcacttccctggtccgtgcacacctggactcagggcccagcactgccaaactggactactccaaggtgaggtcccaccccgtgtctgccttggggaggtctatgagcacatgcagtgcctttgtgcgtgttaggagagctaccccctctggaaggactgaatgagaaaggaggtttaaaaaagaaagaaagaaaagcgactccctccagttcgacagatcaaagagaggatccccctctcggctgaccagatgggaaaatgcaccccctcaggcaggtggccaattagaaaaatatgtccttttggcagctgcagccctgggttaatatgtgagacttggcaagtgagagcctgggcaggatctcagatccactcccactcccgggatctggcatccaagtgtctgacacagccatacgtggcagtgggtgtaggagcctgcctggggtgctgaccccactggaccgtcttcctagttccaggagctggtgctgccccactttgggaaggaagatgctggggatgtacagcagttctacgacctgctctccggttctctggaggtcatccgcaagtgggcggagaagatccctggctttgctgagctgtcaccggctgaccaggacctgttgctggagtcggccttcctggagctcttcatcctccgcctggcgtacaggtctaagccaggcgagggcaagctcatcttctgctcaggcctggtgctacaccggctgcagtgtgcccgtggcttcggggactggattgacagtatcctggccttctcaaggtccctgcacagcttgcttgtcgatgtccctgccttcgcctgcctctctgcccttgtcctcatcaccgaccggcatgggctgcaggagccgcggcgggtggaggagctgcagaaccgcatcgccagctgcctgaaggagcacgtggcagctgtggcgggcgagccccagccagccagctgcctgtcacgtctgttgggcaaactgcccgagctgcggaccctgtgcacccagggcctgcagcgcatcttctacctcaagctggaggacttggtgccccctccacccatcattgacaagatcttcatggacacgctgcccttctgacccctgcctgggaacacgtgtgcacatgcgcactctcatatgccaccccatgtgcctttagtccacggacccccagagcacccccaagcctgggcttgagctgcagaatgactccaccttctcacctgctccaggaggtttgcagggagctcaagcccttggggagggggatgccttcatgggggtgaccccacgatttgtcttatcccccccagcctggccccggcctttatgttttttgtaagataaaccgtttttaacacatagcgccgtgctgtaaataagcccagtgctgctgtaaatacaggaagaaagagcttgaggtgggagcggggctgggaggaagggatgggccccgccttcctgggcagcctttccagcctcctgctggctctctcttcctaccctccttccacatgtacataaactgtcactctaggaagaagacaaatgacagattctgacatttatatttgtgtattttcctggatttatagtatgtgacttttctgattaatatatttaatatattgaataaaaaatagacatgtaaaaaaaaaaaaaaaaaaaaactcgagggggggcccggtacccaatncgccctatagtgagtcgtnttacaattcactggccgtcgttttaancgtcgtgactgggaaaancctggcgttacccaacttaatcgcctggcagnacatccccctttcgccagntggngtaatagngaagaggcccnaccgatcgccctcccaacagtgggcagcctgaatggggattggaaattgtaagcgtaatattnggtaaaatccggtaaatttgggtaatcagtcatttttaaccaataggcgaatcgg

SEQ ID NO: 736750 - DNA, 4151 bp, Homo sapiens
ggcgcgggggcggggggcgccgcgcggccggaactgcgggcggggggcttcccgggggcggggggcgctgagcggctgcggcgcggctgcaggagcgcgaggaggaggtggcggcggcggcggaactggcgggggtcccctcgcggcgcccgggacccccggcctccaggcatgggcgcccctgcggtgcagagcagctcagggccggctggtgcgcgaccccggaaagcgggggtggagaggcgagcggagcccgcggggccaggcctccaccatggacagaggccaggccctgcccctcccaggcagcctggctccttctgctgggccctgaaggcagacgggataatgtggttggccaaggcctgttggtccatccagagtgagatgccctgtatccaagcccaatatgggacaccagcaccgagtccgggaccccgtgaccacctggcaagcgaccccctgacccctgagttcatcaagcccaccatggacctggccagccccgaggcagcccccgctgcccccactgccctgcccagcttcagcaccttcatggacggctacacaggagagtttgacaccttcctctaccagctgccaggaacagtccagccatgctcctcagcctcctcctcggcctcctccacatcctcgtcctcagccacctcccctgcctctgcctccttcaagttcgaggacttccaggtgtacggctgctaccccggccccctgagcggcccagtggatgaggccctgtcctccagtggctctgactactatggcagcccctgctcggccccgtcgccctccacgcccagcttccagccgccccagctctctccctgggatggctccttcggccacttctcgcccagccagacttacgaaggcctgcgggcatggacagagcagctgcccaaagcctctgggcccccacagcctccagccttcttttccttcagtcctcccaccggccccagccccagcctggcccagagccccctgaagttgttcccctcacaggccacccaccagctgggggagggagagagctattccatgcctacggccttcccaggtttggcacccacttctccacaccttgagggctcggggatactggatacacccgtgacctcaaccaaggcccggagcggggccccaggtggaagtgaaggccgctgtgctgtgtgtggggacaacgcttcatgccagcattatggtgtccgcacatgtgagggctgcaagggcttcttcaaggtaccgcgcagccccaggtggggccttttgttggaaatggagagaggctggcctcatcccattgggacctgtggtctccccctgggttctcctcctagctaagtcctgtcctgcagggtgggatcagccctgccaggtgggccgccttcctggagacccgtagatgccagggctggaagctttcatttgccgggacactcgggcccatgggattgcacagagctggagggaggggtgagataggggcagataggagctgcaggggtgcctggcgagcctctggttttcctctgctcctctgcctgtcctctcccaactcaaggttctagtgggaaggggtgcccccaggctctcatgttcctggcgtgagatgaaaggatccctgcggagggtttggttcttgagggctgggggtggacttgggaacaggctgtgtgtttgtcccagcgatggtgcctgcttagcttcccgtccccaccccccagccccttggccctctcctgtctgccctagggagaaggcaggtggacaagggcccatgaaaaaatacaggtgtctagactgccagggagaccctggcccccagtagtgtgtcctggggacttcctcagagcgagaaacctcccccaatgtcttcaagacttttctctccccccgcccaaccccgtctctccctcccttgccacccaaatgttagaaaaatagctgtgaacagagagcgcttttgtctgcaatggcagcaggatctggacggtcccctcccctaagttcccccctccccaccccacactctgacagcttgttccgtgttgcccccccacccagcgcacagtgcagaaaaacgccaagtacatctgcctggctaacaaggactgccctgtggacaagaggcggcgaaaccgctgccagttctgccgcttccagaagtgcctggcggtgggcatggtgaaggaaggtgtgtggctggggtgcggcccagcggggcaagggtaggcttgagtggagtgggaccagcagggcccccaggcttctgccctggaggacccagaggagggcacgtcttatttccaccccacctctgaaccccaggccttggagggaggcagcctacacctgcctggattgtgagggtggtggcagggggaggttcctatagggtaccttggatctcagggactctgggtcctagggactcggtggggcgcgtctcagcagtggtgtgcacggcttgggctgagaggcccttcctcagatcccttccttcctcacccctacccattcctttgcagttgtccgaacagacagcctgaaggggcggcggggccggctaccttcaaaacccaagcagcccccagatgcctcccctgccaatctcctcacttccctggtccgtgcacacctggactcagggcccagcactgccaaactggactactccaaggtgaggtcccaccccgtgtctgccttggggaggtctatgagcacatgcagtgcctttgtgcgtgttaggagagctaccccctctggaaggactgaatgagaaaggaggtttaaaaaagaaagaaagaaaagcgactccctccagttcgacagatcaaagagaggatccccctctcggctgaccagatgggaaaatgcaccccctcaggcaggtggccaattagaaaaatatgtccttttggcagctgcagccctgggttaatatgtgagacttggcaagtgagagcctgggcaggatctcagatccactcccactcccgggatctggcatccaagtgtctgacacagccatacgtggcagtgggtgtaggagcctgcctggggtgctgaccccactggaccgtcttcctagttccaggagctggtgctgccccactttgggaaggaagatgctggggatgtacagcagttctacgacctgctctccggttctctggaggtcatccgcaagtgggcggagaagatccctggctttgctgagctgtcaccggctgaccaggacctgttgctggagtcggccttcctggagctcttcatcctccgcctggcgtacaggtctaagccaggcgagggcaagctcatcttctgctcaggcctggtgctacaccggctgcagtgtgcccgtggcttcggggactggattgacagtatcctggccttctcaaggtccctgcacagcttgcttgtcgatgtccctgccttcgcctgcctctctgcccttgtcctcatcaccgaccggcatgggctgcaggagccgcggcgggtggaggagctgcagaaccgcatcgccagctgcctgaaggagcacgtggcagctgtggcgggcgagccccagccagccagctgcctgtcacgtctgttgggcaaactgcccgagctgcggaccctgtgcacccagggcctgcagcgcatcttctacctcaagctggaggacttggtgccccctccacccatcattgacaagatcttcatggacacgctgcccttctgacccctgcctgggaacacgtgtgcacatgcgcactctcatatgccaccccatgtgcctttagtccacggacccccagagcacccccaagcctgggcttgagctgcagaatgactccaccttctcacctgctccaggaggtttgcagggagctcaagcccttggggagggggatgccttcatgggggtgaccccacgatttgtcttatcccccccagcctggccccggcctttatgttttttgtaagataaaccgtttttaacacatagcgccgtgctgtaaataagcccagtgctgctgtaaatacaggaagaaagagcttgaggtgggatatgagagtgcgcatgtgcacacgtgttcccaggcaggggtcagaagggcagcgtgtccatgaagatc

SEQ ID NO: 736751 - DNA, 4541 bp, Homo sapiens
  misc_feature (4285)..(4285): n is a, c, g, or t
  misc_feature (4304)..(4304): n is a, c, g, or t
  misc_feature (4331)..(4331): n is a, c, g, or t
  misc_feature (4349)..(4349): n is a, c, g, or t
  misc_feature (4381)..(4381): n is a, c, g, or t
  misc_feature (4400)..(4400): n is a, c, g, or t
  misc_feature (4404)..(4404): n is a, c, g, or t
  misc_feature (4412)..(4412): n is a, c, g, or t
  misc_feature (4423)..(4423): n is a, c, g, or t
  misc_feature (4486)..(4486): n is a, c, g, or t
ggcgcgggggcggggggcgccgcgcggccggaactgcgggcggggggcttcccgggggcggggggcgctgagcggctgcggcgcggctgcaggagcgcgaggaggaggtggcggcggcggcggaactggcgggggtcccctcgcggcgcccgggacccccggcctccaggcatgggcgcccctgcggtgcagagcagctcagggccggctggtgcgcgaccccggaaagcgggggtggagaggcgagcggagcccgcggggccaggcctccaccatggacagaggccaggccctgcccctcccaggcagcctggctccttctgctgggccctgaaggcagacgggataatgtggttggccaaggcctgttggtccatccagagtgagatgccctgtatccaagcccaatatgggacaccagcaccgagtccgggaccccgtgaccacctggcaagcgaccccctgacccctgagttcatcaagcccaccatggacctggccagccccgaggcagcccccgctgcccccactgccctgcccagcttcagcaccttcatggacggctacacaggagagtttgacaccttcctctaccagctgccaggaacagtccagccatgctcctcagcctcctcctcggcctcctccacatcctcgtcctcagccacctcccctgcctctgcctccttcaagttcgaggacttccaggtgtacggctgctaccccggccccctgagcggcccagtggatgaggccctgtcctccagtggctctgactactatggcagcccctgctcggccccgtcgccctccacgcccagcttccagccgccccagctctctccctgggatggctccttcggccacttctcgcccagccagacttacgaaggcctgcgggcatggacagagcagctgcccaaagcctctgggcccccacagcctccagccttcttttccttcagtcctcccaccggccccagccccagcctggcccagagccccctgaagttgttcccctcacaggccacccaccagctgggggagggagagagctattccatgcctacggccttcccaggtttggcacccacttctccacaccttgagggctcggggatactggatacacccgtgacctcaaccaaggcccggagcggggccccaggtggaagtgaaggccgctgtgctgtgtgtggggacaacgcttcatgccagcattatggtgtccgcacatgtgagggctgcaagggcttcttcaaggtaccgcgcagccccaggtggggccttttgttggaaatggagagaggctggcctcatcccattgggacctgtggtctccccctgggttctcctcctagctaagtcctgtcctgcagggtgggatcagccctgccaggtgggccgccttcctggagacccgtagatgccagggctggaagctttcatttgccgggacactcgggcccatgggattgcacagagctggagggaggggtgagataggggcagataggagctgcaggggtgcctggcgagcctctggttttcctctgctcctctgcctgtcctctcccaactcaaggttctagtgggaaggggtgcccccaggctctcatgttcctggcgtgagatgaaaggatccctgcggagggtttggttcttgagggctgggggtggacttgggaacaggctgtgtgtttgtcccagcgatggtgcctgcttagcttcccgtccccaccccccagccccttggccctctcctgtctgccctagggagaaggcaggtggacaagggcccatgaaaaaatacaggtgtctagactgccagggagaccctggcccccagtagtgtgtcctggggacttcctcagagcgagaaacctcccccaatgtcttcaagacttttctctccccccgcccaaccccgtctctccctcccttgccacccaaatgttagaaaaatagctgtgaacagagagcgcttttgtctgcaatggcagcaggatctggacggtcccctcccctaagttcccccctccccaccccacactctgacagcttgttccgtgttgcccccccacccagcgcacagtgcagaaaaacgccaagtacatctgcctggctaacaaggactgccctgtggacaagaggcggcgaaaccgctgccagttctgccgcttccagaagtgcctggcggtgggcatggtgaaggaaggtgtgtggctggggtgcggcccagcggggcaagggtaggcttgagtggagtgggaccagcagggcccccaggcttctgccctggaggacccagaggagggcacgtcttatttccaccccacctctgaaccccaggccttggagggaggcagcctacacctgcctggattgtgagggtggtggcagggggaggttcctatagggtaccttggatctcagggactctgggtcctagggactcggtggggcgcgtctcagcagtggtgtgcacggcttgggctgagaggcccttcctcagatcccttccttcctcacccctacccattcctttgcagttgtccgaacagacagcctgaaggggcggcggggccggctaccttcaaaacccaagcagcccccagatgcctcccctgccaatctcctcacttccctggtccgtgcacacctggactcagggcccagcactgccaaactggactactccaaggtgaggtcccaccccgtgtctgccttggggaggtctatgagcacatgcagtgcctttgtgcgtgttaggagagctaccccctctggaaggactgaatgagaaaggaggtttaaaaaagaaagaaagaaaagcgactccctccagttcgacagatcaaagagaggatccccctctcggctgaccagatgggaaaatgcaccccctcaggcaggtggccaattagaaaaatatgtccttttggcagctgcagccctgggttaatatgtgagacttggcaagtgagagcctgggcaggatctcagatccactcccactcccgggatctggcatccaagtgtctgacacagccatacgtggcagtgggtgtaggagcctgcctggggtgctgaccccactggaccgtcttcctagttccaggagctggtgctgccccactttgggaaggaagatgctggggatgtacagcagttctacgacctgctctccggttctctggaggtcatccgcaagtgggcggagaagatccctggctttgctgagctgtcaccggctgaccaggacctgttgctggagtcggccttcctggagctcttcatcctccgcctggcgtacaggtctaagccaggcgagggcaagctcatcttctgctcaggcctggtgctacaccggctgcagtgtgcccgtggcttcggggactggattgacagtatcctggccttctcaaggtccctgcacagcttgcttgtcgatgtccctgccttcgcctgcctctctgcccttgtcctcatcaccgaccggcatgggctgcaggagccgcggcgggtggaggagctgcagaaccgcatcgccagctgcctgaaggagcacgtggcagctgtggcgggcgagccccagccagccagctgcctgtcacgtctgttgggcaaactgcccgagctgcggaccctgtgcacccagggcctgcagcgcatcttctacctcaagctggaggacttggtgccccctccacccatcattgacaagatcttcatggacacgctgcccttctgacccctgcctgggaacacgtgtgcacatgcgcactctcatatgccaccccatgtgcctttagtccacggacccccagagcacccccaagcccttggggagggggatgccttcatgggggtgaccccacgatttgtcttatcccccccagcctggccccggcctttatgttttttgtaagataaaccgtttttaacacatagcgccgtgctgtaaataagcccagtgctgctgtaaatacaggaagaaagagcttgaggtgggagcggggctgggaggaagggatgggccccgccttcctgggcagcctttccagcctcctgctggctctctcttcctaccctccttccacatgtacataaactgtcactctaggaagaagacaaatgacagattctgacatttatatttgtgtattttcctggatttatagtatgtgacttttctgattaatatatttaatatattgaataaaaaatagacatgtaaaaaaaaaaaaaaaaaaaaactcgagggggggcccggtacccaatncgccctatagtgagtcgtnttacaattcactggccgtcgttttaancgtcgtgactgggaaaancctggcgttacccaacttaatcgcctggcagnacatccccctttcgccagntggngtaatagngaagaggcccnaccgatcgccctcccaacagtgggcagcctgaatggggattggaaattgtaagcgtaatattnggtaaaatccggtaaatttgggtaatcagtcatttttaaccaataggcgaatcgg

SEQ ID NO: 736752 - DNA, 3284 bp, Homo sapiens
ggcgcgggggcggggggcgccgcgcggccggaactgcgggcggggggcttcccgggggcggggggcgctgagcggctgcggcgcggctgcaggagcgcgaggaggaggtggcggcggcggcggaactggcgggggtcccctcgcggcgcccgggacccccggcctccaggcatgggcgcccctgcggtgcagagcagctcagggccggctggtgcgcgaccccggaaagcgggggtggagaggcgagcggagcccgcggggccaggcctccaccatggacagaggccaggccctgcccctcccaggcagcctggctccttctgctgggccctgaaggcagacgggataatgtggttggccaaggcctgttggtccatccagagtgagatgccctgtatccaagcccaatatgggacaccagcaccgagtccgggaccccgtgaccacctggcaagcgaccccctgacccctgagttcatcaagcccaccatggacctggccagccccgaggcagcccccgctgcccccactgccctgcccagcttcagcaccttcatggacggctacacaggagagtttgacaccttcctctaccagctgccaggaacagtccagccatgctcctcagcctcctcctcggcctcctccacatcctcgtcctcagccacctcccctgcctctgcctccttcaagttcgaggacttccaggtgtacggctgctaccccggccccctgagcggcccagtggatgaggccctgtcctccagtggctctgactactatggcagcccctgctcggccccgtcgccctccacgcccagcttccagccgccccagctctctccctgggatggctccttcggccacttctcgcccagccagacttacgaaggcctgcgggcatggacagagcagctgcccaaagcctctgggcccccacagcctccagccttcttttccttcagtcctcccaccggccccagccccagcctggcccagagccccctgaagttgttcccctcacaggccacccaccagctgggggagggagagagctattccatgcctacggccttcccaggtttggcacccacttctccacaccttgagggctcggggatactggatacacccgtgacctcaaccaaggcccggagcggggccccaggtggaagtgaaggccgctgtgctgtgtgtggggacaacgcttcatgccagcattatggtgtccgcacatgtgagggctgcaagggcttcttcaaggtaccgcgcagccccaggtggggccttttgttggaaatggagagaggctggcctcatcccattgggacctgtggtctccccctgggttctcctcctagctaagtcctgtcctgcagggtgggatcagccctgccaggtgggccgccttcctggagacccgtagatgccagggctggaagctttcatttgccgggacactcgggcccatgggattgcacagagctggagggaggggtgagataggggcagataggagctgcaggggtgcctggcgagcctctggttttcctctgctcctctgcctgtcctctcccaactcaaggttctagtgggaaggggtgcccccaggctctcatgttcctggcgtgagatgaaaggatccctgcggagggtttggttcttgagggctgggggtggacttgggaacaggctgtgtgtttgtcccagcgatggtgcctgcttagcttcccgtccccaccccccagccccttggccctctcctgtctgccctagggagaaggcaggtggacaagggcccatgaaaaaatacaggtgtctagactgccagggagaccctggcccccagtagtgtgtcctggggacttcctcagagcgagaaacctcccccaatgtcttcaagacttttctctccccccgcccaaccccgtctctccctcccttgccacccaaatgttagaaaaatagctgtgaacagagagcgcttttgtctgcaatggcagcaggatctggacggtcccctcccctaagttcccccctccccaccccacactctgacagcttgttccgtgttgcccccccacccagcgcacagtgcagaaaaacgccaagtacatctgcctggctaacaaggactgccctgtggacaagaggcggcgaaaccgctgccagttctgccgcttccagaagtgcctggcggtgggcatggtgaaggaaggtgtgtggctggggtgcggcccagcggggcaagggtaggcttgagtggagtgggaccagcagggcccccaggcttctgccctggaggacccagaggagggcacgtcttatttccaccccacctctgaaccccaggccttggagggaggcagcctacacctgcctggattgtgagggtggtggcagggggaggttcctatagggtaccttggatctcagggactctgggtcctagggactcggtggggcgcgtctcagcagtggtgtgcacggcttgggctgagaggcccttcctcagatcccttccttcctcacccctacccattcctttgcagttgtccgaacagacagcctgaaggggcggcggggccggctaccttcaaaacccaagcagcccccagatgcctcccctgccaatctcctcacttccctggtccgtgcacacctggactcagggcccagcactgccaaactggactactccaaggtgaggtcccaccccgtgtctgccttggggaggtctatgagcacatgcagtgcctttgtgcgtgttaggagagctaccccctctggaaggactgaatgagaaaggaggtttaaaaaagaaagaaagaaaagcgactccctccagttcgacagatcaaagagaggatccccctctcggctgaccagatgggaaaatgcaccccctcaggcaggtggccaattagaaaaatatgtccttttggcagctgcagccctgggttaatatgtgagacttggcaagtgagagcctgggcaggatctcagatccactcccactcccgggatctggcatccaagtgtctgacacagccatacgtggcagtgggtgtaggagcctgcctggggtgctgaccccactggaccgtcttcctagttccaggagctggtgctgccccactttgggaaggaagatgctggggatgtaaagatgggtcagatggacttgcagggtgaaatgggatggtacttgcagggtgagatgggatggtactcacttgagggtttgagatgtgggggatgtactgctgggtgagataggatgt

SEQ ID NO: 736753 - DNA, 4065 bp, Homo sapiens
  misc_feature (3809)..(3809): n is a, c, g, or t
  misc_feature (3828)..(3828): n is a, c, g, or t
  misc_feature (3855)..(3855): n is a, c, g, or t
  misc_feature (3873)..(3873): n is a, c, g, or t
  misc_feature (3905)..(3905): n is a, c, g, or t
  misc_feature (3924)..(3924): n is a, c, g, or t
  misc_feature (3928)..(3928): n is a, c, g, or t
  misc_feature (3936)..(3936): n is a, c, g, or t
  misc_feature (3947)..(3947): n is a, c, g, or t
  misc_feature (4010)..(4010): n is a, c, g, or t
ggcgcgggggcggggggcgccgcgcggccggaactgcgggcggggggcttcccgggggcggggggcgctgagcggctgcggcgcggctgcaggagcgcgaggaggaggtggcggcggcggcggaactggcgggggtcccctcgcggcgcccgggacccccggcctccaggcatgggcgcccctgcggtgcagagcagctcagggccggctggtgcgcgaccccggaaagcgggggtggagaggcgagcggagcccgcggggccaggcctccaccatggacagaggccaggccctgcccctcccaggcagcctggctccttctgctgggccctgaaggcagacgggataatgtggttggccaaggcctgttggtccatccagagtgagatgccctgtatccaagcccaatatgggacaccagcaccgagtccgggaccccgtgaccacctggcaagcgaccccctgacccctgagttcatcaagcccaccatggacctggccagccccgaggcagcccccgctgcccccactgccctgcccagcttcagcaccttcatggacggctacacaggagagtttgacaccttcctctaccagctgccaggaacagtccagccatgctcctcagcctcctcctcggcctcctccacatcctcgtcctcagccacctcccctgcctctgcctccttcaagttcgaggacttccaggtgtacggctgctaccccggccccctgagcggcccagtggatgaggccctgtcctccagtggctctgactactatggcagcccctgctcggccccgtcgccctccacgcccagcttccagccgccccagctctctccctgggatggctccttcggccacttctcgcccagccagacttacgaaggcctgcgggcatggacagagcagctgcccaaagcctctgggcccccacagcctccagccttcttttccttcagtcctcccaccggccccagccccagcctggcccagagccccctgaagttgttcccctcacaggccacccaccagctgggggagggagagagctattccatgcctacggccttcccaggtttggcacccacttctccacaccttgagggctcggggatactggatacacccgtgacctcaaccaaggcccggagcggggccccaggtggaagtgaaggccgctgtgctgtgtgtggggacaacgcttcatgccagcattatggtgtccgcacatgtgagggctgcaagggcttcttcaaggtaccgcgcagccccaggtggggccttttgttggaaatggagagaggctggcctcatcccattgggacctgtggtctccccctgggttctcctcctagctaagtcctgtcctgcagggtgggatcagccctgccaggtgggccgccttcctggagacccgtagatgccagggctggaagctttcatttgccgggacactcgggcccatgggattgcacagagctggagggaggggtgagataggggcagataggagctgcaggggtgcctggcgagcctctggttttcctctgctcctctgcctgtcctctcccaactcaaggttctagtgggaaggggtgcccccaggctctcatgttcctggcgtgagatgaaaggatccctgcggagggtttggttcttgagggctgggggtggacttgggaacaggctgtgtgtttgtcccagcgatggtgcctgcttagcttcccgtccccaccccccagccccttggccctctcctgtctgccctagggagaaggcaggtggacaagggcccatgaaaaaatacaggtgtctagactgccagggagaccctggcccccagtagtgtgtcctggggacttcctcagagcgagaaacctcccccaatgtcttcaagacttttctctccccccgcccaaccccgtctctccctcccttgccacccaaatgttagaaaaatagctgtgaacagagagcgcttttgtctgcaatggcagcaggatctggacggtcccctcccctaagttcccccctccccaccccacactctgacagcttgttccgtgttgcccccccacccagcgcacagtgcagaaaaacgccaagtacatctgcctggctaacaaggactgccctgtggacaagaggcggcgaaaccgctgccagttctgccgcttccagaagtgcctggcggtgggcatggtgaaggaagttgtccgaacagacagcctgaaggggcggcggggccggctaccttcaaaacccaagcagcccccagatgcctcccctgccaatctcctcacttccctggtccgtgcacacctggactcagggcccagcactgccaaactggactactccaaggtgaggtcccaccccgtgtctgccttggggaggtctatgagcacatgcagtgcctttgtgcgtgttaggagagctaccccctctggaaggactgaatgagaaaggaggtttaaaaaagaaagaaagaaaagcgactccctccagttcgacagatcaaagagaggatccccctctcggtgaccccactggaccgtcttcctagttccaggagctggtgctgccccactttgggaaggaagatgctggggatgtacagcagttctacgacctgctctccggttctctggaggtcatccgcaagtgggcggagaagatccctggctttgctgagctgtcaccggctgaccaggacctgttgctggagtcggccttcctggagctcttcatcctccgcctggcgtacaggtctaagccaggcgagggcaagctcatcttctgctcaggcctggtgctacaccggctgcagtgtgcccgtggcttcggggactggattgacagtatcctggccttctcaaggtccctgcacagcttgcttgtcgatgtccctgccttcgcctgcctctctgcccttgtcctcatcaccgaccggcatgggctgcaggagccgcggcgggtggaggagctgcagaaccgcatcgccagctgcctgaaggagcacgtggcagctgtggcgggcgagccccagccagccagctgcctgtcacgtctgttgggcaaactgcccgagctgcggaccctgtgcacccagggcctgcagcgcatcttctacctcaagctggaggacttggtgccccctccacccatcattgacaagatcttcatggacacgctgcccttctgacccctgcctgggaacacgtgtgcacatgcgcactctcatatgccaccccatgtgcctttagtccacggacccccagagcacccccaagcctgggcttgagctgcagaatgactccaccttctcacctgctccaggaggtttgcagggagctcaagcccttggggagggggatgccttcatgggggtgaccccacgatttgtcttatcccccccagcctggccccggcctttatgttttttgtaagataaaccgtttttaacacatagcgccgtgctgtaaataagcccagtgctgctgtaaatacaggaagaaagagcttgaggtgggagcggggctgggaggaagggatgggccccgccttcctgggcagcctttccagcctcctgctggctctctcttcctaccctccttccacatgtacataaactgtcactctaggaagaagacaaatgacagattctgacatttatatttgtgtattttcctggatttatagtatgtgacttttctgattaatatatttaatatattgaataaaaaatagacatgtaaaaaaaaaaaaaaaaaaaaactcgagggggggcccggtacccaatncgccctatagtgagtcgtnttacaattcactggccgtcgttttaancgtcgtgactgggaaaancctggcgttacccaacttaatcgcctggcagnacatccccctttcgccagntggngtaatagngaagaggcccnaccgatcgccctcccaacagtgggcagcctgaatggggattggaaattgtaagcgtaatattnggtaaaatccggtaaatttgggtaatcagtcatttttaaccaataggcgaatcgg

SEQ ID NO: 736754 - DNA, 3863 bp, Homo sapiens
  misc_feature (3607)..(3607): n is a, c, g, or t
  misc_feature (3626)..(3626): n is a, c, g, or t
  misc_feature (3653)..(3653): n is a, c, g, or t
  misc_feature (3671)..(3671): n is a, c, g, or t
  misc_feature (3703)..(3703): n is a, c, g, or t
  misc_feature (3722)..(3722): n is a, c, g, or t
  misc_feature (3726)..(3726): n is a, c, g, or t
  misc_feature (3734)..(3734): n is a, c, g, or t
  misc_feature (3745)..(3745): n is a, c, g, or t
  misc_feature (3808)..(3808): n is a, c, g, or t
ggcgcgggggcggggggcgccgcgcggccggaactgcgggcggggggcttcccgggggcggggggcgctgagcggctgcggcgcggctgcaggagcgcgaggaggaggtggcggcggcggcggaactggcgggggtcccctcgcggcgcccgggacccccggcctccaggcatgggcgcccctgcggtgcagagcagctcagggccggctggtgcgcgaccccggaaagcgggggtggagaggcgagcggagcccgcggggccaggcctccaccatggacagaggccaggccctgcccctcccaggcagcctggctccttctgctgggccctgaaggcagacgggataatgtggttggccaaggcctgttggtccatccagagtgagatgccctgtatccaagcccaatatgggacaccagcaccgagtccgggaccccgtgaccacctggcaagcgaccccctgacccctgagttcatcaagcccaccatggacctggccagccccgaggcagcccccgctgcccccactgccctgcccagcttcagcaccttcatggacggctacacaggagagtttgacaccttcctctaccagctgccaggaacagtccagccatgctcctcagcctcctcctcggcctcctccacatcctcgtcctcagccacctcccctgcctctgcctccttcaagttcgaggacttccaggtgtacggctgctaccccggccccctgagcggcccagtggatgaggccctgtcctccagtggctctgactactatggcagcccctgctcggccccgtcgccctccacgcccagcttccagccgccccagctctctccctgggatggctccttcggccacttctcgcccagccagacttacgaaggcctgcgggcatggacagagcagctgcccaaagcctctgggcccccacagcctccagccttcttttccttcagtcctcccaccggccccagccccagcctggcccagagccccctgaagttgttcccctcacaggccacccaccagctgggggagggagagagctattccatgcctacggccttcccaggtttggcacccacttctccacaccttgagggctcggggatactggatacacccgtgacctcaaccaaggcccggagcggggccccaggtggaagtgaaggccgctgtgctgtgtgtggggacaacgcttcatgccagcattatggtgtccgcacatgtgagggctgcaagggcttcttcaaggtaccgcgcagccccaggtggggccttttgttggaaatggagagaggctggcctcatcccattgggacctgtggtctccccctgggttctcctcctagctaagtcctgtcctgcagggtgggatcagccctgccaggtgggccgccttcctggagacccgtagatgccagggctggaagctttcatttgccgggacactcgggcccatgggattgcacagagctggagggaggggtgagataggggcagataggagctgcaggggtgcctggcgagcctctggttttcctctgctcctctgcctgtcctctcccaactcaaggttctagtgggaaggggtgcccccaggctctcatgttcctggcgtgagatgaaaggatccctgcggagggtttggttcttgagggctgggggtggacttgggaacaggctgtgtgtttgtcccagcgatggtgcctgcttagcttcccgtccccaccccccagccccttggccctctcctgtctgccctagggagaaggcaggtggacaagggcccatgaaaaaatacaggtgtctagactgccagggagaccctggcccccagtagtgtgtcctggggacttcctcagagcgagaaacctcccccaatgtcttcaagacttttctctccccccgcccaaccccgtctctccctcccttgccacccaaatgttagaaaaatagctgtgaacagagagcgcttttgtctgcaatggcagcaggatctggacggtcccctcccctaagttcccccctccccaccccacactctgacagcttgttccgtgttgcccccccacccagcgcacagtgcagaaaaacgccaagtacatctgcctggctaacaaggactgccctgtggacaagaggcggcgaaaccgctgccagttctgccgcttccagaagtgcctggcggtgggcatggtgaaggaagttgtccgaacagacagcctgaaggggcggcggggccggctaccttcaaaacccaagcagcccccagatgcctcccctgccaatctcctcacttccctggtccgtgcacacctggactcagggcccagcactgccaaactggactactccaagttccaggagctggtgctgccccactttgggaaggaagatgctggggatgtacagcagttctacgacctgctctccggttctctggaggtcatccgcaagtgggcggagaagatccctggctttgctgagctgtcaccggctgaccaggacctgttgctggagtcggccttcctggagctcttcatcctccgcctggcgtacaggtctaagccaggcgagggcaagctcatcttctgctcaggcctggtgctacaccggctgcagtgtgcccgtggcttcggggactggattgacagtatcctggccttctcaaggtccctgcacagcttgcttgtcgatgtccctgccttcgcctgcctctctgcccttgtcctcatcaccgaccggcatgggctgcaggagccgcggcgggtggaggagctgcagaaccgcatcgccagctgcctgaaggagcacgtggcagctgtggcgggcgagccccagccagccagctgcctgtcacgtctgttgggcaaactgcccgagctgcggaccctgtgcacccagggcctgcagcgcatcttctacctcaagctggaggacttggtgccccctccacccatcattgacaagatcttcatggacacgctgcccttctgacccctgcctgggaacacgtgtgcacatgcgcactctcatatgccaccccatgtgcctttagtccacggacccccagagcacccccaagcctgggcttgagctgcagaatgactccaccttctcacctgctccaggaggtttgcagggagctcaagcccttggggagggggatgccttcatgggggtgaccccacgatttgtcttatcccccccagcctggccccggcctttatgttttttgtaagataaaccgtttttaacacatagcgccgtgctgtaaataagcccagtgctgctgtaaatacaggaagaaagagcttgaggtgggagcggggctgggaggaagggatgggccccgccttcctgggcagcctttccagcctcctgctggctctctcttcctaccctccttccacatgtacataaactgtcactctaggaagaagacaaatgacagattctgacatttatatttgtgtattttcctggatttatagtatgtgacttttctgattaatatatttaatatattgaataaaaaatagacatgtaaaaaaaaaaaaaaaaaaaaactcgagggggggcccggtacccaatncgccctatagtgagtcgtnttacaattcactggccgtcgttttaancgtcgtgactgggaaaancctggcgttacccaacttaatcgcctggcagnacatccccctttcgccagntggngtaatagngaagaggcccnaccgatcgccctcccaacagtgggcagcctgaatggggattggaaattgtaagcgtaatattnggtaaaatccggtaaatttgggtaatcagtcatttttaaccaataggcgaatcgg

SEQ ID NO: 736755 - DNA, 4030 bp, Homo sapiens
  misc_feature (3774)..(3774): n is a, c, g, or t
  misc_feature (3793)..(3793): n is a, c, g, or t
  misc_feature (3820)..(3820): n is a, c, g, or t
  misc_feature (3838)..(3838): n is a, c, g, or t
  misc_feature (3870)..(3870): n is a, c, g, or t
  misc_feature (3889)..(3889): n is a, c, g, or t
  misc_feature (3893)..(3893): n is a, c, g, or t
  misc_feature (3901)..(3901): n is a, c, g, or t
  misc_feature (3912)..(3912): n is a, c, g, or t
  misc_feature (3975)..(3975): n is a, c, g, or t
ggcgcgggggcggggggcgccgcgcggccggaactgcgggcggggggcttcccgggggcggggggcgctgagcggctgcggcgcggctgcaggagcgcgaggaggaggtggcggcggcggcggaactggcgggggtcccctcgcggcgcccgggacccccggcctccaggcatgggcgcccctgcggtgcagagcagctcagggccggctggtgcgcgaccccggaaagcgggggtggagaggcgagcggagcccgcggggccaggcctccaccatggacagaggccaggccctgcccctcccaggcagcctggctccttctgctgggccctgaaggcagacgggataatgtggttggccaaggcctgttggtccatccagagtgagatgccctgtatccaagcccaatatgggacaccagcaccgagtccgggaccccgtgaccacctggcaagcgaccccctgacccctgagttcatcaagcccaccatggacctggccagccccgaggcagcccccgctgcccccactgccctgcccagcttcagcaccttcatggacggctacacaggagagtttgacaccttcctctaccagctgccaggaacagtccagccatgctcctcagcctcctcctcggcctcctccacatcctcgtcctcagccacctcccctgcctctgcctccttcaagttcgaggacttccaggtgtacggctgctaccccggccccctgagcggcccagtggatgaggccctgtcctccagtggctctgactactatggcagcccctgctcggccccgtcgccctccacgcccagcttccagccgccccagctctctccctgggatggctccttcggccacttctcgcccagccagacttacgaaggcctgcgggcatggacagagcagctgcccaaagcctctgggcccccacagcctccagccttcttttccttcagtcctcccaccggccccagccccagcctggcccagagccccctgaagttgttcccctcacaggccacccaccagctgggggagggagagagctattccatgcctacggccttcccaggtttggcacccacttctccacaccttgagggctcggggatactggatacacccgtgacctcaaccaaggcccggagcggggccccaggtggaagtgaaggccgctgtgctgtgtgtggggacaacgcttcatgccagcattatggtgtccgcacatgtgagggctgcaagggcttcttcaaggtaccgcgcagccccaggtggggccttttgttggaaatggagagaggctggcctcatcccattgggacctgtggtctccccctgggttctcctcctagctaagtcctgtcctgcagggtgggatcagccctgccaggtgggccgccttcctggagacccgtagatgccagggctggaagctttcatttgccgggacactcgggcccatgggattgcacagagctggagggaggggtgagataggggcagataggagctgcaggggtgcctggcgagcctctggttttcctctgctcctctgcctgtcctctcccaactcaaggttctagtgggaaggggtgcccccaggctctcatgttcctggcgtgagatgaaaggatccctgcggagggtttggttcttgagggctgggggtggacttgggaacaggctgtgtgtttgtcccagcgatggtgcctgcttagcttcccgtccccaccccccagccccttggccctctcctgtctgccctagggagaaggcaggtggacaagggcccatgaaaaaatacaggtgtctagactgccagggagaccctggcccccagtagtgtgtcctggggacttcctcagagcgagaaacctcccccaatgtcttcaagacttttctctccccccgcccaaccccgtctctccctcccttgccacccaaatgttagaaaaatagctgtgaacagagagcgcttttgtctgcaatggcagcaggatctggacggtcccctcccctaagttcccccctccccaccccacactctgacagcttgttccgtgttgcccccccacccagcgcacagtgcagaaaaacgccaagtacatctgcctggctaacaaggactgccctgtggacaagaggcggcgaaaccgctgccagttctgccgcttccagaagtgcctggcggtgggcatggtgaaggaagttgtccgaacagacagcctgaaggggcggcggggccggctaccttcaaaacccaagcagcccccagatgcctcccctgccaatctcctcacttccctggtccgtgcacacctggactcagggcccagcactgccaaactggactactccaagctgcagccctgggttaatatgtgagacttggcaagtgagagcctgggcaggatctcagatccactcccactcccgggatctggcatccaagtgtctgacacagccatacgtggcagtgggtgtaggagcctgcctggggtgctgaccccactggaccgtcttcctagttccaggagctggtgctgccccactttgggaaggaagatgctggggatgtacagcagttctacgacctgctctccggttctctggaggtcatccgcaagtgggcggagaagatccctggctttgctgagctgtcaccggctgaccaggacctgttgctggagtcggccttcctggagctcttcatcctccgcctggcgtacaggtctaagccaggcgagggcaagctcatcttctgctcaggcctggtgctacaccggctgcagtgtgcccgtggcttcggggactggattgacagtatcctggccttctcaaggtccctgcacagcttgcttgtcgatgtccctgccttcgcctgcctctctgcccttgtcctcatcaccgaccggcatgggctgcaggagccgcggcgggtggaggagctgcagaaccgcatcgccagctgcctgaaggagcacgtggcagctgtggcgggcgagccccagccagccagctgcctgtcacgtctgttgggcaaactgcccgagctgcggaccctgtgcacccagggcctgcagcgcatcttctacctcaagctggaggacttggtgccccctccacccatcattgacaagatcttcatggacacgctgcccttctgacccctgcctgggaacacgtgtgcacatgcgcactctcatatgccaccccatgtgcctttagtccacggacccccagagcacccccaagcctgggcttgagctgcagaatgactccaccttctcacctgctccaggaggtttgcagggagctcaagcccttggggagggggatgccttcatgggggtgaccccacgatttgtcttatcccccccagcctggccccggcctttatgttttttgtaagataaaccgtttttaacacatagcgccgtgctgtaaataagcccagtgctgctgtaaatacaggaagaaagagcttgaggtgggagcggggctgggaggaagggatgggccccgccttcctgggcagcctttccagcctcctgctggctctctcttcctaccctccttccacatgtacataaactgtcactctaggaagaagacaaatgacagattctgacatttatatttgtgtattttcctggatttatagtatgtgacttttctgattaatatatttaatatattgaataaaaaatagacatgtaaaaaaaaaaaaaaaaaaaaactcgagggggggcccggtacccaatncgccctatagtgagtcgtnttacaattcactggccgtcgttttaancgtcgtgactgggaaaancctggcgttacccaacttaatcgcctggcagnacatccccctttcgccagntggngtaatagngaagaggcccnaccgatcgccctcccaacagtgggcagcctgaatggggattggaaattgtaagcgtaatattnggtaaaatccggtaaatttgggtaatcagtcatttttaaccaataggcgaatcgg

SEQ ID NO: 736756 - DNA, 3783 bp, Homo sapiens
  misc_feature (3527)..(3527): n is a, c, g, or t
  misc_feature (3546)..(3546): n is a, c, g, or t
  misc_feature (3573)..(3573): n is a, c, g, or t
  misc_feature (3591)..(3591): n is a, c, g, or t
  misc_feature (3623)..(3623): n is a, c, g, or t
  misc_feature (3642)..(3642): n is a, c, g, or t
  misc_feature (3646)..(3646): n is a, c, g, or t
  misc_feature (3654)..(3654): n is a, c, g, or t
  misc_feature (3665)..(3665): n is a, c, g, or t
  misc_feature (3728)..(3728): n is a, c, g, or t
ggcgcgggggcggggggcgccgcgcggccggaactgcgggcggggggcttcccgggggcggggggcgctgagcggctgcggcgcggctgcaggagcgcgaggaggaggtggcggcggcggcggaactggcgggggtcccctcgcggcgcccgggacccccggcctccaggcatgggcgcccctgcggtgcagagcagctcagggccggctggtgcgcgaccccggaaagcgggggtggagaggcgagcggagcccgcggggccaggcctccaccatggacagaggccaggccctgcccctcccaggcagcctggctccttctgctgggccctgaaggcagacgggataatgtggttggccaaggcctgttggtccatccagagtgagatgccctgtatccaagcccaatatgggacaccagcaccgagtccgggaccccgtgaccacctggcaagcgaccccctgacccctgagttcatcaagcccaccatggacctggccagccccgaggcagcccccgctgcccccactgccctgcccagcttcagcaccttcatggacggctacacaggagagtttgacaccttcctctaccagctgccaggaacagtccagccatgctcctcagcctcctcctcggcctcctccacatcctcgtcctcagccacctcccctgcctctgcctccttcaagttcgaggacttccaggtgtacggctgctaccccggccccctgagcggcccagtggatgaggccctgtcctccagtggctctgactactatggcagcccctgctcggccccgtcgccctccacgcccagcttccagccgccccagctctctccctgggatggctccttcggccacttctcgcccagccagacttacgaaggcctgcgggcatggacagagcagctgcccaaagcctctgggcccccacagcctccagccttcttttccttcagtcctcccaccggccccagccccagcctggcccagagccccctgaagttgttcccctcacaggccacccaccagctgggggagggagagagctattccatgcctacggccttcccaggtttggcacccacttctccacaccttgagggctcggggatactggatacacccgtgacctcaaccaaggcccggagcggggccccaggtggaagtgaaggccgctgtgctgtgtgtggggacaacgcttcatgccagcattatggtgtccgcacatgtgagggctgcaagggcttcttcaagcgcacagtgcagaaaaacgccaagtacatctgcctggctaacaaggactgccctgtggacaagaggcggcgaaaccgctgccagttctgccgcttccagaagtgcctggcggtgggcatggtgaaggaaggtgtgtggctggggtgcggcccagcggggcaagggtaggcttgagtggagtgggaccagcagggcccccaggcttctgccctggaggacccagaggagggcacgtcttatttccaccccacctctgaaccccaggccttggagggaggcagcctacacctgcctggattgtgagggtggtggcagggggaggttcctatagggtaccttggatctcagggactctgggtcctagggactcggtggggcgcgtctcagcagtggtgtgcacggcttgggctgagaggcccttcctcagatcccttccttcctcacccctacccattcctttgcagttgtccgaacagacagcctgaaggggcggcggggccggctaccttcaaaacccaagcagcccccagatgcctcccctgccaatctcctcacttccctggtccgtgcacacctggactcagggcccagcactgccaaactggactactccaaggtgaggtcccaccccgtgtctgccttggggaggtctatgagcacatgcagtgcctttgtgcgtgttaggagagctaccccctctggaaggactgaatgagaaaggaggtttaaaaaagaaagaaagaaaagcgactccctccagttcgacagatcaaagagaggatccccctctcggctgaccagatgggaaaatgcaccccctcaggcaggtggccaattagaaaaatatgtccttttggcagctgcagccctgggttaatatgtgagacttggcaagtgagagcctgggcaggatctcagatccactcccactcccgggatctggcatccaagtgtctgacacagccatacgtggcagtgggtgtaggagcctgcctggggtgctgaccccactggaccgtcttcctagttccaggagctggtgctgccccactttgggaaggaagatgctggggatgtacagcagttctacgacctgctctccggttctctggaggtcatccgcaagtgggcggagaagatccctggctttgctgagctgtcaccggctgaccaggacctgttgctggagtcggccttcctggagctcttcatcctccgcctggcgtacaggtctaagccaggcgagggcaagctcatcttctgctcaggcctggtgctacaccggctgcagtgtgcccgtggcttcggggactggattgacagtatcctggccttctcaaggtccctgcacagcttgcttgtcgatgtccctgccttcgcctgcctctctgcccttgtcctcatcaccgaccggcatgggctgcaggagccgcggcgggtggaggagctgcagaaccgcatcgccagctgcctgaaggagcacgtggcagctgtggcgggcgagccccagccagccagctgcctgtcacgtctgttgggcaaactgcccgagctgcggaccctgtgcacccagggcctgcagcgcatcttctacctcaagctggaggacttggtgccccctccacccatcattgacaagatcttcatggacacgctgcccttctgacccctgcctgggaacacgtgtgcacatgcgcactctcatatgccaccccatgtgcctttagtccacggacccccagagcacccccaagcctgggcttgagctgcagaatgactccaccttctcacctgctccaggaggtttgcagggagctcaagcccttggggagggggatgccttcatgggggtgaccccacgatttgtcttatcccccccagcctggccccggcctttatgttttttgtaagataaaccgtttttaacacatagcgccgtgctgtaaataagcccagtgctgctgtaaatacaggaagaaagagcttgaggtgggagcggggctgggaggaagggatgggccccgccttcctgggcagcctttccagcctcctgctggctctctcttcctaccctccttccacatgtacataaactgtcactctaggaagaagacaaatgacagattctgacatttatatttgtgtattttcctggatttatagtatgtgacttttctgattaatatatttaatatattgaataaaaaatagacatgtaaaaaaaaaaaaaaaaaaaaactcgagggggggcccggtacccaatncgccctatagtgagtcgtnttacaattcactggccgtcgttttaancgtcgtgactgggaaaancctggcgttacccaacttaatcgcctggcagnacatccccctttcgccagntggngtaatagngaagaggcccnaccgatcgccctcccaacagtgggcagcctgaatggggattggaaattgtaagcgtaatattnggtaaaatccggtaaatttgggtaatcagtcatttttaaccaataggcgaatcgg

SEQ ID NO: 736757 - DNA, 3038 bp, Homo sapiens
  misc_feature (2782)..(2782): n is a, c, g, or t
  misc_feature (2801)..(2801): n is a, c, g, or t
  misc_feature (2828)..(2828): n is a, c, g, or t
  misc_feature (2846)..(2846): n is a, c, g, or t
  misc_feature (2878)..(2878): n is a, c, g, or t
  misc_feature (2897)..(2897): n is a, c, g, or t
  misc_feature (2901)..(2901): n is a, c, g, or t
  misc_feature (2909)..(2909): n is a, c, g, or t
  misc_feature (2920)..(2920): n is a, c, g, or t
  misc_feature (2983)..(2983): n is a, c, g, or t
ggcgcgggggcggggggcgccgcgcggccggaactgcgggcggggggcttcccgggggcggggggcgctgagcggctgcggcgcggctgcaggagcgcgaggaggaggtggcggcggcggcggaactggcgggggtcccctcgcggcgcccgggacccccggcctccaggcatgggcgcccctgcggtgcagagcagctcagggccggctggtgcgcgaccccggaaagcgggggtggagaggcgagcggagcccgcggggccaggcctccaccatggacagaggccaggccctgcccctcccaggcagcctggctccttctgctgggccctgaaggcagacgggataatgtggttggccaaggcctgttggtccatccagagtgagatgccctgtatccaagcccaatatgggacaccagcaccgagtccgggaccccgtgaccacctggcaagcgaccccctgacccctgagttcatcaagcccaccatggacctggccagccccgaggcagcccccgctgcccccactgccctgcccagcttcagcaccttcatggacggctacacaggagagtttgacaccttcctctaccagctgccaggaacagtccagccatgctcctcagcctcctcctcggcctcctccacatcctcgtcctcagccacctcccctgcctctgcctccttcaagttcgaggacttccaggtgtacggctgctaccccggccccctgagcggcccagtggatgaggccctgtcctccagtggctctgactactatggcagcccctgctcggccccgtcgccctccacgcccagcttccagccgccccagctctctccctgggatggctccttcggccacttctcgcccagccagacttacgaaggcctgcgggcatggacagagcagctgcccaaagcctctgggcccccacagcctccagccttcttttccttcagtcctcccaccggccccagccccagcctggcccagagccccctgaagttgttcccctcacaggccacccaccagctgggggagggagagagctattccatgcctacggccttcccaggtttggcacccacttctccacaccttgagggctcggggatactggatacacccgtgacctcaaccaaggcccggagcggggccccaggtggaagtgaaggccgctgtgctgtgtgtggggacaacgcttcatgccagcattatggtgtccgcacatgtgagggctgcaagggcttcttcaagcgcacagtgcagaaaaacgccaagtacatctgcctggctaacaaggactgccctgtggacaagaggcggcgaaaccgctgccagttctgccgcttccagaagtgcctggcggtgggcatggtgaaggaagttgtccgaacagacagcctgaaggggcggcggggccggctaccttcaaaacccaagcagcccccagatgcctcccctgccaatctcctcacttccctggtccgtgcacacctggactcagggcccagcactgccaaactggactactccaagttccaggagctggtgctgccccactttgggaaggaagatgctggggatgtacagcagttctacgacctgctctccggttctctggaggtcatccgcaagtgggcggagaagatccctggctttgctgagctgtcaccggctgaccaggacctgttgctggagtcggccttcctggagctcttcatcctccgcctggcgtacaggtctaagccaggcgagggcaagctcatcttctgctcaggcctggtgctacaccggctgcagtgtgcccgtggcttcggggactggattgacagtatcctggccttctcaaggtccctgcacagcttgcttgtcgatgtccctgccttcgcctgcctctctgcccttgtcctcatcaccgaccggcatgggctgcaggagccgcggcgggtggaggagctgcagaaccgcatcgccagctgcctgaaggagcacgtggcagctgtggcgggcgagccccagccagccagctgcctgtcacgtctgttgggcaaactgcccgagctgcggaccctgtgcacccagggcctgcagcgcatcttctacctcaagctggaggacttggtgccccctccacccatcattgacaagatcttcatggacacgctgcccttctgacccctgcctgggaacacgtgtgcacatgcgcactctcatatgccaccccatgtgcctttagtccacggacccccagagcacccccaagcctgggcttgagctgcagaatgactccaccttctcacctgctccaggaggtttgcagggagctcaagcccttggggagggggatgccttcatgggggtgaccccacgatttgtcttatcccccccagcctggccccggcctttatgttttttgtaagataaaccgtttttaacacatagcgccgtgctgtaaataagcccagtgctgctgtaaatacaggaagaaagagcttgaggtgggagcggggctgggaggaagggatgggccccgccttcctgggcagcctttccagcctcctgctggctctctcttcctaccctccttccacatgtacataaactgtcactctaggaagaagacaaatgacagattctgacatttatatttgtgtattttcctggatttatagtatgtgacttttctgattaatatatttaatatattgaataaaaaatagacatgtaaaaaaaaaaaaaaaaaaaaactcgagggggggcccggtacccaatncgccctatagtgagtcgtnttacaattcactggccgtcgttttaancgtcgtgactgggaaaancctggcgttacccaacttaatcgcctggcagnacatccccctttcgccagntggngtaatagngaagaggcccnaccgatcgccctcccaacagtgggcagcctgaatggggattggaaattgtaagcgtaatattnggtaaaatccggtaaatttgggtaatcagtcatttttaaccaataggcgaatcgg

SEQ ID NO: 736758 - DNA, 719 bp, Homo sapiens
ggcgcgggggcggggggcgccgcgcggccggaactgcgggcggggggcttcccgggggcggggggcgctgagcggctgcggcgcggctgcaggagcgcgaggaggaggtggcggcggcggcggaactggcgggggtcccctcgcggcgcccgggacccccggcctccaggcatgggcgcccctgcggtgcagagcagctcagggccggctggtgcgcgaccccggaaagcgggggtggagaggcgagcggagcccgcggggccaggcctccaccatggacagaggccaggccctgcccctcccaggcagcctggctccttctgctgggccctgaaggcagacgggataatgtggttggccaaggcctgttggtccatccagagtgagatgccctgtatccaagcccaatatgggacaccagcaccgagtccgggaccccgtgaccacctggcaagcgaccccctgacccctgagttcatcaagcccaccatggacctggccagccccgaggcagcccccgctgcccccactgccctgcccagcttcagcaccttcatggacggctacacaggagagtttgacaccttcctctaccagctgccaggaacagtccagccatgctcctcagcctcctcctcggcctcctccacatcctcgtcctcagccgtacacctggaagtcctcgaacttgaaggaggcagagcaggggaggtggctga

SEQ ID NO: 736759 - DNA, 4558 bp, Homo sapiens
  misc_feature (4302)..(4302): n is a, c, g, or t
  misc_feature (4321)..(4321): n is a, c, g, or t
  misc_feature (4348)..(4348): n is a, c, g, or t
  misc_feature (4366)..(4366): n is a, c, g, or t
  misc_feature (4398)..(4398): n is a, c, g, or t
  misc_feature (4417)..(4417): n is a, c, g, or t
  misc_feature (4421)..(4421): n is a, c, g, or t
  misc_feature (4429)..(4429): n is a, c, g, or t
  misc_feature (4440)..(4440): n is a, c, g, or t
  misc_feature (4503)..(4503): n is a, c, g, or t
ggcgcgggggcggggggcgccgcgcggccggaactgcgggcggggggcttcccgggggcggggggcgctgagcggctgcggcgcggctgcaggagcgcgaggaggaggtggcggcggcggcggaactggcgggggtcccctcgcggcgcccgggacccccggcctccaggcatgggcgcccctgcggtgcagagcagctcagggccggctggtgcgcgaccccggaaagcgggggtggagaggcgagcggagcccgcggggccaggcctccaccatggacagaggccaggccctgcccctcccaggcagcctggctccttctgctgggccctgaaggcagacgggataatgtggttggccaaggcctgttggtccatccagagtgagatgccctgtatccaagcccaatatgggacaccagcaccgagtccgggaccccgtgaccacctggcaagcgaccccctgacccctgagttcatcaaccctgcccagcttcagcaccttcatggacggctacacaggagagtttgacaccttcctctaccagctgccaggaacagtccagccatgctcctcagcctcctcctcggcctcctccacatcctcgtcctcagccacctcccctgcctctgcctccttcaagttcgaggacttccaggtgtacggctgctaccccggccccctgagcggcccagtggatgaggccctgtcctccagtggctctgactactatggcagcccctgctcggccccgtcgccctccacgcccagcttccagccgccccagctctctccctgggatggctccttcggccacttctcgcccagccagacttacgaaggcctgcgggcatggacagagcagctgcccaaagcctctgggcccccacagcctccagccttcttttccttcagtcctcccaccggccccagccccagcctggcccagagccccctgaagttgttcccctcacaggccacccaccagctgggggagggagagagctattccatgcctacggccttcccaggtttggcacccacttctccacaccttgagggctcggggatactggatacacccgtgacctcaaccaaggcccggagcggggccccaggtggaagtgaaggccgctgtgctgtgtgtggggacaacgcttcatgccagcattatggtgtccgcacatgtgagggctgcaagggcttcttcaaggtaccgcgcagccccaggtggggccttttgttggaaatggagagaggctggcctcatcccattgggacctgtggtctccccctgggttctcctcctagctaagtcctgtcctgcagggtgggatcagccctgccaggtgggccgccttcctggagacccgtagatgccagggctggaagctttcatttgccgggacactcgggcccatgggattgcacagagctggagggaggggtgagataggggcagataggagctgcaggggtgcctggcgagcctctggttttcctctgctcctctgcctgtcctctcccaactcaaggttctagtgggaaggggtgcccccaggctctcatgttcctggcgtgagatgaaaggatccctgcggagggtttggttcttgagggctgggggtggacttgggaacaggctgtgtgtttgtcccagcgatggtgcctgcttagcttcccgtccccaccccccagccccttggccctctcctgtctgccctagggagaaggcaggtggacaagggcccatgaaaaaatacaggtgtctagactgccagggagaccctggcccccagtagtgtgtcctggggacttcctcagagcgagaaacctcccccaatgtcttcaagacttttctctccccccgcccaaccccgtctctccctcccttgccacccaaatgttagaaaaatagctgtgaacagagagcgcttttgtctgcaatggcagcaggatctggacggtcccctcccctaagttcccccctccccaccccacactctgacagcttgttccgtgttgcccccccacccagcgcacagtgcagaaaaacgccaagtacatctgcctggctaacaaggactgccctgtggacaagaggcggcgaaaccgctgccagttctgccgcttccagaagtgcctggcggtgggcatggtgaaggaaggtgtgtggctggggtgcggcccagcggggcaagggtaggcttgagtggagtgggaccagcagggcccccaggcttctgccctggaggacccagaggagggcacgtcttatttccaccccacctctgaaccccaggccttggagggaggcagcctacacctgcctggattgtgagggtggtggcagggggaggttcctatagggtaccttggatctcagggactctgggtcctagggactcggtggggcgcgtctcagcagtggtgtgcacggcttgggctgagaggcccttcctcagatcccttccttcctcacccctacccattcctttgcagttgtccgaacagacagcctgaaggggcggcggggccggctaccttcaaaacccaagcagcccccagatgcctcccctgccaatctcctcacttccctggtccgtgcacacctggactcagggcccagcactgccaaactggactactccaaggtgaggtcccaccccgtgtctgccttggggaggtctatgagcacatgcagtgcctttgtgcgtgttaggagagctaccccctctggaaggactgaatgagaaaggaggtttaaaaaagaaagaaagaaaagcgactccctccagttcgacagatcaaagagaggatccccctctcggctgaccagatgggaaaatgcaccccctcaggcaggtggccaattagaaaaatatgtccttttggcagctgcagccctgggttaatatgtgagacttggcaagtgagagcctgggcaggatctcagatccactcccactcccgggatctggcatccaagtgtctgacacagccatacgtggcagtgggtgtaggagcctgcctggggtgctgaccccactggaccgtcttcctagttccaggagctggtgctgccccactttgggaaggaagatgctggggatgtacagcagttctacgacctgctctccggttctctggaggtcatccgcaagtgggcggagaagatccctggctttgctgagctgtcaccggctgaccaggacctgttgctggagtcggccttcctggagctcttcatcctccgcctggcgtacaggtctaagccaggcgagggcaagctcatcttctgctcaggcctggtgctacaccggctgcagtgtgcccgtggcttcggggactggattgacagtatcctggccttctcaaggtccctgcacagcttgcttgtcgatgtccctgccttcgcctgcctctctgcccttgtcctcatcaccgaccggcatgggctgcaggagccgcggcgggtggaggagctgcagaaccgcatcgccagctgcctgaaggagcacgtggcagctgtggcgggcgagccccagccagccagctgcctgtcacgtctgttgggcaaactgcccgagctgcggaccctgtgcacccagggcctgcagcgcatcttctacctcaagctggaggacttggtgccccctccacccatcattgacaagatcttcatggacacgctgcccttctgacccctgcctgggaacacgtgtgcacatgcgcactctcatatgccaccccatgtgcctttagtccacggacccccagagcacccccaagcctgggcttgagctgcagaatgactccaccttctcacctgctccaggaggtttgcagggagctcaagcccttggggagggggatgccttcatgggggtgaccccacgatttgtcttatcccccccagcctggccccggcctttatgttttttgtaagataaaccgtttttaacacatagcgccgtgctgtaaataagcccagtgctgctgtaaatacaggaagaaagagcttgaggtgggagcggggctgggaggaagggatgggccccgccttcctgggcagcctttccagcctcctgctggctctctcttcctaccctccttccacatgtacataaactgtcactctaggaagaagacaaatgacagattctgacatttatatttgtgtattttcctggatttatagtatgtgacttttctgattaatatatttaatatattgaataaaaaatagacatgtaaaaaaaaaaaaaaaaaaaaactcgagggggggcccggtacccaatncgccctatagtgagtcgtnttacaattcactggccgtcgttttaancgtcgtgactgggaaaancctggcgttacccaacttaatcgcctggcagnacatccccctttcgccagntggngtaatagngaagaggcccnaccgatcgccctcccaacagtgggcagcctgaatggggattggaaattgtaagcgtaatattnggtaaaatccggtaaatttgggtaatcagtcatttttaaccaataggcgaatcgg

SEQ ID NO: 736760 - DNA, 1372 bp, Homo sapiens
gccatccccaaacccatccccaagccaaactcaacaccatccccttccctaatcacctctcctgcccctagctcagcctcatccccaactccatgcctgtctccaatcccaaccctgcccccaatctcccctcaactccaatccataacccccttcaaaccatcctcaactaagctcctctccagccctggccacatccccatcctcccccaacctccagccccaacacccatcatccccctgagctcacccttaactccaatttatcctccaagcctatctctcaccatccagccctcacctagccatttcccaaccctagtcctccaccgtcccgaagccaacttcacccatgtccccatccccaatcttgtccccattcctgactccaaatccaacccctaagcctccccaagctcctcctcatctaaccttgtctccagccccaaccacatggccgtcctcacctccaatccgtaaccatcccagaccgatcccaaagccaactccagctacattcccacctccaaccccaatagcatctgcatccccatgcccaaccctaaccccagtgccattaccagcccctaccccatccctatgccatccccacccagcacacccccatcctcacctccatccccagccgcatcctagtcccacccacccccatcctcagttcctccccctgccgtgtgcacctccaacacgacgcctccgcccgctgcctcctccccccaggccgccaggggagccagggctgagccactcggggtcggagcaaccagagcagaccggccttctcatgggaggtgcctccggaggagccaggggtggcagcgggggcttcggagacgagtgctgagccaagaacctcctagaggctgtccctggacctggagctgcaggcatcagagaaccagccctgctcacgccatgcccgcccccgccttccctcttccctcttccctctccctgcccagccctcccttccttcctctgccggcaaggcagggacccacagtggctgcctgcctccgggagggaagggagagggagggtgggtgggtgggagggggccttcctccagggaatgtgactctcccaggccccagaatagctcctggacccaagcccaaggcccagcctgggacaaggctccgagggtcggctggccggagctatttttacctcccgcctcccctgctggtccccccacctgacgtcttgctgcagagtctgacactggattcccccccctcaccccgcccctggtcccactcctgcccccgccctacctccgccccaccccatcatctgtggacactggagtctggaataaatgctgtttgtcacatcaacaccaaaaaaa

SEQ ID NO: 736761 - DNA, 438 bp, Homo sapiens
ttaggagcccggctcatgagtctgagtggggagaactcctgagagaggagccccgacttcagagtcccagctccaagcccagggccatgcccgtgtctgcctcagatcgccacctgcaacagccggaacgggaacccggcccccaagatcacgtggtatcgcaacgggcagcgcctggaggtgcccgtagagatgaacccagagggctacatgaccagccgcacggtccgggaggcctcgggcctgctctccctcaccagcaccctctacctgcggctccgcaaggatgaccgagacgccagcttccactgcgccgcccactacagcctgcccgagggccgccacggccgcctggacagccccaccttccacctcaccctgcactgtgagtctgtgctggcctttgacctctgacctcaggctccacacctcatgagg

SEQ ID NO: 736762 - DNA, 708 bp, Homo sapiens
  misc_feature (12)..(12): n is a, c, g, or t
  misc_feature (15)..(15): n is a, c, g, or t
  misc_feature (18)..(18): n is a, c, g, or t
  misc_feature (21)..(21): n is a, c, g, or t
  misc_feature (31)..(31): n is a, c, g, or t
  misc_feature (37)..(37): n is a, c, g, or t
  misc_feature (52)..(52): n is a, c, g, or t
ctctcgctcctngtngtnttntttatagctnaaaacnaagggggcccttctncccccaccgcgggagaagggggctcgccgccaggggagccagggctgagccactcggggtcggagcaaccagagcagaccggccttctcatgggaggtgcctccggaggagccaggggtggcagcgggggcttcggagacgagtgctgagccaagaacctcctagaggctgtccctggacctggagctgcaggcatcagagaaccagccctgctcacgccatgcccgcccccgccttccctcttccctcttccctctccctgcccagccctcccttccttcctctgccggcaaggcagggacccacagtggctgcctgcctccgggagggaagggagagggagggtgggtgggtgggagggggccttcctccagggaatgtgactctcccaggccccagaatagctcctggacccaagcccaaggcccagcctgggacaaggctccgagggtcggctggccggagctatttttacctcccgcctcccctgctggtccccccacctgacgtcttgctgcagagtctgacactggattcccccccctcaccccgcccctggtcccactcctgcccccgccctacctccgccccaccccatcatctgtggacactggagtctggaataaatgctgtttgtcacatcaacaccaaaaaaa

SEQ ID NO: 736763 - DNA, 1558 bp, Homo sapiens
accgaccgctcgggagctcgcccccgcctagcctcggctgagatgcagggctctgagctccaggtcacaatgcacgacacccggggccgcagtcccccataccagctggactcccaggggcgcctggtgctggctgaggccaggtggcgacgagcgagactacgtgtgcgtggtgagggcaggggcggcaggcactgctgaggccactgcgcggctcaacgtgtttgcaaagccagaggccactgaggtctcccccaacaaagggacactgtctgtgatggaggactctgcccaggagatcgccacctgcaacagccggaacgggaacccggcccccaagatcacgtggtatcgcaacgggcagcgcctggaggtgcccgtagagatgaacccagagggctacatgaccagccgcacggtccgggaggcctcgggcctgctctccctcaccagcaccctctacctgcggctccgcaaggatgaccgagacgccagcttccactgcgccgcccactacagcctgcccgagggccgccacggccgcctggacagccccaccttccacctcaccctgcactatcccacggagcacgtgcagttctgggtgggcagcccgtccaccccagcaggctgggtacgcgagggtgacactgtccagctgctctgccggggggacggcagccccagcccggagtatacgcttttccgccttcaggatgagcaggaggaagtgctgaatgtgaatctcgaggggaacttgaccctggagggagtgacccggggccagagcgggacctatggctgcagagtggaggattacgacgcggcagatgacgtgcagctctccaagacgctggagctgcgcgtggcctatctggaccccctggagctcagcgaggggaaggtgctttccttacctctaaacagcagtgcagtcgtgaactgctccgtgcacggcctgcccacccctgccctacgctggaccaaggactccactcccctgggcgatggccccatgctgtcgctcagttctatcaccttcgattccaatggcacctacgtatgtgaggcctccctgcccacagtcccggtcctcagccgcacccagaacttcacgctgctggtccaaggttcagggggcagggagggggtgggcttggatggggacagtgtggggtgtgggacctggacaaacaggacgagttcctgagtccctggctggggactccatcttctgctcgatgcctctcttctctctctctctcctctcccttcactttcttcccatccccaccacccacaggctcgccagagctaaagacagcggaaatagagcccaaggcagatggcagctggagggaaggagacgaagtcacactcatctgctctgcccgcggccatccagaccccaaactcagctggagccaattggggggcagcgtaagggaccttcctctccaccctgagccccctctcactcatccaagtatcacaccccatcatctgtggacactggagtctggaataaatgctgtttgtcacatcaacaccaaaaaaa

SEQ ID NO: 736764 - DNA, 1753 bp, Homo sapiens
accgaccgctcgggagctcgcccccgcctagcctcggctgagatgcagggctctgagctccaggtcacaatgcacgacacccggggccgcagtcccccataccagctggactcccaggggcgcctggtgctggctgaggccaggtggcgacgagcgagactacgtgtgcgtggtgagggcaggggcggcaggcactgctgaggccactgcgcggctcaacgtgtttgcaaagccagaggccactgaggtctcccccaacaaagggacactgtctgtgatggaggactctgcccaggagatcgccacctgcaacagccggaacgggaacccggcccccaagatcacgtggtatcgcaacgggcagcgcctggaggtgcccgtagagatgaacccagagggctacatgaccagccgcacggtccgggaggcctcgggcctgctctccctcaccagcaccctctacctgcggctccgcaaggatgaccgagacgccagcttccactgcgccgcccactacagcctgcccgagggccgccacggccgcctggacagccccaccttccacctcaccctgcactatcccacggagcacgtgcagttctgggtgggcagcccgtccaccccagcaggctgggtacgcgagggtgacactgtccagctgctctgccggggggacggcagccccagcccggagtatacgcttttccgccttcaggatgagcaggaggaagtgctgaatgtgaatctcgaggggaacttgaccctggagggagtgacccggggccagagcgggacctatggctgcagagtggaggattacgacgcggcagatgacgtgcagctctccaagacgctggagctgcgcgtggcctatctggaccccctggagctcagcgaggggaaggtgctttccttacctctaaacagcagtgcagtcgtgaactgctccgtgcacggcctgcccacccctgccctacgctggaccaaggactccactcccctgggcgatggccccatgctgtcgctcagttctatcaccttcgattccaatggcacctacgtatgtgaggcctccctgcccacagtcccggtcctcagccgcacccagaacttcacgctgctggtccaaggctcgccagagctaaagacagcggaaatagagcccaaggcagatggcagctggagggaaggagacgaagtcacactcatctgctctgcccgcggccatccagaccccaaactcagctggagccaattggggggcagccccgcagagccaatccccggacggcagggttgggtgagcagctctctgaccctgaaagtgaccagcgccctgagccgcgatggcatctcctgtgaagcctccaacccccacgggaacaagcgccatgtcttccacttcggcaccgtgagcccccagacctcccaggctggagtggccgtcatggccgtggccgtcagcgtgggcctcctgctcctcgtcgttgctgtcttctactgcgtgagacgcaaagggggcccctgctgccgccagcggcgggagaagggggctccgtgagtggcctgctatctgcaatgaccaccatagcttaaccccatccccaccctcaaccccaagctcaacccataacctcaaccacatcttatcctccaccccacatcccaccacatccacctccatccccaacccatcctcatccccaactacagccccaaacccagccccagactaatccacagccatccccaa

SEQ ID NO: 736765 - DNA, 2188 bp, Homo sapiens
accgaccgctcgggagctcgcccccgcctagcctcggctgagatgcagggctctgagctccaggtcacaatgcacgacacccggggccgcagtcccccataccagctggactcccaggggcgcctggtgctggctgaggccaggtggcgacgagcgagactacgtgtgcgtggtgagggcaggggcggcaggcactgctgaggccactgcgcggctcaacgtgtttgcaaagccagaggccactgaggtctcccccaacaaagggacactgtctgtgatggaggactctgcccaggagatcgccacctgcaacagccggaacgggaacccggcccccaagatcacgtggtatcgcaacgggcagcgcctggaggtgcccgtagagatgaacccagagggctacatgaccagccgcacggtccgggaggcctcgggcctgctctccctcaccagcaccctctacctgcggctccgcaaggatgaccgagacgccagcttccactgcgccgcccactacagcctgcccgagggccgccacggccgcctggacagccccaccttccacctcaccctgcactatcccacggagcacgtgcagttctgggtgggcagcccgtccaccccagcaggctgggtacgcgagggtgacactgtccagctgctctgccggggggacggcagccccagcccggagtatacgcttttccgccttcaggatgagcaggaggaagtgctgaatgtgaatctcgaggggaacttgaccctggagggagtgacccggggccagagcgggacctatggctgcagagtggaggattacgacgcggcagatgacgtgcagctctccaagacgctggagctgcgcgtggcctatctggaccccctggagctcagcgaggggaaggtgctttccttacctctaaacagcagtgcagtcgtgaactgctccgtgcacggcctgcccacccctgccctacgctggaccaaggactccactcccctgggcgatggccccatgctgtcgctcagttctatcaccttcgattccaatggcacctacgtatgtgaggcctccctgcccacagtcccggtcctcagccgcacccagaacttcacgctgctggtccaaggctcgccagagctaaagacagcggaaatagagcccaaggcagatggcagctggagggaaggagacgaagtcacactcatctgctctgcccgcggccatccagaccccaaactcagctggagccaattggggggcagccccgcagagccaatccccggacggcagggttgggtgagcagctctctgaccctgaaagtgaccagcgccctgagccgcgatggcatctcctgtgaagcctccaacccccacgggaacaagcgccatgtcttccacttcggcaccgtgagcccccagacctcccaggctggagtggccgtcatggccgtggccgtcagcgtgggcctcctgctcctcgtcgttgctgtcttctactgcgtgagacgcaaagggggcccctgctgccgccagcggcgggagaagggggctccgccgccaggggagccagggctgagccactcggggtcggagcaaccagagcagaccggccttctcatgggaggtgcctccggaggagccaggggtggcagcgggggcttcggagacgagtgctgagccaagaacctcctagaggctgtccctggacctggagctgcaggcatcagagaaccagccctgctcacgccatgcccgcccccgccttccctcttccctcttccctctccctgcccagccctcccttccttcctctgccggcaaggcagggacccacagtggctgcctgcctccgggagggaagggagagggagggtgggtgggtgggagggggccttcctccagggaatgtgactctcccaggccccagaatagctcctggacccaagcccaaggcccagcctgggacaaggctccgagggtcggctggccggagctatttttacctcccgcctcccctgctggtccccccacctgacgtcttgctgcagagtctgacactggattcccccccctcaccccgcccctggtcccactcctgcccccgccctacctccgccccaccccatcatctgtggacactggagtctggaataaatgctgtttgtcacatcaacaccaaaaaaa

SEQ ID NO: 736766 - DNA, 2138 bp, Homo sapiens
accgaccgctcgggagctcgcccccgcctagcctcggctgagatgcagggctctgagctccaggtcacaatgcacgacacccggggccgcagtcccccataccagctggactcccaggggcgcctggtgctggctgaggccaggtggcgacgagcgagactacgtgtgcgtggtgagggcaggggcggcaggcactgctgaggccactgcgcggctcaacgtgtttgcaaagccagaggccactgaggtctcccccaacaaagggacactgtctgtgatggaggactctgcccaggagatcgccacctgcaacagccggaacgggaacccggcccccaagatcacgtggtatcgcaacgggcagcgcctggaggtgcccgtagagatgaacccagagggctacatgaccagccgcacggtccgggaggcctcgggcctgctctccctcaccagcaccctctacctgcggctccgcaaggatgaccgagacgccagcttccactgcgccgcccactacagcctgcccgagggccgccacggccgcctggacagccccaccttccacctcaccctgcactatcccacggagcacgtgcagttctgggtgggcagcccgtccaccccagcaggctgggtacgcgagggtgacactgtccagctgctctgccggggggacggcagccccagcccggagtatacgcttttccgccttcaggatgagcaggaggaagtgctgaatgtgaatctcgaggggaacttgaccctggagggagtgacccggggccagagcgggacctatggctgcagagtggaggattacgacgcggcagatgacgtgcagctctccaagacgctggagctgcgcgtggcctatctggaccccctggagctcagcgaggggaaggtgctttccttacctctaaacagcagtgcagtcgtgaactgctccgtgcacggcctgcccacccctgccctacgctggaccaaggactccactcccctgggcgatggccccatgctgtcgctcagttctatcaccttcgattccaatggcacctacgtatgtgaggcctccctgcccacagtcccggtcctcagccgcacccagaacttcacgctgctggtccaaggctcgccagagctaaagacagcggaaatagagcccaaggcagatggcagctggagggaaggagacgaagtcacactcatctgctctgcccgcggccatccagaccccaaactcagctggagccaattggggggcagccccgcagagccaatccccggacggcagggttgggtgagcagctctctgaccctgaaagtgaccagcgccctgagccgcgatggcatctcctgtgaagcctccaacccccacgggaacaagcgccatgtcttccacttcggcaccgtgagcccccagacctcccaggctggagtggccgtcatggccgtggccgtcagcgtgggcctcctgctcctcgtcgttgctgtcttctactgcgtgagacgcaaagggggcccctgctgccgccagcggcgggagaagggggctccgccgccaggggagccagggctgagccactcggggtcggagcaaccagagcagaccggccttctcatgggaggtgcctccggaggagccaggggtggcagcgggggcttcggagacgagtgctgagccaagaacctcctagaggctgtccctggacctggagctgcaggcatcagagaaccagccctgctcacgccatgcccgcccccgccttccctcttccctcttccctctccctgcccagccctcccttccttcctctgccggcaaggcagggacccacagtggctgcctgcctccgggagggaagggagagggagggtgggtgggtgggagggggccttcctccagggaatgtgactctcccaggccccagaatagctcctggacccaagcccaaggcccagcctgggacaaggctccgagggtcggctggccggagctatttttacctcccgcctcccctgctggtccccccacctgacgtcttgctgcagagtctgacactggattccccccccccatcatctgtggacactggagtctggaataaatgctgtttgtcacatcaacaccaaaaaaa

SEQ ID NO: 736767 - DNA, 2184 bp, Homo sapiens
  misc_feature (2176)..(2176): n is a, c, g, or t
accgaccgctcgggagctcgcccccgcctagcctcggctgagatgcagggctctgagctccaggtcacaatgcacgacacccggggccgcagtcccccataccagctggactcccaggggcgcctggtgctggctgaggccaggtggcgacgagcgagactacgtgtgcgtggtgagggcaggggcggcaggcactgctgaggccactgcgcggctcaacgtgtttgcaaagccagaggccactgaggtctcccccaacaaagggacactgtctgtgatggaggactctgcccaggagatcgccacctgcaacagccggaacgggaacccggcccccaagatcacgtggtatcgcaacgggcagcgcctggaggtgcccgtagagatgaacccagagggctacatgaccagccgcacggtccgggaggcctcgggcctgctctccctcaccagcaccctctacctgcggctccgcaaggatgaccgagacgccagcttccactgcgccgcccactacagcctgcccgagggccgccacggccgcctggacagccccaccttccacctcaccctgcactatcccacggagcacgtgcagttctgggtgggcagcccgtccaccccagcaggctgggtacgcgagggtgacactgtccagctgctctgccggggggacggcagccccagcccggagtatacgcttttccgccttcaggatgagcaggaggaagtgctgaatgtgaatctcgaggggaacttgaccctggagggagtgacccggggccagagcgggacctatggctgcagagtggaggattacgacgcggcagatgacgtgcagctctccaagacgctggagctgcgcgtggcctatctggaccccctggagctcagcgaggggaaggtgctttccttacctctaaacagcagtgcagtcgtgaactgctccgtgcacggcctgcccacccctgccctacgctggaccaaggactccactcccctgggcgatggccccatgctgtcgctcagttctatcaccttcgattccaatggcacctacgtatgtgaggcctccctgcccacagtcccggtcctcagccgcacccagaacttcacgctgctggtccaaggctcgccagagctaaagacagcggaaatagagcccaaggcagatggcagctggagggaaggagacgaagtcacactcatctgctctgcccgcggccatccagaccccaaactcagctggagccaattggggggcagccccgcagagccaatccccggacggcagggttgggtgagcagctctctgaccctgaaagtgaccagcgccctgagccgcgatggcatctcctgtgaagcctccaacccccacgggaacaagcgccatgtcttccacttcggcaccgtgagcccccagacctcccaggctggagtggccgtcatggccgtggccgtcagcgtgggcctcctgctcctcgtcgttgctgtcttctactgcgtgagacgcaaagggggcccctgctgccgccagcggcgggagaagggggctccgccgccaggggagccagggctgagccactcggggtcggagcaaccagagcagaccggccttctcatgggaggtgcctccggaggagccaggggtggcagcgggggcttcggagacgagtgctgagccaagaacctcctagaggctgtccctggacctggagctgcaggcatcagagaaccagccctgctcacgccatgcccgcccccgccttccctcttccctcttccctctccctgcccagccctcccttccttcctctgccggcaaggcagggacccacagtggctgcctgcctccgggagggaagggagagggagggtgggtgggtgggagggggccttcctccagggaatgtgactctcccaggccccagaatagctcctggacccaagcccaaggcccagcctgggacaaggctccgagggtcggctggccggagctatttttacctcccgcctcccctgctggtccccccacctgacgtcttgctgcagagtctgacactggattccccccccctcagttcacagtggagactatggagattcagggcaggatccctcaggtacaagaaacaccttccgaagattttgctctccttccttccctccctcttgncaactccc

SEQ ID NO: 736768 - DNA, 2424 bp, Homo sapiens
  misc_feature (2099)..(2099): n is a, c, g, or t
  misc_feature (2101)..(2101): n is a, c, g, or t
accgaccgctcgggagctcgcccccgcctagcctcggctgagatgcagggctctgagctccaggtcacaatgcacgacacccggggccgcagtcccccataccagctggactcccaggggcgcctggtgctggctgaggccaggtggcgacgagcgagactacgtgtgcgtggtgagggcaggggcggcaggcactgctgaggccactgcgcggctcaacgtgtttgcaaagccagaggccactgaggtctcccccaacaaagggacactgtctgtgatggaggactctgcccaggagatcgccacctgcaacagccggaacgggaacccggcccccaagatcacgtggtatcgcaacgggcagcgcctggaggtgcccgtagagatgaacccagagggctacatgaccagccgcacggtccgggaggcctcgggcctgctctccctcaccagcaccctctacctgcggctccgcaaggatgaccgagacgccagcttccactgcgccgcccactacagcctgcccgagggccgccacggccgcctggacagccccaccttccacctcaccctgcactatcccacggagcacgtgcagttctgggtgggcagcccgtccaccccagcaggctgggtacgcgagggtgacactgtccagctgctctgccggggggacggcagccccagcccggagtatacgcttttccgccttcaggatgagcaggaggaagtgctgaatgtgaatctcgaggggaacttgaccctggagggagtgacccggggccagagcgggacctatggctgcagagtggaggattacgacgcggcagatgacgtgcagctctccaagacgctggagctgcgcgtggcctatctggaccccctggagctcagcgaggggaaggtgctttccttacctctaaacagcagtgcagtcgtgaactgctccgtgcacggcctgcccacccctgccctacgctggaccaaggactccactcccctgggcgatggccccatgctgtcgctcagttctatcaccttcgattccaatggcacctacgtatgtgaggcctccctgcccacagtcccggtcctcagccgcacccagaacttcacgctgctggtccaaggctcgccagagctaaagacagcggaaatagagcccaaggcagatggcagctggagggaaggagacgaagtcacactcatctgctctgcccgcggccatccagaccccaaactcagctggagccaattggggggcagccccgcagagccaatccccggacggcagggttgggtgagcagctctctgaccctgaaagtgaccagcgccctgagccgcgatggcatctcctgtgaagcctccaacccccacgggaacaagcgccatgtcttccacttcggcaccgtgagcccccagacctcccaggctggagtggccgtcatggccgtggccgtcagcgtgggcctcctgctcctcgtcgttgctgtcttctactgcgtgagacgcaaagggggcccctgctgccgccagcggcgggagaagggggctccgccgccaggggagccagggctgagccactcggggtcggagcaaccagagcagaccggccttctcatgggaggtgcctccggaggagccaggggtggcagcgggggcttcggagacgagtgctgagccaagaacctcctagaggctgtccctggacctggagctgcaggcatcagagaaccagccctgctcacgccatgcccgcccccgccttccctcttccctcttccctctccctgcccagccctcccttccttcctctgccggcaaggcagggacccacagtggctgcctgcctccgggagggaagggagagggagggtgggtgggtgggagggggccttcctccagggaatgtgactctcccaggccccagaatagctcctggacccaagcccaaggcccagcctgggacaaggctccgagggtcggctggccggagctatttttacctcccgcctcccctgctggtccccccacctgacgtcttgctgcagagtctgacactggattcccccccctttccgcttccctttttcttatncnctagcccacactttttagaatgaggtctgtcatatacttgattacatatgaaatctcagatgccaattttgtttaatgtgtcatatcttttgtttttccccctcccttctaatcccccaaaggacctatttgagctgttccccaattcatctgcttattttggaccatgaatctgccagagtgatattttctgttatttctcctccaaatttttccctgatgtttccaataaagatttacttgggtggcccttaaggtggcatcaggatgctcttatgtccttccagaattagcatacacttcactccgctccccttcatctc

SEQ ID NO: 736769 - DNA, 2121 bp, Homo sapiens
  misc_feature (1895)..(1896): n is a, c, g, or t
accgaccgctcgggagctcgcccccgcctagcctcggctgagatgcagggctctgagctccaggtcacaatgcacgacacccggggccgcagtcccccataccagctggactcccaggggcgcctggtgctggctgaggccaggtggcgacgagcgagactacgtgtgcgtggtgagggcaggggcggcaggcactgctgaggccactgcgcggctcaacgtgtttgcaaagccagaggccactgaggtctcccccaacaaagggacactgtctgtgatggaggactctgcccaggagatcgccacctgcaacagccggaacgggaacccggcccccaagatcacgtggtatcgcaacgggcagcgcctggaggtgcccgtagagatgaacccagagggctacatgaccagccgcacggtccgggaggcctcgggcctgctctccctcaccagcaccctctacctgcggctccgcaaggatgaccgagacgccagcttccactgcgccgcccactacagcctgcccgagggccgccacggccgcctggacagccccaccttccacctcaccctgcactatcccacggagcacgtgcagttctgggtgggcagcccgtccaccccagcaggctgggtacgcgagggtgacactgtccagctgctctgccggggggacggcagccccagcccggagtatacgcttttccgccttcaggatgagcaggaggaagtgctgaatgtgaatctcgaggggaacttgaccctggagggagtgacccggggccagagcgggacctatggctgcagagtggaggattacgacgcggcagatgacgtgcagctctccaagacgctggagctgcgcgtggcctatctggaccccctggagctcagcgaggggaaggtgctttccttacctctaaacagcagtgcagtcgtgaactgctccgtgcacggcctgcccacccctgccctacgctggaccaaggactccactcccctgggcgatggccccatgctgtcgctcagttctatcaccttcgattccaatggcacctacgtatgtgaggcctccctgcccacagtcccggtcctcagccgcacccagaacttcacgctgctggtccaaggctcgccagagctaaagacagcggaaatagagcccaaggcagatggcagctggagggaaggagacgaagtcacactcatctgctctgcccgcggccatccagaccccaaactcagctggagccaattggggggcagccccgcagagccaatccccggacggcagggttgggtgagcagctctctgaccctgaaagtgaccagcgccctgagccgcgatggcatctcctgtgaagcctccaacccccacgggaacaagcgccatgtcttccacttcggcaccgtgagcccccagacctcccaggctggagtggccgtcatggccgtggccgtcagcgtgggcctcctgctcctcgtcgttgctgtcttctactgcgtgagacgcaaagggggcccctgctgccgccagcggcgggagaagggggctccgccgccaggggagccagggctgagccactcggggtcggagcaaccagagcagaccggccttctcatgggaggtgcctccggaggagccaggggtggcagcgggggcttcggagacgagtgctgagccaagaacctcctagaggctgtccctggacctggagctgcaggcatcagagaaccagccctgctcacgccatgcccgcccccgccttccctcttccctcttccctctccctgcccagccctcccttccttcctctgccggcaaggcagggacccacagtggctgcctgcctccgggagggaagggagagggagggtgggtgggtggcccccanncacgcaagttttcactgggtcttacccgacgtgagcccccactcctccatatggacctgttttggaccaatgaggcatcctcttctgtagtcctcaacacgcggagctccaccactcctgagcagtgtgacctcaggtgcttgctgcagaggcatcgggggtctctggccagaggtgacatctgaagcaatcgggatcctgtttggttttgccacatccgacctg

SEQ ID NO: 736770 - DNA, 1844 bp, Homo sapiens
accgaccgctcgggagctcgcccccgcctagcctcggctgagatgcagggctctgagctccaggtcacaatgcacgacacccggggccgcagtcccccataccagctggactcccaggggcgcctggtgctggctgaggccaggtggcgacgagcgagactacgtgtgcgtggtgagggcaggggcggcaggcactgctgaggccactgcgcggctcaacgtgtttgcaaagccagaggccactgaggtctcccccaacaaagggacactgtctgtgatggaggactctgcccaggagatcgccacctgcaacagccggaacgggaacccggcccccaagatcacgtggtatcgcaacgggcagcgcctggaggtgcccgtagagatgaacccagagggctacatgaccagccgcacggtccgggaggcctcgggcctgctctccctcaccagcaccctctacctgcggctccgcaaggatgaccgagacgccagcttccactgcgccgcccactacagcctgcccgagggccgccacggccgcctggacagccccaccttccacctcaccctgcactatcccacggagcacgtgcagttctgggtgggcagcccgtccaccccagcaggctgggtacgcgagggtgacactgtccagctgctctgccggggggacggcagccccagcccggagtatacgcttttccgccttcaggatgagcaggaggaagtgctgaatgtgaatctcgaggggaacttgaccctggagggagtgacccggggccagagcgggacctatggctgcagagtggaggattacgacgcggcagatgacgtgcagctctccaagacgctggagctgcgcgtggcctatctggaccccctggagctcagcgaggggaaggtgctttccttacctctaaacagcagtgcagtcgtgaactgctccgtgcacggcctgcccacccctgccctacgctggaccaaggactccactcccctgggcgatggccccatgctgtcgctcagttctatcaccttcgattccaatggcacctacgtatgtgaggcctccctgcccacagtcccggtcctcagccgcacccagaacttcacgctgctggtccaaggctcgccagagctaaagacagcggaaatagagcccaaggcagatggcagctggagggaaggagacgaagtcacactcatctgctctgcccgcggccatccagaccccaaactcagctggagccaattggggggcagccccgcagagccaatccccggacggcagggttgggtgagcagctctctgaccctgaaagtgaccagcgccctgagccgcgatggcatctcctgtgaagcctccaacccccacgggaacaagcgccatgtcttccacttcggcaccgtgagcccccagacctcccaggctggagtggccgtcatggccgtggccgtcagcgtgggcctcctgctcctcgtcgttgctgtcttctactgcgtgagacgcaaagggggcccctgctgccgccagcggcgggagaagggggctccgccgccaggggagccagggctgagccactcggggtcggagcaaccagagcagaccggccttctcatgggaggtgcctccggaggagccaggggtggcagcgggggcttcggagacgagctgctggtccccccacctgacgtcttgctgcagagtctgacactggattcccccccctcaccccgcccctggtcccactcctgcccccgccctacctccgccccaccccatcatctgtggacactggagtctggaataaatgctgtttgtcacatcaacaccaaaaaaa

SEQ ID NO: 736771 - DNA, 1469 bp, Homo sapiens
accgaccgctcgggagctcgcccccgcctagcctcggctgagatgcagggctctgagctccaggtcacaatgcacgacacccggggccgcagtcccccataccagctggactcccaggggcgcctggtgctggctgaggccaggtggcgacgagcgagactacgtgtgcgtggtgagggcaggggcggcaggcactgctgaggccactgcgcggctcaacgtgtttgcaaagccagaggccactgaggtctcccccaacaaagggacactgtctgtgatggaggactctgcccaggagatcgccacctgcaacagccggaacgggaacccggcccccaagatcacgtggtatcgcaacgggcagcgcctggaggtgcccgtagagatgaacccagagggctacatgaccagccgcacggtccgggaggcctcgggcctgctctccctcaccagcaccctctacctgcggctccgcaaggatgaccgagacgccagcttccactgcgccgcccactacagcctgcccgagggccgccacggccgcctggacagccccaccttccacctcaccctgcactatcccacggagcacgtgcagttctgggtgggcagcccgtccaccccagcaggctgggtacgcgagggtgacactgtccagctgctctgccggggggacggcagccccagcccggagtatacgcttttccgccttcaggatgagcaggaggaagtgctgaatgtgaatctcgaggggaacttgaccctggagggagtgacccggggccagagcgggacctatggctgcagagtggaggattacgacgcggcagatgacgtgcagctctccaagacgctggagctgcgcgtggcctatctggaccccctggagctcagcgaggggaaggtgctttccttacctctaaacagcagtgcagtcgtgaactgctccgtgcacggcctgcccacccctgccctacgctggaccaaggactccactcccctgggcgatggccccatgctgtcgctcagttctatcaccttcgattccaatggcacctacgtatgtgaggcctccctgcccacagtcccggtcctcagccgcacccagaacttcacgctgctggtccaaggctcgccagagctaaagacagcggaaatagagcccaaggcagatggcagctggagggaaggagacgaagtcacactcatctgctctgcccgcggccatccagaccccaaactcagctggagccaattggggggcagccccgcagagccaatccccggacggcagggttgggtgagcagctctctgaccctgaaagtgaccagcgccctgagccgcgatggcatctcctgtgaagcctccaacccccacgggaacaagcgccatgtcttccacttcggcaccgtgagcccccacagagagagcgtcgacgctctctctgtggggtatctcactgcccagg

SEQ ID NO: 736772 - DNA, 2051 bp, Homo sapiens
accgaccgctcgggagctcgcccccgcctagcctcggctgagatgcagggctctgagctccaggtcacaatgcacgacacccggggccgcagtcccccataccagctggactcccaggggcgcctggtgctggctgaggccaggtggcgacgagcgagactacgtgtgcgtggtgagggcaggggcggcaggcactgctgaggccactgcgcggctcaacgtgtttgcaaagccagaggccactgaggtctcccccaacaaagggacactgtctgtgatggaggactctgcccaggagatcgccacctgcaacagccggaacgggaacccggcccccaagatcacgtggtatcgcaacgggcagcgcctggaggtgcccgtagagatgaacccagagggctacatgaccagccgcacggtccgggaggcctcgggcctgctctccctcaccagcaccctctacctgcggctccgcaaggatgaccgagacgccagcttccactgcgccgcccactacagcctgcccgagggccgccacggccgcctggacagccccaccttccacctcaccctgcactgatgagcaggaggaagtgctgaatgtgaatctcgaggggaacttgaccctggagggagtgacccggggccagagcgggacctatggctgcagagtggaggattacgacgcggcagatgacgtgcagctctccaagacgctggagctgcgcgtggcctatctggaccccctggagctcagcgaggggaaggtgctttccttacctctaaacagcagtgcagtcgtgaactgctccgtgcacggcctgcccacccctgccctacgctggaccaaggactccactcccctgggcgatggccccatgctgtcgctcagttctatcaccttcgattccaatggcacctacgtatgtgaggcctccctgcccacagtcccggtcctcagccgcacccagaacttcacgctgctggtccaaggctcgccagagctaaagacagcggaaatagagcccaaggcagatggcagctggagggaaggagacgaagtcacactcatctgctctgcccgcggccatccagaccccaaactcagctggagccaattggggggcagccccgcagagccaatccccggacggcagggttgggtgagcagctctctgaccctgaaagtgaccagcgccctgagccgcgatggcatctcctgtgaagcctccaacccccacgggaacaagcgccatgtcttccacttcggcaccgtgagcccccagacctcccaggctggagtggccgtcatggccgtggccgtcagcgtgggcctcctgctcctcgtcgttgctgtcttctactgcgtgagacgcaaagggggcccctgctgccgccagcggcgggagaagggggctccgccgccaggggagccagggctgagccactcggggtcggagcaaccagagcagaccggccttctcatgggaggtgcctccggaggagccaggggtggcagcgggggcttcggagacgagtgctgagccaagaacctcctagaggctgtccctggacctggagctgcaggcatcagagaaccagccctgctcacgccatgcccgcccccgccttccctcttccctcttccctctccctgcccagccctcccttccttcctctgccggcaaggcagggacccacagtggctgcctgcctccgggagggaagggagagggagggtgggtgggtgggagggggccttcctccagggaatgtgactctcccaggccccagaatagctcctggacccaagcccaaggcccagcctgggacaaggctccgagggtcggctggccggagctatttttacctcccgcctcccctgctggtccccccacctgacgtcttgctgcagagtctgacactggattcccccccctcaccccgcccctggtcccactcctgcccccgccctacctccgccccaccccatcatctgtggacactggagtctggaataaatgctgtttgtcacatcaacaccaaaaaaa

SEQ ID NO: 736773 - DNA, 629 bp, Homo sapiens
accgaccgctcgggagctcgcccccgcctagcctcggctgagatgcagggctctgagctccaggtcacaatgcacgacacccggggccgcagtcccccataccagctggactcccaggggcgcctggtgctggctgaggccaggtggcgacgagcgagactacgtgtgcgtggtgagggcaggggcggcaggcactgctgaggccactgcgcggctcaacgtgtttgcaaagccagaggccactgaggtctcccccaacaaagggacactgtctgtgatggaggactctgcccaggagatcgccacctgcaacagccggaacgggaacccggcccccaagatcacgtggtatcgcaacgggcagcgcctggaggtgcccgtagagatgaacccagagggctacatgaccagccgcacggtccgggaggcctcgggcctgctctccctcaccagcaccctctacctgcggctccgcaaggatgaccgagacgccagcttccactgcgccgcccactacagcctgcccgagggccgccacggccgcctggacagccccaccttccacctcaccctgcactatctcacggaacagctacagatctatgattgcgcagtcgagcacgtacacc

SEQ ID NO: 736774 - DNA, 1544 bp, Homo sapiens
gccctgaaaggggaaagactgtgcaagctgccggtctagcttcggaaacgatacgtattgtacgatagttacgaacgatacgtactgtcgtttccttcctacctcgtcctcaccccaccccgagtgaaacttttcgagtgtgaaccttacttttttcccgttctcctcaaggcagtttgaacgacacaggtttggaaggaatagttaactctccagtattactggaacatctggaccccctggagctcagcgaggggaaggtgctttccttacctctaaacagcagtgcagtcgtgaactgctccgtgcacggcctgcccacccctgccctacgctggaccaaggactccactcccctgggcgatggccccatgctgtcgctcagttctatcaccttcgattccaatggcacctacgtatgtgaggcctccctgcccacagtcccggtcctcagccgcacccagaacttcacgctgctggtccaaggctcgccagagctaaagacagcggaaatagagcccaaggcagatggcagctggagggaaggagacgaagtcacactcatctgctctgcccgcggccatccagaccccaaactcagctggagccaattggggggcagccccgcagagccaatccccggacggcagggttgggtgagcagctctctgaccctgaaagtgaccagcgccctgagccgcgatggcatctcctgtgaagcctccaacccccacgggaacaagcgccatgtcttccacttcggcaccgtgagcccccagacctcccaggctggagtggccgtcatggccgtggccgtcagcgtgggcctcctgctcctcgtcgttgctgtcttctactgcgtgagacgcaaagggggcccctgctgccgccagcggcgggagaagggggctccgccgccaggggagccagggctgagccactcggggtcggagcaaccagagcagaccggccttctcatgggaggtgcctccggaggagccaggggtggcagcgggggcttcggagacgagtgctgagccaagaacctcctagaggctgtccctggacctggagctgcaggcatcagagaaccagccctgctcacgccatgcccgcccccgccttccctcttccctcttccctctccctgcccagccctcccttccttcctctgccggcaaggcagggacccacagtggctgcctgcctccgggagggaagggagagggagggtgggtgggtgggagggggccttcctccagggaatgtgactctcccaggccccagaatagctcctggacccaagcccaaggcccagcctgggacaaggctccgagggtcggctggccggagctatttttacctcccgcctcccctgctggtccccccacctgacgtcttgctgcagagtctgacactggattcccccccctcaccccgcccctggtcccactcctgcccccgccctacctccgccccaccccatcatctgtggacactggagtctggaataaatgctgtttgtcacatcaacaccaaaaaaa

SEQ ID NO: 736775 - DNA, 3475 bp, Homo sapiens
  misc_feature (389)..(389): n is a, c, g, or t
  misc_feature (2084)..(2084): n is a, c, g, or t
  misc_feature (2189)..(2189): n is a, c, g, or t
acagccgggaacgcgcctcgcggatgacaacaaattcgtcgcgcggcggcagtggcggtggctgcctcagcccctgccgcctcctctcgcgctctcttgcactctctccgagccggttgggaccctcctcggaagtcccctggcctggggccaggaggacccctctgcgtcttgcctccgccaggcccagcgcgagcggtgcggcgccggcgatggggtctccctgagggactcccggcaccaaatagggatggaggggccgccccaggcttaggccccgccgcggcctggagccggagtcgctaccccgaggccggagccgtcgcaacccgcagccgcagtcagcccagctgccagcagtcactatgccttggccgttttcggagtcnatcaagaagagggcctgccggtacctcctgcagaggtacctgggccactttctgcaggagaagctgagcctggagcagctcagcctggacctgtaccaaggcaccgggtccctcgcccaggtccccttggacaaatggtgtctcaatgagatcttggagtcagcagatgcacccttagaagtcactgaaggattcattcagtcaatttccctgtcagttccatggggctctttactgcaggataattgtgcactggaagtgagaggattagaaatggtcttccggcctagacctcgcccagcaactggttctgagcctatgtattggtcaagttttatgaccagcagtatgcaattggcaaaagaatgtcttagccagaaactaacagatgaacaaggagaaggatcccagccttttgaaggacttgaaaagtttgctgaaaccattgaaacagtactaagaagagtaaaagtcacttttatagatactgttttgagaattgaacatgtgccagaaaattccaaaactggaactgcacttgaaattcgaatagaaagaactgtgtactgtgatgaaactgctgacgaatcctcaggaattaatgtgcatcaacccactgcttttgctcacaagttacttcagctctctggagtgtctctcttctgggatgagttttctgcatcagccaaatcttccccagtgtgttcaactgcaccagtggaaactgagccaaagctctcacctagctggaaccccaaaattatttatgagccacacccacagctaactagaaatttaccagagatagcaccttctgacccagtgcagattggacggttaattggtaggttggagttgagtctcacgttgaaacagaatgaagtgcttcctggagctaagttggatgttgatggacagatagactctattcatctactcctgtcaccaagacaggtgcacttgcttttggatatgttggcagctattgctggaccagaaaattctagcaaaatagggttagctaataaagataggaaaaatcgacccatgcagcaggaagacgagtatcgaattcagatggaattaaaccggtattatttgagaaaagattccctctctgtgggtgtatcttcagagcaaagcttttatgagacagaaacagctcgtacaccttctagccgtgaagaagaagtattcttctccatggctgatatggacatgtctcatagtctctcttctcttccaccccttggggaccccccaaacatggaccttgagttatcattaactagtacatatacaaataccccagcaggatctccattaagtgctactgtgcttcagcccacttggggagagttccttgatcatcataaagaacagccagtaagagggtcaacatttccatccaacctagttcacccaacacctttacagaagacatctctcccatctagatctgtttcagtggatgaatcaaggcctgaacttatttttagactagctgtgggaactttttcaatctctgtgcttcacattgatcctttatctccacctgaaacgtcacagaaccttaatccattgacacctatggcagtagctttctttacttgtatagaaaagattgatccagcaagattttcaacagaagattttaagtctttccgagcagtgtttgcagaagcttgctcacangatcaccttagatttataggtactggcattaaagtatcctatgaacaaagacaaagatcagcttcccgatattttagtactgatatgtccattgggcaaatggantttttggagtgcctatttccaactgattttcattctgttcctcctcactatacagagcttttaacgttccattccaaagaagaaactggttcccattcccctgtgtgtcttcagcttcattataagcattctgagaatagagggccccagggtaatcaagcaagacttagttcagttcctcacaaggcagaattgcaaattaaattaaatccagtgtgttgtgagctggatatcagtattgtggacaggttaaattccttgcttcaaccacagaaacttgccacagtagagatgatggcatcccacatgtatacttcatataataaacatattagtctgcacaaggctttcactgaagtgtttctagatgattcacatagtcctgcaaattgtcggatatcagtacaagttgccacaccagcattaaacctttctgttcgcttcccaatacctgatcttcgatctgatcaagaaagaggaccatggtttaagaagtcacttcagaaggagatcctttatttagccttcacagatctagaatttaagactgaatttataggaggatcaaccccagaacaaattaaattggaacttacctttagagaactaattggatcgttccaggaagagaaaggagatccatctattaagtttttccatgtgtctagtggagtagatggagatacaacatcgtcagatgactttgactggccacgaattgtactgaaaataaatccaccagccatgcattccattttggagagaattgcagctgaagaagaagaggagaatgatggtcactaccaggaggaagaggaaggaggtgctcattccttgaaagatgtttgtgatctaagaagaccagccccatctcctttttcttctcgtagagtaatgtttgaaaatgaacagatggtgatgccaggagaccctgtagaaatgacagaatttcaggataaagcaatcagcaattctcactatgtgctggaacttacgttaccaaatatttatgtaacactacctaataagagcttttatgagaagctttataataggatctttaatgacttgctactgtgggaaccaacagctccttcaccagtggagacattcgagaatatttcctatggcattgggctttcagtagccagtcagctcattaatactttcaacaaagatagttttagtgcatttaaatctgcagttcactatgatgaggaaagtggatctgaggaggagactttgcagtatttttccactgttgatcccaactatcgttctcgcag

SEQ ID NO: 736776 - DNA, 1348 bp, Homo sapiens
  misc_feature (389)..(389): n is a, c, g, or t
acagccgggaacgcgcctcgcggatgacaacaaattcgtcgcgcggcggcagtggcggtggctgcctcagcccctgccgcctcctctcgcgctctcttgcactctctccgagccggttgggaccctcctcggaagtcccctggcctggggccaggaggacccctctgcgtcttgcctccgccaggcccagcgcgagcggtgcggcgccggcgatggggtctccctgagggactcccggcaccaaatagggatggaggggccgccccaggcttaggccccgccgcggcctggagccggagtcgctaccccgaggccggagccgtcgcaacccgcagccgcagtcagcccagctgccagcagtcactatgccttggccgttttcggagtcnatcaagaagagggcctgccggtacctcctgcagaggtacctgggccactttctgcaggagaagctgagcctggagcagctcagcctggacctgtaccaaggcaccgggtccctcgcccaggtccccttggacaaatggtgtctcaatgagatcttggagtcagcagatgcacccttagaagtcactgaaggattcattcagtcaatttccctgtcagttccatggggctctttactgcaggataattgtgcactggaagtgagaggattagaaatggtcttccggcctagacctcgcccagcaactggttctgagcctatgtattggtcaagttttatgaccagcagtatgcaattggcaaaagaatgtcttagccagaaactaacagatgaacaaggagaaggatcccagccttttgaaggacttgaaaagtttgctgaaaccattgaaacagtactaagaagagtaaaagtcacttttatagatactgttttgagaattgaacatgtgccagaaaattccaaaactggaactgcacttgaaattcgaatagaaagaactgtgtactgtgatgaaactgctgacgaatcctcaggaattaatgtgcatcaacccactgcttttgctcacaagttacttcagctctctggagtgtctctcttctgggatgagttttctgcatcagccaaatcttccccagtgtgttcaactgcaccagtggaaactgagccaaagctctcacctagctggaaccccaaaattatttatgagccacacccacagctaactagaaatttaccagagatagcaccttctgacccagtgcagattggacggttaattggtaggttggagttgagtctcacgttgaaacagaatgaagtgcttcctggagctaaggtcagtgtttgtttcactttctgtagtaaaaccaaaataaaagtacaagtattctttat

SEQ ID NO: 736777 - DNA, 4937 bp, Homo sapiens
cgcggtgctctcgctcctgggctgcgccagtccgaggcggtgccggctcctttgcctccccgagtcgcagatgctgcgggcgcctccgggaaaagatctgggcggcgcgctcgctcgatggacacaggaagatccagaagctagtggcacatctagcaacagagccagatcagaacccaggcaagaagtgcacgtttaaacctcattatctggctaagtataaacctcagggagaaaaggggtttgtttttgtttttctcagtctataagctaacattgagctgactttcagagtccaggcaaatatgtttggtgggtcaccacccagaaaggaattctcttagcactgaatcagggctctgtatgtaaagtataaatcccctaagagaactcctcaccctcctacacagacacattggtgcatgcacacacaccccactctctgcacagagagcatctgagctaggagctggcaagtggggcaccagtcctgtagcaaagaggcacaccacacacacacacacacacacacacacacactctctctctctctctctctcactcacacacacacacacacacacacacacacgcttctcccttgcttgggaatctgggagaagaaccccccacccccacccctgccctccataggcattgtgtaggtgagagaaagagggaggagtgagagagaacacacagaggggcccaaggaggtgccaggccattagcagggcccctccttgagaaacccctctgcaggagcttctcctgccgccagccaggttggaggtggagtagttcagaatcaactgacgcagccgggaattgagctttgcaaagccacttgcaaggaagggaagcatctgcccaaccctcccccaccgcgcgccctggatcctctgcctgccccctcccccgtgacgtcaccctagtcctgtcccggggagcctgcaaagcctctcagattcaaactgctagacgcactgctgccaccgccaccgaattggaaacgcgcgcccaggctccgtcgtcgccttcgcccgccgaccgggccagccggctctccgacctccctacagaatcgcaccccagtccctccctggcagctcggcttccctcagctccaactcttctcttccgctcctgcctcctgtcggatttttaatttctgcgcacccccagtcaaattaaatcaaccaacaaaaagcagggcatcccccctggaagcagcgtcttattttaccttgttctcccacttcctgaagatgctaaactcctggtggactgcagaggagagggattcagtcttctcctgatgtcgattgcgatttctgctgggagctcaagacgggcgagctgcccgagatctcttcgagataccccaggggaggaggagatgggcaggatttagtaggacaactcggttactaatgacttggcggctggctgcgaccccccgggaaatcaggtttgcctgtaggtacctgagttgacaccgaaggtgcctaaagatgctgagcggcgtttggttcctcagtgtgttaaccgtggccgggatcttacagacagagagtcgcaaaactgccaaagacatttgcaagatccgctgtctgtgcgaagaaaaggaaaacgtactgaatatcaactgtgagaacaaaggatttacaacagttagcctgctccagcccccccagtatcgaatctatcagctttttctcaatggaaacctcttgacaagactgtatccaaacgaatttgtcaattactccaacgcggtgactcttcacctaggtaacaacgggttacaggagatccgaacgggggcattcagtggcctgaaaactctcaaaagactgcatctcaacaacaacaagcttgagatattgagggaggacaccttcctaggcctggagagcctggagtatctccaggccgactacaattacatcagtgccatcgaggctggggcattcagcaaacttaacaagctcaaagtgctcatcctgaatgacaaccttctgctttcactgcccagcaatgtgttccgctttgtcctgctgacccacttagacctcagggggaataggctaaaagtaatgccttttgctggcgtccttgaacatattggagggatcatggagattcagctggaggaaaatccatggaattgcacttgtgacttacttcctctcaaggcctggctagacaccataactgtttttgtgggagagattgtctgtgagactccctttaggttgcatgggaaagacgtgacccagctgaccaggcaagacctctgtcccagaaaaagtgccagtgattccagtcagaggggcagccatgctgacacccacgtccaaaggctgtcacctacaatgaatcctgctctcaacccaaccagggctccgaaagccagccggccgcccaaaatgagaaatcgtccaactcctcgagtgactgtgtcaaaggacaggcaaagttttggacccatcatggtgtaccagaccaagtctcctgtgcctctcacctgtcccagcagctgtgtctgcacctctcagagctcagacaatggtctgaatgtaaactgccaagaaaggaagttcactaatatctctgacctgcagcccaaaccgaccagtccaaagaaactctacctaacagggaactatcttcaaactgtctataagaatgacctcttagaatacagttctttggacttactgcacttaggaaacaacaggattgcagtcattcaggaaggtgcctttacaaacctgaccagtttacgcagactttatctgaatggcaattaccttgaagtgctgtacccttctatgtttgatggactgcagagcttgcaatatctctatttagagtataatgtcattaaggaaattaagcctctgacctttgatgctttgattaacctacagctactgtttctgaacaacaaccttcttcggtccttacctgataatatatttggggggacggccctaaccaggctgaatctgagaaacaaccatttttctcacctgcccgtgaaaggggttctggatcagctcccggctttcatccagatagatctgcaggagaacccctgggactgtacctgtgacatcatggggctgaaagactggacagaacatgccaattcccctgtcatcattaatgaggtgacttgcgaatctcctgctaagcatgcaggggagatactaaaatttctggggagggaggctatctgtccagacagcccaaacttgtcagatggaaccgtcttgtcaatgaatcacaatacagacacacctcggtcgcttagtgtgtctcctagttcctatcctgaactacacactgaagttccactgtctgtcttaattctgggattgcttgttgttttcatcttatctgtctgttttggggctggtttattcgtctttgtcttgaaacgccgaaagggagtgccgagcgttcccaggaataccaacaacttagacgtaagctcctttcaattacagtatgggtcttacaacactgagactcacgataaaacagacggccatgtctacaactatatccccccacctgtgggtcagatgtgccaaaaccccatctacatgcagaaggaaggagacccagtagcctattaccgaaacctgcaagagttcagctatagcaacctggaggagaaaaaagaagagccagccacacctgcttacacaataagtgccactgagctgctagaaaagcaggccacaccaagagagcctgagctgctgtatcaaaatattgctgagcgagtcaaggaacttcccagcgcaggcctagtccactataacttttgtaccttacctaaaaggcagtttgccccttcctatgaatctcgacgccaaaaccaagacagaatcaataaaaccgttttatatggaactcccaggaaatgctttgtggggcagtcaaaacccaaccaccctttactgcaagctaagccgcaatcagaaccggactacctcgaagttctggaaaaacaaactgcaatcagtcagctgtgaagggaaatcatttacaaccctaaggcatcagaggatgctgctccgaactgttggaaacaaggacattagcttttgtgtttgtttttgttctccctttcccagtgttaatgggggactttgaaaatgtttgggagataggatgaagtcatgattttgcttttgcaagttttcctttaaattatttctctctcgctctcctcccctccttttttttttttttttttttctttttcccttctcttcttaggaaccatcagtggacatgaatgtttctacaatgcatttcttcatagattttgtttatggttttgtttcttttttcttctttgtttttcagtgtgggagtgggaagaggagattatagtgactgaagaaagaataggcaaacttttcaaatgaaaatggatatttagtgtattttgtagaagatctccaaagatcttttgtgactacaacttcttttgtaaataatgatatatggtatttccatcgtcagttaccgagtatagccactgggtatcactactttgtgttaaagtgccttcgcactttaagtacattacttaaatgttgcttttagctttgataaattgaaaatattttaatgtgttgtatttttgaaattgaaaacactgtaaaatagattgatgtgtcagctatattaagtcaacgtacagtttgcttgagttatagaaaccagcctgtcatcaaatgattctagttctaggactttgtaggcttaactataaaatatttcctttcctctgggtttaagtgattttatttaagtcaactaaggggatttaacagtggactagaggtaataagccacctcagtcaggattaataattcattaataaaatatatttaacccaaaaaaaaag

SEQ ID NO: 736778 - DNA, 702 bp, Homo sapiens
tcaggattcggctttagctcgagttttttttttttttttttttctttttcccttctcttcttaggaaccatcagtggacatgaatgtttctacaatgcatttcttcatagattttgtttatggttttgtttcttttttcttctttgtttttcagtgtgggagtgggaagaggagattatagtgactgaagaaagaataggcaaacttttcaaatgaaaatggatatttagtgtattttgtagaagatctccaaagatcttttgtgactacaacttcttttgtaaataatgatatatggtatttccatcgtcagttaccgagtatagccactgggtatcactactttgtgttaaagtgccttcgcactttaagtacattacttaaatgttgcttttagctttgataaattgaaaatattttaatgtgttgtatttttgaaattgaaaacactgtaaaatagattgatgtgtcagctatattaagtcaacgtacagtttgcttgagttatagaaaccagcctgtcatcaaatgattctagttctaggactttgtaggcttaactataaaatatttcctttcctctgggtttaagtgattttatttaagtcaactaaggggatttaacagtggactagaggtaataagccacctcagtcaggattaataattcattaataaaatatatttaacccaaaaaaaaag

SEQ ID NO: 736779 - DNA, 7678 bp, Homo sapiens
gcggccgccctctaccctcaatccccactggagattcctcaccccgggaccgtccgcgcgggcgtggtcgggctccgcgcctcgcgcagcggggtggcacaggcggccagggagggcccacgcacccggcgcgagctagaagcctccggtcggcctgcagtgcccaagtcccatggcgagggcagcccgagtggccgtcgcggctgtaggtccgcatgccgggcaccgcaccaggcgtctagcaggtaggggcagggaaggtagggctgcgctggcggccggtgcccagttaccggcgatcggggacgctcggagacacctggtctcccggaagcgcccttcggaaatgggattcgacccggcttgcgggcggcgggtgtttagaagaagaggctgcgggcaagcagtgccccctctctggttccccggactcctcttagccccctcgtggcctgatgggcggccgggacggaggtgggctgtaagcccgccggcacccaccgtgtcctgtggaaggcttggagacctgagccaggctctactcggttagatgcgagtgagacaggcgacggagttcgtctttaagcctcccttgcctcagcaaggagagggagcgttttccttattttaatgaccgcctttccctcccttggggtcccagttcaccctgaacctttccacagccttaaaagcccgctctccctagcggagtgctgcggcagttcttcagaagacacggggccaaatgaaacttacttaaagtggttatcgcgtttcaggctgatttgttcctagtaactacgttttggaaagcagctgtggactctcaaggacaggcaggaacgaagacctccttagggtccgagtgtcgcttcccacagttagattacccatgaatttccttgattctgtaggtctcaagaatctcatgagcccccaaccacctccacctttctctctgaatctctctcctgtctctgaaattcttcgcaaaaataatctgtcctcaaggaatattgaaagcgtcatcaatgtcttgaaggaaattactgtatctgagaaccgaaactagtatttgatgtttcactttcaaatacatttttttttaataaaaaggatacctttaagtaaaacactaccactgctatttacgtttaagtagatttttaattcatattaagcagtagtgtgctttttggaaagatgatggactgggactcataatccctgggttttgtttctatttgtagtttcttgagtaagtcagcactttccctggttaagaaatgacctcatctgtaaaatgaacctgacttctaaggtcttgttcggctctcacgtctttacttcagttaaatattgacataatacatgtttgttgaatgaatgactgaatgaataaatcttattgctctaggaactatgtgcttttaacctttggaaatacatagaaacaaatgcctcctttgctaggaaagggagcttaattgtgctcccactgcatcagactgcttccatctaatgatgcaattgcaatacagggtgggaggccatccacagggctgtccctctgcctcagagctcatctcaagtttgcccttctctatggagaaggaaaatttgagtctccagaaggaaagtattttgctaaacgccaagcaagaattagagggtaagggggcttctgatgcctggtccaaggctcttagaagaagaagaaggagaaagggagaaagctcaagaaaataatgcacagatcaccagctacaggtggccctagtgcctaagtttataaactacccccgcccttcccggagagaaaggagcttgtataaagggaacaatcctagaacctaggcttaacaaggaaggagaaggggagaagcaagggtcattctgttctcaagtggtttgttgtatctgtgtgtttatctattccacatttggccaggcagtgggactccgggaaagcaagctgaagtgttttgtgggacaggcacatcatttggtcaactccttttccctggttgattccctccttttcctgacccatctcccccttcctaccagaggcaaccaaggcctttccaggcaacagcagacattatttaccccttgcgaattgattccacaatggaagactcttgggtccaaggagctgtaagataattaaggagaaaacagataatgaaggcaaaaatccaacacctggccattagcaatgctctggaaaggctatttaaacccgcattggatatcagagctgggagggcccatacagtctacctacctgccttttgcagatggacacaggaagatccagaagctagtggcacatctagcaacagagccagatcagaacccaggtaagctcggtctcaggccaggattccttttccatctcctctctttctcaggagccagtcttcctgcaccagcttcctcttttctcctagctcccctgcccctgcagcctggagggctcaaccacccttcctttggctcccactcccagctgaggctcagcctggcagtgcttttctgacacccacttcttttctccttcctccaggcaagaagtgcacgtttaaacctcattatctggctaagtataaacctcagggagaaaaggggtttgtttttgtttttctcagtctataagctaacattgagctgactttcagagtccaggcaaatatgtttggtgggtcaccacccagaaaggaattctcttagcactgaatcagggctctgtatgtaaagtataaatcccctaagagaactcctcaccctcctacacagacacattggtgcatgcacacacaccccactctctgcacagagagcatctgagctaggagctggcaagtggggcaccagtcctgtagcaaagaggcacaccacacacacacacacacacacacacacacactctctctctctctctctctcactcacacacacacacacacacacacacacacgcttctcccttgcttgggaatctgggagaagaaccccccacccccacccctgccctccataggcattgtgtaggtgagagaaagagggaggagtgagagagaacacacagaggggcccaaggaggtgccaggccattagcagggcccctccttgagaaacccctctgcaggagcttctcctgccgccagccaggttggaggtggagtagttcagaatcaactgacgcagccgggaattgagctttgcaaagccacttgcaaggaagggaagcatctgcccaaccctcccccaccgcgcgccctggatcctctgcctgccccctcccccgtgacgtcaccctagtcctgtcccggggagcctgcaaagcctctcagattcaaactgctagacgcactgctgccaccgccaccgaattggaaacgcgcgcccaggctccgtcgtcgccttcgcccgccgaccgggccagccggctctccgacctccctacagaatcgcaccccagtccctccctggcagctcggcttccctcagctccaactcttctcttccgctcctgcctcctgtcggatttttaatttctgcgcacccccagtcaaattaaatcaaccaacaaaaagcagggcatcccccctggaagcagcgtcttattttaccttgttctcccacttcctgaagatgctaaactcctggtggactgcagaggagagggattcagtcttctcctgatgtgtgagtaacccccacctcgcactgtctttcccatctctatctctcctctacacctgccgccagccccctgattcctgattttcccaccccctttttgcgctttttttttttttcctaaagcgattgcgatttctgctgggagctcaagacgggcgagctgcccgagatctcttcgagataccccaggggaggaggagatgggcaggatttagtaggacaactcggttactaatgacttggcggctggctgcgaccccccgggaaatcaggtgcaagcatgtgtgttcccggggcgcgtgtgtgggtggcctcgggatgggggaatagggagcggagaaaagaaaccgctttggaaaatgcaatgatttcattctgccgtgttgctaaccccctcattctccctcgctcccactccgcctccttgctttaccatttttaatcgggcttccttgtttctttcttccctgcacccgcttcttccccctgcccccacctaaggtttgcctgtaggtacctgagttgacaccgaaggtgcctaaagatgctgagcggcgtttggttcctcagtgtgttaaccgtggccgggatcttacagacagagagtcgcaaaactgccaaagacatttgcaagatccgctgtctgtgcgaagaaaaggaaaacgtactgaatatcaactgtgagaacaaaggatttacaacagttagcctgctccagcccccccagtatcgaatctatcagctttttctcaatggaaacctcttgacaagactgtatccaaacgaatttgtcaattactccaacgcggtgactcttcacctaggtaacaacgggttacaggagatccgaacgggggcattcagtggcctgaaaactctcaaaagactgcatctcaacaacaacaagcttgagatattgagggaggacaccttcctaggcctggagagcctggagtatctccaggccgactacaattacatcagtgccatcgaggctggggcattcagcaaacttaacaagctcaaagtgctcatcctgaatgacaaccttctgctttcactgcccagcaatgtgttccgctttgtcctgctgacccacttagacctcagggggaataggctaaaagtaatgccttttgctggcgtccttgaacatattggagggatcatggagattcagctggaggaaaatccatggaattgcacttgtgacttacttcctctcaaggcctggctagacaccataactgtttttgtgggagagattgtctgtgagactccctttaggttgcatgggaaagacgtgacccagctgaccaggcaagacctctgtcccagaaaaagtgccagtgattccagtcagaggggcagccatgctgacacccacgtccaaaggctgtcacctacaatgaatcctgctctcaacccaaccagggctccgaaagccagccggccgcccaaaatgagaaatcgtccaactcctcgagtgactgtgtcaaaggacaggcaaagttttggacccatcatggtgtaccagaccaagtctcctgtgcctctcacctgtcccagcagctgtgtctgcacctctcagagctcagacaatggtctgaatgtaaactgccaagaaaggaagttcactaatatctctgacctgcagcccaaaccgaccagtccaaagaaactctacctaacagggaactatcttcaaactgtctataagaatgacctcttagaatacagttctttggacttactgcacttaggaaacaacaggattgcagtcattcaggaaggtgcctttacaaacctgaccagtttacgcagactttatctgaatggcaattaccttgaagtgctgtacccttctatgtttgatggactgcagagcttgcaatatctctatttagagtataatgtcattaaggaaattaagcctctgacctttgatgctttgattaacctacagctactgtttctgaacaacaaccttcttcggtccttacctgataatatatttggggggacggccctaaccaggctgaatctgagaaacaaccatttttctcacctgcccgtgaaaggggttctggatcagctcccggctttcatccagatagatctgcaggagaacccctgggactgtacctgtgacatcatggggctgaaagactggacagaacatgccaattcccctgtcatcattaatgaggtgacttgcgaatctcctgctaagcatgcaggggagatactaaaatttctggggagggaggctatctgtccagacagcccaaacttgtcagatggaaccgtcttgtcaatgaatcacaatacagacacacctcggtcgcttagtgtgtctcctagttcctatcctgaactacacactgaagttccactgtctgtcttaattctgggattgcttgttgttttcatcttatctgtctgttttggggctggtttattcgtctttgtcttgaaacgccgaaagggagtgccgagcgttcccaggaataccaacaacttagacgtaagctcctttcaattacagtatgggtcttacaacactgagactcacgataaaacagacggccatgtctacaactatatccccccacctgtgggtcagatgtgccaaaaccccatctacatgcagaaggaaggagacccagtagcctattaccgaaacctgcaagagttcagctatagcaacctggaggagaaaaaagaagagccagccacacctgcttacacaataagtgccactgagctgctagaaaagcaggccacaccaagagagcctgagctgctgtatcaaaatattgctgagcgagtcaaggaacttcccagcgcaggcctagtccactataacttttgtaccttacctaaaaggcagtttgccccttcctatgaatctcgacgccaaaaccaagacagaatcaataaaaccgttttatatggaactcccaggaaatgctttgtggggcagtcaaaacccaaccaccctttactgcaagctaagccgcaatcagaaccggactacctcgaagttctggaaaaacaaactgcaatcagtcagctgtgaagggaaatcatttacaaccctaaggcatcagaggatgctgctccgaactgttggaaacaaggacattagcttttgtgtttgtttttgttctccctttcccagtgttaatgggggactttgaaaatgtttgggagataggatgaagtcatgattttgcttttgcaagttttcctttaaattatttctctctcgctctcctcccctccttttttttttttttttttttctttttcccttctcttcttaggaaccatcagtggacatgaatgtttctacaatgcatttcttcatagattttgtttatggttttgtttcttttttcttctttgtttttcagtgtgggagtgggaagaggagattatagtgactgaagaaagaataggcaaacttttcaaatgaaaatggatatttagtgtattttgtagaagatctccaaagatcttttgtgactacaacttcttttgtaaataatgatatatggtatttccatcgtcagttaccgagtatagccactgggtatcactactttgtgttaaagtgccttcgcactttaagtacattacttaaatgttgcttttagctttgataaattgaaaatattttaatgtgttgtatttttgaaattgaaaacactgtaaaatagattgatgtgtcagctatattaagtcaacgtacagtttgcttgagttatagaaaccagcctgtcatcaaatgattctagttctaggactttgtaggcttaactataaaatatttcctttcctctgggtttaagtgattttatttaagtcaactaaggggatttaacagtggactagaggtaataagccacctcagtcaggattaataattcattaataaaatatatttaacccaaaaaaaaag

SEQ ID NO: 736780 - DNA, 7127 bp, Homo sapiens
gcggccgccctctaccctcaatccccactggagattcctcaccccgggaccgtccgcgcgggcgtggtcgggctccgcgcctcgcgcagcggggtggcacaggcggccagggagggcccacgcacccggcgcgagctagaagcctccggtcggcctgcagtgcccaagtcccatggcgagggcagcccgagtggccgtcgcggctgtaggtccgcatgccgggcaccgcaccaggcgtctagcaggtaggggcagggaaggtagggctgcgctggcggccggtgcccagttaccggcgatcggggacgctcggagacacctggtctcccggaagcgcccttcggaaatgggattcgacccggcttgcgggcggcgggtgtttagaagaagaggctgcgggcaagcagtgccccctctctggttccccggactcctcttagccccctcgtggcctgatgggcggccgggacggaggtgggctgtaagcccgccggcacccaccgtgtcctgtggaaggcttggagacctgagccaggctctactcggttagatgcgagtgagacaggcgacggagttcgtctttaagcctcccttgcctcagcaaggagagggagcgttttccttattttaatgaccgcctttccctcccttggggtcccagttcaccctgaacctttccacagccttaaaagcccgctctccctagcggagtgctgcggcagttcttcagaagacacggggccaaatgaaacttacttaaagtggttatcgcgtttcaggctgatttgttcctagtaactacgttttggaaagcagctgtggactctcaaggacaggcaggaacgaagacctccttagggtccgagtgtcgcttcccacagttagattacccatgaatttccttgattctgtaggtctcaagaatctcatgagcccccaaccacctccacctttctctctgaatctctctcctgtctctgaaattcttcgcaaaaataatctgtcctcaaggaatattgaaagcgtcatcaatgtcttgaaggaaattactgtatctgagaaccgaaactagtatttgatgtttcactttcaaatacatttttttttaataaaaaggatacctttaagtaaaacactaccactgctatttacgtttaagtagatttttaattcatattaagcagtagtgtgctttttggaaagatgatggactgggactcataatccctgggttttgtttctatttgtagtttcttgagtaagtcagcactttccctggttaagaaatgacctcatctgtaaaatgaacctgacttctaaggtcttgttcggctctcacgtctttacttcagttaaatattgacataatacatgtttgttgaatgaatgactgaatgaataaatcttattgctctaggaactatgtgcttttaacctttggaaatacatagaaacaaatgcctcctttgctaggaaagggagcttaattgtgctcccactgcatcagactgcttccatctaatgatgcaattgcaatacagggtgggaggccatccacagggctgtccctctgcctcagagctcatctcaagtttgcccttctctatggagaaggaaaatttgagtctccagaaggaaagtattttgctaaacgccaagcaagaattagagggtaagggggcttctgatgcctggtccaaggctcttagaagaagaagaaggagaaagggagaaagctcaagaaaataatgcacagatcaccagctacaggtggccctagtgcctaagtttataaactacccccgcccttcccggagagaaaggagcttgtataaagggaacaatcctagaacctaggcttaacaaggaaggagaaggggagaagcaagggtcattctgttctcaagtggtttgttgtatctgtgtgtttatctattccacatttggccaggcagtgggactccgggaaagcaagctgaagtgttttgtgggacaggcacatcatttggtcaactccttttccctggttgattccctccttttcctgacccatctcccccttcctaccagaggcaaccaaggcctttccaggcaacagcagacattatttaccccttgcgaattgattccacaatggaagactcttgggtccaaggagctgtaagataattaaggagaaaacagataatgaaggcaaaaatccaacacctggccattagcaatgctctggaaaggctatttaaacccgcattggatatcagagctgggagggcccatacagtctacctacctgccttttgcagatggacacaggaagatccagaagctagtggcacatctagcaacagagccagatcagaacccaggtaagctcggtctcaggccaggattccttttccatctcctctctttctcaggagccagtcttcctgcaccagcttcctcttttctcctagctcccctgcccctgcagcctggagggctcaaccacccttcctttggctcccactcccagctgaggctcagcctggcagtgcttttctgacacccacttcttttctccttcctccaggcaagaagtgcacgtttaaacctcattatctggctaagtataaacctcagggagaaaaggggtttgtttttgtttttctcagtctataagctaacattgagctgactttcagagtccaggcaaatatgtttggtgggtcaccacccagaaaggaattctcttagcactgaatcagggctctgtatgtaaagtataaatcccctaagagaactcctcaccctcctacacagacacattggtgcatgcacacacaccccactctctgcacagagagcatctgagctaggagctggcaagtggggcaccagtcctgtagcaaagaggcacaccacacacacacacacacacacacacacacactctctctctctctctctctcactcacacacacacacacacacacacacacacgcttctcccttgcttgggaatctgggagaagaaccccccacccccacccctgccctccataggcattgtgtaggtgagagaaagagggaggagtgagagagaacacacagaggggcccaaggaggtgccaggccattagcagggcccctccttgagaaacccctctgcaggagcttctcctgccgccagccaggttggaggtggagtagttcagaatcaactgacgcagccgggaattgagctttgcaaagccacttgcaaggaagggaagcatctgcccaaccctcccccaccgcgcgccctggatcctctgcctgccccctcccccgtgacgtcaccctagtcctgtcccggggagcctgcaaagcctctcagattcaaactgctagacgcactgctgccaccgccaccgaattggaaacgcgcgcccaggctccgtcgtcgccttcgcccgccgaccgggccagccggctctccgacctccctacagaatcgcaccccagtccctccctggcagctcggcttccctcagctccaactcttctcttccgctcctgcctcctgtcggatttttaatttctgcgcacccccagtcaaattaaatcaaccaacaaaaagcagggcatcccccctggaagcagcgtcttattttaccttgttctcccacttcctgaagatgctaaactcctggtggactgcagaggagagggattcagtcttctcctgatgtgtgagtaacccccacctcgcactgtctttcccatctctatctctcctctacacctgccgccagccccctgattcctgattttcccaccccctttttgcgctttttttttttttcctaaagcgattgcgatttctgctgggagctcaagacgggcgagctgcccgagatctcttcgagataccccaggggaggaggagatgggcaggatttagtaggacaactcggttactaatgacttggcggctggctgcgaccccccgggaaatcaggtgcaagcatgtgtgttcccggggcgcgtgtgtgggtggcctcgggatgggggaatagggagcggagaaaagaaaccgctttggaaaatgcaatgatttcattctgccgtgttgctaaccccctcattctccctcgctcccactccgcctccttgctttaccatttttaatcgggcttccttgtttctttcttccctgcacccgcttcttccccctgcccccacctaaggtttgcctgtaggtacctgagttgacaccgaaggtgcctaaagatgctgagcggcgtttggttcctcagtgtgttaaccgtggccgggatcttacagacagagagtcgcaaaactgccaaagacatttgcaagatccgctgtctgtgcgaagaaaaggaaaacgtactgaatatcaactgtgagaacaaaggatttacaacagttagcctgctccagcccccccagtatcgaatctatcagctttttctcaatggaaacctcttgacaagactgtatccaaacgaatttgtcaattactccaacgcggtgactcttcacctaggtaacaacgggttacaggagatccgaacgggggcattcagtggcctgaaaactctcaaaagactgcatctcaacaacaacaagcttgagatattgagggaggacaccttcctaggcctggagagcctggagtatctccaggccgactacaattacatcagtgccatcgaggctggggcattcagcaaacttaacaagctcaaagtgctcatcctgaatgacaaccttctgctttcactgcccagcaatgtgttccgctttgtcctgctgacccacttagacctcagggggaataggctaaaagtaatgccttttgctggcgtccttgaacatattggagggatcatggagattcagctggaggaaaatccatggaattgcacttgtgacttacttcctctcaaggcctggctagacaccataactgtttttgtgggagagattgtctgtgagactccctttaggttgcatgggaaagacgtgacccagctgaccaggcaagacctctgtcccagaaaaagtgccagtgattccagtcagaggggcagccatgctgacacccacgtccaaaggctgtcacctacaatgaatcctgctctcaacccaaccagggctccgaaagccagccggccgcccaaaatgagaaatcgtccaactcctcgagtgactgtgtcaaaggacaggcaaagttttggacccatcatggtgtaccagaccaagtctcctgtgcctctcacctgtcccagcagctgtgtctgcacctctcagagctcagacaatggtctgaatgtaaactgccaagaaaggaagttcactaatatctctgacctgcagcccaaaccgaccagtccaaagaaactctacctaacagggaactatcttcaaactgtctataagaatgacctcttagaatacagttctttggacttactgcacttaggaaacaacaggattgcagtcattcaggaaggtgcctttacaaacctgaccagtttacgcagactttatctgaatggcaattaccttgaagtgctgtacccttctatgtttgatggactgcagagcttgcaatatctctatttagagtataatgtcattaaggaaattaagcctctgacctttgatgctttgattaacctacagctactgtttctgaacaacaaccttcttcggtccttacctgataatatatttggggggacggccctaaccaggctgaatctgagaaacaaccatttttctcacctgcccgtgaaaggggttctggatcagctcccggctttcatccagatagatctgcaggagaacccctgggactgtacctgtgacatcatggggctgaaagactggacagaacatgccaattcccctgtcatcattaatgaggtgacttgcgaatctcctgctaagcatgcaggggagatactaaaatttctggggagggaggctatctgtccagacagcccaaacttgtcagatggaaccgtcttgtcaatgaatcacaatacagacacacctcggtcgcttagtgtgtctcctagttcctatcctgaactacacactgaagttccactgtctgtcttaattctgggattgcttgttgttttcatcttatctgtctgttttggggctggtttattcgtctttgtcttgaaacgccgaaagggagtgccgagcgttcccaggaataccaacaacttagacgtaagctcctttcaattacagtatgggtcttacaacactgagactcacgataaaacagacggccatgtctacaactatatccccccacctgtgggtcagatgtgccaaaaccccatctacatgcagaaggaaggagacccagtagcctattaccgaaacctgcaagagttcagctatagcaacctggaggagaaaaaagaagagccagccacacctgcttacacaataagtgccactgagctgctagaaaagcaggccacaccaagagagcctgagctgctgtatcaaaatattgctgagcgagtcaaggaacttcccagcgcaggcctagtccactataacttttgtaccttacctaaaaggcagtttgccccttcctatgaatctcgacgccaaaaccaagacagaatcaataaaaccgttttatatggaactcccaggaaatgctttgtggggcagtcaaaacccaaccaccctttactgcaagctaagccgcaatcagaaccggactacctcgaagttctggaaaaacaaactgcaatcagtcagctgtgaagggaaatcatttacaaccctaaggcatcagaggatgctgctccgaactgttggaaacaaggacattagcttttgtgtttgtttttgttctccctttcccagtgttaatgggggactttgaaaatgtttgggagataggatgaagtcatgattttgcttttgcaagttttcctttaaattatttctctctcgctctcctcccctccttcccactcccacactgaaaaacaaagaagaaaaaagaaacaaaaccataaacaaaatctatgaagaaatgcattgtagaaacattcatgtccactgatggttcctaagaagagaagggaaaaagaaa

SEQ ID NO: 736781 - DNA, 485 bp, Homo sapiens
caccaccccgaatagcttcaggggccagaggaaatgctgccaaagcgttattggaaaactttggttttgaactggtcattcagtataacgaaaacaggcagaaggtacagaagaagggcaaaagtggtgaaggcgaaaacactgacaaactagaatgtggaacatgtggtaaattgttttccaatgttcttattttaaagagtcaccaagaacatgtacatgggcaattttttccatatgcagcgctagaaaaatttgctcgtcaatacagggaggcctatgacaagctttatccaatttctccatcttctccagaaacgccgcccccgccacctcctcctcctcccttgcctccggctcctccacagccttcttctatgggtcctgtaaagatccccaacacggtttctactcctctgcaagctccaccacccactcctcccccaccaccaccacctcctcctcctcctcctcctccaccacca

SEQ ID NO: 736782 - DNA, 3404 bp, Homo sapiens
ttatttaagcctcgaattctcttttaatgttttgtagtttttagtgtagacatcttatacttctattaatatatttctaaatatttttttggatgccattgtgaatggcatttattttattttctagttgtttgctgctactatatacacataaaaactgattatcttgtgacctttctaaattgatttttagttctagtagttattttgttttttttcttttgcaagcacaaatagttctacctcttttctgatctttatctctttctttttctttccttaatgtaatagttatggtctccagtacaatgttgaattgaactgatgagagtgaacaccattcttgccttgtttccaattttaagggaaaagcatttggtgtttcactattaagtatgatgttagctgtaggtattttatagatgccctttgttagttaatgaagtttccttctactctagtttgctaagaggtttgtttttttgttgttgtttttgtttttaccatgaatggatattgaattttgtcaaaggctttttctgatctagcaatccttgagaattgattccttttattttaaaaaaatatttcttagttttctggggttttagggatgaggtctcactatgttgtccaggctggactcaaattcttggcctcaagcagtcctcctgccttggccttgagtgtagctgggtctacaggtacatgccactgtgcccagcttgattctattctatacacaaaccgtactccccttcttcttcctcccaccaccattctaatatgcttaattatatctctttatgtgtttttacaaagtctgtattgtttatgaacatgtatgtttttacataactgtgtataaaaatgtctttacctatatataaaaatctttttccactgagcactatgtgtgtaagatccatctgtgttctttgggtatatctcatcaaattgttagcaactttatagcacagacagtgcaagtgctccatattgaaatactgtaaatgaggttttggaagaatgagtatagaatatgtgatcagaagtaactgcaaaactgagtcactgactgatgaaatccatggaaagaatgtggggttagaaggtggtcatgagtgcaaattctggatctgctctttactgctgtgtgatcttgggcaattaaccttttttgagccttggtttcttcttagaatgggagtgacaccttctatgattgttgtgaagattaaagataatgaagatgtaactgcctggtccctgataaactgtcacaatatgttgagacatattgtctcaacatacgtcacatatgttgagacaatatgtgagacagagtctcactctgccccccaggctggggtgcaatggtgcgatctcggctcactgcaacctctgcctcccgggttcaagccattcttctgcctcggcctcccgagtagctgggattacaggcacctgccaccacacccagataatttttgtatttttagtagagatgggatttcaccatgtaggccaggctggtctcgaactcctgacctcaggtgatccacccgcctcagcctcccaaagtactgggattacaggcgtgagccaccacacccagccagtgtcgtttctttccttcctcagggctggctctggggggaagcgagggtcaacagtttgtgtgtggtgagcccgaaggtgccaaagcacaccccacacagaggcactcttcacgcatctcagattggagataacagtaaatgactatgcagagtgtggtgtttaatgtcaatttttccttctgtcctctgcaggacaaagtggccttggagagtatgcctctgctaggcttcaccattgctccagaaaaggaagagggcagcagtgaagtaggacctatttttcacctttaccacaagaaaaccctattttatagcttcaaagcagaagataccaattcagctcagaggtggatcgaggccatggaagatgcgagtgtgttatagcagttatcaagcatgtggacttgtaacaaattcttaggtcaatatgtgaatgcttttagaagctaagctgtggctcaactcatccggacacacacctggattcagcaatgaggcctgaccttttttgctataaccgccccaccactcccctgcccttgccaacatcttcatgaatggaatccttaagggatatttatggacctctccttttctgtgttttccacccctacccccacccgccacccagtaataaactatttccttaccccgcagtgagttaaaatttagtaagatgaagatgtggaaaccaatgaaaagtacatttagaaatgcaggctttttagtagaaagaagctcttacagtttttactcatgataaatcttatcacctttcaaaaattgattgtggtgcctcaggtgaaatgagaagctatcagtaacagctactctcatcgaaagcactttattattttacggagctgcaacctccaattttgtgttttctaagtgatttacttaagtcaataacagatggaatcctgtggactaatgtgccaccagttttctaacaagggtgtacataaaatggatttgtgcagacctggctgtggcttgctggtgtgcaagcacacatcactttagaggggctgcgccccaccagataggaaggggaggattttctcctccagtcgaccttgtgacctgtatactaacataacttattaaaggaggggtccctcctcccccagagcagtcctcaacactatgtcagtgctggaaatgcagccactggcagatctggccccccagacgtcaccgcagggcctctgaagagtcaaggtctgctttaatttattgtgtgcctttctgtgtttacctcactcaagctgacaacattgtttatgggaatctatccttcttttagacacacggtaatccttgggctgtattactgaaggctttttattttttgagaggtgaaaaaaagagaaaacaagttagactccaaaggtgaattcctggtcttggcagatggctctgggaacagcgagggagcacagaagtcgtggcctgaggctgttctatgggcacttggggctaaatcgcctcctgagggtgactgttgcttattctgctggacaggtttttacataaagcaaagggcatgtgaggggtgggattccttgttactcttactgcaataaaaatcaattgtttgatatcctgtccccattctgttgctgccctgtcccctacaaaaaagggaatttgctgacaaactttttgtaaaaagcaccatctctggacttacttgcattaaatattttcaggggaatttttttttccagtttgcagttcttttaaaatgtttgcattaaacatgtaactaatggttca

SEQ ID NO: 736783 - DNA, 724 bp, Homo sapiens
cagcccagtccctgctacctggaggcctggaggtgaagggctgtccagcgccctggaaaagcgtcccctccccagcccccatagcctttgtctgttcctgcaggagggagggaggaagagtgcttgactttcaggtcccacttaacccccatggctcacattcctagagggattttacaggaatcagtgttccaaagacaagccgcaggcacgcctctcacctcccttccatgtggcttctttcggttacagagcggcctgtgagcatgagcttcccgctgtcttcaccccgcttctcgggcagtgccttttcatccgtcttccagagcattaacccctcgaccttcaagaagcagaagaaagtcccttcagccctgacagaggtaaagcaggcagggctacccaagtgggaagtagggcatttggaaggttcatggtcatcctgggtagacggagtcagaccctgccctgtcccagcctgaccagtctcttccagacagagcattcctaatggaagcatcccagctacgaggaccgacttgacagtgatggtgctaggcgacatctttcccatccttctctctacctctcccctcctcctctttcttttctctcctttttctcctgccccatagcttagatctagtacccaagcagactgcacagatcacgggggctcttcattctaaaggagccaaattcctgtgttggtccttccatgtca

SEQ ID NO: 736784 - DNA, 629 bp, Homo sapiens
tcatgcctgaaaccgctttccctggagggagttattcactccatggagggaggaaacagaggttcgggcaccattttccaatatgtggattctcccttccatgtggcttctttcggttacagagcggcctgtgagcatgagcttcccgctgtcttcaccccgcttctcgggcagtgccttttcatccgtcttccagagcattaacccctcgacctttgccacggggtggcggcggcggcgcccggcgctttgcatagtgggccgggccgctcccctcccctccccgcccgcggccgggcgaagcgagcgggttccccctgaccggcccggccggcgcaagggtgggggtggagggggaatggccgcggccccgccttatagttggccctccgccagcgccgccattttgttctcgacggagatggctccggctgggcgggctcccttcctccttatcctcctcctcctcccgcctgcagtcccttcttccttctctgccgggattttcacccctccgcttctagtccgcctttggcggccgtcgcagcccaaccgccgttttttctgaaggggagggtaaaagaaaaggaggaaggcgggtgcgaggcgcgacctcgtgagcgacggat

SEQ ID NO: 736785 - DNA, 862 bp, Homo sapiens
ggtggaaggacagtccagagcccttgtcatcgcacaggaactgctatcttcagagaaagcatacgtggagatgctccagcacttaaatctggatttccatggagctgtcatgagggccttggatgacatggaccatgaaggcagagacacattggcccgggaggagctgaggcagggcctgagtgaactcccagccatccacgaccttcatcaaggcatcctggaggagctggaggaaaggctgtcaaattgggagagccagcagaaggtagctgacgtcttccttgcccgggagcaggggtttgatcaccacgccactcacatcctgcagttcgacaggtacctaggtctgctcagtgagaattgcctccactctccccggctggcagctgctgtccgtgaatttgagcagagtgtacaaggaggcagccagactgcgaagcatcggctgctgcgggtggttcaacgcctcttccagtaccaagtgctcctcacagactatttaaacaacctttgtccggactccgccgagtacgacaacacacagggtgcactgagcctcatctccaaagtcacagaccgtgccaacgacagcatggagcaaggggaaaacctgcagaagctggtccacattgagcacagcgtccggggccaaggggatctcctccagccaggaagggagtttctgaaggaagggacgctgatgaaagtaacagggaaaaacagacggccccggcacctatttctgatgaacgatgtgctcctgtacacctatccccagaaggatgggaagtaccggctgaagaacacattggctgtggccaacatgaaggtcagccgcctgtgatgaaaaagtgcctag

SEQ ID NO: 736786 - DNA, 3333 bp, Homo sapiens
agtatatcagggtgtggaaacagctctgcaccccttcttgattgctgaacactatgatgtgaatatttctacatagccaccacctttatcatttttagtgacagcttaatataccatagggtggatgcctataatttccttagacttcgttttgaaacaacatagctcatgaacctcttcaaagatgaataatgagaaagcaaaaccttctgcttcgttatagaaggaattacccaatctctcccctatcttgaaaaagaagagtgttcaccacgtggccacaacgagaggagagatttccatggagctgtcatgagggccttggatgacatggaccatgaaggcagagacacattggcccgggaggagctgaggcagggcctgagtgaactcccagccatccacgaccttcatcaaggcatcctggaggagctggaggaaaggctgtcaaattgggagagccagcagaaggtagctgacgtcttccttgcccgggagcaggggtttgatcaccacgccactcacatcctgcagttcgacaggtacctaggtctgctcagtgagaattgcctccactctccccggctggcagctgctgtccgtgaatttgagcagagtgtacaaggaggcagccagactgcgaagcatcggctgctgcgggtggttcaacgcctcttccagtaccaagtgctcctcacagactatttaaacaacctttgtccggactccgccgagtacgacaacacacagggtgcactgagcctcatctccaaagtcacagaccgtgccaacgacagcatggagcaaggggaaaacctgcagaagctggtccacattgagcacagcgtccggggccaaggggatctcctccagccaggaagggagtttctgaaggaagggacgctgatgaaagtaacagggaaaaacagacggccccggcacctatttctgatgaacgatgtgctcctgtacacctatccccagaaggatgggaagtaccggctgaagaacacattggctgtggccaacatgaaggtcagccgccctgtgatggagaaagtgccctacgctctaaagattgagacttccgagtcctgcctgatgctgtctgcgagctcctgtgcagagagggacgagtggtatggctgtctgagcagagccctccctgaggactacaaggcccaggcgctggctgcattccaccatagcgtggagatacgagagaggctgggggttagccttggggagaggccccccaccctggtgcctgtcacacacgtcatgatgtgcatgaactgcggctgcgacttctccctcaccctgcggcgtcatcactgtcacgcctgtggcaagatcgtgtgccggaactgttcgcggaacaagtacccgctgaagtacctgaaggacaggatggccaaggtctgcgacggctgcttcggggagctgaagaagcggggcagggctgtcccgggcctgatgagagagcggcctgtgagcatgagcttcccgctgtcttcaccccgcttctcgggcagtgccttttcatccgtcttccagagcattaacccctcgaccttcaagaagcagaagaaagtcccttcagccctgacagaggtggctgcctctggagagggctctgccatcagtggctatctcagccggtgtaagaggggcaagcggcactggaagaagctctggtttgtcatcaaaggcaaagttctctacacctacatggccagtgaggacaaagtggccttggagagtatgcctctgctaggcttcaccattgctccagaaaaggaagagggcagcagtgaagtaggacctatttttcacctttaccacaagaaaaccctattttatagcttcaaagcagaagataccaattcagctcagaggtggatcgaggccatggaagatgcgagtgtgttatagcagttatcaagcatgtggacttgtaacaaattcttaggtcaatatgtgaatgcttttagaagctaagctgtggctcaactcatccggacacacacctggattcagcaatgaggcctgaccttttttgctataaccgccccaccactcccctgcccttgccaacatcttcatgaatggaatccttaagggatatttatggacctctccttttctgtgttttccacccctacccccacccgccacccagtaataaactatttccttaccccgcagtgagttaaaatttagtaagatgaagatgtggaaaccaatgaaaagtacatttagaaatgcaggctttttagtagaaagaagctcttacagtttttactcatgataaatcttatcacctttcaaaaattgattgtggtgcctcaggtgaaatgagaagctatcagtaacagctactctcatcgaaagcactttattattttacggagctgcaacctccaattttgtgttttctaagtgatttacttaagtcaataacagatggaatcctgtggactaatgtgccaccagttttctaacaagggtgtacataaaatggatttgtgcagacctggctgtggcttgctggtgtgcaagcacacatcactttagaggggctgcgccccaccagataggaaggggaggattttctcctccagtcgaccttgtgacctgtatactaacataacttattaaaggaggggtccctcctcccccagagcagtcctcaacactatgtcagtgctggaaatgcagccactggcagatctggccccccagacgtcaccgcagggcctctgaagagtcaaggtctgctttaatttattgtgtgcctttctgtgtttacctcactcaagctgacaacattgtttatgggaatctatccttcttttagacacacggtaatccttgggctgtattactgaaggctttttattttttgagaggtgaaaaaaagagaaaacaagttagactccaaaggtgaattcctggtcttggcagatggctctgggaacagcgagggagcacagaagtcgtggcctgaggctgttctatgggcacttggggctaaatcgcctcctgagggtgactgttgcttattctgctggacaggtttttacataaagcaaagggcatgtgaggggtgggattccttgttactcttactgcaataaaaatcaattgtttgatatcctgtccccattctgttgctgccctgtcccctacaaaaaagggaatttgctgacaaactttttgtaaaaagcaccatctctggacttacttgcattaaatattttcaggggaatttttttttccagtttgcagttcttttaaaatgtttgcattaaacatgtaactaatggttca

SEQ ID NO: 736787 - DNA, 1441 bp, Homo sapiens
agtatatcagggtgtggaaacagctctgcaccccttcttgattgctgaacactatgatgtgaatatttctacatagccaccacctttatcatttttagtgacagcttaatataccatagggtggatgcctataatttccttagacttcgttttgaaacaacatagctcatgaacctcttcaaagatgaataatgagaaagcaaaaccttctgcttcgttatagaaggaattacccaatctctcccctatcttgaaaaagaagagtgttcaccacgtggccacaacgagaggagagatttccatggagctgtcatgagggccttggatgacatggaccatgaaggcagagacacattggcccgggaggagctgaggcagggcctgagtgaactcccagccatccacgaccttcatcaaggcatcctggaggagctggaggaaaggctgtcaaattgggagagccagcagaaggtagctgacgtcttccttgcccgggagcaggggtttgatcaccacgccactcacatcctgcagttcgacaggtacctaggtctgctcagtgagaattgcctccactctccccggctggcagctgctgtccgtgaatttgagcagagtgtacaaggaggcagccagactgcgaagcatcggctgctgcgggtggttcaacgcctcttccagtaccaagtgctcctcacagactatttaaacaacctttgtccggactccgccgagtacgacaacacacagggtgcactgagcctcatctccaaagtcacagaccgtgccaacgacagcatggagcaaggggaaaacctgcagaagctggtccacattgagcacagcgtccggggccaaggggatctcctccagccaggaagggagtttctgaaggaagggacgctgatgaaagtaacagggaaaaacagacggccccggcacctatttctgatgaacgatgtgctcctgtacacctatccccagaaggatgggaagtaccggctgaagaacacattggctgtggccaacatgaaggtcagccgccctgtgatggagaaagtgccctacgctctaaagattgagacttccgagtcctgcctgatgctgtctgcgagctcctgtgcagagagggacgagtggtatggctgtctgagcagagccctccctgaggactacaaggcccaggcgctggctgcattccaccatagcgtggagatacgagagaggctgggggttagccttggggagaggccccccaccctggtgcctgtcacacacgtcatgatgtgcatgaactgcggctgcgacttctccctcaccctgcggcgtcatcactgtcacgcctgtggcaagatcgtgtgccggaactgttcgcggaacaagtacccgctgaagtacctgaacgaactcgcgtccgtggggatgctctagagtcagcacg

SEQ ID NO: 736788 - DNA, 3343 bp, Homo sapiens
cccacgcgtccgcggacgcgtgggtcctgccagggctggcgcgttcacgaagctgtttgaagatcagagcagagccctgtccacagcaaacgaaaatgatggctacgtggacatgagcagcttcaacgcctttgagagcaaacagcagagtgcagaccaggacgcagaaagcgcctacacagagccctacaaagtctgtcccatctcgtcggcagcccccaaagaggaccttacgtcggatgaagagcagagaagctcggaggaggaggacagtgcttcaagagaccccagtgtcacccacaaggatttccatggagctgtcatgagggccttggatgacatggaccatgaaggcagagacacattggcccgggaggagctgaggcagggcctgagtgaactcccagccatccacgaccttcatcaaggcatcctggaggagctggaggaaaggctgtcaaattgggagagccagcagaaggtagctgacgtcttccttgcccgggagcaggggtttgatcaccacgccactcacatcctgcagttcgacaggtacctaggtctgctcagtgagaattgcctccactctccccggctggcagctgctgtccgtgaatttgagcagagtgtacaaggaggcagccagactgcgaagcatcggctgctgcgggtggttcaacgcctcttccagtaccaagtgctcctcacagactatttaaacaacctttgtccggactccgccgagtacgacaacacacagggtgcactgagcctcatctccaaagtcacagaccgtgccaacgacagcatggagcaaggggaaaacctgcagaagctggtccacattgagcacagcgtccggggccaaggggatctcctccagccaggaagggagtttctgaaggaagggacgctgatgaaagtaacagggaaaaacagacggccccggcacctatttctgatgaacgatgtgctcctgtacacctatccccagaaggatgggaagtaccggctgaagaacacattggctgtggccaacatgaaggtcagccgccctgtgatggagaaagtgccctacgctctaaagattgagacttccgagtcctgcctgatgctgtctgcgagctcctgtgcagagagggacgagtggtatggctgtctgagcagagccctccctgaggactacaaggcccaggcgctggctgcattccaccatagcgtggagatacgagagaggctgggggttagccttggggagaggccccccaccctggtgcctgtcacacacgtcatgatgtgcatgaactgcggctgcgacttctccctcaccctgcggcgtcatcactgtcacgcctgtggcaagatcgtgtgccggaactgttcgcggaacaagtacccgctgaagtacctgaaggacaggatggccaaggtctgcgacggctgcttcggggagctgaagaagcggggcagggctgtcccgggcctgatgagagagcggcctgtgagcatgagcttcccgctgtcttcaccccgcttctcgggcagtgccttttcatccgtcttccagagcattaacccctcgaccttcaagaagcagaagaaagtcccttcagccctgacagaggtggctgcctctggagagggctctgccatcagtggctatctcagccggtgtaagaggggcaagcggcactggaagaagctctggtttgtcatcaaaggcaaagttctctacacctacatggccagtgaggacaaagtggccttggagagtatgcctctgctaggcttcaccattgctccagaaaaggaagagggcagcagtgaagtaggacctatttttcacctttaccacaagaaaaccctattttatagcttcaaagcagaagataccaattcagctcagaggtggatcgaggccatggaagatgcgagtgtgttatagcagttatcaagcatgtggacttgtaacaaattcttaggtcaatatgtgaatgcttttagaagctaagctgtggctcaactcatccggacacacacctggattcagcaatgaggcctgaccttttttgctataaccgccccaccactcccctgcccttgccaacatcttcatgaatggaatccttaagggatatttatggacctctccttttctgtgttttccacccctacccccacccgccacccagtaataaactatttccttaccccgcagtgagttaaaatttagtaagatgaagatgtggaaaccaatgaaaagtacatttagaaatgcaggctttttagtagaaagaagctcttacagtttttactcatgataaatcttatcacctttcaaaaattgattgtggtgcctcaggtgaaatgagaagctatcagtaacagctactctcatcgaaagcactttattattttacggagctgcaacctccaattttgtgttttctaagtgatttacttaagtcaataacagatggaatcctgtggactaatgtgccaccagttttctaacaagggtgtacataaaatggatttgtgcagacctggctgtggcttgctggtgtgcaagcacacatcactttagaggggctgcgccccaccagataggaaggggaggattttctcctccagtcgaccttgtgacctgtatactaacataacttattaaaggaggggtccctcctcccccagagcagtcctcaacactatgtcagtgctggaaatgcagccactggcagatctggccccccagacgtcaccgcagggcctctgaagagtcaaggtctgctttaatttattgtgtgcctttctgtgtttacctcactcaagctgacaacattgtttatgggaatctatccttcttttagacacacggtaatccttgggctgtattactgaaggctttttattttttgagaggtgaaaaaaagagaaaacaagttagactccaaaggtgaattcctggtcttggcagatggctctgggaacagcgagggagcacagaagtcgtggcctgaggctgttctatgggcacttggggctaaatcgcctcctgagggtgactgttgcttattctgctggacaggtttttacataaagcaaagggcatgtgaggggtgggattccttgttactcttactgcaataaaaatcaattgtttgatatcctgtccccattctgttgctgccctgtcccctacaaaaaagggaatttgctgacaaactttttgtaaaaagcaccatctctggacttacttgcattaaatattttcaggggaatttttttttccagtttgcagttcttttaaaatgtttgcattaaacatgtaactaatggttca

SEQ ID NO: 736789 - DNA, 502 bp, Homo sapiens
aacatttacaccattgagcaacctttcctagacagtgtctccttccttgaagatgctatcctctgaaataactgtgagtacagtcgcataaccctaatttaagatgtgcctgctgaacatgtgctctctcagatcctgtcctcagaatgcttttggctcttttctcggtatctcatccttagagtttttattttataccaatgttctggattacatacctggtccagaaatctagacttgtacttctttttaattgcctagttgacatttcaaccttgattaaagattgacaatatttatcaccttttcctcctggaacaatttaggttaatggtgcagccttttttcctagtcaaacatgccaggaagttcagggcaaagttcaactgctccctcttgtcttatgtggtcactgcttctgagaacatccaggaagttctttctatacttgaatcatcttctcagtcctttggggctttactgctatgagtatgaacttttg

SEQ ID NO: 736790 - DNA, 5044 bp, Homo sapiens
gatattgatggcaggtctaggcttcattgttaggtagaagattgaatacttctcactttatacaaatttacattggctattgctcccatgtgttagctagtcttaacatgtttgttatttcgttatcttattagctgacatacggagtggtattattagtgtcgtactccttagcgtgagcatgacaattaagttaccttactaacagtgatgagtaaaccatactctgatctaaacccattgttaccaatgatgtgattatgaagttagctgaatctatggtctacatttgaagaaatagttcagaattctctactacattgtaagttacttgctaatagagattgggcattattatgtactactccccttctcacatcctacccaaagtacacaaggccgtagtaaaatactgttgctactaaaaactaaacatactgtggttgctaatgtcctttacatcttcagcctatagggaatggtacaggcagaaacaagcaccattaagtatattatcatcagtagtgagatctgtatgattaggatatctttgcttaagcccccaaaggaaaaattctctagcattaaaaacatggctggaacatagctaagcagttaacctaattagtagacttattgttaacgttcagtcctaaaaatgaaaagcttcagttgggagtagaaaatatactatgctggtatatagagcaacaaataccctgatgagataaaatgaagtagaaacttaccatttgacattatttgactttcatacatgctactgaaaagtctaggtttagctaagaagcataaataatggcagtacttgtagaggaaagaacataccagctaaaacaagaactgtaatgaatataatggaaagtgtttggagcttgaatacttggcttcaaaaatctggctttgccatttactgttaaaaaaatatctgagaatttatctcaggctgtaaaacagagaagtcataccaatttcaagaataaaatatgatataaagaattgttgaagccaaaatatccagaaataaacagaatggaaggtatcattgctataattatcttttcagaataaaaaatagagtattctttatcctttctgttgtctcacatgacaagcatgggatggtgaggaaatggcatattgcctatgttcgccgccccacccccttagttccaccaccccttcaccgtcacccccagttcactagtgtatcagaatgcatcttcagaattacacactgaagatacaaaaggtccagttggtaagctcatcagtaaataacaaggctttgaaatctgacaaattagctatttttgtaggaagataatagaacagcaagatggaagacaagtgatgagtatcatctgttttgaggttgacaaggtgtgacataaccctgttaatagacacaagtaaaagaaaatcatactaggattggatattagtgagcgagcaccgaccagtagaaacaacaacagcataaatctgttatttaagtatcccaataatgaggttaaaaaaaaaaaaaaacagaacaaagcatgaaaagaccacaattagtgctggctatgcttagagaggagcagtctcttggtaaactcaggcagtgatgatgaacagaaaatggccgactgatactgtaatagaggcatagaactaaggacactccgtgagctggcataaatacaggggagtctttaagactgaaaaaagttcatgggtatgacacttaatatgactcaacattactgcagaattttaaagcaaacatgaaagcttgagaataaacactagtccctctacttcaagaaaaagcagaacctgtactagaacatgaagaacttagagatcaaaagacagccagaactatgatgaaatattttgaaagcagtgggcacatttttaaagattttttttggagaactttatgaggctgtatgtataattcctatatgtaattttataggaattcttaactgaaagtagttatcaactgctacttatcaggagcagtgttattagggattttaagttaggcatgtagaaaactttctgacaaaagggctattgaactccagccagttcccagtgaatctccaggaggcaccttagaagtcttcacaagctgaataccatgtctttagggtgtccaaatgcttctgtcttgggggagagatgagagatgactgggtgcctttccactcagaacacagtagaccactcactatttatgaccaagcctcacttcttttctattacagttacagattcttttttagtctggaagttagggtaaataaaatttgtatgtttgatttttctcttaggaatgttttctcatcttaactcttatgttatctttatggccaacagatttgctcagaatatatcatcaaaatatatgtattgtattttgtaaaggtgaaaggatcgaaataccactttgacagttataaaccagagtagatttgagaactgattgctcacatcacacttacgaatagtctcagaagcctttaagagaaacttacttctcaatggacacttagaagaatttgatgatcttactgtcataaaatcagtaatgaaattctcagcaaaactatttggtaaacattgcaccctgtatttttacccaacatcttgttatgaaaattatcaaatacattaaaaagttaaaataattttatagtgtactcactacctagatgctaattagcattacctatgcttgctttgtcacatatccattcatcatttcatattattatttgatgcattttaaattgcatatcattaactagagttcattgttggcttttttacataaaattagcatgcaatgaagtgcatagaaatatgtgttcactgaggtttggcaaatgcatatagtgctatggaaataggaaacgttatcaccaccctagaaagtttccacactgccctttccagtcaattcctgtccctacttgaccctcaaaggcaaccactgttcctttttctaccataagatttttctgttctaaaactttatataaatagagtcacgcaacatgtacgcttttctacaaggcttcatttttttattgctgttcttttttattgctgagtagtattccactgtatgacaatattacagtttgttttcttaatttcctattattgatagatacctgggctgtttccaggattggccattataaataaagctgctatgaccattcttacgtaagtctttgtgaacataggttttcatttctttgcagtaaattccttggattagaattgctgggtcacagggtagttttaaaagaaactgccatacctttttccagttcagttttattgtgccctgtattttgtattttgatgtgcataaaggtgtaaactatttttatgatccatattgaagtattagaagaagtgagtttggaataacaatggcattgttcatggtcaaggatgacaattggaactatctgaggaaagcaaagacctgtctgccccagacagctcctcaaggggttcctatgcctgaaactttagcaatatttcactccttgaaaggttaaagcccaaccatggtgatatgttagctagaagaaacagcactggtttgtttatgttactaactttcaccacccgttttcagtaggtaaagtaagactgatcattgaacagaaaaggttatttctgtgatgaggttgagggggtagtggaaagcatgtattgctagtaagccccaggtacagctatgtgagagagagtcacctggacagggaagtcccccaaatggtggccagaagagcagaaaacggggtgggaaaaattctacctcacagttttgcataggggatagctatgcttttacgggacattttagcgtttaaaaatattttcaatattgtctctttattcaataccacccagctgtagttttttcacactctgatgactctcttatccactcttttacctctcccagctgttctattacatacagcattcacctgtattagtctatagaattataatcatctgtgtgtttctaatgctcattttcaaaaatatgtatggtttattcgatttttcctattaaaattttaagggctgggaaatttggcttctactgtaaatccttataatgttccacacattgtaaatatgcaataaaaatgttaacaactataatggcagcaggttttggtatgtatttctttgatatattgtcactttggacaataagtttgatttctgttaataaaagttgttcataaaatctagggagaattaagtcacactggtctctataagataatctgatgaattctgcatctttgaatcaatttgagttattttttgtaaaggtttaaattgtttctaacagtgttacctaaaacctttcattaaatcaaaaatgtaacttgtatattctgaaataacctggagtcttagaagacagaggcttctgcttccctctcccgtgaccccaacaatcccttcccacaggcttggcacagaagttcagtgctttctctacgtctcatgttgtcagaaataggttctcaccataatagacagtggtgaaatttccattgttcctactgagaagtccatttttaaggcatcaaaggtgaatgtgtatttagggatggaggaggcatattacaacaaagctgtatttaaaataacacaatcatatcatgctataaacaatagcagttccagaatggctactaaggattttggactgccagactttggaaattggcaagccttataccttgtccaatgaagttaagtacatttgagtgacagttcaacatacaagcaaaaaaatatatagaagacattgtacatttgttattaatggacatgtttactttacatgttagagtatccatccatctctaggttttccattagatgcttcattgtatccacaaacctgtttcaaaccattgaagtgatcttaccattgtgtttgttcaaaataaaattgggagaaaatgtgaatgagtcaata

SEQ ID NO: 736791 - DNA, 4990 bp, Homo sapiens
gatattgatggcaggtctaggcttcattgttaggtagaagattgaatacttctcactttatacaaatttacattggctattgctcccatgtgttagctagtcttaacatgtttgttatttcgttatcttattagctgacatacggagtggtattattagtgtcgtactccttagcgtgagcatgacaattaagttaccttactaacagtgatgagtaaaccatactctgatctaaacccattgttaccaatgatgtgattatgaagttagctgaatctatggtctacatttgaagaaatagttcagaattctctactacattgtaagttacttgctaatagagattgggcattattatgtactactccccttctcacatcctacccaaagtacacaaggccgtagtaaaatactgttgctactaaaaactaaacatactgtggttgctaatgtcctttacatcttcagcctatagggaatggtacaggcagaaacaagcaccattaagtatattatcatcagtagtgagatctgtatgattaggatatctttgcttaagcccccaaaggaaaaattctctagcattaaaaacatggctggaacatagctaagcagttaacctaattagtagacttattgttaacgttcagtcctaaaaatgaaaagcttcagttgggagtagaaaatatactatgctggtatatagagcaacaaataccctgatgagataaaatgaagtagaaacttaccatttgacattatttgactttcatacatgctactgaaaagtctaggtttagctaagaagcataaataatggcagtacttgtagaggaaagaacataccagctaaaacaagaactgtaatgaatataatggaaagtgtttggagcttgaatacttggcttcaaaaatctggctttgccatttactgttaaaaaaatatctgagaatttatctcaggctgtaaaacagagaagtcataccaatttcaagaataaaatatgatataaagaattgttgaagccaaaatatccagaaataaacagaatggaaggtatcattgctataattatcttttcagaataaaaaatagagtattctttatcctttctgttgtctcacatgacaagcatgggatggtgaggaaatggcatattgcctatgttcgccgccccacccccttagttccaccaccccttcaccgtcacccccagttcactagtgtatcagaatgcatcttcagaattacacactgaagatacaaaaggtccagttggtaagctcatcagtaaataacaaggctttgaaatctgacaaattagctatttttgtaggaagataatagaacagcaagatggaagacaagtgatgagtatcatctgttttgaggttgacaaggtgtgacataaccctgttaatagacacaagtaaaagaaaatcatactaggattggatattagtgagcgagcaccgaccagtagaaacaacaacagcataaatctgttatttaagtatcccaataatgaggttaaaaaaaaaaaaaaacagaacaaagcatgaaaagaccacaattagtgctggctatgcttagagaggagcagtctcttggtaaactcaggcagtgatgatgaacagaaaatggccgactgatactgtaatagaggcatagaactaaggacactccgtgagctggcataaatacaggggagtctttaagactgaaaaaagttcatgggtatgacacttaatatgactcaacattactgcagaattttaaagcaaacatgaaagcttgagaataaacactagtccctctacttcaagaaaaagcagaacctgtactagaacatgaagaacttagagatcaaaagacagccagaactatgatgaaatattttgaaagcagtgggcacatttttaaagattttttttggagaactttatgaggctgtatgtataattcctatatgtaattttataggaattcttaactgaaagtagttatcaactgctacttatcaggagcagtgttattagggattttaagttaggcatgtagaaaactttctgacaaaagggctattgaactccagccagttcccagtgaatctccaggaggcaccttagaagtcttcacaagctgaataccatgtctttagggtgtccaaatgcttctgtcttgggggagagatgagagatgactgggtgcctttccactcagaacacagtagaccactcactatttatgaccaagcctcacttcttttctattacagttacagattcttttttagtctggaagttagggtaaataaaatttgtatgtttgatttttctcttaggaatgttttctcatcttaactcttatgttatctttatggccaacagatttgctcagaatatatcatcaaaatatatgtattgtattttgtaaaggtgaaaggatcgaaataccactttgacagttataaaccagagtagatttgagaactgattgctcacatcacacttacgaatagtctcagaagcctttaagagaaacttacttctcaatggacacttagaagaatttgatgatcttactgtcataaaatcagtaatgaaattctcagcaaaactatttggtaaacattgcaccctgtatttttacccaacatcttgttatgaaaattatcaaatacattaaaaagttaaaataattttatagtgtactcactacctagatgctaattagcattacctatgcttgctttgtcacatatccattcatcatttcatattattatttgatgcattttaaattgcatatcattaactagagttcattgttggcttttttacataaaattagcatgcaatgaagtgcatagaaatatgtgttcactgaggtttggcaaatgcatatagtgctatggaaataggaaacgttatcaccaccctagaaagtttccacactgccctttccagtcaattcctgtccctacttgaccctcaaaggcaaccactgttcctttttctaccataagatttttctgttctaaaactttatataaatagagtcacgcaacatgtacgcttttctacaaggcttcatttttttattgctgttcttttttattgctgagtagtattccactgtatgacaatattacagtttgttttcttaatttcctattattgatagatacctgggctgtttccaggattggccattataaataaagctgctatgaccattcttacgtaagtctttgtgaacataggttttcatttctttgcagtaaattccttggattagaattgctgggtcacagggtagttttaaaagaaactgccatacctttttccagttcagttttattgtgccctgtattttgtattttgatgtgcataaaggtgtaaactatttttatgatccatattgaagtattagaagaagtgagtttggaataacaatggcattgttcatggtcaaggatgacaattggaactatctgaggaaagcaaagacctgtctgccccagacagctcctcaaggggttcctatgcctgaaactttagcaatatttcactccttgaaaggttaaagcccaaccatggtgatatgttagctagaagaaacagcactggtttgtttatgttactaactttcaccacccgttttcagtaggtaaagtaagactgatcattgaacagaaaaggttatttctgtgatgaggttgagggggtagtggaaagcatgtattgctagtaagccccaggtacagctatgtgagagagagtcacctggacagggaagtcccccaaatggtggccagaagagcagaaaacggggtgggaaaaattctacctcacagttttgcataggggatagctatgcttttacgggacattttagcgtttaaaaatattttcaatattgtctctttattcaataccacccagctgtagttttttcacactctgatgactctcttatccactcttttacctctcccagctgttctattacatacagcattcacctgtattagtctatagaattataatcatctgtgtgtttctaatgctcattttcaaaaatatgtatggtttattcgatttttcctattaaaattttaagggctgggaaatttggcttctactgtaaatccttataatgttccacacattgtaaatatgcaataaaaatgttaacaactataatggcagcaggttttggtatgtatttctttgatatattgtcactttggacaataagtttgatttctgttaataaaagttgttcataaaatctagggagaattaagtcacactggtctctataagataatctgatgaattctgcatctttgaatcaatttgagttattttttgtaaaggtttaaattgtttctaacagtgttacctaaaacctttcattaaatcaaaaatgtaacttgtatattctgaaataacctggagtcttagaagacagaggcttctgcttccctctcccgtgaccccaacaatcccttcccacaggcttggcacagaagttcagtgctttctctacgtctcatgttgtcagaaataggttctcaccataatagacagtggtgaaatttccattgttcctactgagaagtccatttttaaggcatcaaaggtgaatgtgtatttagggatggaggaggcatattacaacaaagctgtatttaaggattttggactgccagactttggaaattggcaagccttataccttgtccaatgaagttaagtacatttgagtgacagttcaacatacaagcaaaaaaatatatagaagacattgtacatttgttattaatggacatgtttactttacatgttagagtatccatccatctctaggttttccattagatgcttcattgtatccacaaacctgtttcaaaccattgaagtgatcttaccattgtgtttgttcaaaataaaattgggagaaaatgtgaatgagtcaata

SEQ ID NO: 736792 - DNA, 4172 bp, Homo sapiens
gatattgatggcaggtctaggcttcattgttaggtagaagattgaatacttctcactttatacaaatttacattggctattgctcccatgtgttagctagtcttaacatgtttgttatttcgttatcttattagctgacatacggagtggtattattagtgtcgtactccttagcgtgagcatgacaattaagttaccttactaacagtgatgagtaaaccatactctgatctaaacccattgttaccaatgatgtgattatgaagttagctgaatctatggtctacatttgaagaaatagttcagaattctctactacattgtaagttacttgctaatagagattgggcattattatgtactactccccttctcacatcctacccaaagtacacaaggccgtagtaaaatactgttgctactaaaaactaaacatactgtggttgctaatgtcctttacatcttcagcctatagggaatggtacaggcagaaacaagcaccattaagtatattatcatcagtagtgagatctgtatgattaggatatctttgcttaagcccccaaaggaaaaattctctagcattaaaaacatggctggaacatagctaagcagttaacctaattagtagacttattgttaacgttcagtcctaaaagttaaaaaaaaaaaaaaacagaacaaagcatgaaaagaccacaattagtgctggctatgcttagagaggagcagtctcttggtaaactcaggcagtgatgatgaacagaaaatggccgactgatactgtaatagaggcatagaactaaggacactccgtgagctggcataaatacaggggagtctttaagactgaaaaaagttcatgggtatgacacttaatatgactcaacattactgcagaattttaaagcaaacatgaaagcttgagaataaacactagtccctctacttcaagaaaaagcagaacctgtactagaacatgaagaacttagagatcaaaagacagccagaactatgatgaaatattttgaaagcagtgggcacatttttaaagattttttttggagaactttatgaggctgtatgtataattcctatatgtaattttataggaattcttaactgaaagtagttatcaactgctacttatcaggagcagtgttattagggattttaagttaggcatgtagaaaactttctgacaaaagggctattgaactccagccagttcccagtgaatctccaggaggcaccttagaagtcttcacaagctgaataccatgtctttagggtgtccaaatgcttctgtcttgggggagagatgagagatgactgggtgcctttccactcagaacacagtagaccactcactatttatgaccaagcctcacttcttttctattacagttacagattcttttttagtctggaagttagggtaaataaaatttgtatgtttgatttttctcttaggaatgttttctcatcttaactcttatgttatctttatggccaacagatttgctcagaatatatcatcaaaatatatgtattgtattttgtaaaggtgaaaggatcgaaataccactttgacagttataaaccagagtagatttgagaactgattgctcacatcacacttacgaatagtctcagaagcctttaagagaaacttacttctcaatggacacttagaagaatttgatgatcttactgtcataaaatcagtaatgaaattctcagcaaaactatttggtaaacattgcaccctgtatttttacccaacatcttgttatgaaaattatcaaatacattaaaaagttaaaataattttatagtgtactcactacctagatgctaattagcattacctatgcttgctttgtcacatatccattcatcatttcatattattatttgatgcattttaaattgcatatcattaactagagttcattgttggcttttttacataaaattagcatgcaatgaagtgcatagaaatatgtgttcactgaggtttggcaaatgcatatagtgctatggaaataggaaacgttatcaccaccctagaaagtttccacactgccctttccagtcaattcctgtccctacttgaccctcaaaggcaaccactgttcctttttctaccataagatttttctgttctaaaactttatataaatagagtcacgcaacatgtacgcttttctacaaggcttcatttttttattgctgttcttttttattgctgagtagtattccactgtatgacaatattacagtttgttttcttaatttcctattattgatagatacctgggctgtttccaggattggccattataaataaagctgctatgaccattcttacgtaagtctttgtgaacataggttttcatttctttgcagtaaattccttggattagaattgctgggtcacagggtagttttaaaagaaactgccatacctttttccagttcagttttattgtgccctgtattttgtattttgatgtgcataaaggtgtaaactatttttatgatccatattgaagtattagaagaagtgagtttggaataacaatggcattgttcatggtcaaggatgacaattggaactatctgaggaaagcaaagacctgtctgccccagacagctcctcaaggggttcctatgcctgaaactttagcaatatttcactccttgaaaggttaaagcccaaccatggtgatatgttagctagaagaaacagcactggtttgtttatgttactaactttcaccacccgttttcagtaggtaaagtaagactgatcattgaacagaaaaggttatttctgtgatgaggttgagggggtagtggaaagcatgtattgctagtaagccccaggtacagctatgtgagagagagtcacctggacagggaagtcccccaaatggtggccagaagagcagaaaacggggtgggaaaaattctacctcacagttttgcataggggatagctatgcttttacgggacattttagcgtttaaaaatattttcaatattgtctctttattcaataccacccagctgtagttttttcacactctgatgactctcttatccactcttttacctctcccagctgttctattacatacagcattcacctgtattagtctatagaattataatcatctgtgtgtttctaatgctcattttcaaaaatatgtatggtttattcgatttttcctattaaaattttaagggctgggaaatttggcttctactgtaaatccttataatgttccacacattgtaaatatgcaataaaaatgttaacaactataatggcagcaggttttggtatgtatttctttgatatattgtcactttggacaataagtttgatttctgttaataaaagttgttcataaaatctagggagaattaagtcacactggtctctataagataatctgatgaattctgcatctttgaatcaatttgagttattttttgtaaaggtttaaattgtttctaacagtgttacctaaaacctttcattaaatcaaaaatgtaacttgtatattctgaaataacctggagtcttagaagacagaggcttctgcttccctctcccgtgaccccaacaatcccttcccacaggcttggcacagaagttcagtgctttctctacgtctcatgttgtcagaaataggttctcaccataatagacagtggtgaaatttccattgttcctactgagaagtccatttttaaggcatcaaaggtgaatgtgtatttagggatggaggaggcatattacaacaaagctgtatttaaaataacacaatcatatcatgctataaacaatagcagttccagaatggctactaaggattttggactgccagactttggaaattggcaagccttataccttgtccaatgaagttaagtacatttgagtgacagttcaacatacaagcaaaaaaatatatagaagacattgtacatttgttattaatggacatgtttactttacatgttagagtatccatccatctctaggttttccattagatgcttcattgtatccacaaacctgtttcaaaccattgaagtgatcttaccattgtgtttgttcaaaataaaattgggagaaaatgtgaatgagtcaata

SEQ ID NO: 736793 - DNA, 3894 bp, Homo sapiens
ctgacaaaatgatgcgtgccagaaaacggggagtatttgatgaccaccccttcaccgtcacccccagttcactagtgtatcagaatgcatcttcagaattacacactgaagatacaaaaggtccagttggtaagctcatcagtaaataacaaggctttgaaatctgacaaattagctatttttgtaggaagataatagaacagcaagatggaagacaagtgatgagtatcatctgttttgaggttgacaaggtgtgacataaccctgttaatagacacaagtaaaagaaaatcatactaggattggatattagtgagcgagcaccgaccagtagaaacaacaacagcataaatctgttatttaagtatcccaataatgaggttaaaaaaaaaaaaaaacagaacaaagcatgaaaagaccacaattagtgctggctatgcttagagaggagcagtctcttggtaaactcaggcagtgatgatgaacagaaaatggccgactgatactgtaatagaggcatagaactaaggacactccgtgagctggcataaatacaggggagtctttaagactgaaaaaagttcatgggtatgacacttaatatgactcaacattactgcagaattttaaagcaaacatgaaagcttgagaataaacactagtccctctacttcaagaaaaagcagaacctgtactagaacatgaagaacttagagatcaaaagacagccagaactatgatgaaatattttgaaagcagtgggcacatttttaaagattttttttggagaactttatgaggctgtatgtataattcctatatgtaattttataggaattcttaactgaaagtagttatcaactgctacttatcaggagcagtgttattagggattttaagttaggcatgtagaaaactttctgacaaaagggctattgaactccagccagttcccagtgaatctccaggaggcaccttagaagtcttcacaagctgaataccatgtctttagggtgtccaaatgcttctgtcttgggggagagatgagagatgactgggtgcctttccactcagaacacagtagaccactcactatttatgaccaagcctcacttcttttctattacagttacagattcttttttagtctggaagttagggtaaataaaatttgtatgtttgatttttctcttaggaatgttttctcatcttaactcttatgttatctttatggccaacagatttgctcagaatatatcatcaaaatatatgtattgtattttgtaaaggtgaaaggatcgaaataccactttgacagttataaaccagagtagatttgagaactgattgctcacatcacacttacgaatagtctcagaagcctttaagagaaacttacttctcaatggacacttagaagaatttgatgatcttactgtcataaaatcagtaatgaaattctcagcaaaactatttggtaaacattgcaccctgtatttttacccaacatcttgttatgaaaattatcaaatacattaaaaagttaaaataattttatagtgtactcactacctagatgctaattagcattacctatgcttgctttgtcacatatccattcatcatttcatattattatttgatgcattttaaattgcatatcattaactagagttcattgttggcttttttacataaaattagcatgcaatgaagtgcatagaaatatgtgttcactgaggtttggcaaatgcatatagtgctatggaaataggaaacgttatcaccaccctagaaagtttccacactgccctttccagtcaattcctgtccctacttgaccctcaaaggcaaccactgttcctttttctaccataagatttttctgttctaaaactttatataaatagagtcacgcaacatgtacgcttttctacaaggcttcatttttttattgctgttcttttttattgctgagtagtattccactgtatgacaatattacagtttgttttcttaatttcctattattgatagatacctgggctgtttccaggattggccattataaataaagctgctatgaccattcttacgtaagtctttgtgaacataggttttcatttctttgcagtaaattccttggattagaattgctgggtcacagggtagttttaaaagaaactgccatacctttttccagttcagttttattgtgccctgtattttgtattttgatgtgcataaaggtgtaaactatttttatgatccatattgaagtattagaagaagtgagtttggaataacaatggcattgttcatggtcaaggatgacaattggaactatctgaggaaagcaaagacctgtctgccccagacagctcctcaaggggttcctatgcctgaaactttagcaatatttcactccttgaaaggttaaagcccaaccatggtgatatgttagctagaagaaacagcactggtttgtttatgttactaactttcaccacccgttttcagtaggtaaagtaagactgatcattgaacagaaaaggttatttctgtgatgaggttgagggggtagtggaaagcatgtattgctagtaagccccaggtacagctatgtgagagagagtcacctggacagggaagtcccccaaatggtggccagaagagcagaaaacggggtgggaaaaattctacctcacagttttgcataggggatagctatgcttttacgggacattttagcgtttaaaaatattttcaatattgtctctttattcaataccacccagctgtagttttttcacactctgatgactctcttatccactcttttacctctcccagctgttctattacatacagcattcacctgtattagtctatagaattataatcatctgtgtgtttctaatgctcattttcaaaaatatgtatggtttattcgatttttcctattaaaattttaagggctgggaaatttggcttctactgtaaatccttataatgttccacacattgtaaatatgcaataaaaatgttaacaactataatggcagcaggttttggtatgtatttctttgatatattgtcactttggacaataagtttgatttctgttaataaaagttgttcataaaatctagggagaattaagtcacactggtctctataagataatctgatgaattctgcatctttgaatcaatttgagttattttttgtaaaggtttaaattgtttctaacagtgttacctaaaacctttcattaaatcaaaaatgtaacttgtatattctgaaataacctggagtcttagaagacagaggcttctgcttccctctcccgtgaccccaacaatcccttcccacaggcttggcacagaagttcagtgctttctctacgtctcatgttgtcagaaataggttctcaccataatagacagtggtgaaatttccattgttcctactgagaagtccatttttaaggcatcaaaggtgaatgtgtatttagggatggaggaggcatattacaacaaagctgtatttaaaataacacaatcatatcatgctataaacaatagcagttccagaatggctactaaggattttggactgccagactttggaaattggcaagccttataccttgtccaatgaagttaagtacatttgagtgacagttcaacatacaagcaaaaaaatatatagaagacattgtacatttgttattaatggacatgtttactttacatgttagagtatccatccatctctaggttttccattagatgcttcattgtatccacaaacctgtttcaaaccattgaagtgatcttaccattgtgtttgttcaaaataaaattgggagaaaatgtgaatgagtcaata

SEQ ID NO: 736794 - DNA, 748 bp, Homo sapiens
  misc_feature (6)..(6): n is a, c, g, or t
  misc_feature (747)..(747): n is a, c, g, or t
ctctcnctcctactctgctgccagcatcggtcccgatccagccctgtcccaggccatggtggctaccaagcaggccatgagccctgaagacaagaagagggctgtcaagtattccatgagccacatagcccagatacctgtcaaacacgactctctgaaggaagaatttgcccagctgtcctgtaacctgaaccagcgcttgagttatctagccaatatgggaggtccttccagcctcgggacaacagtggacatattgcagaaaaagattggcagcctccagaaatctaggctcaaggaggaagaacttgagagaatttggggcaaccaaatagagatgatgaaggatcgctacatcactttggacaaggcggtggagaacctgcagattcgcatggatgagttcaagactctccaggctcaaatcaaaagactggaaatgaacaaggtgaataagagcacgatggaggaggagctgagagagaaagctgacaggagtgccctggcaggcaaggcaagccgcgttgacctggagactgtggccttggagctgaacgagatgattcagggcatactcttcaaggtcacgatccatgaggacagctggaagaaggctatggaggagctcagcaaggacgtgaacaccaagttagtccacagtgatctggatcccttgaagaaagaaatggaagaggtctggaaaatcgtccggaagctgctgattgagggcttaagactggatcctgnc

SEQ ID NO: 736795 - DNA, 566 bp, Homo sapiens; identical to SEQ ID NO: 414243

SEQ ID NO: 736796 - DNA, 750 bp, Homo sapiens; identical to SEQ ID NO: 414245

SEQ ID NO: 736797 - DNA, 3045 bp, Homo sapiens
tgctggcgccagacggcaccggccgctggtagagcgcgtgccgcgagatgcggcctcaggacagcaccggggtcgcggagctccaggagcccgggctgccgctaacggacgatgcacccccgggcgccactgaggagccggcggccgccgaggcagctggggcgccagaccgcgccacattgctgtgaggaagcctgggctacatggagaagcccacatgaagaggcccatgtggagaggaactgaggccctgacacttggccccatctgcactaccagctgatagccagcatgagcctgccagccaggccagcacagtggctcacacctgtaatcccagcatttcgggaggccaaggtggccagatcacttgagtccaggagtttaaggctgcaatgagctacgatcgcgccactgcactccagcctgggtgacagtacgagatacaacagatgaacacacttcctgtttatgtgctttagttcctttgtatgtgcattttagaaaagtcagaagtctttggtactttgcagcatgtgtgcattggtacaacttctaggaagggcaatttggcaccatctatcagatttacttatgtgcaaaatgatatgtacaagtttattccagcctgatttgtaatagcaagaagaaatggaactagcctgaatgtccctcaatagagtactggttaagtaagtcatggtatatacccaaaataaaatgtaatgcaattaaaaataaatttaagaagagcaaggaagctttccatatatgggtgtggaataatgtccaaaattgttaagtgaaaaagcaaaattcatatcatggttgagtatgtgctcatttgtataaaaagagggtaaacagaatattccaggaggatatgcaagaaactgttaacattggttgcctttggcagctgaagggcgaggtgagaggagactttccactgaatccccttttacaccttttgaattttgaaccaggtgggtaaataacttagtcaaaataaaataaaataaaataaaataaaataaaattggtggaacaaaaataaaaaggtgacttgatggaaaagaaaggagaaagaaaaggagtaaaagacatagggagctacatatatacattatgtcatacatacatacatgcatagagagatgtttactgctttaatctgggctgtcaccctgactcaccttacggacttccttttgctccctcctcttttgcctcatagagtctgcagaccatacttaaattcccacatctccatgattgaagggaatataaagatgaaactgaagttcacctttttaataggactatatcctccaagatcctagaaagcgttgtgtggccctgattcagatgtctgctttcctatggcaccaaaacaatttttacttggaaaggacactaacatttattgaataaacctcatcccagccaagagcttcttaatctttgtctcattccctcaccaaccttgggagatagactgattgggaactgaagttcaaagaggttgaatggggttacctacctgctaaattctagtcccctcactagtaaatgatgaggttgggccatgaggtctgcctgactccaaagaccttgccctttccaatacttcatgctgcctccataattgagggtggtagaatgcagaacagggagtcatttgtcactgtggtggagaaagagttggtttttgactttgggatttagggatacatatgtcctccttcctccttcccctcctagagcaagagctagaagtgaaagaatagaaggtgatgacaacactgcatatatttcagttttatttcttccgatctactaattaacatttgttgggcagtagccataaacaatcctagccaatgcaaggaaacaccaaatattgtcaagccctcacattggtcataactggaagcaaacatgacatatatggactatataatcagtttgcgtgggctacagcaagatgttgcccaagagcctaggcatgagctggcttcctacggcctccaagcaggaaagaatggagctatacacagtcatctgaatatacagaagtgaaccctgggccagccacattcagccgtaacttccccagactgtttctacaggtgcagtgtgccaatcagaagaaaggtggccaggctcaggagaaaggacaggagagtgactctggcaggcttgctccattgtagagatgagatacaccaagatagtgacttcccagcttttctccccaaagcacccctaatagctgagaagaatctggaggcatagctaccatcacagctacactaaccaccatactttactgtatccttcaggtgtctgtcctagctagttttgtggtctggctccttcagtccctgcaacaagcctgtttattttcattatattgatgaggttatagagcttggacaagttacatgacttttcgaagatcacatagctaataagtgtcaagagtcttattctcaaaaccctggtctgtccaactacaagcctgtgctcctgactccactattctgcttaccctaagcctaaagctgcccacttcaagctcaaatcctcttggaggcttcatgctttaaaaaaaaaaaatccatgcaattttttgcatcctaattaataatatatctgtgtgttttagtgtaaatttttttttttaaattaccaattcagttatttagctttttattccccaaatctttggtaccctaggcagatgtgtcatatttatcctgggctttatgtacctctggtttgagggactcttgaacttcattttaagaaacatggcccaatgagtacacagtcaagtcttcatgtccctgaacactgcattataaaatcagcactccttgttctttgtatatttgtgttatcaaataactatgtgattataatctggcttctcatataccataagtgcagaagagaatcaaaagattgagtacctgattccctaaactgtcaaatttcccgttgtatattaataaaatttgtatcgtttcacaaataaga

SEQ ID NO: 736798 - DNA, 2167 bp, Homo sapiens
tgctggcgccagacggcaccggccgctggtagagcgcgtgccgcgagatgcggcctcaggacagcaccggggtcgcggagctccaggagcccgggctgccgctaacggacgatgcacccccgggcgccactgaggagccggcggccgccgaggcagctggggcgccagaccgcggtaggtgctggctctgcctttcctcgccgtgttgctcccgcaccgagccggccacattgctgtgaggaagcctgggctacatggagaagcccacatgaagaggcccatgtggagaggaactgaggccctgacacttggccccatctgcactaccagctgatagccagcatgagcctgccagccagagtctgcagaccatacttaaattcccacatctccatgattgaagggaatataaagatgaaactgaagttcacctttttaataggactatatcctccaagatcctagaaagcgttgtgtggccctgattcagatgtctgctttcctatggcaccaaaacaatttttacttggaaaggacactaacatttattgaataaacctcatcccagccaagagcttcttaatctttgtctcattccctcaccaaccttgggagatagactgattgggaactgaagttcaaagaggttgaatggggttacctacctgctaaattctagtcccctcactagtaaatgatgaggttgggccatgaggtctgcctgactccaaagaccttgccctttccaatacttcatgctgcctccataattgagggtggtagaatgcagaacagggagtcatttgtcactgtggtggagaaagagttggtttttgactttgggatttagggatacatatgtcctccttcctccttcccctcctagagcaagagctagaagtgaaagaatagaaggtgatgacaacactgcatatatttcagttttatttcttccgatctactaattaacatttgttgggcagtagccataaacaatcctagccaatgcaaggaaacaccaaatattgtcaagccctcacattggtcataactggaagcaaacatgacatatatggactatataatcagtttgcgtgggctacagcaagatgttgcccaagagcctaggcatgagctggcttcctacggcctccaagcaggaaagaatggagctatacacagtcatctgaatatacagaagtgaaccctgggccagccacattcagccgtaacttccccagactgtttctacaggtgcagtgtgccaatcagaagaaaggtggccaggctcaggagaaaggacaggagagtgactctggcaggcttgctccattgtagagatgagatacaccaagatagtgacttcccagcttttctccccaaagcacccctaatagctgagaagaatctggaggcatagctaccatcacagctacactaaccaccatactttactgtatccttcaggtgtctgtcctagctagttttgtggtctggctccttcagtccctgcaacaagcctgtttattttcattatattgatgaggttatagagcttggacaagttacatgacttttcgaagatcacatagctaataagtgtcaagagtcttattctcaaaaccctggtctgtccaactacaagcctgtgctcctgactccactattctgcttaccctaagcctaaagctgcccacttcaagctcaaatcctcttggaggcttcatgctttaaaaaaaaaaaatccatgcaattttttgcatcctaattaataatatatctgtgtgttttagtgtaaatttttttttttaaattaccaattcagttatttagctttttattccccaaatctttggtaccctaggcagatgtgtcatatttatcctgggctttatgtacctctggtttgagggactcttgaacttcattttaagaaacatggcccaatgagtacacagtcaagtcttcatgtccctgaacactgcattataaaatcagcactccttgttctttgtatatttgtgttatcaaataactatgtgattataatctggcttctcatataccataagtgcagaagagaatcaaaagattgagtacctgattccctaaactgtcaaatttcccgttgtatattaataaaatttgtatcgtttcacaaataaga

SEQ ID NO: 736799 - DNA, 676 bp, Homo sapiens
gcccgccgccacccggcagtagttgcggaggtcagccccgcctacttcctctttccctcggagcgggcggcggcgttggcggcttgtgcagcaatggccaagatcaaggctcgagatcttcgcgggaagaagaaggaggagctgctgaaacagctggacgacctgaaggtggagctgtcccagctgcgcgtcgccaaagtgacaggcggtgcggcctccaagctctctaagatccgagtcgtccggaaatccattgcccgtgttctcacagttattaaccagactcagaaagaaaacctcaggaaattctacaagggcaagaagtacaagcccctggacctgcggcctaagaagacacgtgccatgcgccgccggctcaacaagcacgaggagaacctgaagaccaagaagcagcagcggaaggagcggctgtacccgctgcggaagtacgcggtcaaggcctgaggggcgcattgtcaataaagcacagctggctgagaaaaaacacaaaacaacacacacaccacaaacacttgtgggggccgcctatggggcccctggaaaaaccgcttcaaaacaccaattccgttggggccgccgggggcccaagaaggggaacggtgacccggggccaataggggggtccccagggaaaccggggaccaggacaacgggc

SEQ ID NO: 736800 - DNA, 675 bp, Homo sapiens
gcccgccgccacccggcagtagttgcggaggtcagccccgcctacttcctctttccctcggagcgggcggcggcgttggcggcttgtgcagcaatggccaagatcaaggctcgagatcttcgcgggaagaagaaggaggagctgctgaaacagctggacgacctgaaggtggagctgtcccagctgcgcgtcgccaaagtgacaggcggtgcggcctccaagctctctaagatgtaagtgaggcggccggatcacagccctcgtgggtggggagcacgtgtgcatcgggatcgtcggaggatttcaaagttggcttaaggagctggccgcttagatgcccactccgtgcatcctggcgcgcatgggagacccgttgtgtgcttagcctcttacctgccttgaccttgcggtccttgtgcctggaatgcatccccggagacccatcttaatgctgccttcaaagcctacccggaccccttccttccgcttcccaccaacacttgagtttttaacccccttggcaggtgggtggcttgcaccctggagtggcagcgtaagttattttacatggctaagagtgcgggagacttgtgaaaggaacatgggtttggagttcatcaacctgggtacaaagtccacttctcaaaaaaaaattagatgggtgtggtggtacag

SEQ ID NO: 736801 - DNA, 638 bp, Homo sapiens
  misc_feature (518)..(518): n is a, c, g, or t
ctcaaggatccttaattatattaatcccccccccccccccccccccgctctttccctcggagcgggcggcggcgttggcggcttgtgcagcaatggccaagatcaaggctcgagatcttcgcgggaagaagaaggaggagctgctgaaacagctggacgacctgaaggtggagctgtcccagctgcgcgtcgccaaagtgacaggcggtgcggcctccaagctctctaagatccgagtcgtccggaaatccattgcccgtgttctcacagttattaaccagactcagaaagaaaacctcaggaaattctacaagggcaagaagtacaagcccctggacctgcggcctaagaagacacgtgccatgcgccgccggctcaacaagcacgaggagaacctgaagaccaagaagcagcagcggaaggagcggctgtacccgctgcggaagtacgcggtcaaggcctgaggggcgcattgtcaataaagcacagctggctgagaaaaaaaaaaaaaaaaaatnataataatatttattataatttaacatttaatatatttttacttatatcttttttatatattttatttattttaatttttactaatccccttcttttacaccttccccctcctcttccct

SEQ ID NO: 736802 - DNA, 672 bp, Homo sapiens
tatggctagtacgaggctgggtggagcgggcggcggcgttggcggcttgtgcagcaatggccaagatcaaggctcgagatcttcgcgggaagaagaaggaggagctgctgaaacagctggacgacctgaaggtggagctgtcccagctgcgcgtcgccaaagtgacaggcggtgcggcctccaagctctctaagatccgagtcgtccggaaatccattgcccgtgttctcacagttattaaccagactcagaaagaaaacctcaggaaattctacaagggcaagaagtacaagcccctggacctgcggcctaagaagacacgtgccatgcgccgccggctcaacaagcacgaggagaacctgaagaccaagaagcagcagcggaaggagcggctgtacccgctgcggaagtacgcggtcaaggcctgaggggcgcattgtcaataaagcacagctggctgagaaaaaaaaaaaaaaaaaaaaaaaaaaaaaaaaaaaaaaaacaaaaaaaaaaaaagaaaaccccggagcgacacaaagagagagacgacgcacacaaagaggaacaaagacgcggcaaatagaaaacaagagaccacgacacacaaatctatagcaacaaagggggagaaaccgcggggaacccataaaggggacacaaaaaacgcgaaag

SEQ ID NO: 736803 - DNA, 609 bp, Homo sapiens
  misc_feature (563)..(563): n is a, c, g, or t
  misc_feature (582)..(582): n is a, c, g, or t
  misc_feature (603)..(603): n is a, c, g, or t
ggacgcgtgggtcgcccacgcgtcgggagcgggcggcggcgttggcggcttgtgcagcaatggccaagatcaaggctcgagatcttcgcgggaagaagaaggaggagctgctgaaacagctggacgacctgaaggtggagctgtcccagctgcgcgtcgccaaagtgacaggcggtgcggcctccaagctctctaagatccgagtcgtccggaaatccattgcccgtgttctcacagttattaaccagactcagaaagaaaacctcaggaaattctacaagggcaagaagtacaagcccctggacctgcggcctaagaagacacgtgccatgcgccgccggctcaacaagcacgaggagaacctgaagaccaagaagcagcagcggaaggagcggctgtacccgctgcggaagtacgcggtcaaggcctgaggggcgcattgtcaataaagcacagctggctgagaaaaaaaaaaaaaaaaacaaaaaaaaaaaaaaaaaaaaaaaaaaaaaaaaggggggggcgcgcgcaaaaaaaattcccccgggggggcccaaatttgncgcgcccccgttttttggnaaaaagggggcccccaataanaggaga

SEQ ID NO: 736804 - DNA, 726 bp, Homo sapiens
  misc_feature (98)..(98): n is a, c, g, or t
  misc_feature (103)..(104): n is a, c, g, or t
  misc_feature (109)..(109): n is a, c, g, or t
  misc_feature (111)..(111): n is a, c, g, or t
cagcacgttcttcctctgaggacctttatataagccccctatacccccagaggaatgcatccagaactttaaacaggctgggtcaacaacaaggggcncggcnnttgcngncttgtgcagcaatggccaagatcaaggctcgagatcttcgcgggaagaagaaggaggagctgctgaaacagctggacgacctgaaggtggagctgtcccagctgcgcgtcgccaaagtgacaggcggtgcggcctccaagctctctaagatccgagtcgtccggaaatccattgcccgtgttctcacagttattaaccagactcagaaagaaaacctcaggaaattctacaagggcaagaagtacaagcccctggacctgcggcctaagaagacacgtgccatgcgccgccggctcaacaagcacgaggagaacctgaagaccaagaagcagcagcggaaggagcggctgtacccgctgcggaagtacgcggtcaaggcctgaggggcgcattgtcaataaagcacagctggctgagaaaaaaaaaaaaaaaaacaaaaaaaaaaaaacccctgttgggccgccttggcccaatcgattctttactccgacaaacttttgccttgcggcccgaatttgagcccacttgggccattcgccctataggggggcgtattaaaaatacttggccgccggttaaaacccgtggcggggaaaacacccggggtgccccact

SEQ ID NO: 736805 - DNA, 491 bp, Homo sapiens
taccttgctcctggtgttatcctccggcttgtgcagcaatggccaagatcaaggctcgagatcttcgcgggaagaagaaggaggagctgctgaaacagctggacgacctgaaggtggagctgtcccagctgcgcgtcgccaaagtgacaggcggtgcggcctccaagctctctaagatccgagtcgtccggaaatccattgcccgtgttctcacagttattaaccagactcagaaagaaaacctcaggaaattctacaagggcaagaagtacaagcccctggacctgcggcctaagaagacacgtgccatgcgccgccggctcaacaagcacgaggagaacctgaagaccaagaagcagcagcggaaggagcggctgtacccgctgcggaagtacgcggtcaaggcctgaggggcgcattgtcaataaagcacagctggctgagaaaaaatattaacacctactataccatcgttttgccctatagtgagt

SEQ ID NO: 736806 - DNA, 484 bp, Homo sapiens
ggtggcgtctcggcacgagggtgcagcaatggccaagatcaaggctcgagatcttcgcgggaagaagaaggaggagctgctgaaacagctggacgacctgaaggtggagctgtcccagctgcgcgtcgccaaagtgacaggcggtgcggcctccaagctctctaagatccgagtcgtccggaaatccattgcccgtgttctcacagttattaaccagactcagaaagaaaacctcaggaaattctacaagggcaagaagtacaagcccctggacctgcggcctaagaagacacgtgccatgcgccgccggctcaacaagcacgaggagaacctgaagaccaagaagcagcagcggaaggagcggctgtacccgctgcggaagtacgcggtcaaggcctgaggggcgcattgtcaataaagcacagctggctgagaaaaaaaaaaagtcgacgcggccgcgaatttagtagtagtaggcggccgc

SEQ ID NO: 736807 - DNA, 1008 bp, Homo sapiens
  misc_feature (748)..(748): n is a, c, g, or t
  misc_feature (761)..(761): n is a, c, g, or t
  misc_feature (763)..(763): n is a, c, g, or t
tgagtgacgacagtacaaaagtctggagaaagccccaaagtagtcccctgttcccagagccccaagaataaacagatgggagaacaagaccctcctcttccgtttcccccacagagagatccctgtgacacatctaccgggacccctcgaaatattcctgggaacttcgggaccaaaaagaacatagcgcaccaagagaccccaggttcccaggttattcccccagttgggtaggggacaggcctgctctcggggagggtaccgtgcatcggcggcttgtgcagcaatggccaagatcaaggctcgagatcttcgcgggaagaagaaggaggagctgctgaaacagctggacgacctgaaggtggagctgtcccagctgcgcgtcgccaaagtgacaggcggtgcggcctccaagctctctaagatccgagtcgtccggaaatccattgcccgtgttctcacagttattaaccagactcagaaagaaaacctcaggaaattctacaagggcaagaagtacaagcccctggacctgcggcctaagaagacacgtgccatgcgccgccggctcaacaagcacgaggagaacctgaagaccaagaagcagcagcggaaggagcggctgtacccgctgcggaagtacgcggtcaaggcctgaggggcgcattgtcaataaagcacagctggctgagaaaaaaaaaaaaaaaaaaaaaaaaaaaaaaaaaaaaaaaacaaaaaaaaaaaaaancgggggggttatntntggggggggggaaaaaaggtttaataataaatgggacgtagtgtgaataatagttgcttcgtcgagaaacccactatttttttgggcaccaaggggggagaaacggcggggccaccaaaggaggaggggtaaatctgaaaaccacgtgttcttggtttatctgtccgtcaacaacaattttgctatggaatcaagatatatgcgggagaatacactctattacaaacaatgggtagacacattgt

SEQ ID NO: 736808 - DNA, 623 bp, Homo sapiens
  misc_feature (577)..(577): n is a, c, g, or t
  misc_feature (596)..(596): n is a, c, g, or t
  misc_feature (617)..(617): n is a, c, g, or t
tactaaattcgcggcccgtcgaccggcgttggcggcttgtgcagcaatggccaagatcaaggctcgagatcttcgcgggaagaagaaggaggagctgctgaaacagctggacgacctgaaggtggagctgtcccagctgcgcgtcgccaaagtgacaggcggtgcggcctccaagctctctaagatccgagtcgtccggaaatccattgcccgtgttctcacagttattaaccagactcagaaagaaaacctcaggaaattctacaagggcaagaagtacaagcccctggacctgcggcctaagaagacacgtgccatgcgccgccggctcaacaagcacgaggagaacctgaagaccaagaagcagcagcggaaggagcggctgtacccgctgcggaagtacgcggtcaaggcctgaggggcgcattgtcaataaagcacagctggctgagaaaaaaaaaaaaaaaaacaaaaaaaaaaaaaaaaaaaaaaaaaaaaaaaaacaacaacaaacaaaaacaaacaaagaggggggggcgcgcgcaaaaaaaattcccccgggggggcccaaatttgncgcgcccccgttttttggnaaaaagggggcccccaataanaggaga

SEQ ID NO: 736809 - DNA, 344 bp, Homo sapiens
  misc_feature (15)..(15): n is a, c, g, or t
  misc_feature (22)..(22): n is a, c, g, or t
cgttctgtaggaatncggcacnagggcggcgttggcggcttgtgcagcaatggccaagatcaaggctcgagatcttcgcgggaagaagaaggaggagctgctgaaacagctggacgacctgaaggtggagctgtcccagctgcgcgtcgccaaagtgacaagcggtgcggcctccaagctctctaagatccgagtcgtccggaaatccattgcccgtgttctcacagttattaaccagactcagaaagaaaacctcaggaattctacaggggcaagaggacaagccctggccctgggcctaagagacaggcccttgggcgcggttcacagcacgggggacctga

SEQ ID NO: 736810 - DNA, 343 bp, Homo sapiens
tactaaattcgcggcccgtcgaccggcgttggcggcttgtgcagcaatggccaagatcaaggctcgagatcttcgcgggaagaagaaggaggagctgctgaaacagctgaacgacatgaaggtggagctgtcccagctgcgcgtcgccaaagtgacaggcggtgcggcctccaagctctctaagatccgagtcgtccggaaatccattgcccgtgttctcacagttattaaccagactcagaaagaaaacctcaggaaattctacaagggcaagaagtacaagcccctggacctgcggcaaaaagtcgacgcggccgcgaatttagtagtagtaggcggccgc

SEQ ID NO: 736811 - DNA, 735 bp, Homo sapiens
  misc_feature (492)..(492): n is a, c, g, or t
  misc_feature (499)..(499): n is a, c, g, or t
  misc_feature (502)..(502): n is a, c, g, or t
  misc_feature (519)..(519): n is a, c, g, or t
  misc_feature (526)..(526): n is a, c, g, or t
  misc_feature (541)..(541): n is a, c, g, or t
  misc_feature (549)..(549): n is a, c, g, or t
  misc_feature (552)..(553): n is a, c, g, or t
  misc_feature (558)..(558): n is a, c, g, or t
gggtggcgttccaagacgaggggcggcttgtgcagcaatggccaagatcaaggctcgagatcttcgcgggaagaagaaggaggagctgctgaaacagctggacgacctgaaggtggagctgtcccagctgcgcgtcgccaaagtgacaggcggtgcggcctccaagctctctaagatccgagtcgtccggaaatccattgcccgtgttctcacagttattaaccagactcagaaagaaaacctcaggaaattctacaagggcaagaagtacaagcccctggacctgcggcctaagaagacacgtgccatgcgccgccggctcaacaagcacgaggagaacctgaagaccaagaagcagcagcggaaggagcggctgtacccgctgcggaagtacgcggtcaaggcctgaggggcgcattgtcaataaagcacagctggctgagaaaaaacaacaaaaaaggggggggaccggtagccaattcgccctatagngagtcgnatnacaattcactggccgcngttacancgtcgtgactggganaacctggngtnncccanttaatcggactggagaaaatcccgtattggcaggtagagtaataagcacatggccgacagatagcattccagggttgcgcacctaatggcgatggaacttgacggtatatttgggaacacgcgtaaatttgatcgcgatattcacactggcacatcgacaccatgacaccatgtgcg

SEQ ID NO: 736812 - DNA, 766 bp, Homo sapiens
  misc_feature (15)..(15): n is a, c, g, or t
  misc_feature (22)..(22): n is a, c, g, or t
cgttctgtaggaatncggcacnagggcggcgttggcggcttgtgcagcaatggccaagatcaaggctcgagatcttcgcgggaagaagaaggaggagctgctgaaacagctggacgacctgaaggtggagctgtcccagctgcgcgtcgccaaagtgacaggcggtgcggcctccaagctctctaagatccgagtcgtccggaaatccattgcccgtgttctcacagttattaaccagactcagaaagaaaacctcaggaaattctacaagggcaagaagtacaagcccctggacctgcggcctaagaagacacgtgccatgcgccgccggctcaacaagcacgaggagaacctgaagaccaagaagcagcagcggaaggagcggctgtacccgctgcggaagtacgcggtcaaggcctgaggggcgcattgtcaataaagcacagctggctgagaaaaaaaaaaaaaaaaacaaaaaaaaaaaaaaaaaaaaaaaaaaaaaaaaacaacaccccctcccattcactaacactcccactaatccccctatttccccccttttcctcatcatcttaccttttttttttttttttttgcgggccccttgggccccatgtttttttattttgggagagttttttgttggggcgccaatttgaggtcatttggccaattgccccttatggggagggttaaacaattccggccggtgttttaaaagggggagtggaaaaccccgggggttccccaataaatagcgtggggg

SEQ ID NO: 736813 - DNA, 322 bp, Homo sapiens
caaacgcttgtgaaggatggggctgaggatggggctggggctggggcccaatccttggggctggaaaacctgtggggatcccagaagagaagtggtgctgtgctgggatgggttgcttagcccctgcagggtaggtgtaaggcgtgggcagtggctgcggtgcggcctccaagctctctaagatccgagtcgtccggaaatccattgcccgtgttctcacagttattaaccagactcagaaagaaaacctcaggaaattctacaagggcaagaagtacaagcccctggacctgcggcctctagcggctcccgggaatccgag

SEQ ID NO: 736814 - DNA, 963 bp, Homo sapiens
  misc_feature (322)..(322): n is a, c, g, or t
  misc_feature (324)..(324): n is a, c, g, or t
  misc_feature (948)..(948): n is a, c, g, or t
cggagcttatgtgctttgggacggggtgcggctcctagctctctaagatccgagtcgtccggaaatcattgcccgtgttctcacagttataaccagactcagaaagaaaacctcaggaaattctacaagggcaagaagtacaagcccctggacctgcggcctaagaagacacgtgccatgcgccgccggctcaacaagcacgaggagaacctgaagaccaagaagcagcagcggaaggagcggctgtacccgctgcggaagtacgcggtcaaggcctgaggggcgcattgtcaataaagcacagctggctgagaaaaaaaananaaaaaaaaaaaaaaagggggggccccccatacccttttttataagcccttttaaaaaatttacccttgcaagcttccccgtcccgggggttccccccttcttaaatctcaccaggatcagacgggggacaaagcttcaacgcacaagcagccagggcgaggctcaaaacggtttaagcatagccaaacccccagggggaacaacaacgcagcgtgataaacccgtttggcactaaacccgaaacgttacccaaaggcatattagctaacccccgaggggtgggccaattctgggtgcacagccaccgggggtcaccggatttaaccccagggtcaaatagaacggccgggggaacaacggtgggtgttagatagcccccctccccaaataaaggctaaaagccctcaccctcggagttggtaaaaacacctcccagcgtttgaccccaacaagtaggactaccgacaaagggggtttcacccatcttctggacccccagttagcgtaagaccccaacggggatttagatacccccgtatggttaagccctaaccctgcacggtaattcaccaaaattgtccgccagaaacttacgaccacgttaacccaacggcgcggcgcgtncaatccctaaaggcg

SEQ ID NO: 736815 - DNA, 313 bp, Homo sapiens
acagttattaaccagactcagaaagaaaacctcaggaaattctacaaggtgagtctgcctggacatagggagggttggctgcaggaagccaagtgctagccgtccctggccggggacatggtaaagaggtttttcttggtgcgtgggctgagagtggttagccttcccaatttgttgctgggctcactcttctaccagtgtcttgcactggcacgtggctctgcagaccacttcctcaggctgcagatgtcaagaattcattggggcttggggtgtcctggctggagactcagtttttgaaaccagccttccc

SEQ ID NO: 736816 - DNA, 981 bp, Homo sapiens
tcgagctcggccccggttaatgtagatactgtgttctcacagttattaaccagactcagaaagaaaacctcaggaaattctacaagggcaagaagtacaagcccctggacctgcggcctaagaagacacgtgccatgcgccgccggctcaacaagcacgaggagaacctgaagaccaagaagcagcagcggaaggagcggctgtacccgctgcggaagtacgcggtcaaggcctgaggggcgcattgtcaataaagcacagctggctgagaaaaaaaaaaaaaaaaacaaaaaaaaaaaaaaaaaaaaaaaaaaaaaaaaaaaaaaaagaaagaaaaaaaaaaccacctcaaatgacgcgcaccaacagccactcacgtgacacgctggtgaccctaaggcacggggcgccgtgcatccctggtgtgagtcaagacgagagtaggaatgaggttgggggaggtgggaaggggagaggctaggggcgcggtgggccgctagcgagaccgtatcgtgggtgcaggtggggtagggtggagagagcagcgagcgcccgtcagaagaagagacgcgcgcagcaggagcgcacggctgaagattagtagacggtcgcatattgacaaaatggagttgatttgcctgagcatgagttctgcagcgctgtgcgtcgttgtgagaacaggacacgagcggttattatagatatataagatgtataagaccgatcgattgcattgcgtctcatgctcgagctacacagcctcgtactcttgtagggaggcggagtaggagggaggaggggttgctgtgcgtcgtattgcacaggtgctcggtcgtgtcgagctggggggatgaggagtgagagtggaaggatcggagttgcggcagggagagagaggtgggtaggaggtggtgggagggagggtggaggaggtgggcctgggggggagctaggtgaagctagaagcaggggcgagacggt

SEQ ID NO: 736817 - DNA, 487 bp, Homo sapiens
aagagcccattccagagccgcagctgacaacggagagtccagaatctactctaagttctgagttcactttagagccagggccccagaaaacaccagagtcagcagggagctttgtgcccctctcgaggcagagcccagagcccggggctctttttacaggcagagcttagaacctagagctgctctggagctggggcccggcactggagctgagaacctacttcgatccttcttgggttagcaaagtctactctggactcaatgtcctgagccactgcccagagaacattctggaacccccactacacagaaccaggaaccactctgcatccaaagccgggagtctgggcagagcccgctggacctcacctccccgccgtgctggccgaagaatttcactctccgcacggccagcgtggccgggaccccgctgttcatgggcacccggccccgccccgccccggcgggctccctcctaggcggccgc

SEQ ID NO: 736818 - DNA, 891 bp, Homo sapiens
gcccgccgccacccggcagtagttgcggaggtcagccccgcctacttcctctttccctcggagcgggcggcggcgttggcggcttgtgcagcaatggccaagatcaaggctcgagatcttcgcgggaagaagaaggaggagctgctgaaacagctggacgacctgaaggtggagctgtcccagctgcgcgtcgccaaagtgacaggcggtgcggcctccaagctctctaagatccgagtcgtccggaaatccattgcccgtgttctcacagttattaaccagactcagaaagaaaacctcaggaaattctacaagggcaagaagtacaagcccctggacctgcggcctaagaagacacgtgccatgcgccgccggctcaacaagcacgaggagaacctgaagaccaagaagcagcagcggaaggagcggctgtacccgctgcggaagtacgcggtcaaggcctgaggggcgcattgtcaataaagcacagctggctgagaaaaaaaaaaaaaaaaacaaaaaaaaaaaaaaaaaaaaaaaaaaaaaaaaaaaaaaaaaaaaaaaaaaaaaaaaaaaaaaaaaacaaaaaaaaaaaaaagggcgggagaggaggagagagggaagggggggagggacggagagaggggaaagacaagacgggaaggcgcggagagggagggaacgcaaggggggggacggagggggaagaggcgagaaaagagaaaaagagagcaggagaaaagcaaaagagaacagaaaaaaagacgcgagaggaaagagggagaacagagcgcaaagagaaaaaacacaacaaacgacggcagaagggagaaagacacagagaaaaaaagaacagcaaaaaaaagaaggagagagacagaaaagcaccac

SEQ ID NO: 736819 - DNA, 811 bp, Homo sapiens
  misc_feature (551)..(551): n is a, c, g, or t
  misc_feature (564)..(564): n is a, c, g, or t
  misc_feature (566)..(566): n is a, c, g, or t
gcccgccgccacccggcagtagttgcggaggtcagccccgcctacttcctctttccctcggagcgggcggcggcgttggcggcttgtgcagcaatggccaagatcaaggctcgagatcttcgcgggaagaagaaggaggagctgctgaaacagctggacgacctgaaggtggagctgtcccagctgcgcgtcgccaaagtgacaggcggtgcggcctccaagctctctaagatccgagtcgtccggaaatccattgcccgtgttctcacagttattaaccagactcagaaagaaaacctcaggaaattctacaagggcaagaagtacaagcccctggacctgcggcctaagaagacacgtgccatgcgccgccggctcaacaagcacgaggagaacctgaagaccaagaagcagcagcggaaggagcggctgtacccgctgcggaagtacgcggtcaaggcctgaggggcgcattgtcaataaagcacagctggctgagaaaaaaaaaaaaaaaaacaaaaaaaaaaaaaaaaaaaaaaaaaaaaaaaaancgggggggttatntntggggggggggaaaaaaggtttaataataaatgggacgtagtgtgaataatagttgcttcgtcgagaaacccactatttttttgggcaccaaggggggagaaacggcggggccaccaaaggaggaggggtaaatctgaaaaccacgtgttcttggtttatctgtccgtcaacaacaattttgctatggaatcaagatatatgcgggagaatacactctattacaaacaatgggtagacacattgt

SEQ ID NO: 736820 - DNA, 743 bp, Homo sapiens
gcccgccgccacccggcagtagttgcggaggtcagccccgcctacttcctctttccctcggagcgggcggcggcgttggcggcttgtgcagcaatggccaagatcaaggctcgagatcttcgcgggaagaagaaggaggagctgctgaaacagctggacgacctgaaggtggagctgtcccagctgcgcgtcgccaaagtgacaggcggtgcggcctccaagctctctaagatccgagtcgtccggaaatccattgcccgtgttctcacagttattaaccagactcagaaagaaaacctcaggaaattctacaagggcaagaagtacaagcccctggacctgcggcctaagaagacacgtgccatgcgccgccggctcaacaagcacgaggagaacctgaagaccaagaagcagcagcggaaggagcggctgtacccgctgcggaagtacgcggtcaaggcctgaggggcgcattgtcaataaagcacagctggctgagaaaaaaaaaaaaaaaaacaaaaaaaaaaaaaaaaaaaaaaaaaaaaaaaaaacccgcgagagagcctatctattggcgcggggcgggagaaaaaagagaggacaagaaaggggcgaagagggcgccaaagggtggtccccggagaccccattttctttgggcacaaggggggaaaacttcggcggggccccccaaaaagagagggcgtaatattccgaaaaccccggggaaacccggttaaggt

SEQ ID NO: 736821 - DNA, 857 bp, Homo sapiens
  misc_feature (552)..(552): n is a, c, g, or t
  misc_feature (554)..(554): n is a, c, g, or t
gcccgccgccacccggcagtagttgcggaggtcagccccgcctacttcctctttccctcggagcgggcggcggcgttggcggcttgtgcagcaatggccaagatcaaggctcgagatcttcgcgggaagaagaaggaggagctgctgaaacagctggacgacctgaaggtggagctgtcccagctgcgcgtcgccaaagtgacaggcggtgcggcctccaagctctctaagatccgagtcgtccggaaatccattgcccgtgttctcacagttattaaccagactcagaaagaaaacctcaggaaattctacaagggcaagaagtacaagcccctggacctgcggcctaagaagacacgtgccatgcgccgccggctcaacaagcacgaggagaacctgaagaccaagaagcagcagcggaaggagcggctgtacccgctgcggaagtacgcggtcaaggcctgaggggcgcattgtcaataaagcacagctggctgagaaaaaaaaaaaaaaaaacaaaaaaaaaaaaaaaaaaaaaaaaaaaaaaaaaananaaaaaaaaaaaaaaagggggggggggggcataaaataattccccgggggggggcaatttgggcccctttttttagaaaaaggggggcccacataatgaggggggagcgtatattaaaaacacagaagcggcgggcgcgggttaaacaacacgctggtggagagaaaaatggttgcaggcgatttaggaagaaaacccatttcgggggggggaatatgggaccacaactagaaatatacgtgaggagaaaatactaggagagagtggacccgtattttcgggaaactgtaggtatagtaattag

SEQ ID NO: 736822 - DNA, 817 bp, Homo sapiens
gcccgccgccacccggcagtagttgcggaggtcagccccgcctacttcctctttccctcggagcgggcggcggcgttggcggcttgtgcagcaatggccaagatcaaggctcgagatcttcgcgggaagaagaaggaggagctgctgaaacagctggacgacctgaaggtggagctgtcccagctgcgcgtcgccaaagtgacaggcggtgcggcctccaagctctctaagatccgagtcgtccggaaatccattgcccgtgttctcacagttattaaccagactcagaaagaaaacctcaggaaattctacaagggcaagaagtacaagcccctggacctgcggcctaagaagacacgtgccatgcgccgccggctcaacaagcacgaggagaacctgaagaccaagaagcagcagcggaaggagcggctgtacccgctgcggaagtacgcggtcaaggcctgaggggcgcattgtcaataaagcacagctggctgagaaaaaaaaaaaaaaaaaaaaaaaaaaaaaaaaaaaaaaaacaaaaaaaaaaaaacaaaaaccgcggggccaatatggggggggggggaaacaaggggtaaaaatgggcatggggctgaacggggcgttccggaggacccgagttctttgttgaccaaggggcgggaaacctgggggggcaccccaaatgggagggggacgccaaaaatgtggcataaaccgcccggggaagcccgctttaaagactctggccggcaagaaccggaatcctggagtacgatgcatgatcttggagcacaggggcacttagactgtagac

SEQ ID NO: 736823 - DNA, 907 bp, Homo sapiens
gcccgccgccacccggcagtagttgcggaggtcagccccgcctacttcctctttccctcggagcgggcggcggcgttggcggcttgtgcagcaatggccaagatcaaggctcgagatcttcgcgggaagaagaaggaggagctgctgaaacagctggacgacctgaaggtggagctgtcccagctgcgcgtcgccaaagtgacaggcggtgcggcctccaagctctctaagatccgagtcgtccggaaatccattgcccgtgttctcacagttattaaccagactcagaaagaaaacctcaggaaattctacaagggcaagaagtacaagcccctggacctgcggcctaagaagacacgtgccatgcgccgccggctcaacaagcacgaggagaacctgaagaccaagaagcagcagcggaaggagcggctgtacccgctgcggaagtacgcggtcaaggcctgaggggcgcattgtcaataaagcacagctggctgagaaaaaaaaaaaaaaaaaaaaaaaaaaaaaaaaaaaaaaaacaaaaaaaaaaaaaccccggggccttttttgcgcagggggggagaaacacgagggtcattaaattggcgagcattggcacaaagtggttcccaggaacccacgtttttttgtgccacaggtgggagaaacagacggggccccccaataaagagggagcgcccaaaataatatgcgaaaagcgacgggttacctgtagaattcagtgggcaatgaaaattcggcgagaaataacaccgcagaaatgcgcagaggctaattaggaagcacacaaaagatctctcaaagcagctttgcgcgagagaactcgtggttctaaaaaacaaccgaacccagcgggtgttttcgcgcaaagacacacacttctcgc

SEQ ID NO: 736824 - DNA, 1024 bp, Homo sapiens
gcccgccgccacccggcagtagttgcggaggtcagccccgcctacttcctctttccctcggagcgggcggcggcgttggcggcttgtgcagcaatggccaagatcaaggctcgagatcttcgcgggaagaagaaggaggagctgctgaaacagctggacgacctgaaggtggagctgtcccagctgcgcgtcgccaaagtgacaggcggtgcggcctccaagctctctaagatccgagtcgtccggaaatccattgcccgtgttctcacagttattaaccagactcagaaagaaaacctcaggaaattctacaagggcaagaagtacaagcccctggacctgcggcctaagaagacacgtgccatgcgccgccggctcaacaagcacgaggagaacctgaagaccaagaagcagcagcggaaggagcggctgtacccgctgcggaagtacgcggtcaaggcctgaggggcgcattgtcaataaagcacagctggctgagaaaaaaacaaaccaaacaacaaacaaaaaaaaaagacgaggggggggcgcgcctcaaagaagatatcccgcgcgcgaggggggcgcccagagtttagcagcgcgtcacgccgaggttttgcgtgtggaacagaggggggcgccccaaagagaggagagagcgcgcgaaataaagaagagccgaaagagcaccgtgggccgcagcagttgataaacacaacgacctgggagacgtggggaaaacacggtgcgaaccaggggcgaacccgtgggagaagaggaacccttaactcggggggggcgggcgaaccatatagggggggggcacaaaagattacactctaagcggaaggattttgaagagggcgccacaaaggggggaaacattatttatcaaattttagagaggggggtataacagcggggggtttaaaaccacatggagcggatattatggtatagggaggagagtaaaaaaagtgtggcgataacaggggaggaatatgcacaatggcacacattcttt

SEQ ID NO: 736825 - DNA, 673 bp, Homo sapiens
gcccgccgccacccggcagtagttgcggaggtcagccccgcctacttcctctttccctcggagcgggcggcggcgttggcggcttgtgcagcaatggccaagatcaaggctcgagatcttcgcgggaagaagaaggaggagctgctgaaacagctggacgacctgaaggtggagctgtcccagctgcgcgtcgccaaagtgacaggcggtgcggcctccaagctctctaagatccgagtcgtccggaaatccattgcccgtgttctcacagttattaaccagactcagaaagaaaacctcaggaaattctacaagggcaagaagtacaagcccctggacctgcggcctaagaagacacgtgccatgcgccgccggctcaacaagcacgaggagaacctgaagaccaagaagcagcagcggaaggagcggctgtacccgctgcggaagtacgcggtcaaggcctgaggggcgcattgtcaataaagcacagctggctgagaaaaaatcgacccctttggccacattaatttagactccgccaaggctaaccaaggcggcccatttccacaaaacttgtttcgcccaattttgggcggggcccaaatacgggccattgtgccaatgccctattggggaacctttcaatccccggccgagttttcggccgcccggc

SEQ ID NO: 736826 - DNA, 680 bp, Homo sapiens
gcccgccgccacccggcagtagttgcggaggtcagccccgcctacttcctctttccctcggagcgggcggcggcgttggcggcttgtgcagcaatggccaagatcaaggctcgagatcttcgcgggaagaagaaggaggagctgctgaaacagctggacgacctgaaggtggagctgtcccagctgcgcgtcgccaaagtgacaggcggtgcggcctccaagctctctaagatccgagtcgtccggaaatccattgcccgtgttctcacagttattaaccagactcagaaagaaaacctcaggaaattctacaagggcaagaagtacaagcccctggacctgcggcctaagaagacacgtgccatgcgccgccggctcaacaagcacgaggagaacctgaagaccaagaagcagcagcggaaggagcggctgtacccgctgcggaagtacgcggtcaaggcctgaggggcgcattgtcaataaagcacagctggctgagaaaaaaccactctacctctcttttctctcctcacacctctatcatcccttccccctcaatccaccatcctggggttttacacaattcccctaatcataacaattgttgtctccctctggccacccttattttacctccgccactctttcctttgggccgccatttggggcctttctgctcc

SEQ ID NO: 736827 - DNA, 718 bp, Homo sapiens
gcccgccgccacccggcagtagttgcggaggtcagccccgcctacttcctctttccctcggagcgggcggcggcgttggcggcttgtgcagcaatggccaagatcaaggctcgagatcttcgcgggaagaagaaggaggagctgctgaaacagctggacgacctgaaggtggagctgtcccagctgcgcgtcgccaaagtgacaggcggtgcggcctccaagctctctaagatccgagtcgtccggaaatccattgcccgtgttctcacagttattaaccagactcagaaagaaaacctcaggaaattctacaagggcaagaagtacaagcccctggacctgcggcctaagaagacacgtgccatgcgccgccggctcaacaagcacgaggagaacctgaagaccaagaagcagcagcggaaggagcggctgtacccgctgcggaagtacgcggtcaaggcctgaggggcgcattgtcaataaagcacagctggctgagaaaaaaccaaacccaacacaacaacaagcaagaaacaaacacccagagtcaatagaggccgagcaagctttcatgggcggatcaagctcttgtgcaatcgccttgggagcgatacaatcagtgcgagtacaacgtcggactggaacctgggtacaataacgctgcagaatccctttgcgcgggtatcaaaggcgagaggccttcaagttgcactaagaa

SEQ ID NO: 736828 - DNA, 609 bp, Homo sapiens
gcccgccgccacccggcagtagttgcggaggtcagccccgcctacttcctctttccctcggagcgggcggcggcgttggcggcttgtgcagcaatggccaagatcaaggctcgagatcttcgcgggaagaagaaggaggagctgctgaaacagctggacgacctgaaggtggagctgtcccagctgcgcgtcgccaaagtgacaggcggtgcggcctccaagctctctaagatccgagtcgtccggaaatccattgcccgtgttctcacagttattaaccagactcagaaagaaaacctcaggaaattctacaagggcaagaagtacaagcccctggacctgcggcctaagaagacacgtgccatgcgccgccggctcaacaagcacgaggagaacctgaagaccaagaagcagcagcggaaggagcggctgtacccgctgcggaagtacgcggtcaaggcctgaggggcgcattgtcaataaagcacagctggctgagaaaaaatataataactttatttgtgttttacctacctctgtaaataaatatactatttttttttttccttgggggggggcccgtcccacaattccccttattgggttgtt

SEQ ID NO: 736829 - DNA, 727 bp, Homo sapiens
  misc_feature (507)..(507): n is a, c, g, or t
gcccgccgccacccggcagtagttgcggaggtcagccccgcctacttcctctttccctcggagcgggcggcggcgttggcggcttgtgcagcaatggccaagatcaaggctcgagatcttcgcgggaagaagaaggaggagctgctgaaacagctggacgacctgaaggtggagctgtcccagctgcgcgtcgccaaagtgacaggcggtgcggcctccaagctctctaagatccgagtcgtccggaaatccattgcccgtgttctcacagttattaaccagactcagaaagaaaacctcaggaaattctacaagggcaagaagtacaagcccctggacctgcggcctaagaagacacgtgccatgcgccgccggctcaacaagcacgaggagaacctgaagaccaagaagcagcagcggaaggagcggctgtacccgctgcggaagtacgcggtcaaggcctgaggggcgcattgtcaataaagcacagctggctgagaaaaaaanaaaaaaatctggtcaagtggagatttttaagaacttcctttttaagttgtaaaccttttattacaaatttaacacatgaagttcttaaaaatctcaattgaccagattatgacacagtttaacaacttcatttgtaattctgtactaacaagtttacaacctggattttttgcacaccaagtcaacaaatctgcaagccacctgttaatacggtcttaac

SEQ ID NO: 736830 - DNA, 552 bp, Homo sapiens
gcccgccgccacccggcagtagttgcggaggtcagccccgcctacttcctctttccctcggagcgggcggcggcgttggcggcttgtgcagcaatggccaagatcaaggctcgagatcttcgcgggaagaagaaggaggagctgctgaaacagctggacgacctgaaggtggagctgtcccagctgcgcgtcgccaaagtgacaggcggtgcggcctccaagctctctaagatccgagtcgtccggaaatccattgcccgtgttctcacagttattaaccagactcagaaagaaaacctcaggaaattctacaagggcaagaagtacaagcccctggacctgcggcctaagaagacacgtgccatgcgccgccggctcaacaagcacgaggagaacctgaagaccaagaagcagcagcggaaggagcggctgtacccgctgcggaagtacgcggtcaaggcctgaggggcgcattgtcaataaagcacagctggctgagaaaaaaaaaccatttcccggcaactcttattttgcctttgtcgcttttcttgt

SEQ ID NO: 736831 - DNA, 788 bp, Homo sapiens
  misc_feature (563)..(563): n is a, c, g, or t
  misc_feature (570)..(570): n is a, c, g, or t
  misc_feature (573)..(573): n is a, c, g, or t
  misc_feature (590)..(590): n is a, c, g, or t
  misc_feature (597)..(597): n is a, c, g, or t
  misc_feature (612)..(612): n is a, c, g, or t
  misc_feature (620)..(620): n is a, c, g, or t
  misc_feature (623)..(624): n is a, c, g, or t
  misc_feature (629)..(629): n is a, c, g, or t
  misc_feature (709)..(709): n is a, c, g, or t
gcccgccgccacccggcagtagttgcggaggtcagccccgcctacttcctctttccctcggagcgggcggcggcgttggcggcttgtgcagcaatggccaagatcaaggctcgagatcttcgcgggaagaagaaggaggagctgctgaaacagctggacgacctgaaggtggagctgtcccagctgcgcgtcgccaaagtgacaggcggtgcggcctccaagctctctaagatccgagtcgtccggaaatccattgcccgtgttctcacagttattaaccagactcagaaagaaaacctcaggaaattctacaagggcaagaagtacaagcccctggacctgcggcctaagaagacacgtgccatgcgccgccggctcaacaagcacgaggagaacctgaagaccaagaagcagcagcggaaggagcggctgtacccgctgcggaagtacgcggtcaaggcctgaggggcgcattgtcaataaagcacagctggctgagaaaaaaaagcaagcttatgcatgcggccgcaattcgagctcacttggccaattcgccctatagngagtcgnatnacaattcactggccgcngttacancgtcgtgactggganaacctggngtnncccanttaatcgccttgcacacatcccctttcgcaggtggggaataaacaaaaggccccccccaacgccttcccaacattgccancctgatggcaatgaaattgaagcgtatattttgtaaattcgcgtaaattttgtactatttttaccaatgccgtcggccc

SEQ ID NO: 736832 - DNA, 597 bp, Homo sapiens
gcccgccgccacccggcagtagttgcggaggtcagccccgcctacttcctctttccctcggagcgggcggcggcgttggcggcttgtgcagcaatggccaagatcaaggctcgagatcttcgcgggaagaagaaggaggagctgctgaaacagctggacgacctgaaggtggagctgtcccagctgcgcgtcgccaaagtgacaggcggtgcggcctccaagctctctaagatccgagtcgtccggaaatccattgcccgtgttctcacagttattaaccagactcagaaagaaaacctcaggaaattctacaagggcaagaagtacaagcccctggacctgcggcctaagaagacacgtgccatgcgccgccggctcaacaagcacgaggagaacctgaagaccaagaagcagcagcggaaggagcggctgtacccgctgcggaagtacgcggtcaaggcctgaggggcgcattgtcaataaagcacagctggctgagaaaaaagcagcagcggaaggagcggctgtacccgctgcggaagtacgcggtcaaggcctgaggggcgcattgtcaataaagcacagctggctgagaaa

SEQ ID NO: 736833 - DNA, 2142 bp, Homo sapiens
gcccgccgccacccggcagtagttgcggaggtcagccccgcctacttcctctttccctcggagcgggcggcggcgttggcggcttgtgcagcaatggccaagatcaaggctcgagatcttcgcgggaagaagaaggaggagctgctgaaacagctggacgacctgaaggtggagctgtcccagctgcgcgtcgccaaagtgacaggcggtgcggcctccaagctctctaagatccgagtcgtccggaaatccattgcccgtgttctcacagttattaaccagactcagaaagaaaacctcaggaaattctacaagggcaagaagtacaagcccctggacctgcggccctaagaagacacgtgccatgcgccgccggctcaacaagcacgaggagaacctgaagaccaagaagcagcagcggaaggagcggctgtacccgctgcggaagtacgcggtcaaggcctgaggggcgcattgtcaataaagcacagctggctgagactgctttgtttcctggcacttccactgattgggtggaggtgggtgggtctggttttggggaccaggtgtctgatgggttccagcaagcgtcctgcccaccacagttgtctgctctggtggggcctggagagtcctggccatggggatctgctggatgccagcacagtcactttgcgtctgtggggagaagcggcatgcctgtgcgccactgaggggagcgggtgaggtcggcaccatctgaggtggttggtgttaggtttgagggtccctgggtgatttggacgtgcgggatatttgacgtctagtctgatcggcagctccagacactaagattttcccatctggggtgaaggcacaggtgtgggccacatccaggactccctgcttcagggtctcaaggcactttcctgtgttgcagtcccagactttgaccatgcgggaatagccggcgctggccagccacagctcgtcgggagagaaggctatgctcttcacccaggtgacatggcccttcagttggataagcaggctgctggttgtgggcttccagatgtggatggtcttgtcccaggagccggatgccaggaggccggatgctgaatagcacaggcagctgatgttgccactgtgtccctctagcgcctggtgggagactgctggggtcaccatccgcaggtcccagatgctgtacggtggagtcccaggagccggtggccaggcagttcaccgtgggtgagaagtcgctgctctggatggagtcacggtgcccaactaagaggcgcagcatctggccggactagagagagccctgagctgcagaaggcagcagagggcagccggctacctggccttgacagtccaggaaagggggacctcgtgcaaaaagcctgagggctgctgtgtgcaaggaagcctggagaggcggctgtggccaggtgggggcagccttggttgcctgctgtgggcatgggccatgggaaccagtggagggtttgagctgggagggcaagactggtgacatcctctctggaactggtccttgaatcccagactggtggccccagcccctcaacgtacctgcacatcccagagcatcacccgcttgtcccagccacctgatgccagctgtctcgagtcagggctgaagctgaccgtctccacactccgttggtgacctgcaggcaccagcccggggtcggggaaggtggaaaggtgacgtgacacaggacacagcaccatctgaaagggaacgctggcctggctgcttggctcccagctcactcacccttcaggacccgcagacacttcgctcttgccacatcccacaggcggacagtgcagtcacaggaggcgctggcgaagaggtggccatcaggggagaagcggcagaacttcacggggcctgtgtggccacccagcctccacagcagctgcccactccgggtctcccagccatacacgcagccatcttctgagcctgtgagcagcatctggccatcaggggagaaggcagaagagttgacctccccgccgtgctggccgaagaatttcactctccgcacggccagcgtggccgggaccccgctgttcatgggcacccggccccgccccgccccggcgggctccctcctaggcggccgc

SEQ ID NO: 736834 - DNA, 2032 bp, Homo sapiens
gcccgccgccacccggcagtagttgcggaggtcagccccgcctacttcctctttccctcggagcgggcggcggcgttggcggcttgtgcagcaatggccaagatcaaggctcgagatcttcgcgggaagaagaaggaggagctgctgaaacagctggacgacctgaaggtggagctgtcccagctgcgcgtcgccaaagtgacaggcggtgcggcctccaagctctctaagatccgagtcgtccggaaatccattgcccgtgttctcacagttattaaccagactcagaaagaaaacctcaggaaattctacaagggcaagaagtacaagcccctggacctgcggccctaagaagacacgtgccatgcgccgccggctcaacaagcacgaggagaacctgaagaccaagaagcagcagcggaaggagcggctgtacccgctgcggaagtacgcggtcaaggcctgaggggcgcattgtcaataaagcacagctggctgagactgctttgtttcctggcacttccactgattgggtggaggtgggtgggtctggttttggggaccaggtgtctgatgggttccagcaagcgtcctgcccaccacagttgtctgctctggtggggcctggagagtcctggccatggggatctgctggatgccagcacagtcactttgcgtctgtggggagaagcggcatgcctgtgcgccactgaggggagcgggtgaggtcggcaccatctgaggtggttggtgttaggtttgagggtccctgggtgatttggacgtgcgggatatttgacgtctagtctgatcggcagctccagacactaagattttcccatctggggtgaaggcacaggtgtgggccacatccaggactccctgcttcagggtctcaaggcactttcctgtgttgcagtcccagactttgaccatgcgggaatagccggcgctggccagccacagctcgtcgggagagaaggctatgctcttcacccaggtgacatggcccttcagttggataagcaggctgctggttgtgggcttccagatgtggatggtcttgtcccaggagccggatgccaggaggccggatgctgaatagcacaggcagctgatgttgccactgtgtccctctagcgcctggtgggagactgctggggtcaccatccgcaggtcccagatgctgtacggtggagtcccaggagccggtggccaggcagttcaccgtgggtgagaagtcgctgctctggatggagtcacggtgcccaactaagaggcgcagcatctggccggactagagagagccctgagctgcagaaggcagcagagggcagccggctacctggccttgacagtccaggaaagggggacctcgtgcaaaaagcctgagggctgctgtgtgcaaggaagcctggagaggcggctgtggccaggtgggggcagccttggttgcctgctgtgggcatgggccatgggaaccagtggagggtttgagctgggagggcaagactggtgacatcctctctggaactggtccttgaatcccagactggtggccccagcccctcaacgtacctgcacatcccagagcatcacccgcttgtcccagccacctgatgccagctgtctcgagtcagggctgaagctgaccgtctccacactccgttggtgacccttcaggacccgcagacacttcgctcttgccacatcccacaggcggacagtgcagtcacaggaggcgctggcgaagaggtggccatcaggggagaagcggcagaacttcacggggcctgtgtggccacccagcctccacagcagctgcccactccgggtctcccagccatacacgcagccatcttctgagcctgtgagcagcatctggccatcaggggagaaggcagaagagttgacctccccgccgtgctggccgaagaatttcactctccgcacggccagcgtggccgggaccccgctgttcatgggcacccggccccgccccgccccggcgggctccctcctaggcggccgc

SEQ ID NO: 736835 - DNA, 580 bp, Homo sapiens
gcccgccgccacccggcagtagttgcggaggtcagccccgcctacttcctctttccctcggagcgggcggcggcgttggcggcttgtgcagcaatggccaagatcaaggctcgagatcttcgcgggaagaagaaggaggagctgctgaaacagctggacgacctgaaggtggagctgtcccagctgcgcgtcgccaaagtgacaggcggtgcggcctccaagctctctaagatccgagtcgtccggaaatccattgcccgtgttctcacagttattaaccagactcagaaagaaaacctcaggaaattctacaaggtgagtctgcctggacatagggagggttggctgcaggaagccaagtgctagccgtccctggccggggacatggtaaagaggtttttcttggtgcgtgggctgagagtggttagccttcccaatttgttgctgggctcactcttctaccagtgtcttgcactggcacgtggctctgcagaccacttcctcaggctgcagatgtcaagaattcattggggcttggggtgtcctggctggagactcagtttttgaaaccagccttccc

SEQ ID NO: 736836 - DNA, 2141 bp, Homo sapiens
gcccgccgccacccggcagtagttgcggaggtcagccccgcctacttcctctttccctcggagcgggcggcggcgttggcggcttgtgcagcaatggccaagatcaaggctcgagatcttcgcgggaagaagaaggaggagctgctgaaacagctggacgacctgaaggtggagctgtcccagctgcgcgtcgccaaagtgacaggcggtgcggcctccaagctctctaagatccgagtcgtccggaaatccattgcccgtgttctcacagttattaaccagactcagaaagaaaacctcaggaaattctacaagggcaagaagtacaagcccctggacctgcggcctaagaagacacgtgccatgcgccgccggctcaacaagcacgaggagaacctgaagaccaagaagcagcagcggaaggagcggctgtacccgctgcggaagtacgcggtcaaggcctgaggggcgcattgtcaataaagcacagctggctgagactgctttgtttcctggcacttccactgattgggtggaggtgggtgggtctggttttggggaccaggtgtctgatgggttccagcaagcgtcctgcccaccacagttgtctgctctggtggggcctggagagtcctggccatggggatctgctggatgccagcacagtcactttgcgtctgtggggagaagcggcatgcctgtgcgccactgaggggagcgggtgaggtcggcaccatctgaggtggttggtgttaggtttgagggtccctgggtgatttggacgtgcgggatatttgacgtctagtctgatcggcagctccagacactaagattttcccatctggggtgaaggcacaggtgtgggccacatccaggactccctgcttcagggtctcaaggcactttcctgtgttgcagtcccagactttgaccatgcgggaatagccggcgctggccagccacagctcgtcgggagagaaggctatgctcttcacccaggtgacatggcccttcagttggataagcaggctgctggttgtgggcttccagatgtggatggtcttgtcccaggagccggatgccaggaggccggatgctgaatagcacaggcagctgatgttgccactgtgtccctctagcgcctggtgggagactgctggggtcaccatccgcaggtcccagatgctgtacggtggagtcccaggagccggtggccaggcagttcaccgtgggtgagaagtcgctgctctggatggagtcacggtgcccaactaagaggcgcagcatctggccggactagagagagccctgagctgcagaaggcagcagagggcagccggctacctggccttgacagtccaggaaagggggacctcgtgcaaaaagcctgagggctgctgtgtgcaaggaagcctggagaggcggctgtggccaggtgggggcagccttggttgcctgctgtgggcatgggccatgggaaccagtggagggtttgagctgggagggcaagactggtgacatcctctctggaactggtccttgaatcccagactggtggccccagcccctcaacgtacctgcacatcccagagcatcacccgcttgtcccagccacctgatgccagctgtctcgagtcagggctgaagctgaccgtctccacactccgttggtgacctgcaggcaccagcccggggtcggggaaggtggaaaggtgacgtgacacaggacacagcaccatctgaaagggaacgctggcctggctgcttggctcccagctcactcacccttcaggacccgcagacacttcgctcttgccacatcccacaggcggacagtgcagtcacaggaggcgctggcgaagaggtggccatcaggggagaagcggcagaacttcacggggcctgtgtggccacccagcctccacagcagctgcccactccgggtctcccagccatacacgcagccatcttctgagcctgtgagcagcatctggccatcaggggagaaggcagaagagttgacctccccgccgtgctggccgaagaatttcactctccgcacggccagcgtggccgggaccccgctgttcatgggcacccggccccgccccgccccggcgggctccctcctaggcggccgc

SEQ ID NO: 736837 - DNA, 788 bp, Homo sapiens
gcccgccgccacccggcagtagttgcggaggtcagccccgcctacttcctctttccctcggagcgggcggcggcgttggcggcttgtgcagcaatggccaagatcaaggctcgagatcttcgcgggaagaagaaggaggagctgctgaaacagctggacgacctgaaggtggagctgtcccagctgcgcgtcgccaaagtgacaggcggtgcggcctccaagctctctaagatccgagtcgtccggaaatccattgcccgtgttctcacagttattaaccagactcagaaagaaaacctcaggaaattctacagggcaagaagtccaagcccctgacctgagtgtttcttctgagtccggaaatccattgcccgtgttctcacagttattaaccagactcagaaagaaaacctcaggaattctacagggcaagaagtacaagcccctggacctgcggcctaagaagacacgtgccatgcgccgccggctcaacaagcacgaggagaacctgaagaccaagaagcagcagcggaaggagcggctgtacccgctgcggaagtacgcggtcaaggcctgaggggcgcattgtcaataaagcacagctggctgagaaaaaacacaaaacaacacacacaccacaaacacttgtgggggccgcctatggggcccctggaaaaaccgcttcaaaacaccaattccgttggggccgccgggggcccaagaaggggaacggtgacccggggccaataggggggtccccagggaaaccggggaccaggacaacgggc

SEQ ID NO: 736838 - DNA, 1503 bp, Homo sapiens
  misc_feature (1022)..(1022): n is a, c, g, or t
gtggagagatagctgggctcacttcagaagacccaaattttgattcaagactgctttgttctctcaccagaggcaaacatatcaccaggttgcctttgggaggagactgctaacaaccattgagcagacataacctggagatttgttttgcaatgtgttgtataacaatgttgatttaattgcctcaggcgatttcacatgaaaatccaggtagaaaagtggaaaatatagcaacagtgggattggaggtgaatagctgcctccacctgtggatgaggcatgtcctctctttttatcaaactctcatcacctcttttcttatatcctgtctgcttcatttatttatatcatctgcttgcctctgttggtatggcagttagcaacactaatcatctggtttggggaggacggtgctgcacttattttcaccaacaaagggccaggggacgttttgcactcattttttgatagcaggaacacttacaggatcatgaacaccacattggaatcagaggttcctcagtgctactcaaaacttctctgctgcaattccaactctacctccctgggccctcgttagaatcctttgatcatcctcctccagggattgagatcacatgataaacaatcttggattgggtcaggttaagctatatgcaggtatgataaattcataattttcaaactgcggtatgtgtacctaaggcttttcacggattgcatactcaggacaattttcaggaaattaatttccagatcctctatatacactatactctttccttaaattgatctgctgagaatgagtctttgttcatactgtttcttttcccacagaaaaaagatataggctacccatcccaaatcttaatacattgctcttaatgtgacaccaaaaacctcagatgtagcaaacagaggaaaggtttgatgattaatcataaaaccatagagccttgggcttttgcctcttatacacatgttaaagctgattatgatgttagataacatagaaattgggngtttggactcacaaatagattttcagaattcagatgtatgataaagtggagtgatggtaacaattttttttttttaacggctttttggttttctcttcctgactcttgtcaaagaatttcttgctcttgagggaaagcccatgggagagtgaaacaaagaaaattagtagaaggcactgaatgccaaaaatgtcttcttacatataattataatcaattatttcccattattgtcaatatccttccctaggatgtatcttgactgggaaaaaaagtaacttggaagagctaaagcagtatagatttgccatgctgattattttaaatgtaaccagaatggcttttgggaatgccaaatttttataaggtgcagtagacagatagaacccaaggataaaaactttcacatggttctttcagatttgatgtgcattcattaataaagttgtcagaacccattgtatcaaaccataacatgaaa

SEQ ID NO: 736839 - DNA, 2792 bp, Homo sapiens
tgctggtactgccccgggattaacgggcagcgcagtgctcttggccgggaggaggctgtgctgcaccagcacctcttgctccacatctccagagagcccagggccctgtggccgagtgtgtccagcccagtgtcatggggagcttccatatctcatggctccttgctgggccaagccctccagaaccccaaacccccaaagactgatgaatgccagagtggccaccttgcttatctgtggccccggccctggtgatcaccatggcagctgggaagggagccccgttgagcccatcggctgaaaacagatggcgacttagcgaacctgagctgggccggggctgcaagccagtgctgctcgagaagacgaaccgcctgggccctgaggctgctgtgggcagggcgggccgggatgtgggcagtgcggagctggcactgttggtagccccaggcaagccccgacctggcaagccgctgcccccgaagacacgtggagagcagaggcagagcgccttcacggagctgccgaggatgaaggaccggcaggtggatgctcaggcccaggagagggagcacgatgaccccacaggccaacctggtgccccacagctgacccagaacatccccagaggcccagctggcagcaaagtcttctctgtgtggcccagcggagcacgaagtgagcaaagaagcgcctttagcaaaccaaccaagcgaccagcagagaggcctgagctaacctcagtcttccctgcaggggaatctgcagatgccctgggggagctgtctggactcctcaacactacagacctcgcttgttggggtcgactttcaactcccaagcttttggttggtgatttgtggaacttgcaagcattgccacagaatgctccactctgtagcacttttctgggtgcccctacactgtggctggagcatacccaggcccaggtgcccccaccctcatcatcctccaccacttcgtgggccctcctgccacccaccctcacctccctgggcttgtccacccagaactggtgtgcaaagtgcaacctgtcctttcgcctaacgtccgacctggtctttcacatgcgatcccaccacaaaaaggagcatgcggggcctgacccacattctcagaagcggagagaagaggcccttgcctgccctgtgtgccaggagcacttccgggagcgccaccacctctcccggcacatgacttctcacagctagcaggtgaccgcagaatgacctgctgggtgcagcagccagcctttggcagaggggggctccctgggcctgcgttgagggggctgtcatggtcctttgcagagctgctgcttttggcattcatagataaacagctcaggcataatttgaaaaagccacacctgcatgatgtgttttgaaggaaatgaagtcctgaaataaagtgatgggctttgcaaatccagggtagaggccctaacaggcacagagagcaggggcaactcctggcacacatcatgggctttggaggcacacaagcctggattcgaatctgggctctttcacatactagctgtgaccctggacaaagagctttaacctgctgagtccccattttctcatctgtgaaatggagatgataacactgtgtcttaggttggcattcaggtcacatgaaaggtgtgtggaaagtggccagcattctgcctgcagaccctgagcactgagtcaacaaggtttgtgatgatgtctgtactagttagctattgttattaacaagatctccatggcagacaagctaaagcatctgcctaagtcgtgagtctgtgggttggctcaggttaactgagcaggtggggatctcagccagcctcccagactgcacctcttctattgctctcctctgtccaccgttccaggcagcagcactcccacctggctgctctgatgtcctcgctccctccattcctgcctctcaccatgcacgcatccattgtccacacacacacaaccagataatcttctgaaagtgtaactcagatgatgcctccaaccctgtggctgcccttcacacttacaggcctaaccccagcaggacctgccagctgcttcatgaacaagtccctgcctcatgttaattgcaagcactcatttcactctccctgtgtgccaggcaatagcataagcactggaagaatacagatgttatagtgagtcctacaatagccctggaaggcaagagctgtttcctttccatttctacaatgagtcaattgcagatgatgctataacacttccagtgtttctgacacttccctgaagctatacctgctaccttcatgggccgagcttgcccttatgaggcccacaggtggcagtgggcagaggggaccccgctataccacctcgctgctgttccactgtctgctcccgtgttctgaccacagctctggtgccgtttctcaagcctgggcttcattcaacattttctatctagctcttcatggtgctgctcctgctatggttccacagggcttcttctcgcaggtcagctccttagagaggtctcccagattccccgtaaagcagccctgcagcctctgcctctctcagccgcatcaccctgttgcttccttcacagcatgtctcaccatctgcaaccatctttctgtttgtcgtcttgttgatttgctgcctccacactgtcagctccttgggaacagagattggtttgtttactgtgcatccctggtgcccagaacagggcatggcatattgttggtgcataataaatattgtggaaat

SEQ ID NO: 736840 - DNA, 719 bp, Homo sapiens
attcggcacgagggcaagtctcagatttgatcaagtccctgcctcatgttaattgcaagcactcatttcactctccctgtgtgccaggcaatagcataagcactggaagaatacagatgttatagtgagtcctacaatagccctggaaggcaagagctgtttcctttccatttctacaatgagtcaattgcagatgatgctataacacttccagtgtttctgacacttccctgaagctatacctgctaccttcatgggccgagcttgcccttatgaggcccacaggtggcagtgggcagaggggaccccgctataccacctcgctgctgttccactgtctgctcccgtgttctgaccacagctctggtgccgtttctcaagcctgggcttcattcaacattttctatctagctcttcatggtgctgctcctgctatggttccacagggcttcttctcgcaggtcagctccttagagaggtctcccagattccccgtaaagcagccctgcagcctctgcctctctcagccgcatcaccctgttgcttccttcacagcatgtctcaccatctgcaaccatctttctgtttgtcgtcttgttgatttgctgcctccacactgtcagctccttgggaacagagattggtttgtttactgtgcatccctggtgcccagaacagggcatggcatattgttggtgcataataaatattgtggaaat

SEQ ID NO: 736841 - DNA, 197 bp, Homo sapiens
tactactactaaattcgcggccgcgtcgaccagcatgtctcaccatctgcaaccatctttctgtttgtcgtcttgttgatttgctgcctccacactgtcagctccttgggaacagagattggtttgtttactgtgcatccctggtgcccagaacagggcatggcatattgttggtgcataataaatattgtggaaat

SEQ ID NO: 736842 - DNA, 3541 bp, Homo sapiens
tgctggtactgccccgggattaacgggcagcgcagtgctcttggccgggaggaggctgtgctgcaccagcacctcttgctccacatctccagagagcccagggccctgtggccgagtgtgtccagcccagtgtcatggggagcttccatatctcatggctccttgctgggccaagccctccagaaccccaaacccccaaagactgatgaatgccagagtggccaccttgcttatctgtggccccggccctggtgatcaccatggcagctgggaagggagccccgttgagcccatcggctgaaaacagatggcgacttagcgaacctgagctgggccggggctgcaagccagtgctgctcgagaagacgaaccgcctgggccctgaggctgctgtgggcagggcgggccgggatgtgggcagtgcggagctggcactgttggtagccccaggcaagccccgacctggcaagccgctgcccccgaagacacgtggagagcagaggcagagcgccttcacggagctgccgaggatgaaggaccggcaggtggatgctcaggcccaggagagggagcacgatgaccccacaggccaacctggtgccccacagctgacccagaacatccccagaggcccagctggcagcaaagtcttctctgtgtggcccagcggagcacgaagtgagcaaagaagcgcctttagcaaaccaaccaagcgaccagcagagaggcctgagctaacctcagtcttccctgcaggggaatctgcagatgccctgggggagctgtctggactcctcaacactacagacctcgcttgttggggtcgactttcaactcccaagcttttggttggtgatttgtggaacttgcaagcattgccacagaatgctccactctgtagcacttttctgggtgcccctacactgtggctggagcatacccaggcccaggtgcccccaccctcatcatcctccaccacttcgtgggccctcctgccacccaccctcacctccctgggcttgtccacccagaactggtgtgcaaagtgcaacctgtcctttcgcctaacgtccgacctggtctttcacatgcgatcccaccacaaaaaggagcatgcggggcctgacccacattctcagaagcggagagaagaggcccttgcctgccctgtgtgccaggagcacttccgggagcgccaccacctctcccggcacatgacttctcacagctagcaggtgaccgcagaatgacctgctgggtgcagcagccagcctttggcagaggggggctccctgggcctgcgttgagggggctgtcatggtcctttgcagagctgctgcttttggcattcatagataaacagctcaggcataatttgaaaaagccacacctgcatgatgtgttttgaaggaaatgaagtcctgaaataaagtgatgggctttgcaaatccagggtagaggccctaacaggcacagagagcaggggcaactcctggcacacatcatgggctttggaggcacacaagcctggattcgaatctgggctctttcacatactagctgtgaccctggacaaagagctttaacctgctgagtccccattttctcatctgtgaaatggagatgataacactgtgtcttaggttggcattcaggtcacatgaaaggtgtgtggaaagtggccagcattctgcctgcagaccctgagcactgagtcaacaaggtttgtgatgatgtctgtactagttagctattgttattaacaagatctccatggcagacaagctaaagcatctgcctaagtcgtgagtctgtgggttggctcaggttaagctgagcttggctgggcttggcagcaagtctcagatttgatcaagtcatattcgttttcttcttcggctggtgggctacccagagcgagcacgcttctctcgtggtcatgccaagaacacaggagggtgagtctaacaagcacacctcaagcctctgcttgggtcacattgccaatgtcctctcagcccatacaagtggcaggaccaggcccaatattaaggagtggaaaagtgtaggctgcccttggtgaagctgtgacaagggagtgaccatccatcccctccacaggagggtgaggaattgggacaggtaattccagccaatacctggtccatagttcttcacattgtgagtatatgaatacggggaaatagaaccccctccccaccacctacacacatgctgttttaccttccaagaataggacatgtgcaaaaactaggcttccagatcgtgaggctggggagcattctaggtaccatttattatctactgcgtttcggtcagtagctgttgtaggtacccgcatcagcccttgttcctaaggatgtgtggagcccaggctgtactctttgacattccacaggtcagtctgcgtgaaagccctttgtggggagtttccaagccagtgtcgtttttgcactggtttccacctcactgtcagatattgttcttttgatatgcagtttccagccctccaatgagtccccagcacagatctcaggcttgtggctgggaataagcccagctgagcaggtggggatctcagccagcctcccagactgcacctcttctattgctctcctctgtccaccgttccaggcagcagcactcccacctggctgctctgatgtcctcgctccctccattcctgcctctcaccatgcacgcatccattgtccacacacacacaaccagataatcttctgaaagtgtaactcagatgatgcctccaaccctgtggctgcccttcacacttacaggcctaaccccagcaggacctgccagctgcttcatgaacaagtccctgcctcatgttaattgcaagcactcatttcactctccctgtgtgccaggcaatagcataagcactggaagaatacagatgttatagtgagtcctacaatagccctggaaggcaagagctgtttcctttccatttctacaatgagtcaattgcagatgatgctataacacttccagtgtttctgacacttccctgaagctatacctgctaccttcatgggccgagcttgcccttatgaggcccacaggtggcagtgggcagaggggaccccgctataccacctcgctgctgttccactgtctgctcccgtgttctgaccacagctctggtgccgtttctcaagcctgggcttcattcaacattttctatctagctcttcatggtgctgctcctgctatggttccacagggcttcttctcgcaggtcagctccttagagaggtctcccagattccccgtaaagcagccctgcagcctctgcctctctcagccgcatcaccctgttgcttccttcacagcatgtctcaccatctgcaaccatctttctgtttgtcgtcttgttgatttgctgcctccacactgtcagctccttgggaacagagattggtttgtttactgtgcatccctggtgcccagaacagggcatggcatattgttggtgcataataaatattgtggaaat

SEQ ID NO: 736843 - DNA, 3435 bp, Homo sapiens
tgctggtactgccccgggattaacgggcagcgcagtgctcttggccgggaggaggctgtgctgcaccagcacctcttgctccacatctccagagagcccagggccctgtggccgagtgtgtccagcccagtgtcatggggagcttccatatctcatggctccttgctgggccaagccctccagaaccccaaacccccaaagactgatgaatgccagagtggccaccttgcttatctgtggccccggccctggtgatcaccatggcagctgggaagggagccccgttgagcccatcggctgaaaacagatggcgacttagcgaacctgagctgggccggggctgcaagccagtgctgctcgagaagacgaaccgcctgggccctgaggctgctgtgggcagagcgccttcacggagctgccgaggatgaaggaccggcaggtggatgctcaggcccaggagagggagcacgatgaccccacaggccaacctggtgccccacagctgacccagaacatccccagaggcccagctggcagcaaagtcttctctgtgtggcccagcggagcacgaagtgagcaaagaagcgcctttagcaaaccaaccaagcgaccagcagagaggcctgagctaacctcagtcttccctgcaggggaatctgcagatgccctgggggagctgtctggactcctcaacactacagacctcgcttgttggggtcgactttcaactcccaagcttttggttggtgatttgtggaacttgcaagcattgccacagaatgctccactctgtagcacttttctgggtgcccctacactgtggctggagcatacccaggcccaggtgcccccaccctcatcatcctccaccacttcgtgggccctcctgccacccaccctcacctccctgggcttgtccacccagaactggtgtgcaaagtgcaacctgtcctttcgcctaacgtccgacctggtctttcacatgcgatcccaccacaaaaaggagcatgcggggcctgacccacattctcagaagcggagagaagaggcccttgcctgccctgtgtgccaggagcacttccgggagcgccaccacctctcccggcacatgacttctcacagctagcaggtgaccgcagaatgacctgctgggtgcagcagccagcctttggcagaggggggctccctgggcctgcgttgagggggctgtcatggtcctttgcagagctgctgcttttggcattcatagataaacagctcaggcataatttgaaaaagccacacctgcatgatgtgttttgaaggaaatgaagtcctgaaataaagtgatgggctttgcaaatccagggtagaggccctaacaggcacagagagcaggggcaactcctggcacacatcatgggctttggaggcacacaagcctggattcgaatctgggctctttcacatactagctgtgaccctggacaaagagctttaacctgctgagtccccattttctcatctgtgaaatggagatgataacactgtgtcttaggttggcattcaggtcacatgaaaggtgtgtggaaagtggccagcattctgcctgcagaccctgagcactgagtcaacaaggtttgtgatgatgtctgtactagttagctattgttattaacaagatctccatggcagacaagctaaagcatctgcctaagtcgtgagtctgtgggttggctcaggttaagctgagcttggctgggcttggcagcaagtctcagatttgatcaagtcatattcgttttcttcttcggctggtgggctacccagagcgagcacgcttctctcgtggtcatgccaagaacacaggagggtgagtctaacaagcacacctcaagcctctgcttgggtcacattgccaatgtcctctcagcccatacaagtggcaggaccaggcccaatattaaggagtggaaaagtgtaggctgcccttggtgaagctgtgacaagggagtgaccatccatcccctccacaggagggtgaggaattgggacaggtaattccagccaatacctggtccatagttcttcacattgtgagtatatgaatacggggaaatagaaccccctccccaccacctacacacatgctgttttaccttccaagaataggacatgtgcaaaaactaggcttccagatcgtgaggctggggagcattctaggtaccatttattatctactgcgtttcggtcagtagctgttgtaggtacccgcatcagcccttgttcctaaggatgtgtggagcccaggctgtactctttgacattccacaggtcagtctgcgtgaaagccctttgtggggagtttccaagccagtgtcgtttttgcactggtttccacctcactgtcagatattgttcttttgatatgcagtttccagccctccaatgagtccccagcacagatctcaggcttgtggctgggaataagcccagctgagcaggtggggatctcagccagcctcccagactgcacctcttctattgctctcctctgtccaccgttccaggcagcagcactcccacctggctgctctgatgtcctcgctccctccattcctgcctctcaccatgcacgcatccattgtccacacacacacaaccagataatcttctgaaagtgtaactcagatgatgcctccaaccctgtggctgcccttcacacttacaggcctaaccccagcaggacctgccagctgcttcatgaacaagtccctgcctcatgttaattgcaagcactcatttcactctccctgtgtgccaggcaatagcataagcactggaagaatacagatgttatagtgagtcctacaatagccctggaaggcaagagctgtttcctttccatttctacaatgagtcaattgcagatgatgctataacacttccagtgtttctgacacttccctgaagctatacctgctaccttcatgggccgagcttgcccttatgaggcccacaggtggcagtgggcagaggggaccccgctataccacctcgctgctgttccactgtctgctcccgtgttctgaccacagctctggtgccgtttctcaagcctgggcttcattcaacattttctatctagctcttcatggtgctgctcctgctatggttccacagggcttcttctcgcaggtcagctccttagagaggtctcccagattccccgtaaagcagccctgcagcctctgcctctctcagccgcatcaccctgttgcttccttcacagcatgtctcaccatctgcaaccatctttctgtttgtcgtcttgttgatttgctgcctccacactgtcagctccttgggaacagagattggtttgtttactgtgcatccctggtgcccagaacagggcatggcatattgttggtgcataataaatattgtggaaat

SEQ ID NO: 736844 - DNA, 783 bp, Homo sapiens; identical to SEQ ID NO: 123556

SEQ ID NO: 736845 - DNA, 387 bp, Homo sapiens
ttattcaaggacacacagtttaatacaggaagtgcctagtcattctgtgtctggccccagctgggaaaagttctccaattgagccagaaagatccttaaaaaggcagtgtactccaacttcctctgaagcttgtgtcctacctacagaattcccaaccactctgcttgaatgtctccaaagaggaaaaaatttagaagagaagacaaggaaaattaatcacaagataggcaatgaataggcaagtgaatgctgataatgccaagctgtgtttacagtccaaatttttgctgaagaccttcaactttgcactctccctgtgtggtatctcttgcccaagacagaacttcaaataaaatcacatagctgatgcaagaaaccgttaaaaa

SEQ ID NO: 736846 - DNA, 387 bp, Homo sapiens
ttctctagtcccttaatcatttgtaccattctctctctaatgcctataagggaactgtttaaatatagtccatatgggaaaagtaacctcaacatgttgtaacagggggcagaaaaacacgctgaatagatgaaaggaacaatctacaggttaattagtagtatggccacaaatatgtgcacagttttgtttcagaaataaagcaagctgtatttgttgtaactatctcttctttgaacttaacagaatgctgataatgccaagctgtgtttacagtccaaatttttgctgaagaccttcaactttgcactctccctgtgtggtatctcttgcccaagacagaacttcaaataaaatcacatagctgatgcaagaaaccgttaaaaa

SEQ ID NO: 736847 - DNA, 378 bp, Homo sapiens; identical to SEQ ID NO: 416992

SEQ ID NO: 736848 - DNA, 247 bp, Homo sapiens
  misc_feature (33)..(33): n is a, c, g, or t
gaagcgcgcagcggcgttctagaggatcccagnggggaacatatcacttcactattgtgaagtgatgttcagatttctagttttttttctagtttttaattttaacatcagaactgaaataaaaaattatggatacgtgttttgaattgcaaactattcctcaggaattccaattaaatttattttacttgaataggaatgatcataaaagtgatggttccccgcggggtaccgagctcgcaattcg

SEQ ID NO: 736849 - DNA, 7252 bp, Homo sapiens
cccaccctgcccccacccttcccccttcattcctctgtcccttgttctggaagctgaggcgagaatgtctcagttctgttcccttcaggcttcgagaccaccgccttgctgtgtcccgtagtggactgagggcctgcaagagggagtgagggctagtggagggccagctgcctgtgggggctggacatcgtgattccaacaatgtctcacccatcttggctgccacccaaaagcactggtgagcccctcggccatgtgcctgcacggatggagaccacccattcctttgggaaccccagcatttcagtgtctacacaacagccacccaaaaagtttgccccggtagttgctccaaaacctaagtacaacccatacaaacaacctggaggtgagggtgattttcttccacccccacctccacctctagatgattccagtgcccttccatctatctctggaaactttcctcctccaccacctcttgatgaagaggctttcaaagtacaggggaatcccggaggcaagacacttgaggagaggcgctccagcctggacgctgagattgactccttgaccagcatcttggctgaccttgagtgcagctccccctataagcctcggcctccacagagctccactggttcaacagcctctcctccagtttcgaccccagtcacaggacacaagagaatggtcatcccgaaccaaccccctctaacagcaaccaagaagtctacattgaaaccacagcctgcaccccaggctggacccatccctgtggctccaatcggaacactcaaaccccagcctcagccagtcccagcctcctacaccacggcctccacttcttcaaggcctacctttaatgtgcaggtgaagtcagcccagcccagccctcattatatggctgccccttcatcaggacaaatttatggctcagggccccagggctataacactcagccagttcctgtctctgggcagtgtccacctccttcaacacggggaggcatggattatgcctacattccaccaccaggacttcagccggagcctgggtatgggtatgcccccaaccagggacgctattatgaaggctactatgcagcagggccaggctatgggggcagaaatgactctgaccctacctatggtcaacaaggtcacccaaatacctggaaacgggaaccagggtacactcctcctggagcagggaaccagaaccctcctgggatgtatccagtcactggtcccaagaagacctatatcacagatcctgtttcagccccctgtgcgccaccattgcagccaaagggtggccattcagggcaactggggccttcgtcagttgccccttcattccgcccagaggatgagcttgagcacctgaccaaaaagatgctgtatgacatggaaaatccacctgctgacgaatactttggccgctgtgctcgctgtggagaaaacgtagttggggaaggtacaggatgcactgccatggatcaggtcttccacgtggattgttttacctgcatcatctgcaacaacaagctccgagggcagccattctatgctgtggaaaagaaagcatactgcgagccctgctacattaatactctggagcagtgcaatgtgtgttccaagcccatcatggagcggattctccgagccaccgggaaggcctatcatcctcactgtttcacctgcgtgatgtgccaccgcagcctggatgggatcccattcactgtggatgctggcgggctcattcactgcattgaggacttccacaagaaatttgccccgcgatgttctgtgtgcaaggagcctattatgccagccccgggccaggaggagactgtccgtattgtggctttggatcgagatttccatgttcactgctaccgatgcgaggattgcggtggtctcctgtctgaaggagataaccaaggctgctaccccttggatgggcacatcctctgcaagacctgcaactctgcccgcatcagggtgttgaccgccaaggcgagcactgacctttagattcagtcacctgttcagccggcactgagaagaacgaacacaagaaaaagataagaaatactagagtaaaggccatcaaactacgcgatagtctctgttcttcatctgctattaaccttgccttagaaacacataaattatgagattttttttaaaagttgttaccaaatacacatttcacattgaatcatgtaggatcttgatgggcctttgttcccaaggacttccacatttttgcacagattatgctccatcccattcacttctgcattcctgtaacttttaatccctatgtttgtctcacttttcatctggttgaatggcttttcttagtgtggtatttgctgtcacatagtttttcctgggtgagtctgccaactcacaggtgcttttaggcttgaaatctccatcctatcatttccgttttgcctgtgactgtaaagagtagccattcttttcccatgtattgaagaggatattcttctcttgctttatactactcacgtccttggggagggaaatgcacaatttttttttgttaggctgtaaagaatttaagctgtaaattacataagttagaacaagcccaaatttaatttgcaaccatcagaattcagaatctatagtgaccagtgatcaaggctaattggaaaagagttatcggcccatagctaataagtagtgacagacaaccaagcttcaatatttttctaaagaaattacaggtgggatatgctagaaaaggcattttggggttatgtttaaaaaaacattattgtcccacaatattaccttaagatttttcttttccgcactacctgaacattgtaatacagacaaacttgatttcttctagaagataacattttcaatactgtcccacttctcatcttaaaaatattgtcatgtttattctaatatccaacacaactatcaaaattgcctttttctctagaggatgaaggctgtgaaaaaaccgttcaaattctcttctttttcttttttattaccaggtccattttgcctgacaattgcaaatcagagcatacaaaataaaactgtgcagttttgtttggtttactttcaaaagagtagaaagcttgaaaagattctgaaaccacagtttcattattctcataatccttctgcaactgaaattacatattgcaggagacattttcatatcatcaatgtgacatttacaccacactttcaaagacaatcactgaaacaaaaattgtctttatgagctaaaaatatgcagaatctctgcctagaatctttattcaaacttttattagccagtgaaacacttgcttgccaactgccaagccatacttattaagttcgaacatgtttcacttaaggagagacacctagcttagtcatggcaagttgccattttgtaaactaaggattttggactgagatttcttaaatctttcttcaaatctcccacaagtatatacttttaaattatggagtattttaagtctacaaaaaggtataaataataatataatgaattcctatatacctaatacccagtttaagacaccaaatataacaagtataattacatcctccaatgtaccgtttccttattccacagatatcacttcactattgtgaagtgatgttcagatttctagttttttttctagtttttaattttaacatcagaactgaaataaaaaattatggatacgtgttttgaattgcaaactattcctcaggaattccaattaaatttattttacttgaataggaatgatcataaaagtgattctttttttgtgactagaaattcttaagccgatggtcactatagctcatccttaatgtatggctcatttgcttttgtcactaaacggttttgtgttagaaccaccaaaattatagcttttaagagcttcctttgaccactgtctttttcttaccctacttctcttatctttgatcgtatatttctcataatgtgaaatatgatgagattcacttaggggcagcatgttagttttgggaggcaatgtcaactgtgtctctgaattcctgtcttccaaattgaagccagaccatgctgatgacctcaagtagcactgactatttgacaatagggctgataatgtaatcggcttgaattttgacttagtaactttttatgtaatactttcggagaaattctctttaggacaaagcagagagtccaatttattgagggatagattgtatctcttaaagtggtcatattattattaattttgccaaaagaagaagaatttattgaatatttatactataaaatgcagtaacattctacttgcttattacatttaaatccttgtgtaactgaatgtttacatgtcaagaggaaaagctgtaagaaaatgctgtcacagacccatccctgtggcatcgtcagcagaatactgcttgcttacaatctttattatgcattcttataacataacctcagagtatctttaccaaaggtttttaaagtaaatctctttttaagatagacttattcttttataataatgaatgtgcactcatacatatgtagaaacatttagatttagagtttttttttttctttcacaaggtataataaggaaaggatcctacaatattttattctagggtttcttaaatatatgatttatattactgtcttttctattaatcatttgatttaaacaatgccaagtcactcttttttagttgcatgaaattttgcctgcaacagagagaaaaagattgtattactttaatgattataatcatactgtctgctgatataatatcataattgttgtggtttaaatacataaatagtagaaaaatcagagtctataacagaaagtttgtaaaaatatactgattttgaaaagtatcaggaatataaatatttggtaattctgtgtaacaagagagacatggaaaaggaaaaaaatccactatatcatgggctctgcagaacatatcaaaataggatttcttaaatttttcaacccccagaccatactgactcaacatggagtctcactggccaagaaaattgcctttaaaactcgaaaataaggccaggtgtggtgactcacacttgtaatcccagcaatttgggaggctgagacaggaggattgcctgaggccaggagtttgacaccagcctgggcaacatagtgagaccttgtctctacaaaaaataaaataaaataaaaaccaaattagccagacatggtggcatgcgcttgtttaaaaaaacaaataaataaataatcgactcaaaaataagtcatgtgtcccagcataaggcatcaggttgttagatgctggcatctctgcagctcaaagatgtgggttctttttcttgtcattaacacattgttatttctgtaggagcaacttctctgatcaaaattacttttctgggtatgtgctgattaagggggtggacttatcaacactataattgttccctatgaaagattccacagagatgtttatggtgaggtttaaaggatatgaaactctacatttaaacaagtattttatatttgggtacagaggaagaaagagagggctttttccatggggctatagtagagagttagtggaatatagacaggactctgaaaacacaacttccagccatttttttagttagtaaaaatcctattaatgtgaaccagccaggaataacagtgttatttctattggatatggtttgggcttctcttgtcaaatctgtgtcggctgccccctgatccttccattatcaagttttgaagggtgttggggaaattatggcagctgctagggagatcagggaaacactgatgtaacctcaaagcctctcaccattcctcttggcttggaaaggctttattttttcatatacatttctagaaatattgctattctaccttagtatttcacatttgtagttcaaacaagcgattgtccatctgttgcctagagctatagtacatgtgtgttatgaatgaaatatgacagcatgttccatacccctgctttagccatctgtgggaaaccagcaaactgaaaaagacacctctgcaaaatgtgcctcaagtccatttcttgggatcgctcgtttggtgcactctcgtgggagacaatcagagaacaacatatacttgtgccttattttcaaagaatctatttacactactatgaatattccactgaagagtcaatgatgtaaatgataaccaccaaatctcaaaaatatactcaccaaaaagtaaaaagtaaaaaaaaaaaaaaaaagaaagaaagaaaagaaagagagagaagtcaacttttcatcttaatatattctagtagtatttattttttccttgtcttggaagtatctcataggtctttaaatgagtaaaacatttttatgccagaaggtgatataatggatgttagtgttttttatttgattttacagtagttttagtcagataatgaggacagagacttcaacttgattctttaccaccattcagcatattttttaattgtcttcattgtatttgcttaatagtggtccagacaagttcaaaacttgttctcagtgaggcattaatatggtgcaaccatgaatatttcaggccaagttattcacttgacagataactagaatgaaacttttctcatgaggctgttgtttggttagcatagccttatttcaaaccttaaaaagttacctgactgaagctactatgacttggtaaggattcttcctctcttgctttcttcctcccttcctttcttcctcttccttcctcctcttcttattttctttcctactttccatcctacctattagtgttgctgtacttggattttttgtaaattaaatcaatgcattatgattttagggaattatgattatattcataaggggaaggctaccagaaaatatatgtggcatccataaaatcttcttttataggggcatattttttaggttgtatttattcgtaaagtgaaatgagataatagagtctttctgtaacatgttaatgaattttcatcagggactgaggtcatagattcttggaaaattcatttgtgactgatctagttttctcagctgtatgcaaagtaatctttcaaagactaggttaagattttttttttaagtctgaagcaatgtaaccccaaatctcaaaaatatactcaccaaaaagta

SEQ ID NO: 736850 - DNA, 7373 bp, Homo sapiens
cccaccctgcccccacccttcccccttcattcctctgtcccttgttctggaagctgaggcgagaatgtctcagttctgttcccttcaggcttcgagaccaccgccttgctgtgtcccgtagtggactgagggcctgcaagagggagtgagggctagtggagggccagctgcctgtgggggctggacatcgtggggaactttgaggctcagagacagagcagaagacagaacctggtcttctgattccctgtgttctgcttttttcattgttccactggacgctcatcagagggaagatctttttcctcaattgattccaacaatgtctcacccatcttggctgccacccaaaagcactggtgagcccctcggccatgtgcctgcacggatggagaccacccattcctttgggaaccccagcatttcagtgtctacacaacagccacccaaaaagtttgccccggtagttgctccaaaacctaagtacaacccatacaaacaacctggaggtgagggtgattttcttccacccccacctccacctctagatgattccagtgcccttccatctatctctggaaactttcctcctccaccacctcttgatgaagaggctttcaaagtacaggggaatcccggaggcaagacacttgaggagaggcgctccagcctggacgctgagattgactccttgaccagcatcttggctgaccttgagtgcagctccccctataagcctcggcctccacagagctccactggttcaacagcctctcctccagtttcgaccccagtcacaggacacaagagaatggtcatcccgaaccaaccccctctaacagcaaccaagaagtctacattgaaaccacagcctgcaccccaggctggacccatccctgtggctccaatcggaacactcaaaccccagcctcagccagtcccagcctcctacaccacggcctccacttcttcaaggcctacctttaatgtgcaggtgaagtcagcccagcccagccctcattatatggctgccccttcatcaggacaaatttatggctcagggccccagggctataacactcagccagttcctgtctctgggcagtgtccacctccttcaacacggggaggcatggattatgcctacattccaccaccaggacttcagccggagcctgggtatgggtatgcccccaaccagggacgctattatgaaggctactatgcagcagggccaggctatgggggcagaaatgactctgaccctacctatggtcaacaaggtcacccaaatacctggaaacgggaaccagggtacactcctcctggagcagggaaccagaaccctcctgggatgtatccagtcactggtcccaagaagacctatatcacagatcctgtttcagccccctgtgcgccaccattgcagccaaagggtggccattcagggcaactggggccttcgtcagttgccccttcattccgcccagaggatgagcttgagcacctgaccaaaaagatgctgtatgacatggaaaatccacctgctgacgaatactttggccgctgtgctcgctgtggagaaaacgtagttggggaaggtacaggatgcactgccatggatcaggtcttccacgtggattgttttacctgcatcatctgcaacaacaagctccgagggcagccattctatgctgtggaaaagaaagcatactgcgagccctgctacattaatactctggagcagtgcaatgtgtgttccaagcccatcatggagcggattctccgagccaccgggaaggcctatcatcctcactgtttcacctgcgtgatgtgccaccgcagcctggatgggatcccattcactgtggatgctggcgggctcattcactgcattgaggacttccacaagaaatttgccccgcgatgttctgtgtgcaaggagcctattatgccagccccgggccaggaggagactgtccgtattgtggctttggatcgagatttccatgttcactgctaccgatgcgaggattgcggtggtctcctgtctgaaggagataaccaaggctgctaccccttggatgggcacatcctctgcaagacctgcaactctgcccgcatcagggtgttgaccgccaaggcgagcactgacctttagattcagtcacctgttcagccggcactgagaagaacgaacacaagaaaaagataagaaatactagagtaaaggccatcaaactacgcgatagtctctgttcttcatctgctattaaccttgccttagaaacacataaattatgagattttttttaaaagttgttaccaaatacacatttcacattgaatcatgtaggatcttgatgggcctttgttcccaaggacttccacatttttgcacagattatgctccatcccattcacttctgcattcctgtaacttttaatccctatgtttgtctcacttttcatctggttgaatggcttttcttagtgtggtatttgctgtcacatagtttttcctgggtgagtctgccaactcacaggtgcttttaggcttgaaatctccatcctatcatttccgttttgcctgtgactgtaaagagtagccattcttttcccatgtattgaagaggatattcttctcttgctttatactactcacgtccttggggagggaaatgcacaatttttttttgttaggctgtaaagaatttaagctgtaaattacataagttagaacaagcccaaatttaatttgcaaccatcagaattcagaatctatagtgaccagtgatcaaggctaattggaaaagagttatcggcccatagctaataagtagtgacagacaaccaagcttcaatatttttctaaagaaattacaggtgggatatgctagaaaaggcattttggggttatgtttaaaaaaacattattgtcccacaatattaccttaagatttttcttttccgcactacctgaacattgtaatacagacaaacttgatttcttctagaagataacattttcaatactgtcccacttctcatcttaaaaatattgtcatgtttattctaatatccaacacaactatcaaaattgcctttttctctagaggatgaaggctgtgaaaaaaccgttcaaattctcttctttttcttttttattaccaggtccattttgcctgacaattgcaaatcagagcatacaaaataaaactgtgcagttttgtttggtttactttcaaaagagtagaaagcttgaaaagattctgaaaccacagtttcattattctcataatccttctgcaactgaaattacatattgcaggagacattttcatatcatcaatgtgacatttacaccacactttcaaagacaatcactgaaacaaaaattgtctttatgagctaaaaatatgcagaatctctgcctagaatctttattcaaacttttattagccagtgaaacacttgcttgccaactgccaagccatacttattaagttcgaacatgtttcacttaaggagagacacctagcttagtcatggcaagttgccattttgtaaactaaggattttggactgagatttcttaaatctttcttcaaatctcccacaagtatatacttttaaattatggagtattttaagtctacaaaaaggtataaataataatataatgaattcctatatacctaatacccagtttaagacaccaaatataacaagtataattacatcctccaatgtaccgtttccttattccacagatatcacttcactattgtgaagtgatgttcagatttctagttttttttctagtttttaattttaacatcagaactgaaataaaaaattatggatacgtgttttgaattgcaaactattcctcaggaattccaattaaatttattttacttgaataggaatgatcataaaagtgattctttttttgtgactagaaattcttaagccgatggtcactatagctcatccttaatgtatggctcatttgcttttgtcactaaacggttttgtgttagaaccaccaaaattatagcttttaagagcttcctttgaccactgtctttttcttaccctacttctcttatctttgatcgtatatttctcataatgtgaaatatgatgagattcacttaggggcagcatgttagttttgggaggcaatgtcaactgtgtctctgaattcctgtcttccaaattgaagccagaccatgctgatgacctcaagtagcactgactatttgacaatagggctgataatgtaatcggcttgaattttgacttagtaactttttatgtaatactttcggagaaattctctttaggacaaagcagagagtccaatttattgagggatagattgtatctcttaaagtggtcatattattattaattttgccaaaagaagaagaatttattgaatatttatactataaaatgcagtaacattctacttgcttattacatttaaatccttgtgtaactgaatgtttacatgtcaagaggaaaagctgtaagaaaatgctgtcacagacccatccctgtggcatcgtcagcagaatactgcttgcttacaatctttattatgcattcttataacataacctcagagtatctttaccaaaggtttttaaagtaaatctctttttaagatagacttattcttttataataatgaatgtgcactcatacatatgtagaaacatttagatttagagtttttttttttctttcacaaggtataataaggaaaggatcctacaatattttattctagggtttcttaaatatatgatttatattactgtcttttctattaatcatttgatttaaacaatgccaagtcactcttttttagttgcatgaaattttgcctgcaacagagagaaaaagattgtattactttaatgattataatcatactgtctgctgatataatatcataattgttgtggtttaaatacataaatagtagaaaaatcagagtctataacagaaagtttgtaaaaatatactgattttgaaaagtatcaggaatataaatatttggtaattctgtgtaacaagagagacatggaaaaggaaaaaaatccactatatcatgggctctgcagaacatatcaaaataggatttcttaaatttttcaacccccagaccatactgactcaacatggagtctcactggccaagaaaattgcctttaaaactcgaaaataaggccaggtgtggtgactcacacttgtaatcccagcaatttgggaggctgagacaggaggattgcctgaggccaggagtttgacaccagcctgggcaacatagtgagaccttgtctctacaaaaaataaaataaaataaaaaccaaattagccagacatggtggcatgcgcttgtttaaaaaaacaaataaataaataatcgactcaaaaataagtcatgtgtcccagcataaggcatcaggttgttagatgctggcatctctgcagctcaaagatgtgggttctttttcttgtcattaacacattgttatttctgtaggagcaacttctctgatcaaaattacttttctgggtatgtgctgattaagggggtggacttatcaacactataattgttccctatgaaagattccacagagatgtttatggtgaggtttaaaggatatgaaactctacatttaaacaagtattttatatttgggtacagaggaagaaagagagggctttttccatggggctatagtagagagttagtggaatatagacaggactctgaaaacacaacttccagccatttttttagttagtaaaaatcctattaatgtgaaccagccaggaataacagtgttatttctattggatatggtttgggcttctcttgtcaaatctgtgtcggctgccccctgatccttccattatcaagttttgaagggtgttggggaaattatggcagctgctagggagatcagggaaacactgatgtaacctcaaagcctctcaccattcctcttggcttggaaaggctttattttttcatatacatttctagaaatattgctattctaccttagtatttcacatttgtagttcaaacaagcgattgtccatctgttgcctagagctatagtacatgtgtgttatgaatgaaatatgacagcatgttccatacccctgctttagccatctgtgggaaaccagcaaactgaaaaagacacctctgcaaaatgtgcctcaagtccatttcttgggatcgctcgtttggtgcactctcgtgggagacaatcagagaacaacatatacttgtgccttattttcaaagaatctatttacactactatgaatattccactgaagagtcaatgatgtaaatgataaccaccaaatctcaaaaatatactcaccaaaaagtaaaaagtaaaaaaaaaaaaaaaaagaaagaaagaaaagaaagagagagaagtcaacttttcatcttaatatattctagtagtatttattttttccttgtcttggaagtatctcataggtctttaaatgagtaaaacatttttatgccagaaggtgatataatggatgttagtgttttttatttgattttacagtagttttagtcagataatgaggacagagacttcaacttgattctttaccaccattcagcatattttttaattgtcttcattgtatttgcttaatagtggtccagacaagttcaaaacttgttctcagtgaggcattaatatggtgcaaccatgaatatttcaggccaagttattcacttgacagataactagaatgaaacttttctcatgaggctgttgtttggttagcatagccttatttcaaaccttaaaaagttacctgactgaagctactatgacttggtaaggattcttcctctcttgctttcttcctcccttcctttcttcctcttccttcctcctcttcttattttctttcctactttccatcctacctattagtgttgctgtacttggattttttgtaaattaaatcaatgcattatgattttagggaattatgattatattcataaggggaaggctaccagaaaatatatgtggcatccataaaatcttcttttataggggcatattttttaggttgtatttattcgtaaagtgaaatgagataatagagtctttctgtaacatgttaatgaattttcatcagggactgaggtcatagattcttggaaaattcatttgtgactgatctagttttctcagctgtatgcaaagtaatctttcaaagactaggttaagattttttttttaagtctgaagcaatgtaaccccaaatctcaaaaatatactcaccaaaaagta

SEQ ID NO: 736851 - DNA, 7348 bp, Homo sapiens
gtcacttttatttgggggtgtggacagctgctttcccaggggagtacttcttacagtgggatttcaagacaagatcggcctgaagaaaaattatatttgtatattttttaaaaagtgggaactttgaggctcagagacagagcagaagacagaacctggtcttctgattccctgtgttctgcttttttcattgttccactggacgctcatcagagggaagatctttttcctcaattgattccaacaatgtctcacccatcttggctgccacccaaaagcactggtgagcccctcggccatgtgcctgcacggatggagaccacccattcctttgggaaccccagcatttcagtgtctacacaacagccacccaaaaagtttgccccggtagttgctccaaaacctaagtacaacccatacaaacaacctggaggtgagggtgattttcttccacccccacctccacctctagatgattccagtgcccttccatctatctctggaaactttcctcctccaccacctcttgatgaagaggctttcaaagtacaggggaatcccggaggcaagacacttgaggagaggcgctccagcctggacgctgagattgactccttgaccagcatcttggctgaccttgagtgcagctccccctataagcctcggcctccacagagctccactggttcaacagcctctcctccagtttcgaccccagtcacaggacacaagagaatggtcatcccgaaccaaccccctctaacagcaaccaagaagtctacattgaaaccacagcctgcaccccaggctggacccatccctgtggctccaatcggaacactcaaaccccagcctcagccagtcccagcctcctacaccacggcctccacttcttcaaggcctacctttaatgtgcaggtgaagtcagcccagcccagccctcattatatggctgccccttcatcaggacaaatttatggctcagggccccagggctataacactcagccagttcctgtctctgggcagtgtccacctccttcaacacggggaggcatggattatgcctacattccaccaccaggacttcagccggagcctgggtatgggtatgcccccaaccagggacgctattatgaaggctactatgcagcagggccaggctatgggggcagaaatgactctgaccctacctatggtcaacaaggtcacccaaatacctggaaacgggaaccagggtacactcctcctggagcagggaaccagaaccctcctgggatgtatccagtcactggtcccaagaagacctatatcacagatcctgtttcagccccctgtgcgccaccattgcagccaaagggtggccattcagggcaactggggccttcgtcagttgccccttcattccgcccagaggatgagcttgagcacctgaccaaaaagatgctgtatgacatggaaaatccacctgctgacgaatactttggccgctgtgctcgctgtggagaaaacgtagttggggaaggtacaggatgcactgccatggatcaggtcttccacgtggattgttttacctgcatcatctgcaacaacaagctccgagggcagccattctatgctgtggaaaagaaagcatactgcgagccctgctacattaatactctggagcagtgcaatgtgtgttccaagcccatcatggagcggattctccgagccaccgggaaggcctatcatcctcactgtttcacctgcgtgatgtgccaccgcagcctggatgggatcccattcactgtggatgctggcgggctcattcactgcattgaggacttccacaagaaatttgccccgcgatgttctgtgtgcaaggagcctattatgccagccccgggccaggaggagactgtccgtattgtggctttggatcgagatttccatgttcactgctaccgatgcgaggattgcggtggtctcctgtctgaaggagataaccaaggctgctaccccttggatgggcacatcctctgcaagacctgcaactctgcccgcatcagggtgttgaccgccaaggcgagcactgacctttagattcagtcacctgttcagccggcactgagaagaacgaacacaagaaaaagataagaaatactagagtaaaggccatcaaactacgcgatagtctctgttcttcatctgctattaaccttgccttagaaacacataaattatgagattttttttaaaagttgttaccaaatacacatttcacattgaatcatgtaggatcttgatgggcctttgttcccaaggacttccacatttttgcacagattatgctccatcccattcacttctgcattcctgtaacttttaatccctatgtttgtctcacttttcatctggttgaatggcttttcttagtgtggtatttgctgtcacatagtttttcctgggtgagtctgccaactcacaggtgcttttaggcttgaaatctccatcctatcatttccgttttgcctgtgactgtaaagagtagccattcttttcccatgtattgaagaggatattcttctcttgctttatactactcacgtccttggggagggaaatgcacaatttttttttgttaggctgtaaagaatttaagctgtaaattacataagttagaacaagcccaaatttaatttgcaaccatcagaattcagaatctatagtgaccagtgatcaaggctaattggaaaagagttatcggcccatagctaataagtagtgacagacaaccaagcttcaatatttttctaaagaaattacaggtgggatatgctagaaaaggcattttggggttatgtttaaaaaaacattattgtcccacaatattaccttaagatttttcttttccgcactacctgaacattgtaatacagacaaacttgatttcttctagaagataacattttcaatactgtcccacttctcatcttaaaaatattgtcatgtttattctaatatccaacacaactatcaaaattgcctttttctctagaggatgaaggctgtgaaaaaaccgttcaaattctcttctttttcttttttattaccaggtccattttgcctgacaattgcaaatcagagcatacaaaataaaactgtgcagttttgtttggtttactttcaaaagagtagaaagcttgaaaagattctgaaaccacagtttcattattctcataatccttctgcaactgaaattacatattgcaggagacattttcatatcatcaatgtgacatttacaccacactttcaaagacaatcactgaaacaaaaattgtctttatgagctaaaaatatgcagaatctctgcctagaatctttattcaaacttttattagccagtgaaacacttgcttgccaactgccaagccatacttattaagttcgaacatgtttcacttaaggagagacacctagcttagtcatggcaagttgccattttgtaaactaaggattttggactgagatttcttaaatctttcttcaaatctcccacaagtatatacttttaaattatggagtattttaagtctacaaaaaggtataaataataatataatgaattcctatatacctaatacccagtttaagacaccaaatataacaagtataattacatcctccaatgtaccgtttccttattccacagatatcacttcactattgtgaagtgatgttcagatttctagttttttttctagtttttaattttaacatcagaactgaaataaaaaattatggatacgtgttttgaattgcaaactattcctcaggaattccaattaaatttattttacttgaataggaatgatcataaaagtgattctttttttgtgactagaaattcttaagccgatggtcactatagctcatccttaatgtatggctcatttgcttttgtcactaaacggttttgtgttagaaccaccaaaattatagcttttaagagcttcctttgaccactgtctttttcttaccctacttctcttatctttgatcgtatatttctcataatgtgaaatatgatgagattcacttaggggcagcatgttagttttgggaggcaatgtcaactgtgtctctgaattcctgtcttccaaattgaagccagaccatgctgatgacctcaagtagcactgactatttgacaatagggctgataatgtaatcggcttgaattttgacttagtaactttttatgtaatactttcggagaaattctctttaggacaaagcagagagtccaatttattgagggatagattgtatctcttaaagtggtcatattattattaattttgccaaaagaagaagaatttattgaatatttatactataaaatgcagtaacattctacttgcttattacatttaaatccttgtgtaactgaatgtttacatgtcaagaggaaaagctgtaagaaaatgctgtcacagacccatccctgtggcatcgtcagcagaatactgcttgcttacaatctttattatgcattcttataacataacctcagagtatctttaccaaaggtttttaaagtaaatctctttttaagatagacttattcttttataataatgaatgtgcactcatacatatgtagaaacatttagatttagagtttttttttttctttcacaaggtataataaggaaaggatcctacaatattttattctagggtttcttaaatatatgatttatattactgtcttttctattaatcatttgatttaaacaatgccaagtcactcttttttagttgcatgaaattttgcctgcaacagagagaaaaagattgtattactttaatgattataatcatactgtctgctgatataatatcataattgttgtggtttaaatacataaatagtagaaaaatcagagtctataacagaaagtttgtaaaaatatactgattttgaaaagtatcaggaatataaatatttggtaattctgtgtaacaagagagacatggaaaaggaaaaaaatccactatatcatgggctctgcagaacatatcaaaataggatttcttaaatttttcaacccccagaccatactgactcaacatggagtctcactggccaagaaaattgcctttaaaactcgaaaataaggccaggtgtggtgactcacacttgtaatcccagcaatttgggaggctgagacaggaggattgcctgaggccaggagtttgacaccagcctgggcaacatagtgagaccttgtctctacaaaaaataaaataaaataaaaaccaaattagccagacatggtggcatgcgcttgtttaaaaaaacaaataaataaataatcgactcaaaaataagtcatgtgtcccagcataaggcatcaggttgttagatgctggcatctctgcagctcaaagatgtgggttctttttcttgtcattaacacattgttatttctgtaggagcaacttctctgatcaaaattacttttctgggtatgtgctgattaagggggtggacttatcaacactataattgttccctatgaaagattccacagagatgtttatggtgaggtttaaaggatatgaaactctacatttaaacaagtattttatatttgggtacagaggaagaaagagagggctttttccatggggctatagtagagagttagtggaatatagacaggactctgaaaacacaacttccagccatttttttagttagtaaaaatcctattaatgtgaaccagccaggaataacagtgttatttctattggatatggtttgggcttctcttgtcaaatctgtgtcggctgccccctgatccttccattatcaagttttgaagggtgttggggaaattatggcagctgctagggagatcagggaaacactgatgtaacctcaaagcctctcaccattcctcttggcttggaaaggctttattttttcatatacatttctagaaatattgctattctaccttagtatttcacatttgtagttcaaacaagcgattgtccatctgttgcctagagctatagtacatgtgtgttatgaatgaaatatgacagcatgttccatacccctgctttagccatctgtgggaaaccagcaaactgaaaaagacacctctgcaaaatgtgcctcaagtccatttcttgggatcgctcgtttggtgcactctcgtgggagacaatcagagaacaacatatacttgtgccttattttcaaagaatctatttacactactatgaatattccactgaagagtcaatgatgtaaatgataaccaccaaatctcaaaaatatactcaccaaaaagtaaaaagtaaaaaaaaaaaaaaaaagaaagaaagaaaagaaagagagagaagtcaacttttcatcttaatatattctagtagtatttattttttccttgtcttggaagtatctcataggtctttaaatgagtaaaacatttttatgccagaaggtgatataatggatgttagtgttttttatttgattttacagtagttttagtcagataatgaggacagagacttcaacttgattctttaccaccattcagcatattttttaattgtcttcattgtatttgcttaatagtggtccagacaagttcaaaacttgttctcagtgaggcattaatatggtgcaaccatgaatatttcaggccaagttattcacttgacagataactagaatgaaacttttctcatgaggctgttgtttggttagcatagccttatttcaaaccttaaaaagttacctgactgaagctactatgacttggtaaggattcttcctctcttgctttcttcctcccttcctttcttcctcttccttcctcctcttcttattttctttcctactttccatcctacctattagtgttgctgtacttggattttttgtaaattaaatcaatgcattatgattttagggaattatgattatattcataaggggaaggctaccagaaaatatatgtggcatccataaaatcttcttttataggggcatattttttaggttgtatttattcgtaaagtgaaatgagataatagagtctttctgtaacatgttaatgaattttcatcagggactgaggtcatagattcttggaaaattcatttgtgactgatctagttttctcagctgtatgcaaagtaatctttcaaagactaggttaagattttttttttaagtctgaagcaatgtaaccccaaaaaattataattttaatgatggcattttattttattccattgcagcttgataactttccttatagcaaaggaataacta

SEQ ID NO: 736852 - DNA, 7297 bp, Homo sapiens
gtcacttttatttgggggtgtggacagctgctttcccaggggagtacttcttacagtgggatttcaagacaagatcggcctgaagaaaaattatatttgtatattttttaaaaagtgggaactttgaggctcagagacagagcagaagacagaacctggtcttctgattccctgtgttctgcttttttcattgttccactggacgctcatcagagggaagatctttttcctcaattgattccaacaatgtctcacccatcttggctgccacccaaaagcactggtgagcccctcggccatgtgcctgcacggatggagaccacccattcctttgggaaccccagcatttcagtgtctacacaacagccacccaaaaagtttgccccggtagttgctccaaaacctaagtacaacccatacaaacaacctggaggtgagggtgattttcttccacccccacctccacctctagatgattccagtgcccttccatctatctctggaaactttcctcctccaccacctcttgatgaagaggctttcaaagtacaggggaatcccggaggcaagacacttgaggagaggcgctccagcctggacgctgagattgactccttgaccagcatcttggctgaccttgagtgcagctccccctataagcctcggcctccacagagctccactggttcaacagcctctcctccagtttcgaccccagtcacaggacacaagagaatggtcatcccgaaccaaccccctctaacagcaaccaagaagtctacattgaaaccacagcctgcaccccaggctggacccatccctgtggctccaatcggaacactcaaaccccagcctcagccagtcccagcctcctacaccacggcctccacttcttcaaggcctacctttaatgtgcaggtgaagtcagcccagcccagccctcattatatggctgccccttcatcaggacaaatttatggctcagggccccagggctataacactcagccagttcctgtctctgggcagtgtccacctccttcaacacggggaggcatggattatgcctacattccaccaccaggacttcagccggagcctgggtatgggtatgcccccaaccagggacgctattatgaaggctactatgcagcagggccaggctatgggggcagaaatgactctgaccctacctatggtcaacaaggtcacccaaatacctggaaacgggaaccagggtacactcctcctggagcagggaaccagaaccctcctgggatgtatccagtcactggtcccaagaagacctatatcacagatcctgtttcagccccctgtgcgccaccattgcagccaaagggtggccattcagggcaactggggccttcgtcagttgccccttcattccgcccagaggatgagcttgagcacctgaccaaaaagatgctgtatgacatggaaaatccacctgctgacgaatactttggccgctgtgctcgctgtggagaaaacgtagttggggaaggtacaggatgcactgccatggatcaggtcttccacgtggattgttttacctgcatcatctgcaacaacaagctccgagggcagccattctatgctgtggaaaagaaagcatactgcgagccctgctacattaatactctggagcagtgcaatgtgtgttccaagcccatcatggagcggattctccgagccaccgggaaggcctatcatcctcactgtttcacctgcgtgatgtgccaccgcagcctggatgggatcccattcactgtggatgctggcgggctcattcactgcattgaggacttccacaagaaatttgccccgcgatgttctgtgtgcaaggagcctattatgccagccccgggccaggaggagactgtccgtattgtggctttggatcgagatttccatgttcactgctaccgatgcgaggattgcggtggtctcctgtctgaaggagataaccaaggctgctaccccttggatgggcacatcctctgcaagacctgcaactctgcccgcatcagggtgttgaccgccaaggcgagcactgacctttagattcagtcacctgttcagccggcactgagaagaacgaacacaagaaaaagataagaaatactagagtaaaggccatcaaactacgcgatagtctctgttcttcatctgctattaaccttgccttagaaacacataaattatgagattttttttaaaagttgttaccaaatacacatttcacattgaatcatgtaggatcttgatgggcctttgttcccaaggacttccacatttttgcacagattatgctccatcccattcacttctgcattcctgtaacttttaatccctatgtttgtctcacttttcatctggttgaatggcttttcttagtgtggtatttgctgtcacatagtttttcctgggtgagtctgccaactcacaggtgcttttaggcttgaaatctccatcctatcatttccgttttgcctgtgactgtaaagagtagccattcttttcccatgtattgaagaggatattcttctcttgctttatactactcacgtccttggggagggaaatgcacaatttttttttgttaggctgtaaagaatttaagctgtaaattacataagttagaacaagcccaaatttaatttgcaaccatcagaattcagaatctatagtgaccagtgatcaaggctaattggaaaagagttatcggcccatagctaataagtagtgacagacaaccaagcttcaatatttttctaaagaaattacaggtgggatatgctagaaaaggcattttggggttatgtttaaaaaaacattattgtcccacaatattaccttaagatttttcttttccgcactacctgaacattgtaatacagacaaacttgatttcttctagaagataacattttcaatactgtcccacttctcatcttaaaaatattgtcatgtttattctaatatccaacacaactatcaaaattgcctttttctctagaggatgaaggctgtgaaaaaaccgttcaaattctcttctttttcttttttattaccaggtccattttgcctgacaattgcaaatcagagcatacaaaataaaactgtgcagttttgtttggtttactttcaaaagagtagaaagcttgaaaagattctgaaaccacagtttcattattctcataatccttctgcaactgaaattacatattgcaggagacattttcatatcatcaatgtgacatttacaccacactttcaaagacaatcactgaaacaaaaattgtctttatgagctaaaaatatgcagaatctctgcctagaatctttattcaaacttttattagccagtgaaacacttgcttgccaactgccaagccatacttattaagttcgaacatgtttcacttaaggagagacacctagcttagtcatggcaagttgccattttgtaaactaaggattttggactgagatttcttaaatctttcttcaaatctcccacaagtatatacttttaaattatggagtattttaagtctacaaaaaggtataaataataatataatgaattcctatatacctaatacccagtttaagacaccaaatataacaagtataattacatcctccaatgtaccgtttccttattccacagatatcacttcactattgtgaagtgatgttcagatttctagttttttttctagtttttaattttaacatcagaactgaaataaaaaattatggatacgtgttttgaattgcaaactattcctcaggaattccaattaaatttattttacttgaataggaatgatcataaaagtgattctttttttgtgactagaaattcttaagccgatggtcactatagctcatccttaatgtatggctcatttgcttttgtcactaaacggttttgtgttagaaccaccaaaattatagcttttaagagcttcctttgaccactgtctttttcttaccctacttctcttatctttgatcgtatatttctcataatgtgaaatatgatgagattcacttaggggcagcatgttagttttgggaggcaatgtcaactgtgtctctgaattcctgtcttccaaattgaagccagaccatgctgatgacctcaagtagcactgactatttgacaatagggctgataatgtaatcggcttgaattttgacttagtaactttttatgtaatactttcggagaaattctctttaggacaaagcagagagtccaatttattgagggatagattgtatctcttaaagtggtcatattattattaattttgccaaaagaagaagaatttattgaatatttatactataaaatgcagtaacattctacttgcttattacatttaaatccttgtgtaactgaatgtttacatgtcaagaggaaaagctgtaagaaaatgctgtcacagacccatccctgtggcatcgtcagcagaatactgcttgcttacaatctttattatgcattcttataacataacctcagagtatctttaccaaaggtttttaaagtaaatctctttttaagatagacttattcttttataataatgaatgtgcactcatacatatgtagaaacatttagatttagagtttttttttttctttcacaaggtataataaggaaaggatcctacaatattttattctagggtttcttaaatatatgatttatattactgtcttttctattaatcatttgatttaaacaatgccaagtcactcttttttagttgcatgaaattttgcctgcaacagagagaaaaagattgtattactttaatgattataatcatactgtctgctgatataatatcataattgttgtggtttaaatacataaatagtagaaaaatcagagtctataacagaaagtttgtaaaaatatactgattttgaaaagtatcaggaatataaatatttggtaattctgtgtaacaagagagacatggaaaaggaaaaaaatccactatatcatgggctctgcagaacatatcaaaataggatttcttaaatttttcaacccccagaccatactgactcaacatggagtctcactggccaagaaaattgcctttaaaactcgaaaataaggccaggtgtggtgactcacacttgtaatcccagcaatttgggaggctgagacaggaggattgcctgaggccaggagtttgacaccagcctgggcaacatagtgagaccttgtctctacaaaaaataaaataaaataaaaaccaaattagccagacatggtggcatgcgcttgtttaaaaaaacaaataaataaataatcgactcaaaaataagtcatgtgtcccagcataaggcatcaggttgttagatgctggcatctctgcagctcaaagatgtgggttctttttcttgtcattaacacattgttatttctgtaggagcaacttctctgatcaaaattacttttctgggtatgtgctgattaagggggtggacttatcaacactataattgttccctatgaaagattccacagagatgtttatggtgaggtttaaaggatatgaaactctacatttaaacaagtattttatatttgggtacagaggaagaaagagagggctttttccatggggctatagtagagagttagtggaatatagacaggactctgaaaacacaacttccagccatttttttagttagtaaaaatcctattaatgtgaaccagccaggaataacagtgttatttctattggatatggtttgggcttctcttgtcaaatctgtgtcggctgccccctgatccttccattatcaagttttgaagggtgttggggaaattatggcagctgctagggagatcagggaaacactgatgtaacctcaaagcctctcaccattcctcttggcttggaaaggctttattttttcatatacatttctagaaatattgctattctaccttagtatttcacatttgtagttcaaacaagcgattgtccatctgttgcctagagctatagtacatgtgtgttatgaatgaaatatgacagcatgttccatacccctgctttagccatctgtgggaaaccagcaaactgaaaaagacacctctgcaaaatgtgcctcaagtccatttcttgggatcgctcgtttggtgcactctcgtgggagacaatcagagaacaacatatacttgtgccttattttcaaagaatctatttacactactatgaatattccactgaagagtcaatgatgtaaatgataaccaccaaatctcaaaaatatactcaccaaaaagtaaaaagtaaaaaaaaaaaaaaaaagaaagaaagaaaagaaagagagagaagtcaacttttcatcttaatatattctagtagtatttattttttccttgtcttggaagtatctcataggtctttaaatgagtaaaacatttttatgccagaaggtgatataatggatgttagtgttttttatttgattttacagtagttttagtcagataatgaggacagagacttcaacttgattctttaccaccattcagcatattttttaattgtcttcattgtatttgcttaatagtggtccagacaagttcaaaacttgttctcagtgaggcattaatatggtgcaaccatgaatatttcaggccaagttattcacttgacagataactagaatgaaacttttctcatgaggctgttgtttggttagcatagccttatttcaaaccttaaaaagttacctgactgaagctactatgacttggtaaggattcttcctctcttgctttcttcctcccttcctttcttcctcttccttcctcctcttcttattttctttcctactttccatcctacctattagtgttgctgtacttggattttttgtaaattaaatcaatgcattatgattttagggaattatgattatattcataaggggaaggctaccagaaaatatatgtggcatccataaaatcttcttttataggggcatattttttaggttgtatttattcgtaaagtgaaatgagataatagagtctttctgtaacatgttaatgaattttcatcagggactgaggtcatagattcttggaaaattcatttgtgactgatctagttttctcagctgtatgcaaagtaatctttcaaagactaggttaagattttttttttaagtctgaagcaatgtaaccccaaatctcaaaaatatactcaccaaaaagta

SEQ ID NO: 736853 - DNA, 2945 bp, Homo sapiens
tgtaactgaatgtttacacaaggatttaaatgtaataagcaagtagaatgttactgcattttatatttaaatccttgtgtaactgaatgtttacatgtcaagaggaaaagctgtaagaaaatgctgtcacagacccatccctgtggcatcgtcagcagaatactgcttgcttacaatctttattatgcattcttataacataacctcagagtatctttaccaaaggtttttaaagtaaatctctttttaagatagacttattcttttataataatgaatgtgcactcatacatatgtagaaacatttagatttagagtttttttttttctttcacaaggtataataaggaaaggatcctacaatattttattctagggtttcttaaatatatgatttatattactgtcttttctattaatcatttgatttaaacaatgccaagtcactcttttttagttgcatgaaattttgcctgcaacagagagaaaaagattgtattactttaatgattataatcatactgtctgctgatataatatcataattgttgtggtttaaatacataaatagtagaaaaatcagagtctataacagaaagtttgtaaaaatatactgattttgaaaagtatcaggaatataaatatttggtaattctgtgtaacaagagagacatggaaaaggaaaaaaatccactatatcatgggctctgcagaacatatcaaaataggatttcttaaatttttcaacccccagaccatactgactcaacatggagtctcactggccaagaaaattgcctttaaaactcgaaaataaggccaggtgtggtgactcacacttgtaatcccagcaatttgggaggctgagacaggaggattgcctgaggccaggagtttgacaccagcctgggcaacatagtgagaccttgtctctacaaaaaataaaataaaataaaaaccaaattagccagacatggtggcatgcgcttgtttaaaaaaacaaataaataaataatcgactcaaaaataagtcatgtgtcccagcataaggcatcaggttgttagatgctggcatctctgcagctcaaagatgtgggttctttttcttgtcattaacacattgttatttctgtaggagcaacttctctgatcaaaattacttttctgggtatgtgctgattaagggggtggacttatcaacactataattgttccctatgaaagattccacagagatgtttatggtgaggtttaaaggatatgaaactctacatttaaacaagtattttatatttgggtacagaggaagaaagagagggctttttccatggggctatagtagagagttagtggaatatagacaggactctgaaaacacaacttccagccatttttttagttagtaaaaatcctattaatgtgaaccagccaggaataacagtgttatttctattggatatggtttgggcttctcttgtcaaatctgtgtcggctgccccctgatccttccattatcaagttttgaagggtgttggggaaattatggcagctgctagggagatcagggaaacactgatgtaacctcaaagcctctcaccattcctcttggcttggaaaggctttattttttcatatacatttctagaaatattgctattctaccttagtatttcacatttgtagttcaaacaagcgattgtccatctgttgcctagagctatagtacatgtgtgttatgaatgaaatatgacagcatgttccatacccctgctttagccatctgtgggaaaccagcaaactgaaaaagacacctctgcaaaatgtgcctcaagtccatttcttgggatcgctcgtttggtgcactctcgtgggagacaatcagagaacaacatatacttgtgccttattttcaaagaatctatttacactactatgaatattccactgaagagtcaatgatgtaaatgataaccaccaaatctcaaaaatatactcaccaaaaagtaaaaagtaaaaaaaaaaaaaaaaagaaagaaagaaaagaaagagagagaagtcaacttttcatcttaatatattctagtagtatttattttttccttgtcttggaagtatctcataggtctttaaatgagtaaaacatttttatgccagaaggtgatataatggatgttagtgttttttatttgattttacagtagttttagtcagataatgaggacagagacttcaacttgattctttaccaccattcagcatattttttaattgtcttcattgtatttgcttaatagtggtccagacaagttcaaaacttgttctcagtgaggcattaatatggtgcaaccatgaatatttcaggccaagttattcacttgacagataactagaatgaaacttttctcatgaggctgttgtttggttagcatagccttatttcaaaccttaaaaagttacctgactgaagctactatgacttggtaaggattcttcctctcttgctttcttcctcccttcctttcttcctcttccttcctcctcttcttattttctttcctactttccatcctacctattagtgttgctgtacttggattttttgtaaattaaatcaatgcattatgattttagggaattatgattatattcataaggggaaggctaccagaaaatatatgtggcatccataaaatcttcttttataggggcatattttttaggttgtatttattcgtaaagtgaaatgagataatagagtctttctgtaacatgttaatgaattttcatcagggactgaggtcatagattcttggaaaattcatttgtgactgatctagttttctcagctgtatgcaaagtaatctttcaaagactaggttaagattttttttttaagtctgaagcaatgtaaccccaaatctcaaaaatatactcaccaaaaagta

SEQ ID NO: 736854 - DNA, 3679 bp, Homo sapiens
cgcggggaaccatcacttagttccagtgattgttccagtgattgttccagtgattgttccagtgattgttcagcggggaatatcacttcactattgtgaagtgatgttcagatttctagttttttttctagtttttaattttaacatcagaactgaaataaaaaattatggatacgtgttttgaattgcaaactattcctcaggaattccaattaaatttattttacttgaataggaatgatcataaaagtgattctttttttgtgactagaaattcttaagccgatggtcactatagctcatccttaatgtatggctcatttgcttttgtcactaaacggttttgtgttagaaccaccaaaattatagcttttaagagcttcctttgaccactgtctttttcttaccctacttctcttatctttgatcgtatatttctcataatgtgaaatatgatgagattcacttaggggcagcatgttagttttgggaggcaatgtcaactgtgtctctgaattcctgtcttccaaattgaagccagaccatgctgatgacctcaagtagcactgactatttgacaatagggctgataatgtaatcggcttgaattttgacttagtaactttttatgtaatactttcggagaaattctctttaggacaaagcagagagtccaatttattgagggatagattgtatctcttaaagtggtcatattattattaattttgccaaaagaagaagaatttattgaatatttatactataaaatgcagtaacattctacttgcttattacatttaaatccttgtgtaactgaatgtttacatgtcaagaggaaaagctgtaagaaaatgctgtcacagacccatccctgtggcatcgtcagcagaatactgcttgcttacaatctttattatgcattcttataacataacctcagagtatctttaccaaaggtttttaaagtaaatctctttttaagatagacttattcttttataataatgaatgtgcactcatacatatgtagaaacatttagatttagagtttttttttttctttcacaaggtataataaggaaaggatcctacaatattttattctagggtttcttaaatatatgatttatattactgtcttttctattaatcatttgatttaaacaatgccaagtcactcttttttagttgcatgaaattttgcctgcaacagagagaaaaagattgtattactttaatgattataatcatactgtctgctgatataatatcataattgttgtggtttaaatacataaatagtagaaaaatcagagtctataacagaaagtttgtaaaaatatactgattttgaaaagtatcaggaatataaatatttggtaattctgtgtaacaagagagacatggaaaaggaaaaaaatccactatatcatgggctctgcagaacatatcaaaataggatttcttaaatttttcaacccccagaccatactgactcaacatggagtctcactggccaagaaaattgcctttaaaactcgaaaataaggccaggtgtggtgactcacacttgtaatcccagcaatttgggaggctgagacaggaggattgcctgaggccaggagtttgacaccagcctgggcaacatagtgagaccttgtctctacaaaaaataaaataaaataaaaaccaaattagccagacatggtggcatgcgcttgtttaaaaaaacaaataaataaataatcgactcaaaaataagtcatgtgtcccagcataaggcatcaggttgttagatgctggcatctctgcagctcaaagatgtgggttctttttcttgtcattaacacattgttatttctgtaggagcaacttctctgatcaaaattacttttctgggtatgtgctgattaagggggtggacttatcaacactataattgttccctatgaaagattccacagagatgtttatggtgaggtttaaaggatatgaaactctacatttaaacaagtattttatatttgggtacagaggaagaaagagagggctttttccatggggctatagtagagagttagtggaatatagacaggactctgaaaacacaacttccagccatttttttagttagtaaaaatcctattaatgtgaaccagccaggaataacagtgttatttctattggatatggtttgggcttctcttgtcaaatctgtgtcggctgccccctgatccttccattatcaagttttgaagggtgttggggaaattatggcagctgctagggagatcagggaaacactgatgtaacctcaaagcctctcaccattcctcttggcttggaaaggctttattttttcatatacatttctagaaatattgctattctaccttagtatttcacatttgtagttcaaacaagcgattgtccatctgttgcctagagctatagtacatgtgtgttatgaatgaaatatgacagcatgttccatacccctgctttagccatctgtgggaaaccagcaaactgaaaaagacacctctgcaaaatgtgcctcaagtccatttcttgggatcgctcgtttggtgcactctcgtgggagacaatcagagaacaacatatacttgtgccttattttcaaagaatctatttacactactatgaatattccactgaagagtcaatgatgtaaatgataaccaccaaatctcaaaaatatactcaccaaaaagtaaaaagtaaaaaaaaaaaaaaaaagaaagaaagaaaagaaagagagagaagtcaacttttcatcttaatatattctagtagtatttattttttccttgtcttggaagtatctcataggtctttaaatgagtaaaacatttttatgccagaaggtgatataatggatgttagtgttttttatttgattttacagtagttttagtcagataatgaggacagagacttcaacttgattctttaccaccattcagcatattttttaattgtcttcattgtatttgcttaatagtggtccagacaagttcaaaacttgttctcagtgaggcattaatatggtgcaaccatgaatatttcaggccaagttattcacttgacagataactagaatgaaacttttctcatgaggctgttgtttggttagcatagccttatttcaaaccttaaaaagttacctgactgaagctactatgacttggtaaggattcttcctctcttgctttcttcctcccttcctttcttcctcttccttcctcctcttcttattttctttcctactttccatcctacctattagtgttgctgtacttggattttttgtaaattaaatcaatgcattatgattttagggaattatgattatattcataaggggaaggctaccagaaaatatatgtggcatccataaaatcttcttttataggggcatattttttaggttgtatttattcgtaaagtgaaatgagataatagagtctttctgtaacatgttaatgaattttcatcagggactgaggtcatagattcttggaaaattcatttgtgactgatctagttttctcagctgtatgcaaagtaatctttcaaagactaggttaagattttttttttaagtctgaagcaatgtaaccccaaatctcaaaaatatactcaccaaaaagta

SEQ ID NO: 736855 - DNA, 5982 bp, Homo sapiens
agagcggtgcgggtcgtgctggagaactaagcgcggcagacctcggtggccattcagggcaactggggccttcgtcagttgccccttcattccgcccagaggatgagcttgagcacctgaccaaaaagatgctgtatgacatggaaaatccacctgctgacgaatactttggccgctgtgctcgctgtggagaaaacgtagttggggaaggtacaggatgcactgccatggatcaggtcttccacgtggattgttttacctgcatcatctgcaacaacaagctccgagggcagccattctatgctgtggaaaagaaagcatactgcgagccctgctacattaatactctggagcagtgcaatgtgtgttccaagcccatcatggagcggattctccgagccaccgggaaggcctatcatcctcactgtttcacctgcgtgatgtgccaccgcagcctggatgggatcccattcactgtggatgctggcgggctcattcactgcattgaggacttccacaagaaatttgccccgcgatgttctgtgtgcaaggagcctattatgccagccccgggccaggaggagactgtccgtattgtggctttggatcgagatttccatgttcactgctaccgatgcgaggattgcggtggtctcctgtctgaaggagataaccaaggctgctaccccttggatgggcacatcctctgcaagacctgcaactctgcccgcatcagggtgttgaccgccaaggcgagcactgacctttagattcagtcacctgttcagccggcactgagaagaacgaacacaagaaaaagataagaaatactagagtaaaggccatcaaactacgcgatagtctctgttcttcatctgctattaaccttgccttagaaacacataaattatgagattttttttaaaagttgttaccaaatacacatttcacattgaatcatgtaggatcttgatgggcctttgttcccaaggacttccacatttttgcacagattatgctccatcccattcacttctgcattcctgtaacttttaatccctatgtttgtctcacttttcatctggttgaatggcttttcttagtgtggtatttgctgtcacatagtttttcctgggtgagtctgccaactcacaggtgcttttaggcttgaaatctccatcctatcatttccgttttgcctgtgactgtaaagagtagccattcttttcccatgtattgaagaggatattcttctcttgctttatactactcacgtccttggggagggaaatgcacaatttttttttgttaggctgtaaagaatttaagctgtaaattacataagttagaacaagcccaaatttaatttgcaaccatcagaattcagaatctatagtgaccagtgatcaaggctaattggaaaagagttatcggcccatagctaataagtagtgacagacaaccaagcttcaatatttttctaaagaaattacaggtgggatatgctagaaaaggcattttggggttatgtttaaaaaaacattattgtcccacaatattaccttaagatttttcttttccgcactacctgaacattgtaatacagacaaacttgatttcttctagaagataacattttcaatactgtcccacttctcatcttaaaaatattgtcatgtttattctaatatccaacacaactatcaaaattgcctttttctctagaggatgaaggctgtgaaaaaaccgttcaaattctcttctttttcttttttattaccaggtccattttgcctgacaattgcaaatcagagcatacaaaataaaactgtgcagttttgtttggtttactttcaaaagagtagaaagcttgaaaagattctgaaaccacagtttcattattctcataatccttctgcaactgaaattacatattgcaggagacattttcatatcatcaatgtgacatttacaccacactttcaaagacaatcactgaaacaaaaattgtctttatgagctaaaaatatgcagaatctctgcctagaatctttattcaaacttttattagccagtgaaacacttgcttgccaactgccaagccatacttattaagttcgaacatgtttcacttaaggagagacacctagcttagtcatggcaagttgccattttgtaaactaaggattttggactgagatttcttaaatctttcttcaaatctcccacaagtatatacttttaaattatggagtattttaagtctacaaaaaggtataaataataatataatgaattcctatatacctaatacccagtttaagacaccaaatataacaagtataattacatcctccaatgtaccgtttccttattccacagatatcacttcactattgtgaagtgatgttcagatttctagttttttttctagtttttaattttaacatcagaactgaaataaaaaattatggatacgtgttttgaattgcaaactattcctcaggaattccaattaaatttattttacttgaataggaatgatcataaaagtgattctttttttgtgactagaaattcttaagccgatggtcactatagctcatccttaatgtatggctcatttgcttttgtcactaaacggttttgtgttagaaccaccaaaattatagcttttaagagcttcctttgaccactgtctttttcttaccctacttctcttatctttgatcgtatatttctcataatgtgaaatatgatgagattcacttaggggcagcatgttagttttgggaggcaatgtcaactgtgtctctgaattcctgtcttccaaattgaagccagaccatgctgatgacctcaagtagcactgactatttgacaatagggctgataatgtaatcggcttgaattttgacttagtaactttttatgtaatactttcggagaaattctctttaggacaaagcagagagtccaatttattgagggatagattgtatctcttaaagtggtcatattattattaattttgccaaaagaagaagaatttattgaatatttatactataaaatgcagtaacattctacttgcttattacatttaaatccttgtgtaactgaatgtttacatgtcaagaggaaaagctgtaagaaaatgctgtcacagacccatccctgtggcatcgtcagcagaatactgcttgcttacaatctttattatgcattcttataacataacctcagagtatctttaccaaaggtttttaaagtaaatctctttttaagatagacttattcttttataataatgaatgtgcactcatacatatgtagaaacatttagatttagagtttttttttttctttcacaaggtataataaggaaaggatcctacaatattttattctagggtttcttaaatatatgatttatattactgtcttttctattaatcatttgatttaaacaatgccaagtcactcttttttagttgcatgaaattttgcctgcaacagagagaaaaagattgtattactttaatgattataatcatactgtctgctgatataatatcataattgttgtggtttaaatacataaatagtagaaaaatcagagtctataacagaaagtttgtaaaaatatactgattttgaaaagtatcaggaatataaatatttggtaattctgtgtaacaagagagacatggaaaaggaaaaaaatccactatatcatgggctctgcagaacatatcaaaataggatttcttaaatttttcaacccccagaccatactgactcaacatggagtctcactggccaagaaaattgcctttaaaactcgaaaataaggccaggtgtggtgactcacacttgtaatcccagcaatttgggaggctgagacaggaggattgcctgaggccaggagtttgacaccagcctgggcaacatagtgagaccttgtctctacaaaaaataaaataaaataaaaaccaaattagccagacatggtggcatgcgcttgtttaaaaaaacaaataaataaataatcgactcaaaaataagtcatgtgtcccagcataaggcatcaggttgttagatgctggcatctctgcagctcaaagatgtgggttctttttcttgtcattaacacattgttatttctgtaggagcaacttctctgatcaaaattacttttctgggtatgtgctgattaagggggtggacttatcaacactataattgttccctatgaaagattccacagagatgtttatggtgaggtttaaaggatatgaaactctacatttaaacaagtattttatatttgggtacagaggaagaaagagagggctttttccatggggctatagtagagagttagtggaatatagacaggactctgaaaacacaacttccagccatttttttagttagtaaaaatcctattaatgtgaaccagccaggaataacagtgttatttctattggatatggtttgggcttctcttgtcaaatctgtgtcggctgccccctgatccttccattatcaagttttgaagggtgttggggaaattatggcagctgctagggagatcagggaaacactgatgtaacctcaaagcctctcaccattcctcttggcttggaaaggctttattttttcatatacatttctagaaatattgctattctaccttagtatttcacatttgtagttcaaacaagcgattgtccatctgttgcctagagctatagtacatgtgtgttatgaatgaaatatgacagcatgttccatacccctgctttagccatctgtgggaaaccagcaaactgaaaaagacacctctgcaaaatgtgcctcaagtccatttcttgggatcgctcgtttggtgcactctcgtgggagacaatcagagaacaacatatacttgtgccttattttcaaagaatctatttacactactatgaatattccactgaagagtcaatgatgtaaatgataaccaccaaatctcaaaaatatactcaccaaaaagtaaaaagtaaaaaaaaaaaaaaaaagaaagaaagaaaagaaagagagagaagtcaacttttcatcttaatatattctagtagtatttattttttccttgtcttggaagtatctcataggtctttaaatgagtaaaacatttttatgccagaaggtgatataatggatgttagtgttttttatttgattttacagtagttttagtcagataatgaggacagagacttcaacttgattctttaccaccattcagcatattttttaattgtcttcattgtatttgcttaatagtggtccagacaagttcaaaacttgttctcagtgaggcattaatatggtgcaaccatgaatatttcaggccaagttattcacttgacagataactagaatgaaacttttctcatgaggctgttgtttggttagcatagccttatttcaaaccttaaaaagttacctgactgaagctactatgacttggtaaggattcttcctctcttgctttcttcctcccttcctttcttcctcttccttcctcctcttcttattttctttcctactttccatcctacctattagtgttgctgtacttggattttttgtaaattaaatcaatgcattatgattttagggaattatgattatattcataaggggaaggctaccagaaaatatatgtggcatccataaaatcttcttttataggggcatattttttaggttgtatttattcgtaaagtgaaatgagataatagagtctttctgtaacatgttaatgaattttcatcagggactgaggtcatagattcttggaaaattcatttgtgactgatctagttttctcagctgtatgcaaagtaatctttcaaagactaggttaagattttttttttaagtctgaagcaatgtaaccccaaatctcaaaaatatactcaccaaaaagta

SEQ ID NO: 736856 - DNA, 6910 bp, Homo sapiens
accgacgggtcgtcatgaggtcgcaacccatacaaacaacctggaggtgagggtgattttcttccacccccacctccacctctagatgattccagtgcccttccatctatctctggaaactttcctcctccaccacctcttgatgaagaggctttcaaagtacaggggaatcccggaggcaagacacttgaggagaggcgctccagcctggacgctgagattgactccttgaccagcatcttggctgaccttgagtgcagctccccctataagcctcggcctccacagagctccactggttcaacagcctctcctccagtttcgaccccagtcacaggacacaagagaatggtcatcccgaaccaaccccctctaacagcaaccaagaagtctacattgaaaccacagcctgcaccccaggctggacccatccctgtggctccaatcggaacactcaaaccccagcctcagccagtcccagcctcctacaccacggcctccacttcttcaaggcctacctttaatgtgcaggtgaagtcagcccagcccagccctcattatatggctgccccttcatcaggacaaatttatggctcagggccccagggctataacactcagccagttcctgtctctgggcagtgtccacctccttcaacacggggaggcatggattatgcctacattccaccaccaggacttcagccggagcctgggtatgggtatgcccccaaccagggacgctattatgaaggctactatgcagcagggccaggctatgggggcagaaatgactctgaccctacctatggtcaacaaggtcacccaaatacctggaaacgggaaccagggtacactcctcctggagcagggaaccagaaccctcctgggatgtatccagtcactggtcccaagaagacctatatcacagatcctgtttcagccccctgtgcgccaccattgcagccaaagggtggccattcagggcaactggggccttcgtcagttgccccttcattccgcccagaggatgagcttgagcacctgaccaaaaagatgctgtatgacatggaaaatccacctgctgacgaatactttggccgctgtgctcgctgtggagaaaacgtagttggggaaggtacaggatgcactgccatggatcaggtcttccacgtggattgttttacctgcatcatctgcaacaacaagctccgagggcagccattctatgctgtggaaaagaaagcatactgcgagccctgctacattaatactctggagcagtgcaatgtgtgttccaagcccatcatggagcggattctccgagccaccgggaaggcctatcatcctcactgtttcacctgcgtgatgtgccaccgcagcctggatgggatcccattcactgtggatgctggcgggctcattcactgcattgaggacttccacaagaaatttgccccgcgatgttctgtgtgcaaggagcctattatgccagccccgggccaggaggagactgtccgtattgtggctttggatcgagatttccatgttcactgctaccgatgcgaggattgcggtggtctcctgtctgaaggagataaccaaggctgctaccccttggatgggcacatcctctgcaagacctgcaactctgcccgcatcagggtgttgaccgccaaggcgagcactgacctttagattcagtcacctgttcagccggcactgagaagaacgaacacaagaaaaagataagaaatactagagtaaaggccatcaaactacgcgatagtctctgttcttcatctgctattaaccttgccttagaaacacataaattatgagattttttttaaaagttgttaccaaatacacatttcacattgaatcatgtaggatcttgatgggcctttgttcccaaggacttccacatttttgcacagattatgctccatcccattcacttctgcattcctgtaacttttaatccctatgtttgtctcacttttcatctggttgaatggcttttcttagtgtggtatttgctgtcacatagtttttcctgggtgagtctgccaactcacaggtgcttttaggcttgaaatctccatcctatcatttccgttttgcctgtgactgtaaagagtagccattcttttcccatgtattgaagaggatattcttctcttgctttatactactcacgtccttggggagggaaatgcacaatttttttttgttaggctgtaaagaatttaagctgtaaattacataagttagaacaagcccaaatttaatttgcaaccatcagaattcagaatctatagtgaccagtgatcaaggctaattggaaaagagttatcggcccatagctaataagtagtgacagacaaccaagcttcaatatttttctaaagaaattacaggtgggatatgctagaaaaggcattttggggttatgtttaaaaaaacattattgtcccacaatattaccttaagatttttcttttccgcactacctgaacattgtaatacagacaaacttgatttcttctagaagataacattttcaatactgtcccacttctcatcttaaaaatattgtcatgtttattctaatatccaacacaactatcaaaattgcctttttctctagaggatgaaggctgtgaaaaaaccgttcaaattctcttctttttcttttttattaccaggtccattttgcctgacaattgcaaatcagagcatacaaaataaaactgtgcagttttgtttggtttactttcaaaagagtagaaagcttgaaaagattctgaaaccacagtttcattattctcataatccttctgcaactgaaattacatattgcaggagacattttcatatcatcaatgtgacatttacaccacactttcaaagacaatcactgaaacaaaaattgtctttatgagctaaaaatatgcagaatctctgcctagaatctttattcaaacttttattagccagtgaaacacttgcttgccaactgccaagccatacttattaagttcgaacatgtttcacttaaggagagacacctagcttagtcatggcaagttgccattttgtaaactaaggattttggactgagatttcttaaatctttcttcaaatctcccacaagtatatacttttaaattatggagtattttaagtctacaaaaaggtataaataataatataatgaattcctatatacctaatacccagtttaagacaccaaatataacaagtataattacatcctccaatgtaccgtttccttattccacagatatcacttcactattgtgaagtgatgttcagatttctagttttttttctagtttttaattttaacatcagaactgaaataaaaaattatggatacgtgttttgaattgcaaactattcctcaggaattccaattaaatttattttacttgaataggaatgatcataaaagtgattctttttttgtgactagaaattcttaagccgatggtcactatagctcatccttaatgtatggctcatttgcttttgtcactaaacggttttgtgttagaaccaccaaaattatagcttttaagagcttcctttgaccactgtctttttcttaccctacttctcttatctttgatcgtatatttctcataatgtgaaatatgatgagattcacttaggggcagcatgttagttttgggaggcaatgtcaactgtgtctctgaattcctgtcttccaaattgaagccagaccatgctgatgacctcaagtagcactgactatttgacaatagggctgataatgtaatcggcttgaattttgacttagtaactttttatgtaatactttcggagaaattctctttaggacaaagcagagagtccaatttattgagggatagattgtatctcttaaagtggtcatattattattaattttgccaaaagaagaagaatttattgaatatttatactataaaatgcagtaacattctacttgcttattacatttaaatccttgtgtaactgaatgtttacatgtcaagaggaaaagctgtaagaaaatgctgtcacagacccatccctgtggcatcgtcagcagaatactgcttgcttacaatctttattatgcattcttataacataacctcagagtatctttaccaaaggtttttaaagtaaatctctttttaagatagacttattcttttataataatgaatgtgcactcatacatatgtagaaacatttagatttagagtttttttttttctttcacaaggtataataaggaaaggatcctacaatattttattctagggtttcttaaatatatgatttatattactgtcttttctattaatcatttgatttaaacaatgccaagtcactcttttttagttgcatgaaattttgcctgcaacagagagaaaaagattgtattactttaatgattataatcatactgtctgctgatataatatcataattgttgtggtttaaatacataaatagtagaaaaatcagagtctataacagaaagtttgtaaaaatatactgattttgaaaagtatcaggaatataaatatttggtaattctgtgtaacaagagagacatggaaaaggaaaaaaatccactatatcatgggctctgcagaacatatcaaaataggatttcttaaatttttcaacccccagaccatactgactcaacatggagtctcactggccaagaaaattgcctttaaaactcgaaaataaggccaggtgtggtgactcacacttgtaatcccagcaatttgggaggctgagacaggaggattgcctgaggccaggagtttgacaccagcctgggcaacatagtgagaccttgtctctacaaaaaataaaataaaataaaaaccaaattagccagacatggtggcatgcgcttgtttaaaaaaacaaataaataaataatcgactcaaaaataagtcatgtgtcccagcataaggcatcaggttgttagatgctggcatctctgcagctcaaagatgtgggttctttttcttgtcattaacacattgttatttctgtaggagcaacttctctgatcaaaattacttttctgggtatgtgctgattaagggggtggacttatcaacactataattgttccctatgaaagattccacagagatgtttatggtgaggtttaaaggatatgaaactctacatttaaacaagtattttatatttgggtacagaggaagaaagagagggctttttccatggggctatagtagagagttagtggaatatagacaggactctgaaaacacaacttccagccatttttttagttagtaaaaatcctattaatgtgaaccagccaggaataacagtgttatttctattggatatggtttgggcttctcttgtcaaatctgtgtcggctgccccctgatccttccattatcaagttttgaagggtgttggggaaattatggcagctgctagggagatcagggaaacactgatgtaacctcaaagcctctcaccattcctcttggcttggaaaggctttattttttcatatacatttctagaaatattgctattctaccttagtatttcacatttgtagttcaaacaagcgattgtccatctgttgcctagagctatagtacatgtgtgttatgaatgaaatatgacagcatgttccatacccctgctttagccatctgtgggaaaccagcaaactgaaaaagacacctctgcaaaatgtgcctcaagtccatttcttgggatcgctcgtttggtgcactctcgtgggagacaatcagagaacaacatatacttgtgccttattttcaaagaatctatttacactactatgaatattccactgaagagtcaatgatgtaaatgataaccaccaaatctcaaaaatatactcaccaaaaagtaaaaagtaaaaaaaaaaaaaaaaagaaagaaagaaaagaaagagagagaagtcaacttttcatcttaatatattctagtagtatttattttttccttgtcttggaagtatctcataggtctttaaatgagtaaaacatttttatgccagaaggtgatataatggatgttagtgttttttatttgattttacagtagttttagtcagataatgaggacagagacttcaacttgattctttaccaccattcagcatattttttaattgtcttcattgtatttgcttaatagtggtccagacaagttcaaaacttgttctcagtgaggcattaatatggtgcaaccatgaatatttcaggccaagttattcacttgacagataactagaatgaaacttttctcatgaggctgttgtttggttagcatagccttatttcaaaccttaaaaagttacctgactgaagctactatgacttggtaaggattcttcctctcttgctttcttcctcccttcctttcttcctcttccttcctcctcttcttattttctttcctactttccatcctacctattagtgttgctgtacttggattttttgtaaattaaatcaatgcattatgattttagggaattatgattatattcataaggggaaggctaccagaaaatatatgtggcatccataaaatcttcttttataggggcatattttttaggttgtatttattcgtaaagtgaaatgagataatagagtctttctgtaacatgttaatgaattttcatcagggactgaggtcatagattcttggaaaattcatttgtgactgatctagttttctcagctgtatgcaaagtaatctttcaaagactaggttaagattttttttttaagtctgaagcaatgtaaccccaaatctcaaaaatatactcaccaaaaagta

SEQ ID NO: 736857 - DNA, 6079 bp, Homo sapiens
gttaatcctgatgcacagaactgggaataggccagatgccacattaatcaatttaagaatgctggagcttcgcagaatactgcatgaacaacgagaaccgtggccctgaaagactcaaaaccctacagtatatgaaactattgcaggatgtgtggatgttcaaaggaataacagacttggaagcaatgcttactgaattttgatgtattaaaggatgtcaagtccaagagagagataaggtctcagaagacagaactagaaccatggggccgctgtgctcgctgtggagaaaacgtagttggggaaggtacaggatgcactgccatggatcaggtcttccacgtggattgttttacctgcatcatctgcaacaacaagctccgagggcagccattctatgctgtggaaaagaaagcatactgcgagccctgctacattaatactctggagcagtgcaatgtgtgttccaagcccatcatggagcggattctccgagccaccgggaaggcctatcatcctcactgtttcacctgcgtgatgtgccaccgcagcctggatgggatcccattcactgtggatgctggcgggctcattcactgcattgaggacttccacaagaaatttgccccgcgatgttctgtgtgcaaggagcctattatgccagccccgggccaggaggagactgtccgtattgtggctttggatcgagatttccatgttcactgctaccgatgcgaggattgcggtggtctcctgtctgaaggagataaccaaggctgctaccccttggatgggcacatcctctgcaagacctgcaactctgcccgcatcagggtgttgaccgccaaggcgagcactgacctttagattcagtcacctgttcagccggcactgagaagaacgaacacaagaaaaagataagaaatactagagtaaaggccatcaaactacgcgatagtctctgttcttcatctgctattaaccttgccttagaaacacataaattatgagattttttttaaaagttgttaccaaatacacatttcacattgaatcatgtaggatcttgatgggcctttgttcccaaggacttccacatttttgcacagattatgctccatcccattcacttctgcattcctgtaacttttaatccctatgtttgtctcacttttcatctggttgaatggcttttcttagtgtggtatttgctgtcacatagtttttcctgggtgagtctgccaactcacaggtgcttttaggcttgaaatctccatcctatcatttccgttttgcctgtgactgtaaagagtagccattcttttcccatgtattgaagaggatattcttctcttgctttatactactcacgtccttggggagggaaatgcacaatttttttttgttaggctgtaaagaatttaagctgtaaattacataagttagaacaagcccaaatttaatttgcaaccatcagaattcagaatctatagtgaccagtgatcaaggctaattggaaaagagttatcggcccatagctaataagtagtgacagacaaccaagcttcaatatttttctaaagaaattacaggtgggatatgctagaaaaggcattttggggttatgtttaaaaaaacattattgtcccacaatattaccttaagatttttcttttccgcactacctgaacattgtaatacagacaaacttgatttcttctagaagataacattttcaatactgtcccacttctcatcttaaaaatattgtcatgtttattctaatatccaacacaactatcaaaattgcctttttctctagaggatgaaggctgtgaaaaaaccgttcaaattctcttctttttcttttttattaccaggtccattttgcctgacaattgcaaatcagagcatacaaaataaaactgtgcagttttgtttggtttactttcaaaagagtagaaagcttgaaaagattctgaaaccacagtttcattattctcataatccttctgcaactgaaattacatattgcaggagacattttcatatcatcaatgtgacatttacaccacactttcaaagacaatcactgaaacaaaaattgtctttatgagctaaaaatatgcagaatctctgcctagaatctttattcaaacttttattagccagtgaaacacttgcttgccaactgccaagccatacttattaagttcgaacatgtttcacttaaggagagacacctagcttagtcatggcaagttgccattttgtaaactaaggattttggactgagatttcttaaatctttcttcaaatctcccacaagtatatacttttaaattatggagtattttaagtctacaaaaaggtataaataataatataatgaattcctatatacctaatacccagtttaagacaccaaatataacaagtataattacatcctccaatgtaccgtttccttattccacagatatcacttcactattgtgaagtgatgttcagatttctagttttttttctagtttttaattttaacatcagaactgaaataaaaaattatggatacgtgttttgaattgcaaactattcctcaggaattccaattaaatttattttacttgaataggaatgatcataaaagtgattctttttttgtgactagaaattcttaagccgatggtcactatagctcatccttaatgtatggctcatttgcttttgtcactaaacggttttgtgttagaaccaccaaaattatagcttttaagagcttcctttgaccactgtctttttcttaccctacttctcttatctttgatcgtatatttctcataatgtgaaatatgatgagattcacttaggggcagcatgttagttttgggaggcaatgtcaactgtgtctctgaattcctgtcttccaaattgaagccagaccatgctgatgacctcaagtagcactgactatttgacaatagggctgataatgtaatcggcttgaattttgacttagtaactttttatgtaatactttcggagaaattctctttaggacaaagcagagagtccaatttattgagggatagattgtatctcttaaagtggtcatattattattaattttgccaaaagaagaagaatttattgaatatttatactataaaatgcagtaacattctacttgcttattacatttaaatccttgtgtaactgaatgtttacatgtcaagaggaaaagctgtaagaaaatgctgtcacagacccatccctgtggcatcgtcagcagaatactgcttgcttacaatctttattatgcattcttataacataacctcagagtatctttaccaaaggtttttaaagtaaatctctttttaagatagacttattcttttataataatgaatgtgcactcatacatatgtagaaacatttagatttagagtttttttttttctttcacaaggtataataaggaaaggatcctacaatattttattctagggtttcttaaatatatgatttatattactgtcttttctattaatcatttgatttaaacaatgccaagtcactcttttttagttgcatgaaattttgcctgcaacagagagaaaaagattgtattactttaatgattataatcatactgtctgctgatataatatcataattgttgtggtttaaatacataaatagtagaaaaatcagagtctataacagaaagtttgtaaaaatatactgattttgaaaagtatcaggaatataaatatttggtaattctgtgtaacaagagagacatggaaaaggaaaaaaatccactatatcatgggctctgcagaacatatcaaaataggatttcttaaatttttcaacccccagaccatactgactcaacatggagtctcactggccaagaaaattgcctttaaaactcgaaaataaggccaggtgtggtgactcacacttgtaatcccagcaatttgggaggctgagacaggaggattgcctgaggccaggagtttgacaccagcctgggcaacatagtgagaccttgtctctacaaaaaataaaataaaataaaaaccaaattagccagacatggtggcatgcgcttgtttaaaaaaacaaataaataaataatcgactcaaaaataagtcatgtgtcccagcataaggcatcaggttgttagatgctggcatctctgcagctcaaagatgtgggttctttttcttgtcattaacacattgttatttctgtaggagcaacttctctgatcaaaattacttttctgggtatgtgctgattaagggggtggacttatcaacactataattgttccctatgaaagattccacagagatgtttatggtgaggtttaaaggatatgaaactctacatttaaacaagtattttatatttgggtacagaggaagaaagagagggctttttccatggggctatagtagagagttagtggaatatagacaggactctgaaaacacaacttccagccatttttttagttagtaaaaatcctattaatgtgaaccagccaggaataacagtgttatttctattggatatggtttgggcttctcttgtcaaatctgtgtcggctgccccctgatccttccattatcaagttttgaagggtgttggggaaattatggcagctgctagggagatcagggaaacactgatgtaacctcaaagcctctcaccattcctcttggcttggaaaggctttattttttcatatacatttctagaaatattgctattctaccttagtatttcacatttgtagttcaaacaagcgattgtccatctgttgcctagagctatagtacatgtgtgttatgaatgaaatatgacagcatgttccatacccctgctttagccatctgtgggaaaccagcaaactgaaaaagacacctctgcaaaatgtgcctcaagtccatttcttgggatcgctcgtttggtgcactctcgtgggagacaatcagagaacaacatatacttgtgccttattttcaaagaatctatttacactactatgaatattccactgaagagtcaatgatgtaaatgataaccaccaaatctcaaaaatatactcaccaaaaagtaaaaagtaaaaaaaaaaaaaaaaagaaagaaagaaaagaaagagagagaagtcaacttttcatcttaatatattctagtagtatttattttttccttgtcttggaagtatctcataggtctttaaatgagtaaaacatttttatgccagaaggtgatataatggatgttagtgttttttatttgattttacagtagttttagtcagataatgaggacagagacttcaacttgattctttaccaccattcagcatattttttaattgtcttcattgtatttgcttaatagtggtccagacaagttcaaaacttgttctcagtgaggcattaatatggtgcaaccatgaatatttcaggccaagttattcacttgacagataactagaatgaaacttttctcatgaggctgttgtttggttagcatagccttatttcaaaccttaaaaagttacctgactgaagctactatgacttggtaaggattcttcctctcttgctttcttcctcccttcctttcttcctcttccttcctcctcttcttattttctttcctactttccatcctacctattagtgttgctgtacttggattttttgtaaattaaatcaatgcattatgattttagggaattatgattatattcataaggggaaggctaccagaaaatatatgtggcatccataaaatcttcttttataggggcatattttttaggttgtatttattcgtaaagtgaaatgagataatagagtctttctgtaacatgttaatgaattttcatcagggactgaggtcatagattcttggaaaattcatttgtgactgatctagttttctcagctgtatgcaaagtaatctttcaaagactaggttaagattttttttttaagtctgaagcaatgtaaccccaaatctcaaaaatatactcaccaaaaagta

SEQ ID NO: 736858 - DNA, 6578 bp, Homo sapiens
tactaaattcgcggccgcgtcgaccccgaaccaaccccctctaacagcaaccaagaagtctacattgaaaccacagcctgcaccccaggctggacccatccctgtggctccaatcggaacactcaaaccccagcctcagccagtcccagcctcctacaccacggcctccacttcttcaaggcctacctttaatgtgcaggtgaagtcagcccagcccagccctcattatatggctgccccttcatcaggacaaatttatggctcagggccccagggctataacactcagccagttcctgtctctgggcagtgtccacctccttcaacacggggaggcatggattatgcctacattccaccaccaggacttcagccggagcctgggtatgggtatgcccccaaccagggacgctattatgaaggctactatgcagcagggccaggctatgggggcagaaatgactctgaccctacctatggtcaacaaggtcacccaaatacctggaaacgggaaccagggtacactcctcctggagcagggaaccagaaccctcctgggatgtatccagtcactggtcccaagaagacctatatcacagatcctgtttcagccccctgtgcgccaccattgcagccaaagggtggccattcagggcaactggggccttcgtcagttgccccttcattccgcccagaggatgagcttgagcacctgaccaaaaagatgctgtatgacatggaaaatccacctgctgacgaatactttggccgctgtgctcgctgtggagaaaacgtagttggggaaggtacaggatgcactgccatggatcaggtcttccacgtggattgttttacctgcatcatctgcaacaacaagctccgagggcagccattctatgctgtggaaaagaaagcatactgcgagccctgctacattaatactctggagcagtgcaatgtgtgttccaagcccatcatggagcggattctccgagccaccgggaaggcctatcatcctcactgtttcacctgcgtgatgtgccaccgcagcctggatgggatcccattcactgtggatgctggcgggctcattcactgcattgaggacttccacaagaaatttgccccgcgatgttctgtgtgcaaggagcctattatgccagccccgggccaggaggagactgtccgtattgtggctttggatcgagatttccatgttcactgctaccgatgcgaggattgcggtggtctcctgtctgaaggagataaccaaggctgctaccccttggatgggcacatcctctgcaagacctgcaactctgcccgcatcagggtgttgaccgccaaggcgagcactgacctttagattcagtcacctgttcagccggcactgagaagaacgaacacaagaaaaagataagaaatactagagtaaaggccatcaaactacgcgatagtctctgttcttcatctgctattaaccttgccttagaaacacataaattatgagattttttttaaaagttgttaccaaatacacatttcacattgaatcatgtaggatcttgatgggcctttgttcccaaggacttccacatttttgcacagattatgctccatcccattcacttctgcattcctgtaacttttaatccctatgtttgtctcacttttcatctggttgaatggcttttcttagtgtggtatttgctgtcacatagtttttcctgggtgagtctgccaactcacaggtgcttttaggcttgaaatctccatcctatcatttccgttttgcctgtgactgtaaagagtagccattcttttcccatgtattgaagaggatattcttctcttgctttatactactcacgtccttggggagggaaatgcacaatttttttttgttaggctgtaaagaatttaagctgtaaattacataagttagaacaagcccaaatttaatttgcaaccatcagaattcagaatctatagtgaccagtgatcaaggctaattggaaaagagttatcggcccatagctaataagtagtgacagacaaccaagcttcaatatttttctaaagaaattacaggtgggatatgctagaaaaggcattttggggttatgtttaaaaaaacattattgtcccacaatattaccttaagatttttcttttccgcactacctgaacattgtaatacagacaaacttgatttcttctagaagataacattttcaatactgtcccacttctcatcttaaaaatattgtcatgtttattctaatatccaacacaactatcaaaattgcctttttctctagaggatgaaggctgtgaaaaaaccgttcaaattctcttctttttcttttttattaccaggtccattttgcctgacaattgcaaatcagagcatacaaaataaaactgtgcagttttgtttggtttactttcaaaagagtagaaagcttgaaaagattctgaaaccacagtttcattattctcataatccttctgcaactgaaattacatattgcaggagacattttcatatcatcaatgtgacatttacaccacactttcaaagacaatcactgaaacaaaaattgtctttatgagctaaaaatatgcagaatctctgcctagaatctttattcaaacttttattagccagtgaaacacttgcttgccaactgccaagccatacttattaagttcgaacatgtttcacttaaggagagacacctagcttagtcatggcaagttgccattttgtaaactaaggattttggactgagatttcttaaatctttcttcaaatctcccacaagtatatacttttaaattatggagtattttaagtctacaaaaaggtataaataataatataatgaattcctatatacctaatacccagtttaagacaccaaatataacaagtataattacatcctccaatgtaccgtttccttattccacagatatcacttcactattgtgaagtgatgttcagatttctagttttttttctagtttttaattttaacatcagaactgaaataaaaaattatggatacgtgttttgaattgcaaactattcctcaggaattccaattaaatttattttacttgaataggaatgatcataaaagtgattctttttttgtgactagaaattcttaagccgatggtcactatagctcatccttaatgtatggctcatttgcttttgtcactaaacggttttgtgttagaaccaccaaaattatagcttttaagagcttcctttgaccactgtctttttcttaccctacttctcttatctttgatcgtatatttctcataatgtgaaatatgatgagattcacttaggggcagcatgttagttttgggaggcaatgtcaactgtgtctctgaattcctgtcttccaaattgaagccagaccatgctgatgacctcaagtagcactgactatttgacaatagggctgataatgtaatcggcttgaattttgacttagtaactttttatgtaatactttcggagaaattctctttaggacaaagcagagagtccaatttattgagggatagattgtatctcttaaagtggtcatattattattaattttgccaaaagaagaagaatttattgaatatttatactataaaatgcagtaacattctacttgcttattacatttaaatccttgtgtaactgaatgtttacatgtcaagaggaaaagctgtaagaaaatgctgtcacagacccatccctgtggcatcgtcagcagaatactgcttgcttacaatctttattatgcattcttataacataacctcagagtatctttaccaaaggtttttaaagtaaatctctttttaagatagacttattcttttataataatgaatgtgcactcatacatatgtagaaacatttagatttagagtttttttttttctttcacaaggtataataaggaaaggatcctacaatattttattctagggtttcttaaatatatgatttatattactgtcttttctattaatcatttgatttaaacaatgccaagtcactcttttttagttgcatgaaattttgcctgcaacagagagaaaaagattgtattactttaatgattataatcatactgtctgctgatataatatcataattgttgtggtttaaatacataaatagtagaaaaatcagagtctataacagaaagtttgtaaaaatatactgattttgaaaagtatcaggaatataaatatttggtaattctgtgtaacaagagagacatggaaaaggaaaaaaatccactatatcatgggctctgcagaacatatcaaaataggatttcttaaatttttcaacccccagaccatactgactcaacatggagtctcactggccaagaaaattgcctttaaaactcgaaaataaggccaggtgtggtgactcacacttgtaatcccagcaatttgggaggctgagacaggaggattgcctgaggccaggagtttgacaccagcctgggcaacatagtgagaccttgtctctacaaaaaataaaataaaataaaaaccaaattagccagacatggtggcatgcgcttgtttaaaaaaacaaataaataaataatcgactcaaaaataagtcatgtgtcccagcataaggcatcaggttgttagatgctggcatctctgcagctcaaagatgtgggttctttttcttgtcattaacacattgttatttctgtaggagcaacttctctgatcaaaattacttttctgggtatgtgctgattaagggggtggacttatcaacactataattgttccctatgaaagattccacagagatgtttatggtgaggtttaaaggatatgaaactctacatttaaacaagtattttatatttgggtacagaggaagaaagagagggctttttccatggggctatagtagagagttagtggaatatagacaggactctgaaaacacaacttccagccatttttttagttagtaaaaatcctattaatgtgaaccagccaggaataacagtgttatttctattggatatggtttgggcttctcttgtcaaatctgtgtcggctgccccctgatccttccattatcaagttttgaagggtgttggggaaattatggcagctgctagggagatcagggaaacactgatgtaacctcaaagcctctcaccattcctcttggcttggaaaggctttattttttcatatacatttctagaaatattgctattctaccttagtatttcacatttgtagttcaaacaagcgattgtccatctgttgcctagagctatagtacatgtgtgttatgaatgaaatatgacagcatgttccatacccctgctttagccatctgtgggaaaccagcaaactgaaaaagacacctctgcaaaatgtgcctcaagtccatttcttgggatcgctcgtttggtgcactctcgtgggagacaatcagagaacaacatatacttgtgccttattttcaaagaatctatttacactactatgaatattccactgaagagtcaatgatgtaaatgataaccaccaaatctcaaaaatatactcaccaaaaagtaaaaagtaaaaaaaaaaaaaaaaagaaagaaagaaaagaaagagagagaagtcaacttttcatcttaatatattctagtagtatttattttttccttgtcttggaagtatctcataggtctttaaatgagtaaaacatttttatgccagaaggtgatataatggatgttagtgttttttatttgattttacagtagttttagtcagataatgaggacagagacttcaacttgattctttaccaccattcagcatattttttaattgtcttcattgtatttgcttaatagtggtccagacaagttcaaaacttgttctcagtgaggcattaatatggtgcaaccatgaatatttcaggccaagttattcacttgacagataactagaatgaaacttttctcatgaggctgttgtttggttagcatagccttatttcaaaccttaaaaagttacctgactgaagctactatgacttggtaaggattcttcctctcttgctttcttcctcccttcctttcttcctcttccttcctcctcttcttattttctttcctactttccatcctacctattagtgttgctgtacttggattttttgtaaattaaatcaatgcattatgattttagggaattatgattatattcataaggggaaggctaccagaaaatatatgtggcatccataaaatcttcttttataggggcatattttttaggttgtatttattcgtaaagtgaaatgagataatagagtctttctgtaacatgttaatgaattttcatcagggactgaggtcatagattcttggaaaattcatttgtgactgatctagttttctcagctgtatgcaaagtaatctttcaaagactaggttaagattttttttttaagtctgaagcaatgtaaccccaaatctcaaaaatatactcaccaaaaagta

SEQ ID NO: 736859 - DNA, 884 bp, Homo sapiens; identical to SEQ ID NO: 417008

SEQ ID NO: 736860 - DNA, 7362 bp, Homo sapiens
cacgaggggtatttgctttcatttctaatgaaatttcaggcctctagggtaggatatcaaaattggtagatcatttgcaatttattttatcccaaacacctcactttacagtcagagaaactgaggcccagagaagtaaaatgagttgctcaaggtctcagagagcaagaaatagagatgggacttgagcacctagatctctggtattgctgtcctgtagttcatggagctggcagatggatacatctgtgacctgggatgatggagagactgctggacccttcagaggatctcatctcaagattccaacaatgtctcacccatcttggctgccacccaaaagcactggtgagcccctcggccatgtgcctgcacggatggagaccacccattcctttgggaaccccagcatttcagtgtctacacaacagccacccaaaaagtttgccccggtagttgctccaaaacctaagtacaacccatacaaacaacctggaggtgagggtgattttcttccacccccacctccacctctagatgattccagtgcccttccatctatctctggaaactttcctcctccaccacctcttgatgaagaggctttcaaagtacaggggaatcccggaggcaagacacttgaggagaggcgctccagcctggacgctgagattgactccttgaccagcatcttggctgaccttgagtgcagctccccctataagcctcggcctccacagagctccactggttcaacagcctctcctccagtttcgaccccagtcacaggacacaagagaatggtcatcccgaaccaaccccctctaacagcaaccaagaagtctacattgaaaccacagcctgcaccccaggctggacccatccctgtggctccaatcggaacactcaaaccccagcctcagccagtcccagcctcctacaccacggcctccacttcttcaaggcctacctttaatgtgcaggtgaagtcagcccagcccagccctcattatatggctgccccttcatcaggacaaatttatggctcagggccccagggctataacactcagccagttcctgtctctgggcagtgtccacctccttcaacacggggaggcatggattatgcctacattccaccaccaggacttcagccggagcctgggtatgggtatgcccccaaccagggacgctattatgaaggctactatgcagcagggccaggctatgggggcagaaatgactctgaccctacctatggtcaacaaggtcacccaaatacctggaaacgggaaccagggtacactcctcctggagcagggaaccagaaccctcctgggatgtatccagtcactggtcccaagaagacctatatcacagatcctgtttcagccccctgtgcgccaccattgcagccaaagggtggccattcagggcaactggggccttcgtcagttgccccttcattccgcccagaggatgagcttgagcacctgaccaaaaagatgctgtatgacatggaaaatccacctgctgacgaatactttggccgctgtgctcgctgtggagaaaacgtagttggggaaggtacaggatgcactgccatggatcaggtcttccacgtggattgttttacctgcatcatctgcaacaacaagctccgagggcagccattctatgctgtggaaaagaaagcatactgcgagccctgctacattaatactctggagcagtgcaatgtgtgttccaagcccatcatggagcggattctccgagccaccgggaaggcctatcatcctcactgtttcacctgcgtgatgtgccaccgcagcctggatgggatcccattcactgtggatgctggcgggctcattcactgcattgaggacttccacaagaaatttgccccgcgatgttctgtgtgcaaggagcctattatgccagccccgggccaggaggagactgtccgtattgtggctttggatcgagatttccatgttcactgctaccgatgcgaggattgcggtggtctcctgtctgaaggagataaccaaggctgctaccccttggatgggcacatcctctgcaagacctgcaactctgcccgcatcagggtgttgaccgccaaggcgagcactgacctttagattcagtcacctgttcagccggcactgagaagaacgaacacaagaaaaagataagaaatactagagtaaaggccatcaaactacgcgatagtctctgttcttcatctgctattaaccttgccttagaaacacataaattatgagattttttttaaaagttgttaccaaatacacatttcacattgaatcatgtaggatcttgatgggcctttgttcccaaggacttccacatttttgcacagattatgctccatcccattcacttctgcattcctgtaacttttaatccctatgtttgtctcacttttcatctggttgaatggcttttcttagtgtggtatttgctgtcacatagtttttcctgggtgagtctgccaactcacaggtgcttttaggcttgaaatctccatcctatcatttccgttttgcctgtgactgtaaagagtagccattcttttcccatgtattgaagaggatattcttctcttgctttatactactcacgtccttggggagggaaatgcacaatttttttttgttaggctgtaaagaatttaagctgtaaattacataagttagaacaagcccaaatttaatttgcaaccatcagaattcagaatctatagtgaccagtgatcaaggctaattggaaaagagttatcggcccatagctaataagtagtgacagacaaccaagcttcaatatttttctaaagaaattacaggtgggatatgctagaaaaggcattttggggttatgtttaaaaaaacattattgtcccacaatattaccttaagatttttcttttccgcactacctgaacattgtaatacagacaaacttgatttcttctagaagataacattttcaatactgtcccacttctcatcttaaaaatattgtcatgtttattctaatatccaacacaactatcaaaattgcctttttctctagaggatgaaggctgtgaaaaaaccgttcaaattctcttctttttcttttttattaccaggtccattttgcctgacaattgcaaatcagagcatacaaaataaaactgtgcagttttgtttggtttactttcaaaagagtagaaagcttgaaaagattctgaaaccacagtttcattattctcataatccttctgcaactgaaattacatattgcaggagacattttcatatcatcaatgtgacatttacaccacactttcaaagacaatcactgaaacaaaaattgtctttatgagctaaaaatatgcagaatctctgcctagaatctttattcaaacttttattagccagtgaaacacttgcttgccaactgccaagccatacttattaagttcgaacatgtttcacttaaggagagacacctagcttagtcatggcaagttgccattttgtaaactaaggattttggactgagatttcttaaatctttcttcaaatctcccacaagtatatacttttaaattatggagtattttaagtctacaaaaaggtataaataataatataatgaattcctatatacctaatacccagtttaagacaccaaatataacaagtataattacatcctccaatgtaccgtttccttattccacagatatcacttcactattgtgaagtgatgttcagatttctagttttttttctagtttttaattttaacatcagaactgaaataaaaaattatggatacgtgttttgaattgcaaactattcctcaggaattccaattaaatttattttacttgaataggaatgatcataaaagtgattctttttttgtgactagaaattcttaagccgatggtcactatagctcatccttaatgtatggctcatttgcttttgtcactaaacggttttgtgttagaaccaccaaaattatagcttttaagagcttcctttgaccactgtctttttcttaccctacttctcttatctttgatcgtatatttctcataatgtgaaatatgatgagattcacttaggggcagcatgttagttttgggaggcaatgtcaactgtgtctctgaattcctgtcttccaaattgaagccagaccatgctgatgacctcaagtagcactgactatttgacaatagggctgataatgtaatcggcttgaattttgacttagtaactttttatgtaatactttcggagaaattctctttaggacaaagcagagagtccaatttattgagggatagattgtatctcttaaagtggtcatattattattaattttgccaaaagaagaagaatttattgaatatttatactataaaatgcagtaacattctacttgcttattacatttaaatccttgtgtaactgaatgtttacatgtcaagaggaaaagctgtaagaaaatgctgtcacagacccatccctgtggcatcgtcagcagaatactgcttgcttacaatctttattatgcattcttataacataacctcagagtatctttaccaaaggtttttaaagtaaatctctttttaagatagacttattcttttataataatgaatgtgcactcatacatatgtagaaacatttagatttagagtttttttttttctttcacaaggtataataaggaaaggatcctacaatattttattctagggtttcttaaatatatgatttatattactgtcttttctattaatcatttgatttaaacaatgccaagtcactcttttttagttgcatgaaattttgcctgcaacagagagaaaaagattgtattactttaatgattataatcatactgtctgctgatataatatcataattgttgtggtttaaatacataaatagtagaaaaatcagagtctataacagaaagtttgtaaaaatatactgattttgaaaagtatcaggaatataaatatttggtaattctgtgtaacaagagagacatggaaaaggaaaaaaatccactatatcatgggctctgcagaacatatcaaaataggatttcttaaatttttcaacccccagaccatactgactcaacatggagtctcactggccaagaaaattgcctttaaaactcgaaaataaggccaggtgtggtgactcacacttgtaatcccagcaatttgggaggctgagacaggaggattgcctgaggccaggagtttgacaccagcctgggcaacatagtgagaccttgtctctacaaaaaataaaataaaataaaaaccaaattagccagacatggtggcatgcgcttgtttaaaaaaacaaataaataaataatcgactcaaaaataagtcatgtgtcccagcataaggcatcaggttgttagatgctggcatctctgcagctcaaagatgtgggttctttttcttgtcattaacacattgttatttctgtaggagcaacttctctgatcaaaattacttttctgggtatgtgctgattaagggggtggacttatcaacactataattgttccctatgaaagattccacagagatgtttatggtgaggtttaaaggatatgaaactctacatttaaacaagtattttatatttgggtacagaggaagaaagagagggctttttccatggggctatagtagagagttagtggaatatagacaggactctgaaaacacaacttccagccatttttttagttagtaaaaatcctattaatgtgaaccagccaggaataacagtgttatttctattggatatggtttgggcttctcttgtcaaatctgtgtcggctgccccctgatccttccattatcaagttttgaagggtgttggggaaattatggcagctgctagggagatcagggaaacactgatgtaacctcaaagcctctcaccattcctcttggcttggaaaggctttattttttcatatacatttctagaaatattgctattctaccttagtatttcacatttgtagttcaaacaagcgattgtccatctgttgcctagagctatagtacatgtgtgttatgaatgaaatatgacagcatgttccatacccctgctttagccatctgtgggaaaccagcaaactgaaaaagacacctctgcaaaatgtgcctcaagtccatttcttgggatcgctcgtttggtgcactctcgtgggagacaatcagagaacaacatatacttgtgccttattttcaaagaatctatttacactactatgaatattccactgaagagtcaatgatgtaaatgataaccaccaaatctcaaaaatatactcaccaaaaagtaaaaagtaaaaaaaaaaaaaaaaagaaagaaagaaaagaaagagagagaagtcaacttttcatcttaatatattctagtagtatttattttttccttgtcttggaagtatctcataggtctttaaatgagtaaaacatttttatgccagaaggtgatataatggatgttagtgttttttatttgattttacagtagttttagtcagataatgaggacagagacttcaacttgattctttaccaccattcagcatattttttaattgtcttcattgtatttgcttaatagtggtccagacaagttcaaaacttgttctcagtgaggcattaatatggtgcaaccatgaatatttcaggccaagttattcacttgacagataactagaatgaaacttttctcatgaggctgttgtttggttagcatagccttatttcaaaccttaaaaagttacctgactgaagctactatgacttggtaaggattcttcctctcttgctttcttcctcccttcctttcttcctcttccttcctcctcttcttattttctttcctactttccatcctacctattagtgttgctgtacttggattttttgtaaattaaatcaatgcattatgattttagggaattatgattatattcataaggggaaggctaccagaaaatatatgtggcatccataaaatcttcttttataggggcatattttttaggttgtatttattcgtaaagtgaaatgagataatagagtctttctgtaacatgttaatgaattttcatcagggactgaggtcatagattcttggaaaattcatttgtgactgatctagttttctcagctgtatgcaaagtaatctttcaaagactaggttaagattttttttttaagtctgaagcaatgtaaccccaaatctcaaaaatatactcaccaaaaagta

SEQ ID NO: 736861 - DNA, 1117 bp, Homo sapiens
  misc_feature (871)..(871): n is a, c, g, or t
  misc_feature (1117)..(1117): n is a, c, g, or t
cacgaggggtatttgctttcatttctaatgaaatttcaggcctctagggtaggatatcaaaattggtagatcatttgcaatttattttatcccaaacacctcactttacagtcagagaaactgaggcccagagaagtaaaatgagttgctcaaggtctcagagagcaagaaatagagatgggacttgagcacctagatctctggtattgctgtcctgtagttcatggagctggcagatggatacatctgtgacctgggatgatggagagactgctggacccttcagaggatctcatctcaagattccaacaatgtctcacccatcttggctgccacccaaaagcactggtgagcccctcggccatgtgcctgcacggatggagaccacccattcctttgggaaccccagcatttcagtgtctacacaacagccacccaaaaagtttgccccggtagttgctccaaaacctaagtacaacccatacaaacaacctggaggtgagggtgattttcttccacccccacctccacctctagatgattccagtgcccttccatctatctctggaaactttcctcctccaccacctcttgatgaagaggctttcaaagtacaggggaatcccggaggcaagacacttgaggagaggcgctccagcctggacgctgagattgactccttgaccagcatcttggctgaccttgagtgcagctccccctataagcctcggcctccacagaggaaagcagctaaacaggatgttggctggtaacaccagcaaagtggaatcaacctcaaaggagatggtgtcagagtggtgttcaatgcctgagcttctaccgagtgagtcacttgtgtgaaaatgtcttnacacagatagaattgaggtgcccacactatatctgatcacagaaatgttaatgcagaatagcaaactggctttcatcttcatgggattgcaggctgggggataaaagggggtgcatttttaaaggtcatctctattgcttatgagaaaacaatgtatcacatcccatgcatctgtgggactgtgtatcaagaatcagaaataaatcatggcctcgttggcatcagcggtggagctgttcggccagn

SEQ ID NO: 736862 - DNA, 7426 bp, Homo sapiens
cacgaggggtatttgctttcatttctaatgaaatttcaggcctctagggtaggatatcaaaattggtagatcatttgcaatttattttatcccaaacacctcactttacagtcagagaaactgaggcccagagaagtaaaatgagttgctcaaggtctcagagagcaagaaatagagatgggacttgagcacctagatctctggtattgctgtcctgtagttcatggagctggcagatggatacatctgtgacctgggatgatggagagactgctggacccttcagaggatctcatctcaagacactagcattgcagttggctgaaccttgtgtcaaccatccattccaggagccagctatctgagattccaacaatgtctcacccatcttggctgccacccaaaagcactggtgagcccctcggccatgtgcctgcacggatggagaccacccattcctttgggaaccccagcatttcagtgtctacacaacagccacccaaaaagtttgccccggtagttgctccaaaacctaagtacaacccatacaaacaacctggaggtgagggtgattttcttccacccccacctccacctctagatgattccagtgcccttccatctatctctggaaactttcctcctccaccacctcttgatgaagaggctttcaaagtacaggggaatcccggaggcaagacacttgaggagaggcgctccagcctggacgctgagattgactccttgaccagcatcttggctgaccttgagtgcagctccccctataagcctcggcctccacagagctccactggttcaacagcctctcctccagtttcgaccccagtcacaggacacaagagaatggtcatcccgaaccaaccccctctaacagcaaccaagaagtctacattgaaaccacagcctgcaccccaggctggacccatccctgtggctccaatcggaacactcaaaccccagcctcagccagtcccagcctcctacaccacggcctccacttcttcaaggcctacctttaatgtgcaggtgaagtcagcccagcccagccctcattatatggctgccccttcatcaggacaaatttatggctcagggccccagggctataacactcagccagttcctgtctctgggcagtgtccacctccttcaacacggggaggcatggattatgcctacattccaccaccaggacttcagccggagcctgggtatgggtatgcccccaaccagggacgctattatgaaggctactatgcagcagggccaggctatgggggcagaaatgactctgaccctacctatggtcaacaaggtcacccaaatacctggaaacgggaaccagggtacactcctcctggagcagggaaccagaaccctcctgggatgtatccagtcactggtcccaagaagacctatatcacagatcctgtttcagccccctgtgcgccaccattgcagccaaagggtggccattcagggcaactggggccttcgtcagttgccccttcattccgcccagaggatgagcttgagcacctgaccaaaaagatgctgtatgacatggaaaatccacctgctgacgaatactttggccgctgtgctcgctgtggagaaaacgtagttggggaaggtacaggatgcactgccatggatcaggtcttccacgtggattgttttacctgcatcatctgcaacaacaagctccgagggcagccattctatgctgtggaaaagaaagcatactgcgagccctgctacattaatactctggagcagtgcaatgtgtgttccaagcccatcatggagcggattctccgagccaccgggaaggcctatcatcctcactgtttcacctgcgtgatgtgccaccgcagcctggatgggatcccattcactgtggatgctggcgggctcattcactgcattgaggacttccacaagaaatttgccccgcgatgttctgtgtgcaaggagcctattatgccagccccgggccaggaggagactgtccgtattgtggctttggatcgagatttccatgttcactgctaccgatgcgaggattgcggtggtctcctgtctgaaggagataaccaaggctgctaccccttggatgggcacatcctctgcaagacctgcaactctgcccgcatcagggtgttgaccgccaaggcgagcactgacctttagattcagtcacctgttcagccggcactgagaagaacgaacacaagaaaaagataagaaatactagagtaaaggccatcaaactacgcgatagtctctgttcttcatctgctattaaccttgccttagaaacacataaattatgagattttttttaaaagttgttaccaaatacacatttcacattgaatcatgtaggatcttgatgggcctttgttcccaaggacttccacatttttgcacagattatgctccatcccattcacttctgcattcctgtaacttttaatccctatgtttgtctcacttttcatctggttgaatggcttttcttagtgtggtatttgctgtcacatagtttttcctgggtgagtctgccaactcacaggtgcttttaggcttgaaatctccatcctatcatttccgttttgcctgtgactgtaaagagtagccattcttttcccatgtattgaagaggatattcttctcttgctttatactactcacgtccttggggagggaaatgcacaatttttttttgttaggctgtaaagaatttaagctgtaaattacataagttagaacaagcccaaatttaatttgcaaccatcagaattcagaatctatagtgaccagtgatcaaggctaattggaaaagagttatcggcccatagctaataagtagtgacagacaaccaagcttcaatatttttctaaagaaattacaggtgggatatgctagaaaaggcattttggggttatgtttaaaaaaacattattgtcccacaatattaccttaagatttttcttttccgcactacctgaacattgtaatacagacaaacttgatttcttctagaagataacattttcaatactgtcccacttctcatcttaaaaatattgtcatgtttattctaatatccaacacaactatcaaaattgcctttttctctagaggatgaaggctgtgaaaaaaccgttcaaattctcttctttttcttttttattaccaggtccattttgcctgacaattgcaaatcagagcatacaaaataaaactgtgcagttttgtttggtttactttcaaaagagtagaaagcttgaaaagattctgaaaccacagtttcattattctcataatccttctgcaactgaaattacatattgcaggagacattttcatatcatcaatgtgacatttacaccacactttcaaagacaatcactgaaacaaaaattgtctttatgagctaaaaatatgcagaatctctgcctagaatctttattcaaacttttattagccagtgaaacacttgcttgccaactgccaagccatacttattaagttcgaacatgtttcacttaaggagagacacctagcttagtcatggcaagttgccattttgtaaactaaggattttggactgagatttcttaaatctttcttcaaatctcccacaagtatatacttttaaattatggagtattttaagtctacaaaaaggtataaataataatataatgaattcctatatacctaatacccagtttaagacaccaaatataacaagtataattacatcctccaatgtaccgtttccttattccacagatatcacttcactattgtgaagtgatgttcagatttctagttttttttctagtttttaattttaacatcagaactgaaataaaaaattatggatacgtgttttgaattgcaaactattcctcaggaattccaattaaatttattttacttgaataggaatgatcataaaagtgattctttttttgtgactagaaattcttaagccgatggtcactatagctcatccttaatgtatggctcatttgcttttgtcactaaacggttttgtgttagaaccaccaaaattatagcttttaagagcttcctttgaccactgtctttttcttaccctacttctcttatctttgatcgtatatttctcataatgtgaaatatgatgagattcacttaggggcagcatgttagttttgggaggcaatgtcaactgtgtctctgaattcctgtcttccaaattgaagccagaccatgctgatgacctcaagtagcactgactatttgacaatagggctgataatgtaatcggcttgaattttgacttagtaactttttatgtaatactttcggagaaattctctttaggacaaagcagagagtccaatttattgagggatagattgtatctcttaaagtggtcatattattattaattttgccaaaagaagaagaatttattgaatatttatactataaaatgcagtaacattctacttgcttattacatttaaatccttgtgtaactgaatgtttacatgtcaagaggaaaagctgtaagaaaatgctgtcacagacccatccctgtggcatcgtcagcagaatactgcttgcttacaatctttattatgcattcttataacataacctcagagtatctttaccaaaggtttttaaagtaaatctctttttaagatagacttattcttttataataatgaatgtgcactcatacatatgtagaaacatttagatttagagtttttttttttctttcacaaggtataataaggaaaggatcctacaatattttattctagggtttcttaaatatatgatttatattactgtcttttctattaatcatttgatttaaacaatgccaagtcactcttttttagttgcatgaaattttgcctgcaacagagagaaaaagattgtattactttaatgattataatcatactgtctgctgatataatatcataattgttgtggtttaaatacataaatagtagaaaaatcagagtctataacagaaagtttgtaaaaatatactgattttgaaaagtatcaggaatataaatatttggtaattctgtgtaacaagagagacatggaaaaggaaaaaaatccactatatcatgggctctgcagaacatatcaaaataggatttcttaaatttttcaacccccagaccatactgactcaacatggagtctcactggccaagaaaattgcctttaaaactcgaaaataaggccaggtgtggtgactcacacttgtaatcccagcaatttgggaggctgagacaggaggattgcctgaggccaggagtttgacaccagcctgggcaacatagtgagaccttgtctctacaaaaaataaaataaaataaaaaccaaattagccagacatggtggcatgcgcttgtttaaaaaaacaaataaataaataatcgactcaaaaataagtcatgtgtcccagcataaggcatcaggttgttagatgctggcatctctgcagctcaaagatgtgggttctttttcttgtcattaacacattgttatttctgtaggagcaacttctctgatcaaaattacttttctgggtatgtgctgattaagggggtggacttatcaacactataattgttccctatgaaagattccacagagatgtttatggtgaggtttaaaggatatgaaactctacatttaaacaagtattttatatttgggtacagaggaagaaagagagggctttttccatggggctatagtagagagttagtggaatatagacaggactctgaaaacacaacttccagccatttttttagttagtaaaaatcctattaatgtgaaccagccaggaataacagtgttatttctattggatatggtttgggcttctcttgtcaaatctgtgtcggctgccccctgatccttccattatcaagttttgaagggtgttggggaaattatggcagctgctagggagatcagggaaacactgatgtaacctcaaagcctctcaccattcctcttggcttggaaaggctttattttttcatatacatttctagaaatattgctattctaccttagtatttcacatttgtagttcaaacaagcgattgtccatctgttgcctagagctatagtacatgtgtgttatgaatgaaatatgacagcatgttccatacccctgctttagccatctgtgggaaaccagcaaactgaaaaagacacctctgcaaaatgtgcctcaagtccatttcttgggatcgctcgtttggtgcactctcgtgggagacaatcagagaacaacatatacttgtgccttattttcaaagaatctatttacactactatgaatattccactgaagagtcaatgatgtaaatgataaccaccaaatctcaaaaatatactcaccaaaaagtaaaaagtaaaaaaaaaaaaaaaaagaaagaaagaaaagaaagagagagaagtcaacttttcatcttaatatattctagtagtatttattttttccttgtcttggaagtatctcataggtctttaaatgagtaaaacatttttatgccagaaggtgatataatggatgttagtgttttttatttgattttacagtagttttagtcagataatgaggacagagacttcaacttgattctttaccaccattcagcatattttttaattgtcttcattgtatttgcttaatagtggtccagacaagttcaaaacttgttctcagtgaggcattaatatggtgcaaccatgaatatttcaggccaagttattcacttgacagataactagaatgaaacttttctcatgaggctgttgtttggttagcatagccttatttcaaaccttaaaaagttacctgactgaagctactatgacttggtaaggattcttcctctcttgctttcttcctcccttcctttcttcctcttccttcctcctcttcttattttctttcctactttccatcctacctattagtgttgctgtacttggattttttgtaaattaaatcaatgcattatgattttagggaattatgattatattcataaggggaaggctaccagaaaatatatgtggcatccataaaatcttcttttataggggcatattttttaggttgtatttattcgtaaagtgaaatgagataatagagtctttctgtaacatgttaatgaattttcatcagggactgaggtcatagattcttggaaaattcatttgtgactgatctagttttctcagctgtatgcaaagtaatctttcaaagactaggttaagattttttttttaagtctgaagcaatgtaaccccaaatctcaaaaatatactcaccaaaaagta

SEQ ID NO: 736863 - DNA, 1652 bp, Homo sapiens
tacttttcctacttttccacagggtacttttcactttgggctatagtagagagttagtggaatatagacaggactctgaaaacacaacttccagccatttttttagttagtaaaaatcctattaatgtgaaccagccaggaataacagtgttatttctattggatatggtttgggcttctcttgtcaaatctgtgtcggctgccccctgatccttccattatcaagttttgaagggtgttggggaaattatggcagctgctagggagatcagggaaacactgatgtaacctcaaagcctctcaccattcctcttggcttggaaaggctttattttttcatatacatttctagaaatattgctattctaccttagtatttcacatttgtagttcaaacaagcgattgtccatctgttgcctagagctatagtacatgtgtgttatgaatgaaatatgacagcatgttccatacccctgctttagccatctgtgggaaaccagcaaactgaaaaagacacctctgcaaaatgtgcctcaagtccatttcttgggatcgctcgtttggtgcactctcgtgggagacaatcagagaacaacatatacttgtgccttattttcaaagaatctatttacactactatgaatattccactgaagagtcaatgatgtaaatgataaccaccaaatctcaaaaatatactcaccaaaaagtaaaaagtaaaaaaaaaaaaaaaaagaaagaaagaaaagaaagagagagaagtcaacttttcatcttaatatattctagtagtatttattttttccttgtcttggaagtatctcataggtctttaaatgagtaaaacatttttatgccagaaggtgatataatggatgttagtgttttttatttgattttacagtagttttagtcagataatgaggacagagacttcaacttgattctttaccaccattcagcatattttttaattgtcttcattgtatttgcttaatagtggtccagacaagttcaaaacttgttctcagtgaggcattaatatggtgcaaccatgaatatttcaggccaagttattcacttgacagataactagaatgaaacttttctcatgaggctgttgtttggttagcatagccttatttcaaaccttaaaaagttacctgactgaagctactatgacttggtaaggattcttcctctcttgctttcttcctcccttcctttcttcctcttccttcctcctcttcttattttctttcctactttccatcctacctattagtgttgctgtacttggattttttgtaaattaaatcaatgcattatgattttagggaattatgattatattcataaggggaaggctaccagaaaatatatgtggcatccataaaatcttcttttataggggcatattttttaggttgtatttattcgtaaagtgaaatgagataatagagtctttctgtaacatgttaatgaattttcatcagggactgaggtcatagattcttggaaaattcatttgtgactgatctagttttctcagctgtatgcaaagtaatctttcaaagactaggttaagattttttttttaagtctgaagcaatgtaaccccaaatctcaaaaatatactcaccaaaaagta

SEQ ID NO: 736864 - DNA, 6751 bp, Homo sapiens
  misc_feature (8)..(8): n is a, c, g, or t
agcgggtncaggagtttttcaaggctgaccacagtctaggcagaagaaattgcaattgtgaaaggaagatttgcgtgaaagaatggtgtttttggctgagtgaggaatttgaagtatctggaaaatggaagctccactggttcaacagcctctcctccagtttcgaccccagtcacaggacacaagagaatggtcatcccgaaccaaccccctctaacagcaaccaagaagtctacattgaaaccacagcctgcaccccaggctggacccatccctgtggctccaatcggaacactcaaaccccagcctcagccagtcccagcctcctacaccacggcctccacttcttcaaggcctacctttaatgtgcaggtgaagtcagcccagcccagccctcattatatggctgccccttcatcaggacaaatttatggctcagggccccagggctataacactcagccagttcctgtctctgggcagtgtccacctccttcaacacggggaggcatggattatgcctacattccaccaccaggacttcagccggagcctgggtatgggtatgcccccaaccagggacgctattatgaaggctactatgcagcagggccaggctatgggggcagaaatgactctgaccctacctatggtcaacaaggtcacccaaatacctggaaacgggaaccagggtacactcctcctggagcagggaaccagaaccctcctgggatgtatccagtcactggtcccaagaagacctatatcacagatcctgtttcagccccctgtgcgccaccattgcagccaaagggtggccattcagggcaactggggccttcgtcagttgccccttcattccgcccagaggatgagcttgagcacctgaccaaaaagatgctgtatgacatggaaaatccacctgctgacgaatactttggccgctgtgctcgctgtggagaaaacgtagttggggaaggtacaggatgcactgccatggatcaggtcttccacgtggattgttttacctgcatcatctgcaacaacaagctccgagggcagccattctatgctgtggaaaagaaagcatactgcgagccctgctacattaatactctggagcagtgcaatgtgtgttccaagcccatcatggagcggattctccgagccaccgggaaggcctatcatcctcactgtttcacctgcgtgatgtgccaccgcagcctggatgggatcccattcactgtggatgctggcgggctcattcactgcattgaggacttccacaagaaatttgccccgcgatgttctgtgtgcaaggagcctattatgccagccccgggccaggaggagactgtccgtattgtggctttggatcgagatttccatgttcactgctaccgatgcgaggattgcggtggtctcctgtctgaaggagataaccaaggctgctaccccttggatgggcacatcctctgcaagacctgcaactctgcccgcatcagggtgttgaccgccaaggcgagcactgacctttagattcagtcacctgttcagccggcactgagaagaacgaacacaagaaaaagataagaaatactagagtaaaggccatcaaactacgcgatagtctctgttcttcatctgctattaaccttgccttagaaacacataaattatgagattttttttaaaagttgttaccaaatacacatttcacattgaatcatgtaggatcttgatgggcctttgttcccaaggacttccacatttttgcacagattatgctccatcccattcacttctgcattcctgtaacttttaatccctatgtttgtctcacttttcatctggttgaatggcttttcttagtgtggtatttgctgtcacatagtttttcctgggtgagtctgccaactcacaggtgcttttaggcttgaaatctccatcctatcatttccgttttgcctgtgactgtaaagagtagccattcttttcccatgtattgaagaggatattcttctcttgctttatactactcacgtccttggggagggaaatgcacaatttttttttgttaggctgtaaagaatttaagctgtaaattacataagttagaacaagcccaaatttaatttgcaaccatcagaattcagaatctatagtgaccagtgatcaaggctaattggaaaagagttatcggcccatagctaataagtagtgacagacaaccaagcttcaatatttttctaaagaaattacaggtgggatatgctagaaaaggcattttggggttatgtttaaaaaaacattattgtcccacaatattaccttaagatttttcttttccgcactacctgaacattgtaatacagacaaacttgatttcttctagaagataacattttcaatactgtcccacttctcatcttaaaaatattgtcatgtttattctaatatccaacacaactatcaaaattgcctttttctctagaggatgaaggctgtgaaaaaaccgttcaaattctcttctttttcttttttattaccaggtccattttgcctgacaattgcaaatcagagcatacaaaataaaactgtgcagttttgtttggtttactttcaaaagagtagaaagcttgaaaagattctgaaaccacagtttcattattctcataatccttctgcaactgaaattacatattgcaggagacattttcatatcatcaatgtgacatttacaccacactttcaaagacaatcactgaaacaaaaattgtctttatgagctaaaaatatgcagaatctctgcctagaatctttattcaaacttttattagccagtgaaacacttgcttgccaactgccaagccatacttattaagttcgaacatgtttcacttaaggagagacacctagcttagtcatggcaagttgccattttgtaaactaaggattttggactgagatttcttaaatctttcttcaaatctcccacaagtatatacttttaaattatggagtattttaagtctacaaaaaggtataaataataatataatgaattcctatatacctaatacccagtttaagacaccaaatataacaagtataattacatcctccaatgtaccgtttccttattccacagatatcacttcactattgtgaagtgatgttcagatttctagttttttttctagtttttaattttaacatcagaactgaaataaaaaattatggatacgtgttttgaattgcaaactattcctcaggaattccaattaaatttattttacttgaataggaatgatcataaaagtgattctttttttgtgactagaaattcttaagccgatggtcactatagctcatccttaatgtatggctcatttgcttttgtcactaaacggttttgtgttagaaccaccaaaattatagcttttaagagcttcctttgaccactgtctttttcttaccctacttctcttatctttgatcgtatatttctcataatgtgaaatatgatgagattcacttaggggcagcatgttagttttgggaggcaatgtcaactgtgtctctgaattcctgtcttccaaattgaagccagaccatgctgatgacctcaagtagcactgactatttgacaatagggctgataatgtaatcggcttgaattttgacttagtaactttttatgtaatactttcggagaaattctctttaggacaaagcagagagtccaatttattgagggatagattgtatctcttaaagtggtcatattattattaattttgccaaaagaagaagaatttattgaatatttatactataaaatgcagtaacattctacttgcttattacatttaaatccttgtgtaactgaatgtttacatgtcaagaggaaaagctgtaagaaaatgctgtcacagacccatccctgtggcatcgtcagcagaatactgcttgcttacaatctttattatgcattcttataacataacctcagagtatctttaccaaaggtttttaaagtaaatctctttttaagatagacttattcttttataataatgaatgtgcactcatacatatgtagaaacatttagatttagagtttttttttttctttcacaaggtataataaggaaaggatcctacaatattttattctagggtttcttaaatatatgatttatattactgtcttttctattaatcatttgatttaaacaatgccaagtcactcttttttagttgcatgaaattttgcctgcaacagagagaaaaagattgtattactttaatgattataatcatactgtctgctgatataatatcataattgttgtggtttaaatacataaatagtagaaaaatcagagtctataacagaaagtttgtaaaaatatactgattttgaaaagtatcaggaatataaatatttggtaattctgtgtaacaagagagacatggaaaaggaaaaaaatccactatatcatgggctctgcagaacatatcaaaataggatttcttaaatttttcaacccccagaccatactgactcaacatggagtctcactggccaagaaaattgcctttaaaactcgaaaataaggccaggtgtggtgactcacacttgtaatcccagcaatttgggaggctgagacaggaggattgcctgaggccaggagtttgacaccagcctgggcaacatagtgagaccttgtctctacaaaaaataaaataaaataaaaaccaaattagccagacatggtggcatgcgcttgtttaaaaaaacaaataaataaataatcgactcaaaaataagtcatgtgtcccagcataaggcatcaggttgttagatgctggcatctctgcagctcaaagatgtgggttctttttcttgtcattaacacattgttatttctgtaggagcaacttctctgatcaaaattacttttctgggtatgtgctgattaagggggtggacttatcaacactataattgttccctatgaaagattccacagagatgtttatggtgaggtttaaaggatatgaaactctacatttaaacaagtattttatatttgggtacagaggaagaaagagagggctttttccatggggctatagtagagagttagtggaatatagacaggactctgaaaacacaacttccagccatttttttagttagtaaaaatcctattaatgtgaaccagccaggaataacagtgttatttctattggatatggtttgggcttctcttgtcaaatctgtgtcggctgccccctgatccttccattatcaagttttgaagggtgttggggaaattatggcagctgctagggagatcagggaaacactgatgtaacctcaaagcctctcaccattcctcttggcttggaaaggctttattttttcatatacatttctagaaatattgctattctaccttagtatttcacatttgtagttcaaacaagcgattgtccatctgttgcctagagctatagtacatgtgtgttatgaatgaaatatgacagcatgttccatacccctgctttagccatctgtgggaaaccagcaaactgaaaaagacacctctgcaaaatgtgcctcaagtccatttcttgggatcgctcgtttggtgcactctcgtgggagacaatcagagaacaacatatacttgtgccttattttcaaagaatctatttacactactatgaatattccactgaagagtcaatgatgtaaatgataaccaccaaatctcaaaaatatactcaccaaaaagtaaaaagtaaaaaaaaaaaaaaaaagaaagaaagaaaagaaagagagagaagtcaacttttcatcttaatatattctagtagtatttattttttccttgtcttggaagtatctcataggtctttaaatgagtaaaacatttttatgccagaaggtgatataatggatgttagtgttttttatttgattttacagtagttttagtcagataatgaggacagagacttcaacttgattctttaccaccattcagcatattttttaattgtcttcattgtatttgcttaatagtggtccagacaagttcaaaacttgttctcagtgaggcattaatatggtgcaaccatgaatatttcaggccaagttattcacttgacagataactagaatgaaacttttctcatgaggctgttgtttggttagcatagccttatttcaaaccttaaaaagttacctgactgaagctactatgacttggtaaggattcttcctctcttgctttcttcctcccttcctttcttcctcttccttcctcctcttcttattttctttcctactttccatcctacctattagtgttgctgtacttggattttttgtaaattaaatcaatgcattatgattttagggaattatgattatattcataaggggaaggctaccagaaaatatatgtggcatccataaaatcttcttttataggggcatattttttaggttgtatttattcgtaaagtgaaatgagataatagagtctttctgtaacatgttaatgaattttcatcagggactgaggtcatagattcttggaaaattcatttgtgactgatctagttttctcagctgtatgcaaagtaatctttcaaagactaggttaagattttttttttaagtctgaagcaatgtaaccccaaatctcaaaaatatactcaccaaaaagta

SEQ ID NO: 736865 - DNA, 3359 bp, Homo sapiens
  misc_feature (8)..(8): n is a, c, g, or t
agcgggtncaggagtttttcaaggctgaccacagtctaggcagaagaaattgcaattgtgaaaggaagatttgcgtgaaagaatggtgtttttggctgagtgaggaatttgaagtatctggaaaatggaagctccactggttcaacagcctctcctccagtttcgaccccagtcacaggacacaagagaatggtcatcccgaaccaaccccctctaacagcaaccaagaagtctacattgaaaccacagcctgcaccccaggctggacccatccctgtggctccaatcggaacactcaaaccccagcctcagccagtcccagcctcctacaccacggcctccacttcttcaaggcctacctttaatgtgcaggtgaagtcagcccagcccagccctcattatatggctgccccttcatcaggacaaatttatggctcagggccccagggctataacactcagccagttcctgtctctgggcagtgtccacctccttcaacacggggaggcatggattatgcctacattccaccaccaggacttcagccggagcctgggtatgggtatgcccccaaccagggacgctattatgaaggctactatgcagcagggccaggctatgggggcagaaatgactctgaccctacctatggtcaacaaggtcacccaaatacctggaaacgggaaccagggtacactcctcctggagcagggaaccagaaccctcctgggatgtatccagtcactggtcccaagaagacctatatcacagatcctgtttcagccccctgtgcgccaccattgcagccaaagggtggccattcagggcaactggggccttcgtcagttgccccttcattccgcccagaggatgagcttgagcacctgaccaaaaagatgctgtatgacatggaaaatccacctgctgacgaatactttggccgctgtgctcgctgtggagaaaacgtagttggggaaggtacaggatgcactgccatggatcaggtcttccacgtggattgttttacctgcatcatctgcaacaacaagctccgagggcagccattctatgctgtggaaaagaaagcatactgcgagccctgctacattaatactctggagcagtgcaatgtgtgttccaagcccatcatggagcggattctccgagccaccgggaaggcctatcatcctcactgtttcacctgcgtgatgtgccaccgcagcctggatgggatcccattcactgtggatgctggcgggctcattcactgcattgaggacttccacaagaaatttgccccgcgatgttctgtgtgcaaggagcctattatgccagccccgggccaggaggagactgtccgtattgtggctttggatcgagatttccatgttcactgctaccgatgcgaggattgcggtggtctcctgtctgaaggagataaccaaggctgctaccccttggatgggcacatcctctgcaagacctgcaactctgcccgcatcagggtgttgaccgccaaggcgagcactgacctttagattcagtcacctgttcagccggcactgagaagaacgaacacaagaaaaagataagaaatactagagtaaaggccatcaaactacgcgatagtctctgttcttcatctgctattaaccttgccttagaaacacataaattatgagattttttttaaaagttgttaccaaatacacatttcacattgaatcatgtaggatcttgatgggcctttgttcccaaggacttccacatttttgcacagattatgctccatcccattcacttctgcattcctgtaacttttaatccctatgtttgtctcacttttcatctggttgaatggcttttcttagtgtggtatttgctgtcacatagtttttcctgggtgagtctgccaactcacaggtgcttttaggcttgaaatctccatcctatcatttccgttttgcctgtgactgtaaagagtagccattcttttcccatgtattgaagaggatattcttctcttgctttatactactcacgtccttggggagggaaatgcacaatttttttttgttaggctgtaaagaatttaagctgtaaattacataagttagaacaagcccaaatttaatttgcaaccatcagaattcagaatctatagtgaccagtgatcaaggctaattggaaaagagttatcggcccatagctaataagtagtgacagacaaccaagcttcaatatttttctaaagaaattacaggtgggatatgctagaaaaggcattttggggttatgtttaaaaaaacattattgtcccacaatattaccttaagatttttcttttccgcactacctgaacattgtaatacagacaaacttgatttcttctagaagataacattttcaatactgtcccacttctcatcttaaaaatattgtcatgtttattctaatatccaacacaactatcaaaattgcctttttctctagaggatgaaggctgtgaaaaaaccgttcaaattctcttctttttcttttttattaccaggtccattttgcctgacaattgcaaatcagagcatacaaaataaaactgtgcagttttgtttggtttactttcaaaagagtagaaagcttgaaaagattctgaaaccacagtttcattattctcataatccttctgcaactgaaattacatattgcaggagacattttcatatcatcaatgtgacatttacaccacactttcaaagacaatcactgaaacaaaaattgtctttatgagctaaaaatatgcagaatctctgcctagaatctttattcaaacttttattagccagtgaaacacttgcttgccaactgccaagccatacttattaagttcgaacatgtttcacttaaggagagacacctagcttagtcatggcaagttgccattttgtaaactaaggattttggactgagatttcttaaatctttcttcaaatctcccacaagtatatacttttaaattatggagtattttaagtctacaaaaaggtataaataataatataatgaattcctatatacctaatacccagtttaagacaccaaatataacaagtataattacatcctccaatgtaccgtttccttattccacagatatcacttcactattgtgaagtgatgttcagatttctagttttttttctagtttttaattttaacatcagaactgaaataaaaaattatggatacgtgttttgaattgcaaactattcctcaggaattccaattaaatttattttacttgaataggaatgatcataaaagtgatgttccccgctatacatggacggcgcccagcgag

SEQ ID NO: 736866 - DNA, 1081 bp, Homo sapiens
  misc_feature (8)..(8): n is a, c, g, or t
agcgggtncaggagtttttcaaggctgaccacagtctaggcagaagaaattgcaattgtgaaaggaagatttgcgtgaaagaatggtgtttttggctgagtgaggaatttgaagtatctggaaaatggaagctccactggttcaacagcctctcctccagtttcgaccccagtcacaggacacaagagaatggtcatcccgaaccaaccccctctaacagcaaccaagaagtctacattgaaaccacagcctgcaccccaggctggacccatccctgtggctccaatcggaacactcaaaccccagcctcagccagtcccagcctcctacaccacggcctccacttcttcaaggcctacctttaatgtgcaggtgaagtcagcccagcccagccctcattatatggctgccccttcatcaggacaaatttatggctcagggccccagggctataacactcagccagttcctgtctctgggcagtgtccacctccttcaacacggggaggcatggattatgcctacattccaccaccaggacttcagccggagcctgggtatgggtatgcccccaaccagggacgctattatgaaggctactatgcagcagggccaggctatgggggcagaaatgactctgaccctacctatggtcaacaaggtcacccaaatacctggaaacgggaaccagggtacactcctcctggagcagggaaccagaaccctcctgggatgtatccagtcactggtcccaagaagacctatatcacagatcctgtttcagccccctgtgcgccaccattgcagccaaagggtggccattcagggcaactggggccttcgtcagttgccccttcattccgcccagaggatgagcttgagcacctgaccaaaaagatgctgtatgacatggaaaatccacctgctgacgaatactttgaatgctgataatgccaagctgtgtttacagtccaaatttttgctgaagaccttcaactttgcactctccctgtgtggtatctcttgcccaagacagaacttcaaataaaatcacatagctgatgcaagaaaccgttaaaaa

SEQ ID NO: 736867 - DNA, 1053 bp, Homo sapiens
  misc_feature (8)..(8): n is a, c, g, or t
agcgggtncaggagtttttcaaggctgaccacagtctaggcagaagaaattgcaattgtgaaaggaagatttgcgtgaaagaatggtgtttttggctgagtgaggaatttgaagtatctggaaaatggaagctccactggttcaacagcctctcctccagtttcgaccccagtcacaggacacaagagaatggtcatcccgaaccaaccccctctaacagcaaccaagaagtctacattgaaaccacagcctgcaccccaggctggacccatccctgtggctccaatcggaacactcaaaccccagcctcagccagtcccagcctcctacaccacggcctccacttcttcaaggcctacctttaatgtgcaggtgaagtcagcccagcccagccctcattatatggctgccccttcatcaggacaaatttatggctcagggccccagggctataacactcagccagttcctgtctctgggcagtgtccacctccttcaacacggggaggcatggattatgcctacattccaccaccaggacttcagccggagcctgggtatgggtatgcccccaaccagggacgctattatgaaggctactatgcagcagggccaggctatgggggcagaaatgactctgaccctacctatggtcaacaaggtcacccaaatacctggaaacgggaaccagggtacactcctcctggagcagggaaccagaaccctcctgggatgtatccagtcactggtcccaagaagacctatatcacagatcctgtttcagccccctgtgcgccaccattgcagccaaagcttcttctcagcctgttgataaccatgttagcccatcttccttcttgggccagacaccagcatctccagccagatactccccagtttctaaagcagtacttggagatgatgaaattacaagggaacctagaaaagttgttcttcatcgtggctcaacggaccttggtttcaacattgtaggaggagaagatggagaaggaatattatttccttatcttagcaaggagctcacagagctgg

SEQ ID NO: 736868 - DNA, 986 bp, Homo sapiens
tgcggcccctctggatactcacacgttaattctatacgaaacagccttacttacaaaatagttacccataaatacaagtaataagaggatagattacaacctaaatatttttaaatggtaacgtacaaccccattgatctagatgagaggtcaggaaactttttccatgaagagccagttcgtaaacatatcggattttgtgggttatacaatctctgttacaactattcaactctgccatcatagcatgaaagcagccatacacaatctgcaaatgagtaagagtggctgttttccagtaaaactttatttacaaaaacaggctatcagctgtagtttgctgaccactgatctaatccttagtattttgaaagaaaaaaaatacccaacatcacactgttgttttaatttaaagaccaatctctgtcattcagcatttatgaaatactagttttactaaacattatatggattttctaaactcagttctccacctaaatttttcattggaactccaagcttcagaacaatgaatgagaacatctgttgcatttaagtaataaaatcttgcagattgccaatccaaatggcaggtgcggtggctcacacttatagtcccagcactttgggaggctgaggtaggtggatcacttgaggtcaggagtttgagatcagcctggccaacatggtgaaacgccatctctactaaaaaaaaaaatacaataattagccaggcatggtggcatacacctgtagtcccagctactcaggaggctaagggaggagaatcacttgaacctaggaggcaaaggctgcagtgagctgagatcatacccctgcaactccagcctgggagacagagagagacttgtctcaaaaaacaaacaaataaataaaattttaaaatgctatgtgacaaaacatttggcatgctgggtattcaggctcacaatcattttcgaaattattttccaaattgagtttct

SEQ ID NO: 736869 - DNA, 2271 bp, Homo sapiens
tctcggttcactgcagcctctgcctcctgggttcaagcaattctcatgcctcagcctccagagtagctgggattacaggcatgcgccaccatgcccagctaatttttttatttttagcagagatggggttttaccatgctgcccacgctggtcttgaactcttgacctcaggtgagccacccatctctgtctccccaaggttagggttacaggcgtgagccaccatgcccggccaaccctttcttaaagtaacaggaatttaacagcattaacctaaacactagaatgatgtacatttaatggattttcagaacatgatgacttccactgacccccattaacactagttatgtctatgtggttcatcataagaggagcaagtttagatgttcttcttttttttttttttgagacggagtctcgctctgtcgcccaggctggagtgcagtggcgcgatattggctcactgcaagctccgcctcccgggttcacgccattctcctgcctcagcttcccaaggggctgggactacaggcgcccgctaccacgcccagctaatttttttgtattttttgtagaggcggggtttcaccgtgttagccaggatggtcttgatctcctgacctcgtgatccacccgcctcggcctcccaaagtgctgggattacaggcgtgagccgccacgcccgccctagatgttcttcttaggcaatacaatttaacactaaaattaagatgttaccactaaatacagtgtctctcatgtttaaaatcattcaagtctttcttgcaggaagatttaagcttcatcagacactcatgggatgaggactgaggtatgaaatctacatgttttctgaccagaacacatccaacatggcctaaagattatcttactcttctaaattaagatcaaatagatttagagtaacttactgtagcagggttcttagatttgtattttatacagacgaatcaagaaaccattctactaatataaaatatcagtagttatgaaaattattttcaaccaaataaaaacaaattttaaaagaaaagttcaaaggaaatgtaacaaaatcattttcctatatctgttttggttcaaattagttcccaaaaactgtctccctcctagtcaaagatgttaaaaaacagcatataatgacttacatttaaactaaaattaaggtgggaaaatataattttaaataagtttaaacgagtcaaagacaaatgttctaaatttgaaaaaagttagacaataaagctaaattaacctaacatttctgaatgcttacctaaaccacgttaattctatacgaaacagccttacttacaaaatagttacccataaatacaagtaataagaggatagattacaacctaaatatttttaaatggtaacgtacaaccccattgatctagatgagaggtcaggaaactttttccatgaagagccagttcgtaaacatatcggattttgtgggttatacaatctctgttacaactattcaactctgccatcatagcatgaaagcagccatacacaatctgcaaatgagtaagagtggctgttttccagtaaaactttatttacaaaaacaggctatcagctgtagtttgctgaccactgatctaatccttagtattttgaaagaaaaaaaatacccaacatcacactgttgttttaatttaaagaccaatctctgtcattcagcatttatgaaatactagttttactaaacattatatggattttctaaactcagttctccacctaaatttttcattggaactccaagcttcagaacaatgaatgagaacatctgttgcatttaagtaataaaatcttgcagattgccaatccaaatggcaggtgcggtggctcacacttatagtcccagcactttgggaggctgaggtaggtggatcacttgaggtcaggagtttgagatcagcctggccaacatggtgaaacgccatctctactaaaaaaaaaaatacaataattagccaggcatggtggcatacacctgtagtcccagctactcaggaggctaagggaggagaatcacttgaacctaggaggcaaaggctgcagtgagctgagatcatacccctgcaactccagcctgggagacagagagagacttgtctcaaaaaacaaacaaataaataaaattttaaaatgctatgtgacaaaacatttggcatgctgggtattcaggctcacaatcattttcgaaattattttccaaattgagtttct

SEQ ID NO: 736870 - DNA, 2217 bp, Homo sapiens
tctcggttcactgcagcctctgcctcctgggttcaagcaattctcatgcctcagcctccagagtagctgggattacaggcatgcgccaccatgcccagctaatttttttatttttagcagagatggggttttaccatgctgcccacgctggtcttgaactcttgacctcaggtgagccacccatctctgtctccccaaggttagggttacaggcgtgagccaccatgcccggccaaccctttcttaaagtaacaggaatttaacagcattaacctaaacactagaatgatgtacatttaatggattttcagaacatgatgacttccactgacccccattaacactagttatgtctatgtggttcatcataagaggagcaagtttagatgttcttcttttttttttttttgagacggagtctcgctctgtcgcccaggctggagtgcagtggcgcgatattggctcactgcaagctccgcctcccgggttcacgccattctcctgcctcagcttcccaaggggctgggactacaggcgcccgctaccacgcccagctaatttttttgtattttttgtagaggcggggtttcaccgtgttagccaggatggtcttgatctcctgacctcgtgatccacccgcctcggcctcccaaagtgctgggattacaggcgtgagccgccacgcccgccctagatgttcttcttaggcaatacaatttaacactaaaattaagatgttaccactaaatacagtgtctctcatgtttaaaatcattcaagtctttcttgcaggaagatttaagcttcatcagacactcatgggatgaggactgaggtatgaaatctacatgttttctgaccagaacacatccaacatggcctaaagattatcttactcttctaaattaagatcaaatagatttagagtaacttactgtagcagggttcttagatttgtattttatacagacgaatcaagaaaccattctactaatataaaatatcagtagttatgaaaattattttcaaccaaataaaaacaaattttaaaagaaaagttcaaaggaaatgtaacaaaatcattttcctatatctgttttggttcaaattagttcccaaaaactgtctccctcctagtcaaagatgttaaaaaacagcatataatgacttacatttaaactaaaattaaggtgggaaaatataattttaaataagtttaaacgagtcaaagacaaatgttctaaatttgaaaaaagttagacaataaagctaaattaacctaacatttctgaatgcttacctaaaccacgttaattctatacgaaacagccttacttacaaaatagttacccataaatacaagtaataagaggatagattacaacctaaatatttttaaatggtaacgtacaaccccattgatctagatgagaggtcaggaaactttttccatgaagagccagttcgtaaacatatcggattttgtgggttatacaatctctgttacaactattcaactctgccatccagtaaaactttatttacaaaaacaggctatcagctgtagtttgctgaccactgatctaatccttagtattttgaaagaaaaaaaatacccaacatcacactgttgttttaatttaaagaccaatctctgtcattcagcatttatgaaatactagttttactaaacattatatggattttctaaactcagttctccacctaaatttttcattggaactccaagcttcagaacaatgaatgagaacatctgttgcatttaagtaataaaatcttgcagattgccaatccaaatggcaggtgcggtggctcacacttatagtcccagcactttgggaggctgaggtaggtggatcacttgaggtcaggagtttgagatcagcctggccaacatggtgaaacgccatctctactaaaaaaaaaaatacaataattagccaggcatggtggcatacacctgtagtcccagctactcaggaggctaagggaggagaatcacttgaacctaggaggcaaaggctgcagtgagctgagatcatacccctgcaactccagcctgggagacagagagagacttgtctcaaaaaacaaacaaataaataaaattttaaaatgctatgtgacaaaacatttggcatgctgggtattcaggctcacaatcattttcgaaattattttccaaattgagtttct

SEQ ID NO: 736871 - DNA, 1907 bp, Homo sapiens
atttttatttttgagacagagtcttcctctgtcgcccaagctggagtgcagtggcacgaatctcggctcactgcattccagcctgggcaacagagcgagactccatctcaaaaaaaaaaaaaaaattagccaggagtactggctcacacctataatcccagctactcgggaggatagtttgagcccaggagtttgaggctgtagtgagccttgattgggccattgcactccagtctggagtaccctgtctcaaaaataaataaataaatatttaaaaattctcaggtacataggaaaagcagggccagaagcggtggctcacatctgtaatcctagcactttggcaatacaatttaacactaaaattaagatgttaccactaaatacagtgtctctcatgtttaaaatcattcaagtctttcttgcaggaagatttaagcttcatcagacactcatgggatgaggactgaggtatgaaatctacatgttttctgaccagaacacatccaacatggcctaaagattatcttactcttctaaattaagatcaaatagatttagagtaacttactgtagcagggttcttagatttgtattttatacagacgaatcaagaaaccattctactaatataaaatatcagtagttatgaaaattattttcaaccaaataaaaacaaattttaaaagaaaagttcaaaggaaatgtaacaaaatcattttcctatatctgttttggttcaaattagttcccaaaaactgtctccctcctagtcaaagatgttaaaaaacagcatataatgacttacatttaaactaaaattaaggtgggaaaatataattttaaataagtttaaacgagtcaaagacaaatgttctaaatttgaaaaaagttagacaataaagctaaattaacctaacatttctgaatgcttacctaaaccacgttaattctatacgaaacagccttacttacaaaatagttacccataaatacaagtaataagaggatagattacaacctaaatatttttaaatggtaacgtacaaccccattgatctagatgagaggtcaggaaactttttccatgaagagccagttcgtaaacatatcggattttgtgggttatacaatctctgttacaactattcaactctgccatcatagcatgaaagcagccatacacaatctgcaaatgagtaagagtggctgttttccagtaaaactttatttacaaaaacaggctatcagctgtagtttgctgaccactgatctaatccttagtattttgaaagaaaaaaaatacccaacatcacactgttgttttaatttaaagaccaatctctgtcattcagcatttatgaaatactagttttactaaacattatatggattttctaaactcagttctccacctaaatttttcattggaactccaagcttcagaacaatgaatgagaacatctgttgcatttaagtaataaaatcttgcagattgccaatccaaatggcaggtgcggtggctcacacttatagtcccagcactttgggaggctgaggtaggtggatcacttgaggtcaggagtttgagatcagcctggccaacatggtgaaacgccatctctactaaaaaaaaaaatacaataattagccaggcatggtggcatacacctgtagtcccagctactcaggaggctaagggaggagaatcacttgaacctaggaggcaaaggctgcagtgagctgagatcatacccctgcaactccagcctgggagacagagagagacttgtctcaaaaaacaaacaaataaataaaattttaaaatgctatgtgacaaaacatttggcatgctgggtattcaggctcacaatcattttcgaaattattttccaaattgagtttct

SEQ ID NO: 736872 - DNA, 3354 bp, Homo sapiens
  misc_feature (2373)..(2373): n is a, c, g, or t
  misc_feature (2375)..(2375): n is a, c, g, or t
  misc_feature (3025)..(3025): n is a, c, g, or t
ggtttttccatggtgaagtttggaaaactgagggtctgagtccctcatttggtggtattagaatttaactgagtaggaggagagaagaaaacagtaacaaatgtcaaaatttcaagcaaccatgtggtatggctgtggtagagatgtatcaggcaattgaaagttttctaggtggtgccatcttgctaaaataataaaaagtacaggtttataaatcaaaaacaagtgcaatctatgtagggaaggattgtctatggatatacaagtggccagtgcaggaagtgaagtaacatttatctttatcttaatttctatgctcatgtcccccattccccttctgaagccaggcctgggaccttagatagcagcttagagggtctggccctgatacatttactcctttaattttggaatttccttctagtctctcaagagtgtttgtggcatatatttttcattttataaatataaaattgtacaaagtaatgtacattttgttttagagaagtcttttaaatgtttgcagacagcccagatcgtccatccctatttaggcagtggtctccaaacgtttatgtttattcaccctattagtaaaactttctgagcatgcccctccatgtatttatttatgatatatatgtatatatgtatacactgctatatatgtatatactgttttactgatgtaaacattaaaaaccatagcaaacatagacattttaaaagtatattttctggtcctcaatggagtttagagaatgggacaaggagtctttaggcgtagcacccagatgcctgtaattgattagagaatgtgtatataccatttgtggcaaagcagatataaaacaggcatggacgcatgattttaggtcaaggtatttaattatttttacttaaaataggcatttttggttgggaaagagaaggatgaacaatttgatgtcacctttaagactgatgtttttaattctgcttttgggaccacttgatctagaatgccttgaaaattccagaaagatttaacaacacactgaggtaagcaaaacaagaaaagaaagtaggggtgaggtgatacccagataatgcaaatgcaggatgtattgtctgtgaatttcagcatcaatctgaaaaacatgttttgataatgcctgataattcatcatctcactgattacatgtctttttttctatttgtttataatcttgtgtcttcaaatgtgtggaagatgtgcagacttatttttaggtatctgagataggaagggccaatgttggcataatttgaacccacatttcggggctaatgggcggacaccacctggaaacacttacctgcaccctctgttttgcaatcacaatgattagcatcttgctgaatgatgaccccaatgtgaagatggcatttcagtgtttatttctggatctatgagttactttagcagagttattagtagtttataaagccatatttaaacttgtacacttgattgtaagatagatttgaattgtgcactatgttgactactgtatataaatgtggaaattctgtatatttggtcttaatgctatatgtatttgatgtgtaaatgataactaatggatatgaaatagttttctgtgaatgtctttcttccaatttacttctcttttgcaaatttgaatgtttaaacttcaggctcatggggaaaatctgaaatgtttgcatctaatatactgttaagtggtggtctcttagatgactgggagagtattttagttgtaaggctcttgtataattaaaacagaggtaatgaattttttaggcatataactttgatagaatttcaagtgagtggcttttaagaagaaaaacagatctctggaatatgctgtcccatcctctcctgcttttatttcatgcccagtgtgcctcagagtgttacgaagtgtgagaaccactggtagagagaagacaaggaggagagggagagctgggagcacatgttgagacctttactatggctaggccttataatagaccaatttccccttgtataaatattgtctcaattaggcagggtgcagtggctcatgcctgtaatcccaggactttgggaggccaaggtgggcagatcacctgaggttgggagtttgagaccagcctgaccaacatggagaaaccctgtctctactaaaaatacaaaattagccgggcatggtggtgcatgcctgtaatcccagctacttgggaggctgaggcaggagaatcgcttgaacccaggaggtggaggctgcagtgagctgactttgtgccattgactccagcctgggcaacaagagcaaaactccatctcaaaaacacacacacacacacacacacacacacananatatagtctcaattagttttcatacctcttcaataaagtaattattgttcccaaattacagatgaagaaagacgtttgggatgataaactggcatatggtaatatggccatgatatgctcaagtctttagggtcagagattcacagcaagattttggaaattcaaatcttactatgaagtgattcacacatgtgtatggtaatgaaccttaaaggatagctgggcctataggcatgtcaagatctatagagacatgcaggatgtttcaaattctatcttaaaatttgaccaaatctttggtcaaataataatactgttactcaaatattagctttttaccatttagagcaaattacaatcaggtaacattcaaaattctaaccctcccttcccaacatgggaatatctattaagtaggaaatgagagaaccccctaatttcccatttcagtgataatactgattgagtatctcttatctgaagtgcttgggaccagaagtgttttggatctgggtttttctcagattttgaaatatttgcattataccagttgagtatcccaaaatcaaaactggaaatctgaaatgatccaatgtccgtttcctttgagtgtcatgttagtgctcaaaaagttttggattttggagcgnttcagattttggatttttggatttgggatgctcgacctgtagtttggttttcatctttttagactccatttctcttgacctataaatcctatcagccctgtttattaacatagaccctagtcagaaatactttgaaatagatctacatctacttcaacgtcagttggttccacacccttctagaacttgtgtggggtcctggacttcccgtctgtcctgttagggaagctttgctgtcctagctttcaggactcatcagagggaagagggtcatttacctttccaatgtgctgtgatctcagagtcgttaaaatacatgttttgctgcc

SEQ ID NO: 736873 - DNA, 2247 bp, Homo sapiens
tgtattgaagaatcctgccctcatttactgcaaggatgcctccaagccaatacacttgcattgtaaatgtttagtaatctcatgaacaagcaaaaagtatagtacttagcagttattggaaatattttgggggatttttaaaaaaacagataaatggtaaatatgtgcaatgaattttttggttaagaaagtaaaattttatctaatactaggtttttacttttttcactgtggtttgatatatatttttggttagaatgtactgattgtttttatgataagatgtatattttacttgcattcattcttaagaggtttctgtttttctattgagaatatctgttgaattaagtaggatttcagttagaaaaaggaattccgaaattaactggtctcaatctgattatatgtgctacatggccaaatcctattacagtgaattctaaggtgattcaaattgttttattgttatagaaatatgcagaaatcagatggcttcagagtcataaaatatttttcttgtaatagtatttaagcaatttgaccttatatgcaaacgttaagtgaatataaataagttctgtttcaattcatgtccatttaacaacattaaaataattattaggaacaccacatgaattttctttacatttgctgtggtataaattctgcttttaatgaatgtttatttatttattagccaaaattcagtttctctttgaacccagaattttgcaaagctgggggttggggagggggattattagctacttgttaactttttcagcatattatcattcctcttttaagactcaagtattattcactttgcttcttacaacccagagaatgtgaaaattctcctctattttatgtagcactattcacttaacattttttcaaagcactttataggatataaaaatagtacccggtaacatttaagtaaaggtagcagaaaacaaaagaactttcaaacagaaattatgttccctgccacctcctccacctcaaagaataataagcatgtggcataaatggagttgttcagaaaagctgtctgcataattttccttcaaggtaatgtatttgacagcatgaagtttgtgatgatcttacttggtctactactcagcggagtcttagaatctcttttatttacttctgagagattgttatttcaccagtatatgtgaacaggcttgctaaaggcattaaagatatggatcatggaggcaccaaatttggcttctgtatgcaatccagcattaacttcatccatacatttctaacttcatccataaatttctaacttcaagttaccttattttttatagttaagaatgtttttcgaggtttacaacagaatttaaaaaataattgttaggctttagaatcccactgtttgaaaagatccttttaatgtcaactttattgaaatatgtagtctactttctaatttcatctgataatatagcaggatttgatttttctgcctgccatttgtgcatttaaaaaaaaatcctcatttaagatttagagttctttaggttcaaattcctatgatgttttattgggtaacatgaactctcttatacataattcaaaatttcaatccatggtatattttatggtacattttgaaaagaaaatttgtaatgctccttagttacaaaaattagaaggaagctacataaaattcaggtgtcctaattaaattcaatttgattcaacacacgtattaggcataactcatacctaacactatttgataagggagacaggctccctgccatccaagaactcaacctagggagcagtgacaacagaaaccgggttgggttaaggcaaagagccatggataatgctgcaacatgagtggcacagaggggagtacacagagagagcaattaatttggtgtggggaaggtggtgatctgaatacagcagcagtttgaaagtgttccgtttttaaataaacagtatgcttattttgatttgtgactaggtgtagaaaaaagcctgcatagtgttacatatttatagtagttctttgtaaaaatgttaagtggatgagctattatgaaagtaaaagtttcattttttctcattaaaattagtactaaattactatggatcagatgataatattaaatagtactctgtagaaaaaaggtttcaagttgaattaatttatgtactgattattaatacagaataaatgttatattgactcaaaaaaaaaaa

SEQ ID NO: 736874 - DNA, 1515 bp, Homo sapiens
gtgtgttccaataagaaaaaaacatggctgtttgcttcggccccagggttgtagcttaccagtcctgtaacagatcacagtttgctcttttggtcacaaatacttgaacccctccctagttcagagcatttgataccgtaatatttaaagctcacttgtaaaacatcgtttgttgcctccatccatagtatctcaaacagaatgtctctcccaaatatacctaaattccatattctctgaagcacaaccagctattttcttgacatacttcctaacacaccccacagttcacaatttgatctgaaaacttgttaagggaggttctttggcatgtgatgccataaaaagagaggtatgggctctcctttaaaaaagagaccctttttatgagactcacaataggataaagagcccatgcctatttttaatcattttttcactatatagacatgcatgctgaaaaatgtttttattagtataatgctaattatactgacttcctatatattttagcatatagattcaaagattattagcacaataaggtagataacttcatagaccatttcttcatcttgttttcatttagtatgtaaaatttatctaaaatttacatgaaagatcagaatagctatgtaatgctactttgtaactcttatattttccaccagatgtcactaatgctgtaatattcaaattaagatgactttcttttggttctaaaggctgtaagcttattggaaaagcaaggttactcagcattggaattcctggcaacaaatatataaatacattaggggaataaacacttagcatttattatttactagtcacttcacatgaatttttatttaattctcatgcttttgtgcacaagtaaaactgggggtcaatgggcatgcaaattgtgtcgtggtttttgaagtttagtggtctctcctatccctggccaaggaagtatgcaaattgtattgtggtttttgaagtttaggtgatctcttccttctatccctagccaaggaagttcatcctgactccccaacaagcatatcaaaaggagtgtttcgtcacctttttcctcttaccctttacatccttttagcaataaagtgttcagaacaaactggttttcctttactgtgctttgcaaaacttattcatgttttattgggtgactttgtatttacactttcctcagatagtctgttgtcagatgactttgaccaatgattgggaggaaccaaatacagaggattttatcctatgcctaatctatattgtctacagagtaaatcaggtatgaatttgtgaacagtaatgaaacaattttccaactaatcagaagaattgtttgttaagtaaccttaattactcagtttttggtgaattgtttgcggcttaacttgtaaataatttcttattctttttttaaatgtatgaaatatttctagttattttgttcaatgtgactgataaaagtttatattggaatagctgtgaaatggaaaaagtcta

SEQ ID NO: 736875 - DNA, 658 bp, Homo sapiens
gtgggagccaaactatgagttttattgaggtgaagctatactggaaaagctttgccctgtagctccaagtggactgtcccatcctctttctagaccttgaggcttacctcaggaggatgatgtttaaatcaacagctgaaagacttgtgagtggtttctacaccatgttaaagagaaggttctaagacagcatgataggcctctaggcctggcctggactctggctcagtgttgcttaccatatgtagaggatgaacagaggttaagcccatcaaggtctgaagtagagcccaggaggaactgaactgtatctggctttcaggatccttttcccagtgtcatcaatcagagaagtcaaacctctgtgagaatgcttgtgcagaggtataacagtctcatgtattggttggcttttgctgcacctttctcattctgttggagggacattggttagtcaggactctgaaggccagctttttcacactgaccaaagcaagtgaaggtcaagcctaactttaatgggaccaggaagtatactcctcccatggaggtggtgggaatggcaccgagaagtttgatgacagttatctaattggactagaggttggcaaactttctgtaaatggccaggttagtaaaatagttctgcttttgaagg

SEQ ID NO: 736876 - DNA, 922 bp, Homo sapiens; identical to SEQ ID NO: 251670

SEQ ID NO: 736877 - DNA, 673 bp, Homo sapiens; identical to SEQ ID NO: 382542

SEQ ID NO: 736878 - DNA, 891 bp, Homo sapiens
  misc_feature (586)..(586): n is a, c, g, or t
aagcttggcacgaggtggcacgagggaaacactctgggtctctgcttgatcagtgtcccctctaaactgcacctcactacagtagggatggcataagatacttctttacacagcatctttttgttcccacctcacccccagagctgtaataggtagagccagccaaatgtcaaagggatgatttgtcttgtcaccactagtttcccttttctctgccttgtatgtaacaggaatattctttagttcctccttatgttctaaagcacctccccaacctaaaaatagaagaggagttgtgggtcatttacactttagtgtgaatttgcccttgtgactttgccaaggctgttgtgcctaaccctttcaatctaacagcagaatgagagtctctggactatcctggctccttccctgagaagaatgaactgggaattgttggtctagacatcaagactaccagagacctattgctcagagatgtttgggctgtacaatttctgtagatatggcatctggagcagccttttctaagcaatggcattatcattccaggctctctcgctctttccatctctccaccaggtgnactcttgccctccaccccttccaatttgtcagtgattcagagaacattctccatccttccaatgattacattccttcatcttgctggggcgccaattcagtgatggagcggctcttgggagcagccttggcttatagtgcagctctctgctaccttcaacaggctggtattcggggtgcttagatgtgactggttgtacgcacgtgtgtgtatgtgcatgtgtgtacagcagtaagagctttcgaggtagatacttgaggaagcctcagacatctagccccattactggggcaatgtcttacttg

SEQ ID NO: 736879 - DNA, 1157 bp, Homo sapiens
  misc_feature (981)..(981): n is a, c, g, or t
aatttcgggaatcgtcgaccacgcgtctactgtagcgggacttcttttggttttctttctctttggggcacctctggactcactccccagcatgaaggcgctgagcccggtgcgcggctgctacgaggcggtgtgctgcctgtcggaacgcagtctggccatcgcccggggccgagggaagggcccggcagctgaggagccgctgagcttgctggacgacatgaaccactgctactcccgcctgcgggaactggtacccggagtcccgagaggcactcagcttagccaggtggaaatcctacagcgcgtcatcgactacattctcgacctgcaggtagtcctggccgagccagcccctggaccccctgatggcccccaccttcccatccagacagccgagctcgctccggaacttgtcatctccaacgacaaaaggagcttttgccactgactcggccgtgtcctgacacctccagaacgcaggtgctggcgcccgttctgcctgggaccccgggaacctctcctgccggaagccggacggcagggatgggccccaacttcgccctgcccacttgacttcaccaaatcccttcctggagactaaacctggtgctcaggagcgaaggactgtgaacttgtggcctgaagagccagagctagctctggccaccagctgggcgacgtcaccctgctcccaccccacccccaagttctaaggtcttttcagagcgtggaggtgtggaaggagtggctgctctccaaactatgccaaggcggcggcagagctggtcttctggtctccttggagaaaggttctgttgccctgatttatgaactctataatagagtatataggttttgtaccttttttacaggaaggtgactttctgtaacaatgcgatgtatattaaactttttataaaagttaacattttgcataataaacgatttttaaacacttgtgtattttaaaacctttgnggaaaaaaaaaaaaaaaggcgggcccgttccagaaaaatccccctccagggggccccaggcttaaccggaacccccgtttttttttggaacaagggggcccccttataggggaccccatattaaagcttaggccccgggcccgccctttttacaacacccggggactgggaaacct

SEQ ID NO: 736880 - DNA, 1938 bp, Homo sapiens
ggcggactggcagggggcagggaagctcaaagatctggggtgctgccaggaaaaagcaaattctggaagttaatggttttgagtgatttttaaatccttgctggcggagaggcccgcctctccccggtatcagcgcttcctcattctttgaatccgcggctccgcggtcttcggcgtcagaccagccggaggaagcctgtttgcaatttaagcgggctgtgaacgcccagggccggcgggggcagggccgaggcgggccattttgaataaagaggcgtgccttccaggcaggctctataagtgaccgccgcggcgagcgtgcgcgcgttgcaggtcactgttactgtagcgggacttcttttggttttctttctctttggggcacctctggactcactccccagcatgaaggcgctgagcccggtgcgcggctgctacgaggcggtgtgctgcctgtcggaacgcagtctggccatcgcccggggccgagggaagggcccggcagctgaggagccgctgagcttgctggacgacatgaaccactgctactcccgcctgcgggaactggtacccggagtcccgagaggcactcagcttagccaggtggaaatcctacagcgcgtcatcgactacattctcgacctgcaggtagtcctggccgagccagcccctggaccccctgatggcccccaccttcccatccaggtaagcctcgaagtcgggacagggctgaacacccaggcaaggatgctgcgggaccctcggagctcccgattgcctcgcgtaactcttccctcttttcctctaatcagacagccgagctcgctccggaacttgtcatctccaacgacaaaaggagcttttgccactgactcggccgtgtcctgacacctccaggtgagtatctcctctcttggagagggaggtttaaacggcaagtcctggagttggcagacgttttgaaaaattgccactcactcggtttagggaaactgaggccagagagggacaagtgacttgcccatggttgcatcaaatgaatggcagagtcagtttccatgtgatgtgcatttaagccttaaatgcgcctgggccctgccctcccgcagtggccgagggtctggcaaagtagacatgggtccgactaaatacaagtctttctgttccatgttgtatagggagctgtcttcggcagccccctcccagctagtgtcaattccaagtaggaggggtagcgcaagctccgcctgtggtctttggcgccaactgggtgggggcagcgtggggcgcggagttatcagctggaggtacagaccaagtttcctccctggcgccggccagtctgcggacggcccccgcctcggcacgctcggcggaaactgactgctccttggtcttctttcctcccccgcccagaacgcaggtgctggcgcccgttctgcctgggaccccgggaacctctcctgccggaagccggacggcagggatgggccccaacttcgccctgcccacttgacttcaccaaatcccttcctggagactaaacctggtgctcaggagcgaaggactgtgaacttgtggcctgaagagccagagctagctctggccaccagctgggcgacgtcaccctgctcccaccccacccccaagttctaaggtcttttcagagcgtggaggtgtggaaggagtggctgctctccaaactatgccaaggcggcggcagagctggtcttctggtctccttggagaaaggttctgttgccctgatttatgaactctataatagagtatataggttttgtaccttttttacaggaaggtgactttctgtaacaatgcgatgtatattaaactttttataaaagttaacattttgcataataaacgatttttaaacacttgtgtatttaacacttgtgtatatgatgacacccgtct

SEQ ID NO: 736881 - DNA, 1424 bp, Homo sapiens
ggcggactggcagggggcagggaagctcaaagatctggggtgctgccaggaaaaagcaaattctggaagttaatggttttgagtgatttttaaatccttgctggcggagaggcccgcctctccccggtatcagcgcttcctcattctttgaatccgcggctccgcggtcttcggcgtcagaccagccggaggaagcctgtttgcaatttaagcgggctgtgaacgcccagggccggcgggggcagggccgaggcgggccattttgaataaagaggcgtgccttccaggcaggctctataagtgaccgccgcggcgagcgtgcgcgcgttgcaggtcactgttactgtagcgggacttcttttggttttctttctctttggggcacctctggactcactccccagcatgaaggcgctgagcccggtgcgcggctgctacgaggcggtgtgctgcctgtcggaacgcagtctggccatcgcccggggccgagggaagggcccggcagctgaggagccgctgagcttgctggacgacatgaaccactgctactcccgcctgcgggaactggtacccggagtcccgagaggcactcagcttagccaggtggaaatcctacagcgcgtcatcgactacattctcgacctgcaggtagtcctggccgagccagcccctggaccccctgatggcccccaccttcccatccaggtaagcctcgaagtcgggacagggctgaacacccaggcaaggatgctgcgggaccctcggagctcccgattgcctcgcgtaactcttccctcttttcctctaatcagacagccgagctcgctccggaacttgtcatctccaacgacaaaaggagcttttgccactgactcggccgtgtcctgacacctccaggtgagtatctcctctcttggagagggaggtttaaacggcaagtcctggagttggcagacgttttgaaaaattgccactcactcggtttagggaaactgaggccagagagggacaagtgacttgcccatggttgcatcaaatgaatggcagagtcagtttccatgtgatgtgcatttaagccttaaatgcgcctgggccctgccctcccgcagtggccgagggtctggcaaagtagacatgggtccgactaaatacaagtctttctgttccatgttgtatagggagctgtcttcggcagccccctcccagctagtgtcaattccaagtaggaggggtagcgcaagctccgcctgtggtctttggcgccaactgggtgggggcagcgtggggcgcggagttatcagctggaggtacagaccaagtttcctccctggcgccggccagtctgcggacggcccccgcctcggcacgctcggcggaaactgactgctccttgtcgtggcgattgggatcctaagagtcgccta

SEQ ID NO: 736882 - DNA, 1419 bp, Homo sapiens
ggcggactggcagggggcagggaagctcaaagatctggggtgctgccaggaaaaagcaaattctggaagttaatggttttgagtgatttttaaatccttgctggcggagaggcccgcctctccccggtatcagcgcttcctcattctttgaatccgcggctccgcggtcttcggcgtcagaccagccggaggaagcctgtttgcaatttaagcgggctgtgaacgcccagggccggcgggggcagggccgaggcgggccattttgaataaagaggcgtgccttccaggcaggctctataagtgaccgccgcggcgagcgtgcgcgcgttgcaggtcactgttactgtagcgggacttcttttggttttctttctctttggggcacctctggactcactccccagcatgaaggcgctgagcccggtgcgcggctgctacgaggcggtgtgctgcctgtcggaacgcagtctggccatcgcccggggccgagggaagggcccggcagctgaggagccgctgagcttgctggacgacatgaaccactgctactcccgcctgcgggaactggtacccggagtcccgagaggcactcagcttagccaggtggaaatcctacagcgcgtcatcgactacattctcgacctgcaggtagtcctggccgagccagcccctggaccccctgatggcccccaccttcccatccaggtaagcctcgaagtcgggacagggctgaacacccaggcaaggatgctgcgggaccctcggagctcccgattgcctcgcgtaactcttccctcttttcctctaatcagacagccgagctcgctccggaacttgtcatctccaacgacaaaaggagcttttgccactgactcggccgtgtcctgacacctccagaacgcaggtgctggcgcccgttctgcctgggaccccgggaacctctcctgccggaagccggacggcagggatgggccccaacttcgccctgcccacttgacttcaccaaatcccttcctggagactaaacctggtgctcaggagcgaaggactgtgaacttgtggcctgaagagccagagctagctctggccaccagctgggcgacgtcaccctgctcccaccccacccccaagttctaaggtcttttcagagcgtggaggtgtggaaggagtggctgctctccaaactatgccaaggcggcggcagagctggtcttctggtctccttggagaaaggttctgttgccctgatttatgaactctataatagagtatataggttttgtaccttttttacaggaaggtgactttctgtaacaatgcgatgtatattaaactttttataaaagttaacattttgcataataaacgatttttaaacacttgtgtatttaacacttgtgtatatgatgacacccgtct

SEQ ID NO: 736883 - DNA, 2585 bp, Homo sapiens
ggcggactggcagggggcagggaagctcaaagatctggggtgctgccaggaaaaagcaaattctggaagttaatggttttgagtgatttttaaatccttgctggcggagaggcccgcctctccccggtatcagcgcttcctcattctttgaatccgcggctccgcggtcttcggcgtcagaccagccggaggaagcctgtttgcaatttaagcgggctgtgaacgcccagggccggcgggggcagggccgaggcgggccattttgaataaagaggcgtgccttccaggcaggctctataagtgaccgccgcggcgagcgtgcgcgcgttgcaggtcactgttactgtagcgggacttcttttggttttctttctctttggggcacctctggactcactccccagcatgaaggcgctgagcccggtgcgcggctgctacgaggcggtgtgctgcctgtcggaacgcagtctggccatcgcccggggccgagggaagggcccggcagctgaggagccgctgagcttgctggacgacatgaaccactgctactcccgcctgcgggaactggtacccggagtcccgagaggcactcagcttagccaggtggaaatcctacagcgcgtcatcgactacattctcgacctgcaggtagtcctggccgagccagcccctggaccccctgatggcccccaccttcccatccagacagccgagctcgctccggaacttgtcatctccaacgacaaaaggagcttttgccactgactcggccgtgtcctgacacctccaggtgagtatctcctctcttggagagggaggtttaaacggcaagtcctggagttggcagacgttttgaaaaattgccactcactcggtttagggaaactgaggccagagagggacaagtgacttgcccatggttgcatcaaatgaatggcagagtcagtttccatgtgatgtgcatttaagccttaaatgcgcctgggccctgccctcccgcagtggccgagggtctggcaaagtagacatgggtccgactaaatacaagtctttctgttccatgttgtatagggagctgtcttcggcagccccctcccagctagtgtcaattccaagtaggaggggtagcgcaagctccgcctgtggtctttggcgccaactgggtgggggcagcgtggggcgcggagttatcagctggaggtacagaccaagtttcctccctggcgccggccagtctgcggacggcccccgcctcggcacgctcggcggaaactgactgctccttggtcttctttcctcccccgcccagaacgcaggtgctggcgcccgttctgcctgggaccccgggaacctctcctgccggaagccggacggcagggatgggccccaacttcgccctgcccacttgacttcaccaaatcccttcctggagactaaacctggtgctcaggagcgaaggactgtgaacttgtggcctgaagagccagagctagctctggccaccagctgggcgacgtcaccctgctcccaccccacccccaagttctaaggtcttttcagagcgtggaggtgtggaaggagtggctgctctccaaactatgccaaggcggcggcagagctggtcttctggtctccttggagaaaggttctgttgccctgatttatgaactctataatagagtatataggttttgtaccttttttacaggaaggtgactttctgtaacaatgcgatgtatattaaactttttataaaagttaacattttgcataataaacgatttttaaacacttgtgtatttaaaaaaaaaaacacagaaaaaaacacgaaagaaagaaacagagaaacaaaaacacacgagcagagacgaagacagccagaacacacacgcgagtagaccacaagaccaaaaaagaaaagcaaacggatcaggagcggtaaaaacagaaagacaagcagcagcggagggatacagaagcgagcggggatcgcggaagcgaccagcagaagaccaggccgacggagtcgagacacaaggggcgcagtgagacgggagcgagggcagaaggcacgcggcacgtcgacagcactgcgtaggcgtaggagaaggtcaaactgaaagaaaacagtacgagcagcacggggcgacaaggaaagaaccgagaagagaagcgtagacaagcagggaaggccaaagcagacgagcaggagagggcacgatagactcggaagcgggacaaaaaacagagtaacacgagagcactacagagagagctactgcagaggtcgagctcgaacaaactgagagagacaggaaaacagcaaggaaaaagaaaggagacgaggaggagaggtaaggtaaggaaggagaggaaagaacaggaggagagaaagcggaaatgcaaaggagaggcgaaaagaggagagcggtaaaaaaagggagaaagaaaagaaacgaaaaaggaggaagcgcagacaagagaaaaagaggagaaagagaaaaaagaagcagaaggaacgaaaggaagagagcgcacagaagggagagccgcaaaagactcaggagacagaaaacagcagagac

SEQ ID NO: 736884 - DNA, 1312 bp, Homo sapiens
ggcggactggcagggggcagggaagctcaaagatctggggtgctgccaggaaaaagcaaattctggaagttaatggttttgagtgatttttaaatccttgctggcggagaggcccgcctctccccggtatcagcgcttcctcattctttgaatccgcggctccgcggtcttcggcgtcagaccagccggaggaagcctgtttgcaatttaagcgggctgtgaacgcccagggccggcgggggcagggccgaggcgggccattttgaataaagaggcgtgccttccaggcaggctctataagtgaccgccgcggcgagcgtgcgcgcgttgcaggtcactgttactgtagcgggacttcttttggttttctttctctttggggcacctctggactcactccccagcatgaaggcgctgagcccggtgcgcggctgctacgaggcggtgtgctgcctgtcggaacgcagtctggccatcgcccggggccgagggaagggcccggcagctgaggagccgctgagcttgctggacgacatgaaccactgctactcccgcctgcgggaactggtacccggagtcccgagaggcactcagcttagccaggtggaaatcctacagcgcgtcatcgactacattctcgacctgcaggtagtcctggccgagccagcccctggaccccctgatggcccccaccttcccatccagacagccgagctcgctccggaacttgtcatctccaacgacaaaaggagcttttgccactgactcggccgtgtcctgacacctccagaacgcaggtgctggcgcccgttctgcctgggaccccgggaacctctcctgccggaagccggacggcagggatgggccccaacttcgccctgcccacttgacttcaccaaatcccttcctggagactaaacctggtgctcaggagcgaaggactgtgaacttgtggcctgaagagccagagctagctctggccaccagctgggcgacgtcaccctgctcccaccccacccccaagttctaaggtcttttcagagcgtggaggtgtggaaggagtggctgctctccaaactatgccaaggcggcggcagagctggtcttctggtctccttggagaaaggttctgttgccctgatttatgaactctataatagagtatataggttttgtaccttttttacaggaaggtgactttctgtaacaatgcgatgtatattaaactttttataaaagttaacattttgcataataaacgatttttaaacacttgtgtatttaacacttgtgtatatgatgacacccgtct

SEQ ID NO: 736885 - DNA, 2066 bp, Homo sapiens
ggcggactggcagggggcagggaagctcaaagatctggggtgctgccaggaaaaagcaaattctggaagttaatggttttgagtgatttttaaatccttgctggcggagaggcccgcctctccccggtatcagcgcttcctcattctttgaatccgcggctccgcggtcttcggcgtcagaccagccggaggaagcctgtttgcaatttaagcgggctgtgaacgcccagggccggcgggggcagggccgaggcgggccattttgaataaagaggcgtgccttccaggcaggctctataagtgaccgccgcggcgagcgtgcgcgcgttgcaggtcactgttactgtagcgggacttcttttggttttctttctctttggggcacctctggactcactccccagcatgaaggcgctgagcccggtgcgcggctgctacgaggcggtgtgctgcctgtcggaacgcagtctggccatcgcccggggccgagggaagggcccggcagctgaggagccgctgagcttgctggacgacatgaaccactgctactcccgcctgcgggaactggtacccggagtcccgagaggcactcagcttagccaggtggaaatcctacagcgcgtcatcgactacattctcgacctgcaggtagtcctggccgagccagcccctggaccccctgatggcccccaccttcccatccagacagccgagctcgctccggaacttgtcatctccaacgacaaaaggagcttttgccactgactcggccgtgtcctgacacctccagaacgcaggtgctggcgcccgttctgcctgggaccccgggaacctctcctgccggaagccggacggcagggatgggccccaacttcgccctgcccacttgacttcaccaaatcccttcctggagactaaacctggtgctcaggagcgaaggactgtgaacttgtggcctgaagagccagagctagctctggccaccagctgggcgacgtcaccctgctcccaccccacccccaagttctaaggtcttttcagagcgtggaggtgtggaaggagtggctgctctccaaactatgccaaggcggcggcagagctggtcttctggtctccttggagaaaggttctgttgccctgatttatgaactctataatagagtatataggttttgtaccttttttacaggaaggtgactttctgtaacaatgcgatgtatattaaactttttataaaagttaacattttgcataataaacgatttttaaacacttgtgtatttaaaaaaaaaaacacagaaaaaaacacgaaagaaagaaacagagaaacaaaaacacacgagcagagacgaagacagccagaacacacacgcgagtagaccacaagaccaaaaaagaaaagcaaacggatcaggagcggtaaaaacagaaagacaagcagcagcggagggatacagaagcgagcggggatcgcggaagcgaccagcagaagaccaggccgacggagtcgagacacaaggggcgcagtgagacgggagcgagggcagaaggcacgcggcacgtcgacagcactgcgtaggcgtaggagaaggtcaaactgaaagaaaacagtacgagcagcacggggcgacaaggaaagaaccgagaagagaagcgtagacaagcagggaaggccaaagcagacgagcaggagagggcacgatagactcggaagcgggacaaaaaacagagtaacacgagagcactacagagagagctactgcagaggtcgagctcgaacaaactgagagagacaggaaaacagcaaggaaaaagaaaggagacgaggaggagaggtaaggtaaggaaggagaggaaagaacaggaggagagaaagcggaaatgcaaaggagaggcgaaaagaggagagcggtaaaaaaagggagaaagaaaagaaacgaaaaaggaggaagcgcagacaagagaaaaagaggagaaagagaaaaaagaagcagaaggaacgaaaggaagagagcgcacagaagggagagccgcaaaagactcaggagacagaaaacagcagagac

SEQ ID NO: 736886 - DNA, 1471 bp, Homo sapiens
  misc_feature (1295)..(1295): n is a, c, g, or t
ggcggactggcagggggcagggaagctcaaagatctggggtgctgccaggaaaaagcaaattctggaagttaatggttttgagtgatttttaaatccttgctggcggagaggcccgcctctccccggtatcagcgcttcctcattctttgaatccgcggctccgcggtcttcggcgtcagaccagccggaggaagcctgtttgcaatttaagcgggctgtgaacgcccagggccggcgggggcagggccgaggcgggccattttgaataaagaggcgtgccttccaggcaggctctataagtgaccgccgcggcgagcgtgcgcgcgttgcaggtcactgttactgtagcgggacttcttttggttttctttctctttggggcacctctggactcactccccagcatgaaggcgctgagcccggtgcgcggctgctacgaggcggtgtgctgcctgtcggaacgcagtctggccatcgcccggggccgagggaagggcccggcagctgaggagccgctgagcttgctggacgacatgaaccactgctactcccgcctgcgggaactggtacccggagtcccgagaggcactcagcttagccaggtggaaatcctacagcgcgtcatcgactacattctcgacctgcaggtagtcctggccgagccagcccctggaccccctgatggcccccaccttcccatccagacagccgagctcgctccggaacttgtcatctccaacgacaaaaggagcttttgccactgactcggccgtgtcctgacacctccagaacgcaggtgctggcgcccgttctgcctgggaccccgggaacctctcctgccggaagccggacggcagggatgggccccaacttcgccctgcccacttgacttcaccaaatcccttcctggagactaaacctggtgctcaggagcgaaggactgtgaacttgtggcctgaagagccagagctagctctggccaccagctgggcgacgtcaccctgctcccaccccacccccaagttctaaggtcttttcagagcgtggaggtgtggaaggagtggctgctctccaaactatgccaaggcggcggcagagctggtcttctggtctccttggagaaaggttctgttgccctgatttatgaactctataatagagtatataggttttgtaccttttttacaggaaggtgactttctgtaacaatgcgatgtatattaaactttttataaaagttaacattttgcataataaacgatttttaaacacttgtgtattttaaaacctttgnggaaaaaaaaaaaaaaaggcgggcccgttccagaaaaatccccctccagggggccccaggcttaaccggaacccccgtttttttttggaacaagggggcccccttataggggaccccatattaaagcttaggccccgggcccgccctttttacaacacccggggactgggaaacct

SEQ ID NO: 736887 - DNA, 1361 bp, Homo sapiens
ggcggactggcagggggcagggaagctcaaagatctggggtgctgccaggaaaaagcaaattctggaagttaatggttttgagtgatttttaaatccttgctggcggagaggcccgcctctccccggtatcagcgcttcctcattctttgaatccgcggctccgcggtcttcggcgtcagaccagccggaggaagcctgtttgcaatttaagcgggctgtgaacgcccagggccggcgggggcagggccgaggcgggccattttgaataaagaggcgtgccttccaggcaggctctataagtgaccgccgcggcgagcgtgcgcgcgttgcaggtcactgttactgtagcgggacttcttttggttttctttctctttggggcacctctggactcactccccagcatgaaggcgctgagcccggtgcgcggctgctacgaggcggtgtgctgcctgtcggaacgcagtctggccatcgcccggggccgagggaagggcccggcagctgaggagccgctgagcttgctggacgacatgaaccactgctactcccgcctgcgggaactggtacccggagtcccgagaggcactcagcttagccaggtggaaatcctacagcgcgtcatcgactacattctcgacctgcaggtagtcctggccgagccagcccctggaccccctgatggcccccaccttcccatccagacagccgagctcgctccggaacttgtcatctccaacgacaaaaggagcttttgccactgactcggccgtgtcctgacacctccagaacgcaggtgctggcgcccgttctgcctgggaccccgggaacctctcctgccggaagccggacggcagggatgggccccaacttcgccctgcccacttgacttcaccaaatcccttcctggagactaaacctggtgctcaggagcgaaggactgtgaacttgtggcctgaagagccagagctagctctggccaccagctgggcgacgtcaccctgctcccaccccacccccaagttctaaggtcttttcagagcgtggaggtgtggaaggagtggctgctctccaaactatgccaaggcggcggcagagctggtcttctggtctccttggagaaaggttctgttgccctgatttatgaactctataatagagtatataggttttgtaccttttttacaggaaggtgactttctgtaacaatgcgatgtatattaaactttttataaaagttaacattttgcataataaacgatttttaaacacttgtgtatttttaaccccggcccaagatggaagctgcctcggccagaccatgtattacgaccaccccacgggggggggggcccccccc

SEQ ID NO: 736888 - DNA, 1329 bp, Homo sapiens
  misc_feature (1320)..(1320): n is a, c, g, or t
  misc_feature (1328)..(1329): n is a, c, g, or t
ggcggactggcagggggcagggaagctcaaagatctggggtgctgccaggaaaaagcaaattctggaagttaatggttttgagtgatttttaaatccttgctggcggagaggcccgcctctccccggtatcagcgcttcctcattctttgaatccgcggctccgcggtcttcggcgtcagaccagccggaggaagcctgtttgcaatttaagcgggctgtgaacgcccagggccggcgggggcagggccgaggcgggccattttgaataaagaggcgtgccttccaggcaggctctataagtgaccgccgcggcgagcgtgcgcgcgttgcaggtcactgttactgtagcgggacttcttttggttttctttctctttggggcacctctggactcactccccagcatgaaggcgctgagcccggtgcgcggctgctacgaggcggtgtgctgcctgtcggaacgcagtctggccatcgcccggggccgagggaagggcccggcagctgaggagccgctgagcttgctggacgacatgaaccactgctactcccgcctgcgggaactggtacccggagtcccgagaggcactcagcttagccaggtggaaatcctacagcgcgtcatcgactacattctcgacctgcaggtagtcctggccgagccagcccctggaccccctgatggcccccaccttcccatccagacagccgagctcgctccggaacttgtcatctccaacgacaaaaggagcttttgccactgactcggccgtgtcctgacacctccagaacgcaggtgctggcgcccgttctgcctgggaccccgggaacctctcctgccggaagccggacggcagggatgggccccaacttcgccctgcccacttgacttcaccaaatcccttcctggagactaaacctggtgctcaggagcgaaggactgtgaacttgtggcctgaagagccagagctagctctggccaccagctgggcgacgtcaccctgctcccaccccacccccaagttctaaggtcttttcagagcgtggaggtgtggaaggagtggctgctctccaaactatgccaaggcggcggcagagctggtcttctggtctccttggagaaaggttctgttgccctgatttatgaactctataatagagtatataggttttgtaccttttttacaggaaggtgactttctgtaacaatgcgatgtatattaaactttttataaaagttaacattttgcataataaacgatttttaaacacttgtgtattttataaaacaaaaaaaacttttctcgtacttctttttnatcaaaann

SEQ ID NO: 736889 - DNA, 1798 bp, Homo sapiens
ggcggactggcagggggcagggaagctcaaagatctggggtgctgccaggaaaaagcaaattctggaagttaatggttttgagtgatttttaaatccttgctggcggagaggcccgcctctccccggtatcagcgcttcctcattctttgaatccgcggctccgcggtcttcggcgtcagaccagccggaggaagcctgtttgcaatttaagcgggctgtgaacgcccagggccggcgggggcagggccgaggcgggccattttgaataaagaggcgtgccttccaggcaggctctataagtgaccgccgcggcgagcgtgcgcgcgttgcaggtcactgttactgtagcgggacttcttttggttttctttctctttggggcacctctggactcactccccagcatgaaggcgctgagcccggtgcgcggctgctacgaggcggtgtgctgcctgtcggaacgcagtctggccatcgcccggggccgagggaagggcccggcagctgaggagccgctgagcttgctggacgacatgaaccactgctactcccgcctgcgggaactctcctgccggaagccggacggcagggatgggccccaacttcgccctgcccacttgacttcaccaaatcccttcctggagactaaacctggtgctcaggagcgaaggactgtgaacttgtggcctgaagagccagagctagctctggccaccagctgggcgacgtcaccctgctcccaccccacccccaagttctaaggtcttttcagagcgtggaggtgtggaaggagtggctgctctccaaactatgccaaggcggcggcagagctggtcttctggtctccttggagaaaggttctgttgccctgatttatgaactctataatagagtatataggttttgtaccttttttacaggaaggtgactttctgtaacaatgcgatgtatattaaactttttataaaagttaacattttgcataataaacgatttttaaacacttgtgtatttaaaaaaaaaaacacagaaaaaaacacgaaagaaagaaacagagaaacaaaaacacacgagcagagacgaagacagccagaacacacacgcgagtagaccacaagaccaaaaaagaaaagcaaacggatcaggagcggtaaaaacagaaagacaagcagcagcggagggatacagaagcgagcggggatcgcggaagcgaccagcagaagaccaggccgacggagtcgagacacaaggggcgcagtgagacgggagcgagggcagaaggcacgcggcacgtcgacagcactgcgtaggcgtaggagaaggtcaaactgaaagaaaacagtacgagcagcacggggcgacaaggaaagaaccgagaagagaagcgtagacaagcagggaaggccaaagcagacgagcaggagagggcacgatagactcggaagcgggacaaaaaacagagtaacacgagagcactacagagagagctactgcagaggtcgagctcgaacaaactgagagagacaggaaaacagcaaggaaaaagaaaggagacgaggaggagaggtaaggtaaggaaggagaggaaagaacaggaggagagaaagcggaaatgcaaaggagaggcgaaaagaggagagcggtaaaaaaagggagaaagaaaagaaacgaaaaaggaggaagcgcagacaagagaaaaagaggagaaagagaaaaaagaagcagaaggaacgaaaggaagagagcgcacagaagggagagccgcaaaagactcaggagacagaaaacagcagagac

SEQ ID NO: 736890 - DNA, 2023 bp, Homo sapiens
ggcaacagaaaccggccgccccaccttcccatccaggtaagcctcgaagtcgggacagggctgaacacccaggcaaggatgctgcgggaccctcggagctcccgattgcctcgcgtaactcttccctcttttcctctaatcagacagccgagctcgctccggaacttgtcatctccaacgacaaaaggagcttttgccactgactcggccgtgtcctgacacctccaggtgagtatctcctctcttggagagggaggtttaaacggcaagtcctggagttggcagacgttttgaaaaattgccactcactcggtttagggaaactgaggccagagagggacaagtgacttgcccatggttgcatcaaatgaatggcagagtcagtttccatgtgatgtgcatttaagccttaaatgcgcctgggccctgccctcccgcagtggccgagggtctggcaaagtagacatgggtccgactaaatacaagtctttctgttccatgttgtatagggagctgtcttcggcagccccctcccagctagtgtcaattccaagtaggaggggtagcgcaagctccgcctgtggtctttggcgccaactgggtgggggcagcgtggggcgcggagttatcagctggaggtacagaccaagtttcctccctggcgccggccagtctgcggacggcccccgcctcggcacgctcggcggaaactgactgctccttggtcttctttcctcccccgcccagaacgcaggtgctggcgcccgttctgcctgggaccccgggaacctctcctgccggaagccggacggcagggatgggccccaacttcgccctgcccacttgacttcaccaaatcccttcctggagactaaacctggtgctcaggagcgaaggactgtgaacttgtggcctgaagagccagagctagctctggccaccagctgggcgacgtcaccctgctcccaccccacccccaagttctaaggtcttttcagagcgtggaggtgtggaaggagtggctgctctccaaactatgccaaggcggcggcagagctggtcttctggtctccttggagaaaggttctgttgccctgatttatgaactctataatagagtatataggttttgtaccttttttacaggaaggtgactttctgtaacaatgcgatgtatattaaactttttataaaagttaacattttgcataataaacgatttttaaacacttgtgtatttaaaaaaaaaaacacagaaaaaaacacgaaagaaagaaacagagaaacaaaaacacacgagcagagacgaagacagccagaacacacacgcgagtagaccacaagaccaaaaaagaaaagcaaacggatcaggagcggtaaaaacagaaagacaagcagcagcggagggatacagaagcgagcggggatcgcggaagcgaccagcagaagaccaggccgacggagtcgagacacaaggggcgcagtgagacgggagcgagggcagaaggcacgcggcacgtcgacagcactgcgtaggcgtaggagaaggtcaaactgaaagaaaacagtacgagcagcacggggcgacaaggaaagaaccgagaagagaagcgtagacaagcagggaaggccaaagcagacgagcaggagagggcacgatagactcggaagcgggacaaaaaacagagtaacacgagagcactacagagagagctactgcagaggtcgagctcgaacaaactgagagagacaggaaaacagcaaggaaaaagaaaggagacgaggaggagaggtaaggtaaggaaggagaggaaagaacaggaggagagaaagcggaaatgcaaaggagaggcgaaaagaggagagcggtaaaaaaagggagaaagaaaagaaacgaaaaaggaggaagcgcagacaagagaaaaagaggagaaagagaaaaaagaagcagaaggaacgaaaggaagagagcgcacagaagggagagccgcaaaagactcaggagacagaaaacagcagagac

SEQ ID NO: 736891 - DNA, 991 bp, Homo sapiens
gcctgggtggcgaaatgccatactgtagcgggacttcttttggttttctttctctttggggcacctctggactcactccccagcatgaaggcgctgagcccggtgcgcggctgctacgaggcggtgtgctgcctgtcggaacgcagtctggccatcgcccggggccgagggaagggcccggcagctgaggagccgctgagcttgctggacgacatgaaccactgctactcccgcctgcgggaactggtacccggagtcccgagaggcactcagcttagccaggtggaaatcctacagcgcgtcatcgactacattctcgacctgcaggtagtcctggccgagccagcccctggaccccctgatggcccccaccttcccatccagacagccgagctcgctccggaacttgtcatctccaacgacaaaaggagcttttgccactgactcggccgtgtcctgacacctccagaacgcaggtgctggcgcccgttctgcctgggaccccgggaacctctcctgccggaagccggacggcagggatgggccccaacttcgccctgcccacttgacttcaccaaatcccttcctggagactaaacctggtgctcaggagcgaaggactgtgaacttgtggcctgaagagccagagctagctctggccaccagctgggcgacgtcaccctgctcccaccccacccccaagttctaaggtcttttcagagcgtggaggtgtggaaggagtggctgctctccaaactatgccaaggcggcggcagagctggtcttctggtctccttggagaaaggttctgttgccctgatttatgaactctataatagagtatataggttttgtaccttttttacaggaaggtgactttctgtaacaatgcgatgtatattaaactttttataaaagttaacattttgcataataaacgatttttaaacacttgtgtatttaacacttgtgtatatgatgacacccgtct

SEQ ID NO: 736892 - DNA, 805 bp, Homo sapiens
ttcggcacgagcggcacgagggacgacatgaaccactgctactcccgcctgcgggaactggtacccggagtcccgagaggcactcagcttagccaggtggaaatcctacagcgcgtcatcgactacattctcgacctgcaggtagtcctggccgagccagcccctggaccccctgatggcccccaccttcccatccagacagccgagctcgctccggaacttgtcatctccaacgacaaaaggagcttttgccactgactcggccgtgtcctgacacctccagaacgcaggtgctggcgcccgttctgcctgggaccccgggaacctctcctgccggaagccggacggcagggatgggccccaacttcgccctgcccacttgacttcaccaaatcccttcctggagactaaacctggtgctcaggagcgaaggactgtgaacttgtggcctgaagagccagagctagctctggccaccagctgggcgacgtcaccctgctcccaccccacccccaagttctaaggtcttttcagagcgtggaggtgtggaaggagtggctgctctccaaactatgccaaggcggcggcagagctggtcttctggtctccttggagaaaggttctgttgccctgatttatgaactctataatagagtatataggttttgtaccttttttacaggaaggtgactttctgtaacaatgcgatgtatattaaactttttataaaagttaacattttgcataataaacgatttttaaacacttgtgtatttaacacttgtgtatatgatgacacccgtct

SEQ ID NO: 736893 - DNA, 1182 bp, Homo sapiens
ggacgcgtgggtcgcccacgcgtcgcccacgcgtcgctggtgctcaggagcgaaggactgtgaacttgtggcctgaagagccagagctagctctggccaccagctgggcgacgtcaccctgctcccaccccacccccaagttctaaggtcttttcagagcgtggaggtgtggaaggagtggctgctctccaaactatgccaaggcggcggcagagctggtcttctggtctccttggagaaaggttctgttgccctgatttatgaactctataatagagtatataggttttgtaccttttttacaggaaggtgactttctgtaacaatgcgatgtatattaaactttttataaaagttaacattttgcataataaacgatttttaaacacttgtgtatttaaaaaaaaaaacacagaaaaaaacacgaaagaaagaaacagagaaacaaaaacacacgagcagagacgaagacagccagaacacacacgcgagtagaccacaagaccaaaaaagaaaagcaaacggatcaggagcggtaaaaacagaaagacaagcagcagcggagggatacagaagcgagcggggatcgcggaagcgaccagcagaagaccaggccgacggagtcgagacacaaggggcgcagtgagacgggagcgagggcagaaggcacgcggcacgtcgacagcactgcgtaggcgtaggagaaggtcaaactgaaagaaaacagtacgagcagcacggggcgacaaggaaagaaccgagaagagaagcgtagacaagcagggaaggccaaagcagacgagcaggagagggcacgatagactcggaagcgggacaaaaaacagagtaacacgagagcactacagagagagctactgcagaggtcgagctcgaacaaactgagagagacaggaaaacagcaaggaaaaagaaaggagacgaggaggagaggtaaggtaaggaaggagaggaaagaacaggaggagagaaagcggaaatgcaaaggagaggcgaaaagaggagagcggtaaaaaaagggagaaagaaaagaaacgaaaaaggaggaagcgcagacaagagaaaaagaggagaaagagaaaaaagaagcagaaggaacgaaaggaagagagcgcacagaagggagagccgcaaaagactcaggagacagaaaacagcagagac

SEQ ID NO: 736894 - DNA, 250 bp, Homo sapiens
  misc_feature (11)..(11): n is a, c, g, or t
  misc_feature (230)..(230): n is a, c, g, or t
tgacaattcangtttttgaacatccagcttttcaccatcctttactctgctggcttcccagtagggagtttaatatttttttcgggattctcggctcccagtgtggctggtattatagaagagacagcatctttgaaatgagggcaaaccatctacacggacaggtctcgggtcctcagattgctccttccggctgctccatcttctagaagcatgacagttttttttgntttttgtttttttaaataag

SEQ ID NO: 736895 - DNA, 338 bp, Homo sapiens
  misc_feature (189)..(189): n is a, c, g, or t
  misc_feature (256)..(257): n is a, c, g, or t
  misc_feature (303)..(303): n is a, c, g, or t
  misc_feature (308)..(308): n is a, c, g, or t
  misc_feature (338)..(338): n is a, c, g, or t
cattattattgccatgatcactgaagccagctgaagctctatttgtggaattaagtctcagagggctgaaatgggctgtccaaggtcacacaagtgagtgagtcagggagggatcccagatttcctgattcctgaagcctttgccaaccatcagctcacacacagacgaatcattgcccaatgacctanaaatcggggtatctgatcacatccaagtaccacagctggtgatttaataagcactcaccatgtgttnnaaactgtgcaggctatatgaaagctttatagcatctataggtcagnataanaaggtcatctcattgcttatgccaaactan

SEQ ID NO: 736896 - DNA, 1135 bp, Homo sapiens
  misc_feature (401)..(401): n is a, c, g, or t
  misc_feature (650)..(650): n is a, c, g, or t
tccccagcactctgcccagcccaagctctcccagcctctgcctcccatcccccaggaggaaagacagtgcccaggctgggccaggcagctggccctggtgcccatgagcagaggggaccctccctggagaactcgaaaatgccagtgaacaaggcccaaacacctccatcctgagtccttctccagccttaaagcaaatcatcttttaatcctgaaacaccaaatatttaatttatgctctacctcaaatgtcaagcccacctcccatcacatagctttgaaaccacgtaaagaagcctaacactttccatatggcaaagacatggggccttttaattgtgccaactggtatcattcaagggtaattcccttggaatctggcactcgggcaacagctgggncagcctccaatctcatcacccaaccccacacgtccccatgggctccaagtaagcctgcaccctcctcatcttctccaaatatcaaagtgcactaggtacccccagtcaaattaccaaactgcctggcagccgcctttgatccagaggcgggcttgcctgcaccacggctctcagcctatttcttcaggcagctctgctgtaaaggaacaaaagggccaaccggggccatggggagattattttaaatcnggttgtacatattcacaatcagcctgtgagcatatacagaggcacacaggtcttcaccaagtgtttcccacctgatacctgagtccactgcactatttaatctatctattaagctttttcacttgtccattctattttccacacccagtgtttccaattggttttcttctctaactgcctgttgctgcttcatgtttccagcatcctccgtttctctctgagtttatgatgcttattttgctttctaattgtttaacatggtgttctttgccgcgtgtgctgatcagtttattgctcctcttccacagtactcgtgcgcctcccatttctcattccttttctcctatgagtccatattcccttggacttgctcatgtccccatggaaagggcaaaagcccagcccttggcctgcgtccctccaagtgagcctgccatgacagtgggggaggcagagagcctctagcattcttatcccagccctat

SEQ ID NO: 736897 - DNA, 416 bp, Homo sapiens
cgcctgcgagcgaactctagagagcgcaacccctatctattaagctttttcacttgtccattctattttccacacccagtgtttccaattggttttcttctctaactgcctgttgctgcttcatgtttccagcatcctccgtttctctctgagtttatgatgcttattttgctttctaattgtttaacatggtgttctttgccgcgtgtgctgatcagtttattgctcctcttccacagtactcgtgcgcctcccatttctcattccttttctcctatgagtccatattcccttggacttgctcatgtccccatggaaagggcaaaagcccagcccttggcctgcgtccctccaagtgagcctgccatgacagtgggggaggcagagagcctctagcattcttatcccagccctat

SEQ ID NO: 736898 - DNA, 907 bp, Homo sapiens; identical to SEQ ID NO: 116138

SEQ ID NO: 736899 - DNA, 1008 bp, Homo sapiens
gggccagagcttgcggggcgcacagagcccccaggcctcatggcgcagaaacctctcagcaccgcggcggctgaacgcatgaaccttgtgggtcaggatgagatctggaaataccgtctgaaggctgaatcggaagcacggcagaactggccccagaactgggggtttttaacaaccccttttgaggagttgatcaagtgtgaagaagatctccccaccccaaagcccaaaatcgagcttcctgagcgtttccgcatccggccggtgaccccagtggagaagtacatcaaggtctttccatcccccccagtcccacagaccacccagggcttcatcggctggagatctgcagtgccaggcctgaacaagtgcctagagctcgacgatgcgatcagaagctgcaaaggtgcttttgcacgagagctgtgctggcccaagcagggcgtgcactgaatccagacggagttctgcccaggggtgctgcatatcggtcaccaggcacccagggccatgccagggaaaggaagagctcccctgaatcccgaggacacagtcccctgcgtacttgctcatgggatgttgcaaagaacacaaagtgtgccttagacattctcaagtcatcagcgtcacccttccagaatcccgaggacacagtcccctgcgtacttgctcatgggatgttgcaaagaacacaaagtgtgccttagacattttcaagtcatcagcgtcacccttccagaatgttcacgtccacacccattcttggctaatgtaatgaataaggcttctctcatttgtttttgataccttgggaatttctatgcagggctttaaaaaaaaataagtgattcaattttaaaaatatttgtctaggtccttcaatgtagcttttcattgcacctatcatcatccttatttataacgaacttgttgatcaggtgtttctctatccagatatccctgggcctgtttttcaggaagaagaatacacttagagaatcccttggc

SEQ ID NO: 736900 - DNA, 887 bp, Homo sapiens
ttttttttttttgagacggagtcccgctctgtcgcccaggctggagtgcagcgggtttaggctttttaagggaccccctcccaatcagggcaacagagggatgcccaaggtgaccgccaacaccttcctggggggctgactccagggctcaggaggaagggaccagccttcttcgccaagagggggagccctagcatgcacttctgggctggctttacccaaatagtgaggcaccccaggtgtggagacctccctctccccactccaaacaccactgggtcagggggctgccagccagccacctccagcagcccaggcaggaagccggaaatgatgcagcccaaattcctcttggtggggtttcctgtaagtggggagccgcccagggcaggatcataaatgggctgatctgaggtctgtggtcctaccggagaagccaggcatggaaggctgactatatatccacggccaatggctccagagccctaagccatgggcagaccagatgtggtgagtgaccctggctatggcagtaaccaagaccaggatgcaggagtgtggtccaagggtttgcctggcactttcccccagcctgggggaggggttctccttctcctccaggtgacctgagaagaatggtaggcaaaggacactgtcctggtctgggcagccgctattggtgtcagctcatttctggatgacacagatgggacgcccaccctaaccattctgtctcctccctctgtgcaagtgcccttgggactacccagattgtagtttaaggtgaagggatccttgcgtcaagaagctccttggaccaaacctgggacggaaaggacaggaactgtaagggaactcgtcagccctccccctgcgcttctggctcc

SEQ ID NO: 736901 - DNA, 2362 bp, Homo sapiens
ctccccctccccgcgctccgcagctgggaatcacgggactagccttcgtttccttggcaacgcagtacacaagtgctagccctagcagctcgcgatgtgcttcagcagagcagacgctgcggataactacccttttggaacatgtcaacagaggaaactttttcctcacttccatcccccgaatttgattgggaacaagtttgtccctcttaggggatcaccccacagagggcctgggtgttatttttcagatggatatggcttggcatacgacttatctaagatcccaaccagtataaaaggatatactttgggagccagaacagctgtgaggtttaagccaatacagaaggaaatgacacctcatgcaggcaggtaccagaaagtaagtcctcagcaggaaaaacacaaacaaaattttgctccatttaatgtcttggtgcctcgatttaagaactacccaaaggacacttactatcccagccctggtgcatacaacccagagaagaagccaccgccaaaaattgcctggccaatgaaatttggatctccagactgggctcaggttccatgtctacagaaaagaaccctaaaagctgagctgtccacagacaaagactttagaaagcatcggaaccgtgtggcctacctaagcctgtattataattgagcggctgtaactaccttcacgtgctcctcttatacacagactctccaggactgaggacagagctgctcttcttcttctacgttactgtggccctcttgtctggcagcctggagcccagggagggacaggggcttatagctgctgtatgagaacataaagactagtgcacagtgctatctccatctactgacttgtggtgtacacgtgcatgtctggggtctgtgggtttctgttgggtgctgagttgggtgatttcattttagtgaaatatttgtgggcccctgctctctagttctaattcccaggagccaattttatatattctaccactagccctggtcataggaggctgttagcctatacatgtcaagggtttggatgggatttgggcttgctagatacagaaaacacttaaggcagattaaaacatgtattggagctctcccaattgtgttgctcagtgtggagtgggaaggtcttgatttggttgactttcccagattgacataaaactcaaaaaccaaaaaattgcccctttcctatgacatcatccatttagtctgtgagtcaacatatatactgaggtcctactatgtgttgagcagagcagtaagcactggggatatggcaggaatcaaaataaacttatctactaagtccttgggcctggcctgaagtcagaggaggactccccagggcagctaggggattgggtctgccctccaatctgaatgaccccctagaaccttacaagtcattctggggttataaagatcataacatttatagccccagactgacttgtaagcagctgcatttaaagtacttactcagacactcaggcctgagagatagacccctttctttccagcactagctgaaataatcaagtatatagtttgttcaggattggcactaaatgtgatttaatcttttaataaaagggtccttttgtacccacttaggcttcttcgtaattaccagaaaggtgataagcctgcatgtgtctggacaccaaagattgagaagctgccagtggctgcaagagagcctactgtaaccctcatggccaccccctgatgagtgttacctggggaaagggctagcaagaggtgaagcctcctggtcatatgatgctgggggtgcctaattccttaaaggccaaggtcttctgaaataataatggtgaaggacagaaaagtctttatgagaaatcacataggatatattaagataatgataaagatacctcagcaagaacatacctaatatatacacttcttttaatctgatgacttaatgatttctgttatcaagaagtatttatgacttgagataagtcaggattaactgttatcacctctcctgtacacctccctcctttttctcctttgtacccacatgtgcagattttttcagaggtgacaatttagcatttaatgtttttttttctgcttcaagttcttaggtccctttggaggatattgatgggggtggaggtggggatagaacatctttcacactgtttggtacagagatgctcaaagcttttcccagggaaaggaactctctaaaatagtaatctgatttgatgaaagataaaattttaatatagcttcagttaaccttcaggatactttaaatgctacattgtatataaaagtaataaagtacaaatgaacacgaagacta

SEQ ID NO: 736902 - DNA, 880 bp, Homo sapiens
ctccccctccccgcgctccgcagctgggaatcacgggactagccttcgtttccttggcaacgcagtacacaagtgctagccctagcagctcgcgatgtgcttcagcagagcagacgctgcggataactacccttttggaacatgtcaacagaggaaactttttcctcacttccatcccccgaatttgattgggaacaagtttgtccctcttaggggatcaccccacagagggcctgggtgttatttttcagatggatatggcttggcatacgacttatctaagatcccaaccagtataaaaggatatactttgggagccagaacagctgtgaggtttaagccaatacagaaggaaatgacacctcatgcaggcaggtaccagaaagtaagtcctcagcaggaaaaacacaaacaaaattttgctccatttaatgtcttggtgcctcgatttaagaactacccaaaggacacttactatcccaggtatgtctcctcccttttggtgcacttcaacaaaaaaagcaataggaggaaaagaagtacgtaataaaagaagcacataaagaagggatgacatccaaaccatcgcagttaaataaggaaccattcagagatttaatcaattgtctcacagatttctggcattgtagaatgtagaatcatagttactcattcaatgaatttttattaacatgccaggtagttttgtaggttcgatagatttttgcactaaatccatcacacaaggctcctgatttcttggggcttacattctagagtccagacagagcacaggcaaatacacaagaaaatatcaatagtgatagagtgaccatataatttgttagtcaaacgatgacacttctgagagtaaaagggg

SEQ ID NO: 736903 - DNA, 2263 bp, Homo sapiens
ctccccctccccgcgctccgcagctgggaatcacgggactagccttcgtttccttggcaacgcagtacacaagtgctagccctagcagctcgcgatgtgcttcagcagagcagacgctgcggataactacccttttggaacatgtcaacagaggaaactttttcctcacttccatcccccgaatttgattgggaacaagtttgtccctcttaggggatcaccccacagagggcctgggtgttatttttcagatgaaatgacacctcatgcaggcaggtaccagaaagtaagtcctcagcaggaaaaacacaaacaaaattttgctccatttaatgtcttggtgcctcgatttaagaactacccaaaggacacttactatcccagccctggtgcatacaacccagagaagaagccaccgccaaaaattgcctggccaatgaaatttggatctccagactgggctcaggttccatgtctacagaaaagaaccctaaaagctgagctgtccacagacaaagactttagaaagcatcggaaccgtgtggcctacctaagcctgtattataattgagcggctgtaactaccttcacgtgctcctcttatacacagactctccaggactgaggacagagctgctcttcttcttctacgttactgtggccctcttgtctggcagcctggagcccagggagggacaggggcttatagctgctgtatgagaacataaagactagtgcacagtgctatctccatctactgacttgtggtgtacacgtgcatgtctggggtctgtgggtttctgttgggtgctgagttgggtgatttcattttagtgaaatatttgtgggcccctgctctctagttctaattcccaggagccaattttatatattctaccactagccctggtcataggaggctgttagcctatacatgtcaagggtttggatgggatttgggcttgctagatacagaaaacacttaaggcagattaaaacatgtattggagctctcccaattgtgttgctcagtgtggagtgggaaggtcttgatttggttgactttcccagattgacataaaactcaaaaaccaaaaaattgcccctttcctatgacatcatccatttagtctgtgagtcaacatatatactgaggtcctactatgtgttgagcagagcagtaagcactggggatatggcaggaatcaaaataaacttatctactaagtccttgggcctggcctgaagtcagaggaggactccccagggcagctaggggattgggtctgccctccaatctgaatgaccccctagaaccttacaagtcattctggggttataaagatcataacatttatagccccagactgacttgtaagcagctgcatttaaagtacttactcagacactcaggcctgagagatagacccctttctttccagcactagctgaaataatcaagtatatagtttgttcaggattggcactaaatgtgatttaatcttttaataaaagggtccttttgtacccacttaggcttcttcgtaattaccagaaaggtgataagcctgcatgtgtctggacaccaaagattgagaagctgccagtggctgcaagagagcctactgtaaccctcatggccaccccctgatgagtgttacctggggaaagggctagcaagaggtgaagcctcctggtcatatgatgctgggggtgcctaattccttaaaggccaaggtcttctgaaataataatggtgaaggacagaaaagtctttatgagaaatcacataggatatattaagataatgataaagatacctcagcaagaacatacctaatatatacacttcttttaatctgatgacttaatgatttctgttatcaagaagtatttatgacttgagataagtcaggattaactgttatcacctctcctgtacacctccctcctttttctcctttgtacccacatgtgcagattttttcagaggtgacaatttagcatttaatgtttttttttctgcttcaagttcttaggtccctttggaggatattgatgggggtggaggtggggatagaacatctttcacactgtttggtacagagatgctcaaagcttttcccagggaaaggaactctctaaaatagtaatctgatttgatgaaagataaaattttaatatagcttcagttaaccttcaggatactttaaatgctacattgtatataaaagtaataaagtacaaatgaacacgaagacta

SEQ ID NO: 736904 - DNA, 2222 bp, Homo sapiens
ctccccctccccgcgctccgcagctgggaatcacgggactagccttcgtttccttggcaacgcagtacacaagtgctagccctagcagctcgcgatgtgcttcagcagagcagggatatggcttggcatacgacttatctaagatcccaaccagtataaaaggatatactttgggagccagaacagctgtgaggtttaagccaatacagaaggaaatgacacctcatgcaggcaggtaccagaaagtaagtcctcagcaggaaaaacacaaacaaaattttgctccatttaatgtcttggtgcctcgatttaagaactacccaaaggacacttactatcccagccctggtgcatacaacccagagaagaagccaccgccaaaaattgcctggccaatgaaatttggatctccagactgggctcaggttccatgtctacagaaaagaaccctaaaagctgagctgtccacagacaaagactttagaaagcatcggaaccgtgtggcctacctaagcctgtattataattgagcggctgtaactaccttcacgtgctcctcttatacacagactctccaggactgaggacagagctgctcttcttcttctacgttactgtggccctcttgtctggcagcctggagcccagggagggacaggggcttatagctgctgtatgagaacataaagactagtgcacagtgctatctccatctactgacttgtggtgtacacgtgcatgtctggggtctgtgggtttctgttgggtgctgagttgggtgatttcattttagtgaaatatttgtgggcccctgctctctagttctaattcccaggagccaattttatatattctaccactagccctggtcataggaggctgttagcctatacatgtcaagggtttggatgggatttgggcttgctagatacagaaaacacttaaggcagattaaaacatgtattggagctctcccaattgtgttgctcagtgtggagtgggaaggtcttgatttggttgactttcccagattgacataaaactcaaaaaccaaaaaattgcccctttcctatgacatcatccatttagtctgtgagtcaacatatatactgaggtcctactatgtgttgagcagagcagtaagcactggggatatggcaggaatcaaaataaacttatctactaagtccttgggcctggcctgaagtcagaggaggactccccagggcagctaggggattgggtctgccctccaatctgaatgaccccctagaaccttacaagtcattctggggttataaagatcataacatttatagccccagactgacttgtaagcagctgcatttaaagtacttactcagacactcaggcctgagagatagacccctttctttccagcactagctgaaataatcaagtatatagtttgttcaggattggcactaaatgtgatttaatcttttaataaaagggtccttttgtacccacttaggcttcttcgtaattaccagaaaggtgataagcctgcatgtgtctggacaccaaagattgagaagctgccagtggctgcaagagagcctactgtaaccctcatggccaccccctgatgagtgttacctggggaaagggctagcaagaggtgaagcctcctggtcatatgatgctgggggtgcctaattccttaaaggccaaggtcttctgaaataataatggtgaaggacagaaaagtctttatgagaaatcacataggatatattaagataatgataaagatacctcagcaagaacatacctaatatatacacttcttttaatctgatgacttaatgatttctgttatcaagaagtatttatgacttgagataagtcaggattaactgttatcacctctcctgtacacctccctcctttttctcctttgtacccacatgtgcagattttttcagaggtgacaatttagcatttaatgtttttttttctgcttcaagttcttaggtccctttggaggatattgatgggggtggaggtggggatagaacatctttcacactgtttggtacagagatgctcaaagcttttcccagggaaaggaactctctaaaatagtaatctgatttgatgaaagataaaattttaatatagcttcagttaaccttcaggatactttaaatgctacattgtatataaaagtaataaagtacaaatgaacacgaagacta

SEQ ID NO: 736905 - DNA, 2353 bp, Homo sapiens
ggtgcgttgaagagagtctgacgcgggagttaggtaagtacccttgggggaacactgttaagcagaggaaaattatcccattatttctatcccccgtgaagttggatggggacccgcagttgggtccctcctatagggagttcaccactgacagtagggccttggcgttggtattcattacacgatggatagtggcttggaaagtgactgagcgttaatcgtaaaggtactcccaatacactacgtcattcacacaacggcactatactttggtggagcctggcacagaggagggaggcttcaagccaaactcacagaaggaaactgacatcctatcatgcaagtgcgacggctacgctagaaagttagatccatccatgacaggaataaataacatgacatgagtttggctccggttattaatgtcttggtgcctcgatttaagaactacccaaaggacacttactatcccagccctggtgcatacaacccagagaagaagccaccgccaaaaattgcctggccaatgaaatttggatctccagactgggctcaggttccatgtctacagaaaagaaccctaaaagctgagctgtccacagacaaagactttagaaagcatcggaaccgtgtggcctacctaagcctgtattataattgagcggctgtaactaccttcacgtgctcctcttatacacagactctccaggactgaggacagagctgctcttcttcttctacgttactgtggccctcttgtctggcagcctggagcccagggagggacaggggcttatagctgctgtatgagaacataaagactagtgcacagtgctatctccatctactgacttgtggtgtacacgtgcatgtctggggtctgtgggtttctgttgggtgctgagttgggtgatttcattttagtgaaatatttgtgggcccctgctctctagttctaattcccaggagccaattttatatattctaccactagccctggtcataggaggctgttagcctatacatgtcaagggtttggatgggatttgggcttgctagatacagaaaacacttaaggcagattaaaacatgtattggagctctcccaattgtgttgctcagtgtggagtgggaaggtcttgatttggttgactttcccagattgacataaaactcaaaaaccaaaaaattgcccctttcctatgacatcatccatttagtctgtgagtcaacatatatactgaggtcctactatgtgttgagcagagcagtaagcactggggatatggcaggaatcaaaataaacttatctactaagtccttgggcctggcctgaagtcagaggaggactccccagggcagctaggggattgggtctgccctccaatctgaatgaccccctagaaccttacaagtcattctggggttataaagatcataacatttatagccccagactgacttgtaagcagctgcatttaaagtacttactcagacactcaggcctgagagatagacccctttctttccagcactagctgaaataatcaagtatatagtttgttcaggattggcactaaatgtgatttaatcttttaataaaagggtccttttgtacccacttaggcttcttcgtaattaccagaaaggtgataagcctgcatgtgtctggacaccaaagattgagaagctgccagtggctgcaagagagcctactgtaaccctcatggccaccccctgatgagtgttacctggggaaagggctagcaagaggtgaagcctcctggtcatatgatgctgggggtgcctaattccttaaaggccaaggtcttctgaaataataatggtgaaggacagaaaagtctttatgagaaatcacataggatatattaagataatgataaagatacctcagcaagaacatacctaatatatacacttcttttaatctgatgacttaatgatttctgttatcaagaagtatttatgacttgagataagtcaggattaactgttatcacctctcctgtacacctccctcctttttctcctttgtacccacatgtgcagattttttcagaggtgacaatttagcatttaatgtttttttttctgcttcaagttcttaggtccctttggaggatattgatgggggtggaggtggggatagaacatctttcacactgtttggtacagagatgctcaaagcttttcccagggaaaggaactctctaaaatagtaatctgatttgatgaaagataaaattttaatatagcttcagttaaccttcaggatactttaaatgctacattgtatataaaagtaataaagtacaaatgaacacgaagacta

SEQ ID NO: 736906 - DNA, 1772 bp, Homo sapiens
acgcggaccgtcagctttagggtctttgctttagaaagcatcggaaccgtgtggcctacctaagcctgtattataattgagcggctgtaactaccttcacgtgctcctcttatacacagactctccaggactgaggacagagctgctcttcttcttctacgttactgtggccctcttgtctggcagcctggagcccagggagggacaggggcttatagctgctgtatgagaacataaagactagtgcacagtgctatctccatctactgacttgtggtgtacacgtgcatgtctggggtctgtgggtttctgttgggtgctgagttgggtgatttcattttagtgaaatatttgtgggcccctgctctctagttctaattcccaggagccaattttatatattctaccactagccctggtcataggaggctgttagcctatacatgtcaagggtttggatgggatttgggcttgctagatacagaaaacacttaaggcagattaaaacatgtattggagctctcccaattgtgttgctcagtgtggagtgggaaggtcttgatttggttgactttcccagattgacataaaactcaaaaaccaaaaaattgcccctttcctatgacatcatccatttagtctgtgagtcaacatatatactgaggtcctactatgtgttgagcagagcagtaagcactggggatatggcaggaatcaaaataaacttatctactaagtccttgggcctggcctgaagtcagaggaggactccccagggcagctaggggattgggtctgccctccaatctgaatgaccccctagaaccttacaagtcattctggggttataaagatcataacatttatagccccagactgacttgtaagcagctgcatttaaagtacttactcagacactcaggcctgagagatagacccctttctttccagcactagctgaaataatcaagtatatagtttgttcaggattggcactaaatgtgatttaatcttttaataaaagggtccttttgtacccacttaggcttcttcgtaattaccagaaaggtgataagcctgcatgtgtctggacaccaaagattgagaagctgccagtggctgcaagagagcctactgtaaccctcatggccaccccctgatgagtgttacctggggaaagggctagcaagaggtgaagcctcctggtcatatgatgctgggggtgcctaattccttaaaggccaaggtcttctgaaataataatggtgaaggacagaaaagtctttatgagaaatcacataggatatattaagataatgataaagatacctcagcaagaacatacctaatatatacacttcttttaatctgatgacttaatgatttctgttatcaagaagtatttatgacttgagataagtcaggattaactgttatcacctctcctgtacacctccctcctttttctcctttgtacccacatgtgcagattttttcagaggtgacaatttagcatttaatgtttttttttctgcttcaagttcttaggtccctttggaggatattgatgggggtggaggtggggatagaacatctttcacactgtttggtacagagatgctcaaagcttttcccagggaaaggaactctctaaaatagtaatctgatttgatgaaagataaaattttaatatagcttcagttaaccttcaggatactttaaatgctacattgtatataaaagtaataaagtacaaatgaacacgaagacta

SEQ ID NO: 736907 - DNA, 2330 bp, Homo sapiens
ctccccctccccgcgctccgcagctgggaatcacgggactagccttcgtttccttggcaacgcagtacacaagtgctagccctagcagctcgcgatgtgcttcagcagagcagacgctgcggataactacccttttggaacatgtcaacagaggaaactttttcctcacttccatcccccgaatttgattgggaacaagtttgtccctcttaggggatcaccccacagagggcctgggtgttatttttcagatggatatggcttggcatacgacttatctaagatcccaaccagtataaaaggatatactttgggagccagaacagctgtgaggtttaagccaatacagaaggaaatgacacctcatgcaggcaggtaccagaaagtaagtcctcagcaggaaaaacacaaacaaaattttgctccatttaatgtcttggtgcctcgatttaagaactacccaaaggacacttactatcccagcgccaaaaattgcctggccaatgaaatttggatctccagactgggctcaggttccatgtctacagaaaagaaccctaaaagctgagctgtccacagacaaagactttagaaagcatcggaaccgtgtggcctacctaagcctgtattataattgagcggctgtaactaccttcacgtgctcctcttatacacagactctccaggactgaggacagagctgctcttcttcttctacgttactgtggccctcttgtctggcagcctggagcccagggagggacaggggcttatagctgctgtatgagaacataaagactagtgcacagtgctatctccatctactgacttgtggtgtacacgtgcatgtctggggtctgtgggtttctgttgggtgctgagttgggtgatttcattttagtgaaatatttgtgggcccctgctctctagttctaattcccaggagccaattttatatattctaccactagccctggtcataggaggctgttagcctatacatgtcaagggtttggatgggatttgggcttgctagatacagaaaacacttaaggcagattaaaacatgtattggagctctcccaattgtgttgctcagtgtggagtgggaaggtcttgatttggttgactttcccagattgacataaaactcaaaaaccaaaaaattgcccctttcctatgacatcatccatttagtctgtgagtcaacatatatactgaggtcctactatgtgttgagcagagcagtaagcactggggatatggcaggaatcaaaataaacttatctactaagtccttgggcctggcctgaagtcagaggaggactccccagggcagctaggggattgggtctgccctccaatctgaatgaccccctagaaccttacaagtcattctggggttataaagatcataacatttatagccccagactgacttgtaagcagctgcatttaaagtacttactcagacactcaggcctgagagatagacccctttctttccagcactagctgaaataatcaagtatatagtttgttcaggattggcactaaatgtgatttaatcttttaataaaagggtccttttgtacccacttaggcttcttcgtaattaccagaaaggtgataagcctgcatgtgtctggacaccaaagattgagaagctgccagtggctgcaagagagcctactgtaaccctcatggccaccccctgatgagtgttacctggggaaagggctagcaagaggtgaagcctcctggtcatatgatgctgggggtgcctaattccttaaaggccaaggtcttctgaaataataatggtgaaggacagaaaagtctttatgagaaatcacataggatatattaagataatgataaagatacctcagcaagaacatacctaatatatacacttcttttaatctgatgacttaatgatttctgttatcaagaagtatttatgacttgagataagtcaggattaactgttatcacctctcctgtacacctccctcctttttctcctttgtacccacatgtgcagattttttcagaggtgacaatttagcatttaatgtttttttttctgcttcaagttcttaggtccctttggaggatattgatgggggtggaggtggggatagaacatctttcacactgtttggtacagagatgctcaaagcttttcccagggaaaggaactctctaaaatagtaatctgatttgatgaaagataaaattttaatatagcttcagttaaccttcaggatactttaaatgctacattgtatataaaagtaataaagtacaaatgaacacgaagacta

SEQ ID NO: 736908 - DNA, 905 bp, Homo sapiens
  misc_feature (626)..(626): n is a, c, g, or t
  misc_feature (639)..(639): n is a, c, g, or t
  misc_feature (641)..(641): n is a, c, g, or t
actagttctagatcgcgagcggctgccctttcttaatatgactagtggtcttgatgctagagtcaacttactctgttgctggctttagcagagaataggaggaaccatatgaaaaagatcaggctttctgacttccatccccaaaacacatttaccagcatactccaaactgtttctgatgtgttccatgagaaaaggattgtttgctcaaaaagcttggaaaatactacacactccctttctccttctggagatcaacccacattagagtgtctaaggactcctgagaattcctgttacagtaaacaaaactaacgtaatctaccatttcctacactatttgagcatggaaatcatagtccccactctgtgaaaacttaacgctttttggaagacatttctgtagcatgtcagtttggagaaatgatgagctacgccttgatgaaagaaccgtgttggtgctgctaagtttagccattatggtttttcctttctctctcttaagccttattcttcaactaaaagatgaggattaagagcaagaagttgggggggatgtgaaaataattttatgaggttgtctaaaataaagagtagtttcttaaaaaaaaaaaacaaaccacacnaacaaaaaaacananaaaaacagacggcacggaccaaaacaaagcaacaacaaccaacacaaaaagacacgaacccggaagagcacaaaacaacaagaaaaacaaaaaagaccagaaagaaagcataatatatatgcggggcaagagaccagccagaacagacagagaaaggaaaaaaaaagaaaagaaacgaaaaaaagggagaaaacaaaggagagaggaagacaggggagacacaagaaaaacaccaggagcatagcaaccccaaaccacgaagat

SEQ ID NO: 736909 - DNA, 418 bp, Homo sapiens
gcagctcgtaccccgatatttgtgtttctggctacagaaggggaccatcttcagttgtctgaagaatggttttatgcccacatcataccattccttggatgaaacccgtatagttcacaatagagctcagggagcccctaactcttccaaaccacatgggagacagtttccttcatgcccaagcctgagctcagatccagcttgcaactaatccttctatcatctaacatgccctacttggaaagatctaagatctgaatcttatcctttgccatcttctgttaccatatggtgttgaatgcaagtttaattaccatggagattgttttacaaacttttgatgtggtcaagttcagttttagaaaagggagtctgttccagatcagggccagaaccacaaatatcgggggcgagcagc

SEQ ID NO: 736910 - DNA, 746 bp, Homo sapiens
cccatgggaccttggcagcttcattcgggcagcatgacagcactacatttgtggaacctcgcacgtgacagccgtgcgctggtgatctggcatgggatgggagacagctgttgcaatcccttaagcatgggtgctattaaaaaaatggtggagaagaaaatacctggaatttacgtcttatctttagagattgggaagaccctgatggaggacgtggagaacagcttcttcttgaatgtcaattcccaagtaacaacagtgtgtcaggcacttgctaaggatcctaaattgcagcaaggctacaatgctatgggattctcccagggaggccaatttctgagggcagtggctcagagatgcccttcacctcccatgatcaatctgatctcggttgggggacaacatcaaggtgtttttggactccctcgatgcccaggagagagctctcacatctgtgacttcatccgaaaaacactgaatgctggggcgtactccaaagttgttcaggaacgcctcgtgcaagccgaatactggcatgaccccataaaggaggatgtgtatcgcaaccacagcatcttcttggcagatataaatcaggagcggggtatcaatgagtcctacaagaaaaacctgatggccctgaagaagtttgtgatggtgaaattcctcaatgattccattgtggaccctgtagattcggagtggtttggatttcacagaagtgggagtcgagctcgacttggtaa

SEQ ID NO: 736911 - DNA, 473 bp, Homo sapiens
ccggagtctcgcgcccgcggtcatgtgacacagcgaagatggcgtcgcccggcgtgcctgtggctcttggctgtggctctcctgccatggacctgcgcttctcgggcgctgcagcatctggacccgccggcgccgctgccgttggtgatctggcatgggatgggagacagctgttgcaatcccttaagcatgggtgctattaaaaaaatggtggagaagaaaatacctggaatttacgtcttatctttagagattgggaagaccctgatggaggacgtggagaacagcttcttcttgaatgtcaattcccaagtaacaacagtgtgtcaggcacttgctaaggatcctaaattgcagcaaggctacaatgctatgggattctcccagggaggccaatttctgaggacagagactaagagatggccttcacctgccatgagcaatgggacctagaaggaggcacaactcccggc

SEQ ID NO: 736912 - DNA, 2359 bp, Homo sapiens
ccggagtctcgcgcccgcggtcatgtgacacagcgaagatggcgtcgcccggcgtgcctgtggctcttggctgtggctctcctgccatggacctgcgcttctcgggcgctgcagcatctggacccgccggcgccgctgccgttggtgatctggcatgggatgggagacagctgttgcaatcccttaagcatgggtgctattaaaaaaatggtggagaagaaaatacctggaatttacgtcttatctttagagattgggaagaccctgatggaggacgtggagaacagcttcttcttgaatgtcaattcccaagtaacaacagtgtgtcaggcacttgctaaggatcctaaattgcagcaaggctacaatgctatgggattctcccagggaggccaatttctgagggcagtggctcagagatgcccttcacctcccatgatcaatctgatctcggttgggggacaacatcaaggtgtttttggactccctcgatgcccaggagagagctctcacatctgtgacttcatccgaaaaacactgaatgctggggcgtactccaaagttgttcaggaacgcctcgtgcaagccgaatactggcatgaccccataaaggaggatgtgtatcgcaaccacagcatcttcttggcagatataaatcaggagcggggtatcaatgagtcctacaagaaaaacctgatggccctgaagaagtttgtgatggtgaaattcctcaatgattccattgtggaccctgtagattcggagtggtttggattttacagaagtggccaagccaaggaaaccattcccttacaggagacctccctgtacacacaggaccgcctggggctaaaggaaatggacaatgcaggacagctagtgtttctggctacagaaggggaccatcttcagttgtctgaagaatggttttatgcccacatcataccattccttggatgaaacccgtatagttcacaatagagctcagggagcccctaactcttccaaaccacatgggagacagtttccttcatgcccaagcctgagctcagatccagcttgcaactaatccttctatcatctaacatgccctacttggaaagatctaagatctgaatcttatcctttgccatcttctgttaccatatggtgttgaatgcaagtttaattaccatggagattgttttacaaacttttgatgtggtcaagttcagttttagaaaagggagtctgttccagatcagggccagaactgtgcccaggcccaaaggagacaactaactaaagtagtgagatagattctaagggcaaacatttttccaagtcttgccatatttcaagcaaagaggtgcccaggcctgaggtactcacataaatgctttgttttgctggtgatttaaccagtgcttggaaaaatcttgcttggctatttctgcatcatttcttaaggctgccttcctctctgagtacgttgccctctgtgctatcaatcatcttatcatcaattattagacaaatcccactggcctacagtcttgcttctgcagcacccactttgtctcctcaggtagtgatgaattagttgctgtcacaaaaggagggaagtagcacccaaattaaattgcttaagagaggaaatgtacatcttgtataacttagggagcgaagaaaatgtaggcgcgaaagtgaaaagtgaggcagctagttcttcctattccattctcgaccaacctgccctttcttaatatgactagtggtcttgatgctagagtcaacttactctgttgctggctttagcagagaataggaggaaccatatgaaaaagatcaggctttctgacttccatccccaaaacacatttaccagcatactccaaactgtttctgatgtgttccatgagaaaaggattgtttgctcaaaaagcttggaaaatactacacactccctttctccttctggagatcaacccacattagagtgtctaaggactcctgagaattcctgttacagtaaacaaaactaacgtaatctaccatttcctacactatttgagcatggaaatcatagtccccactctgtgaaaacttaacgctttttggaagacatttctgtagcatgtcagtttggagaaatgatgagctacgccttgatgaaagaaccgtgttggtgctgctaagtttagccattatggtttttcctttctctctcttaagccttattcttcaactaaaagatgaggattaagagcaagaagttgggggggatgtgaaaataattttatgaggttgtctaaaataaagagtagtttcttaaaaaaaaaaagttgacgccgccggattttatgaagaagtattcgca

SEQ ID NO: 736913 - DNA, 2614 bp, Homo sapiens
  misc_feature (2335)..(2335): n is a, c, g, or t
  misc_feature (2348)..(2348): n is a, c, g, or t
  misc_feature (2350)..(2350): n is a, c, g, or t
ccggagtctcgcgcccgcggtcatgtgacacagcgaagatggcgtcgcccggcgtgcctgtggctcttggctgtggctctcctgccatggacctgcgcttctcgggcgctgcagcatctggacccgccggcgccgctgccgttggtgatctggcatgggatgggagacagctgttgcaatcccttaagcatgggtgctattaaaaaaatggtggagaagaaaatacctggaatttacgtcttatctttagagattgggaagaccctgatggaggacgtggagaacagcttcttcttgaatgtcaattcccaagtaacaacagtgtgtcaggcacttgctaaggatcctaaattgcagcaaggctacaatgctatgggattctcccagggaggccaatttctgagggcagtggctcagagatgcccttcacctcccatgatcaatctgatctcggttgggggacaacatcaaggtgtttttggactccctcgatgcccaggagagagctctcacatctgtgacttcatccgaaaaacactgaatgctggggcgtactccaaagttgttcaggaacgcctcgtgcaagccgaatactggcatgaccccataaaggaggatgtgtatcgcaaccacagcatcttcttggcagatataaatcaggagcggggtatcaatgagtcctacaagaaaaacctgatggccctgaagaagtttgtgatggtgaaattcctcaatgattccattgtggaccctgtagattcggagtggtttggattttacagaagtggccaagccaaggaaaccattcccttacaggagacctccctgtacacacaggaccgcctggggctaaaggaaatggacaatgcaggacagctagtgtttctggctacagaaggggaccatcttcagttgtctgaagaatggttttatgcccacatcataccattccttggatgaaacccgtatagttcacaatagagctcagggagcccctaactcttccaaaccacatgggagacagtttccttcatgcccaagcctgagctcagatccagcttgcaactaatccttctatcatctaacatgccctacttggaaagatctaagatctgaatcttatcctttgccatcttctgttaccatatggtgttgaatgcaagtttaattaccatggagattgttttacaaacttttgatgtggtcaagttcagttttagaaaagggagtctgttccagatcagggccagaactgtgcccaggcccaaaggagacaactaactaaagtagtgagatagattctaagggcaaacatttttccaagtcttgccatatttcaagcaaagaggtgcccaggcctgaggtactcacataaatgctttgttttgctggtgatttaaccagtgcttggaaaaatcttgcttggctatttctgcatcatttcttaaggctgccttcctctctgagtacgttgccctctgtgctatcaatcatcttatcatcaattattagacaaatcccactggcctacagtcttgcttctgcagcacccactttgtctcctcaggtagtgatgaattagttgctgtcacaaaaggagggaagtagcacccaaattaaattgcttaagagaggaaatgtacatcttgtataacttagggagcgaagaaaatgtaggcgcgaaagtgaaaagtgaggcagctagttcttcctattccattctcgaccaacctgccctttcttaatatgactagtggtcttgatgctagagtcaacttactctgttgctggctttagcagagaataggaggaaccatatgaaaaagatcaggctttctgacttccatccccaaaacacatttaccagcatactccaaactgtttctgatgtgttccatgagaaaaggattgtttgctcaaaaagcttggaaaatactacacactccctttctccttctggagatcaacccacattagagtgtctaaggactcctgagaattcctgttacagtaaacaaaactaacgtaatctaccatttcctacactatttgagcatggaaatcatagtccccactctgtgaaaacttaacgctttttggaagacatttctgtagcatgtcagtttggagaaatgatgagctacgccttgatgaaagaaccgtgttggtgctgctaagtttagccattatggtttttcctttctctctcttaagccttattcttcaactaaaagatgaggattaagagcaagaagttgggggggatgtgaaaataattttatgaggttgtctaaaataaagagtagtttcttaaaaaaaaaaaacaaaccacacnaacaaaaaaacananaaaaacagacggcacggaccaaaacaaagcaacaacaaccaacacaaaaagacacgaacccggaagagcacaaaacaacaagaaaaacaaaaaagaccagaaagaaagcataatatatatgcggggcaagagaccagccagaacagacagagaaaggaaaaaaaaagaaaagaaacgaaaaaaagggagaaaacaaaggagagaggaagacaggggagacacaagaaaaacaccaggagcatagcaaccccaaaccacgaagat

SEQ ID NO: 736914 - DNA, 2560 bp, Homo sapiens
  misc_feature (2281)..(2281): n is a, c, g, or t
  misc_feature (2294)..(2294): n is a, c, g, or t
  misc_feature (2296)..(2296): n is a, c, g, or t
ccggagtctcgcgcccgcggtcatgtgacacagcgaagatggcgtcgcccggcgtgcctgtggctcttggctgtggctctcctgccatggacctgcgcttctcgggcgctgcagcatctggacccgccggcgccgctgccgttggtgatctggcatgggatgggagacagctgttgcaatcccttaagcatgggtgctattaaaaaaatggtggagaagaaaatacctggaatttacgtcttatctttagagattgggaagaccctgatggaggacgtggagaacagcttcttcttgaatgtcaattcccaagtaacaacagtgtgtcaggcacttgctaaggatcctaaattgcagcaaggctacaatgctatgggattctcccagggaggccaatttctgagggcagtggctcagagatgcccttcacctcccatgatcaatctgatctcggttgggggacaacatcaaggtgtttttggactccctcgatgcccaggagagagctctcacatctgtgacttcatccgaaaaacactgaatgctggggcgtactccaaagttgttcaggaacgcctcgtgcaagccgaatactggcatgaccccataaaggaggatgtgtatcgcaaccacagcatcttcttggcagatataaatcaggagcggggtatcaatgagtcctacaagaaaaacctgatggccctgaagaagtttgtgatggtgaaattcctcaatgattccattgtggaccctgtagattcggagtggtttggattttacagaagtggccaagccaaggaaaccattcccttacaggagacctccctgtacacacaggaccgcctggggctaaaggaaatggacaatgcaggacagctagtgtttctggctacagaaggggaccatcttcagttgtctgaagaatggttttatgcccacatcataccattccttggatgaaacccgtatagttcacaatagagctcagggagcccctaactcttccaaaccacatgggagacagtttccttcatgcccaagcctgagctcagatccagcttgcaactaatccttctatcatctaacatgccctacttggaaagatctaagatctgaatcttatcctttgccatcttctgttaccatatggtgttgaatgcaagtttaattaccatggagattgttttacaaacttttgatgtggtcaagttcagttttagaaaagggagtctgttccagatcagggccagaactgtgcccaggcccaaaggagacaactaactaaagtagtgagatagattctaagggcaaacatttttccaagtcttgccatatttcaagcaaagaggtgcccaggcctgaggtactcacataaatgctttgttttgctggtgatttaaccagtgcttggaaaaatcttgcttggctatttctgcatcatttcttaaggctgccttcctctctgagtacgttgccctctgtgctatcaatcatcttatcatcaattattagacaaatcccactggcctacagtcttgcttctgcagcacccactttgtctcctcaggtagtgatgaattagttgctgtcacaaaaggagggaagtagcacccaaattaaattgcttaagagaggaaatgtacatcttgtataacttagggagcgaagaaaatgtaggcgcgaaagtgaaatatgactagtggtcttgatgctagagtcaacttactctgttgctggctttagcagagaataggaggaaccatatgaaaaagatcaggctttctgacttccatccccaaaacacatttaccagcatactccaaactgtttctgatgtgttccatgagaaaaggattgtttgctcaaaaagcttggaaaatactacacactccctttctccttctggagatcaacccacattagagtgtctaaggactcctgagaattcctgttacagtaaacaaaactaacgtaatctaccatttcctacactatttgagcatggaaatcatagtccccactctgtgaaaacttaacgctttttggaagacatttctgtagcatgtcagtttggagaaatgatgagctacgccttgatgaaagaaccgtgttggtgctgctaagtttagccattatggtttttcctttctctctcttaagccttattcttcaactaaaagatgaggattaagagcaagaagttgggggggatgtgaaaataattttatgaggttgtctaaaataaagagtagtttcttaaaaaaaaaaaacaaaccacacnaacaaaaaaacananaaaaacagacggcacggaccaaaacaaagcaacaacaaccaacacaaaaagacacgaacccggaagagcacaaaacaacaagaaaaacaaaaaagaccagaaagaaagcataatatatatgcggggcaagagaccagccagaacagacagagaaaggaaaaaaaaagaaaagaaacgaaaaaaagggagaaaacaaaggagagaggaagacaggggagacacaagaaaaacaccaggagcatagcaaccccaaaccacgaagat

SEQ ID NO: 736915 - DNA, 2533 bp, Homo sapiens
  misc_feature (2254)..(2254): n is a, c, g, or t
  misc_feature (2267)..(2267): n is a, c, g, or t
  misc_feature (2269)..(2269): n is a, c, g, or t
ccggagtctcgcgcccgcggtcatgtgacacagcgaagatggcgtcgcccggcgtgcctgtggctcttggctgtggctctcctgccatggacctgcgcttctcgggcgctgcagcatctggacccgccggcgccgctgccgttggtgatctggcatgggatgggagacagctgttgcaatcccttaagcatgggtgctattaaaaaaatggtggagaagaaaatacctggaatttacgtcttatctttagagattgggaagaccctgatggaggacgtggagaacagcttcttcttgaatgtcaattcccaagtaacaacagtgtgtcaggcacttgctaaggatcctaaattgcagcaaggctacaatgctatgggattctcccagggaggccaatttctgagggcagtggctcagagatgcccttcacctcccatgatcaatctgatctcggttgggggacaacatcaaggtgtttttggactccctcgatgcccaggagagagctctcacatctgtgacttcatccgaaaaacactgaatgctggggcgtactccaaagttgttcaggaacgcctcgtgcaagccgaatactggcatgaccccataaaggaggatgtgtatcgcaaccacagcatcttcttggcagatataaatcaggagcggggtatcaatgagtcctacaagaaaaacctgatggccctgaagaagtttgtgatggtgaaattcctcaatgattccattgtggaccctgtagattcggagtggtttggattttacagaagtggccaagccaaggaaaccattcccttacaggagacctccctgtacacacaggaccgcctggggctaaaggaaatggacaatgcaggacagctagtgtttctggctacagaaggggaccatcttcagttgtctgaagaatggttttatgcccacatcataccattccttggatgaaacccgtatagttcacaatagagctcagggagcccctaactcttccaaaccacatgggagacagtttccttcatgcccaagcctgagctcagatccagcttgcaactaatccttctatcatctaacatgccctacttggaaagatctaagatctgaatcttatcctttttcagttttagaaaagggagtctgttccagatcagggccagaactgtgcccaggcccaaaggagacaactaactaaagtagtgagatagattctaagggcaaacatttttccaagtcttgccatatttcaagcaaagaggtgcccaggcctgaggtactcacataaatgctttgttttgctggtgatttaaccagtgcttggaaaaatcttgcttggctatttctgcatcatttcttaaggctgccttcctctctgagtacgttgccctctgtgctatcaatcatcttatcatcaattattagacaaatcccactggcctacagtcttgcttctgcagcacccactttgtctcctcaggtagtgatgaattagttgctgtcacaaaaggagggaagtagcacccaaattaaattgcttaagagaggaaatgtacatcttgtataacttagggagcgaagaaaatgtaggcgcgaaagtgaaaagtgaggcagctagttcttcctattccattctcgaccaacctgccctttcttaatatgactagtggtcttgatgctagagtcaacttactctgttgctggctttagcagagaataggaggaaccatatgaaaaagatcaggctttctgacttccatccccaaaacacatttaccagcatactccaaactgtttctgatgtgttccatgagaaaaggattgtttgctcaaaaagcttggaaaatactacacactccctttctccttctggagatcaacccacattagagtgtctaaggactcctgagaattcctgttacagtaaacaaaactaacgtaatctaccatttcctacactatttgagcatggaaatcatagtccccactctgtgaaaacttaacgctttttggaagacatttctgtagcatgtcagtttggagaaatgatgagctacgccttgatgaaagaaccgtgttggtgctgctaagtttagccattatggtttttcctttctctctcttaagccttattcttcaactaaaagatgaggattaagagcaagaagttgggggggatgtgaaaataattttatgaggttgtctaaaataaagagtagtttcttaaaaaaaaaaaacaaaccacacnaacaaaaaaacananaaaaacagacggcacggaccaaaacaaagcaacaacaaccaacacaaaaagacacgaacccggaagagcacaaaacaacaagaaaaacaaaaaagaccagaaagaaagcataatatatatgcggggcaagagaccagccagaacagacagagaaaggaaaaaaaaagaaaagaaacgaaaaaaagggagaaaacaaaggagagaggaagacaggggagacacaagaaaaacaccaggagcatagcaaccccaaaccacgaagat

SEQ ID NO: 736916 - DNA, 2542 bp, Homo sapiens
  misc_feature (2263)..(2263): n is a, c, g, or t
  misc_feature (2276)..(2276): n is a, c, g, or t
  misc_feature (2278)..(2278): n is a, c, g, or t
ccggagtctcgcgcccgcggtcatgtgacacagcgaagatggcgtcgcccggcgtgcctgtggctcttggctgtggctctcctgccatggacctgcgcttctcgggcgctgcagcatctggacccgccggcgccgctgccgttggtgatctggcatgggatgggagacagctgttgcaatcccttaagcatgggtgctattaaaaaaatggtggagaagaaaatacctggaatttacgtcttatctttagagattgggaagaccctgatggaggacgtggagaacagcttcttcttgaatgtcaattcccaagtaacaacagtgtgtcaggcacttgctaaggatcctaaattgcagcaaggctacaatgctatgggattctcccagggaggccaatttctgagggcagtggctcagagatgcccttcacctcccatgatcaatctgatctcggttgggggacaacatcaaggtgtttttggactccctcgatgcccaggagagagctctcacatctgtgacttcatccgaaaaacactgaatgctggggcgtactccaaagttgttcaggaacgcctcgtgcaagccgaatactggcatgaccccataaaggaggatgtgtatcgcaaccacagcatcttcttggcagatataaatcaggagcggggtatcaatgagtcctacaagaaaaacctgatggccctgaagaagtttgtgatggtgaaattcctcaatgattccattgtggaccctgtagattcggaggaccgcctggggctaaaggaaatggacaatgcaggacagctagtgtttctggctacagaaggggaccatcttcagttgtctgaagaatggttttatgcccacatcataccattccttggatgaaacccgtatagttcacaatagagctcagggagcccctaactcttccaaaccacatgggagacagtttccttcatgcccaagcctgagctcagatccagcttgcaactaatccttctatcatctaacatgccctacttggaaagatctaagatctgaatcttatcctttgccatcttctgttaccatatggtgttgaatgcaagtttaattaccatggagattgttttacaaacttttgatgtggtcaagttcagttttagaaaagggagtctgttccagatcagggccagaactgtgcccaggcccaaaggagacaactaactaaagtagtgagatagattctaagggcaaacatttttccaagtcttgccatatttcaagcaaagaggtgcccaggcctgaggtactcacataaatgctttgttttgctggtgatttaaccagtgcttggaaaaatcttgcttggctatttctgcatcatttcttaaggctgccttcctctctgagtacgttgccctctgtgctatcaatcatcttatcatcaattattagacaaatcccactggcctacagtcttgcttctgcagcacccactttgtctcctcaggtagtgatgaattagttgctgtcacaaaaggagggaagtagcacccaaattaaattgcttaagagaggaaatgtacatcttgtataacttagggagcgaagaaaatgtaggcgcgaaagtgaaaagtgaggcagctagttcttcctattccattctcgaccaacctgccctttcttaatatgactagtggtcttgatgctagagtcaacttactctgttgctggctttagcagagaataggaggaaccatatgaaaaagatcaggctttctgacttccatccccaaaacacatttaccagcatactccaaactgtttctgatgtgttccatgagaaaaggattgtttgctcaaaaagcttggaaaatactacacactccctttctccttctggagatcaacccacattagagtgtctaaggactcctgagaattcctgttacagtaaacaaaactaacgtaatctaccatttcctacactatttgagcatggaaatcatagtccccactctgtgaaaacttaacgctttttggaagacatttctgtagcatgtcagtttggagaaatgatgagctacgccttgatgaaagaaccgtgttggtgctgctaagtttagccattatggtttttcctttctctctcttaagccttattcttcaactaaaagatgaggattaagagcaagaagttgggggggatgtgaaaataattttatgaggttgtctaaaataaagagtagtttcttaaaaaaaaaaaacaaaccacacnaacaaaaaaacananaaaaacagacggcacggaccaaaacaaagcaacaacaaccaacacaaaaagacacgaacccggaagagcacaaaacaacaagaaaaacaaaaaagaccagaaagaaagcataatatatatgcggggcaagagaccagccagaacagacagagaaaggaaaaaaaaagaaaagaaacgaaaaaaagggagaaaacaaaggagagaggaagacaggggagacacaagaaaaacaccaggagcatagcaaccccaaaccacgaagat

SEQ ID NO: 736917 - DNA, 2532 bp, Homo sapiens
  misc_feature (2253)..(2253): n is a, c, g, or t
  misc_feature (2266)..(2266): n is a, c, g, or t
  misc_feature (2268)..(2268): n is a, c, g, or t
ccggagtctcgcgcccgcggtcatgtgacacagcgaagatggcgtcgcccggcctgccgttggtgatctggcatgggatgggagacagctgttgcaatcccttaagcatgggtgctattaaaaaaatggtggagaagaaaatacctggaatttacgtcttatctttagagattgggaagaccctgatggaggacgtggagaacagcttcttcttgaatgtcaattcccaagtaacaacagtgtgtcaggcacttgctaaggatcctaaattgcagcaaggctacaatgctatgggattctcccagggaggccaatttctgagggcagtggctcagagatgcccttcacctcccatgatcaatctgatctcggttgggggacaacatcaaggtgtttttggactccctcgatgcccaggagagagctctcacatctgtgacttcatccgaaaaacactgaatgctggggcgtactccaaagttgttcaggaacgcctcgtgcaagccgaatactggcatgaccccataaaggaggatgtgtatcgcaaccacagcatcttcttggcagatataaatcaggagcggggtatcaatgagtcctacaagaaaaacctgatggccctgaagaagtttgtgatggtgaaattcctcaatgattccattgtggaccctgtagattcggagtggtttggattttacagaagtggccaagccaaggaaaccattcccttacaggagacctccctgtacacacaggaccgcctggggctaaaggaaatggacaatgcaggacagctagtgtttctggctacagaaggggaccatcttcagttgtctgaagaatggttttatgcccacatcataccattccttggatgaaacccgtatagttcacaatagagctcagggagcccctaactcttccaaaccacatgggagacagtttccttcatgcccaagcctgagctcagatccagcttgcaactaatccttctatcatctaacatgccctacttggaaagatctaagatctgaatcttatcctttgccatcttctgttaccatatggtgttgaatgcaagtttaattaccatggagattgttttacaaacttttgatgtggtcaagttcagttttagaaaagggagtctgttccagatcagggccagaactgtgcccaggcccaaaggagacaactaactaaagtagtgagatagattctaagggcaaacatttttccaagtcttgccatatttcaagcaaagaggtgcccaggcctgaggtactcacataaatgctttgttttgctggtgatttaaccagtgcttggaaaaatcttgcttggctatttctgcatcatttcttaaggctgccttcctctctgagtacgttgccctctgtgctatcaatcatcttatcatcaattattagacaaatcccactggcctacagtcttgcttctgcagcacccactttgtctcctcaggtagtgatgaattagttgctgtcacaaaaggagggaagtagcacccaaattaaattgcttaagagaggaaatgtacatcttgtataacttagggagcgaagaaaatgtaggcgcgaaagtgaaaagtgaggcagctagttcttcctattccattctcgaccaacctgccctttcttaatatgactagtggtcttgatgctagagtcaacttactctgttgctggctttagcagagaataggaggaaccatatgaaaaagatcaggctttctgacttccatccccaaaacacatttaccagcatactccaaactgtttctgatgtgttccatgagaaaaggattgtttgctcaaaaagcttggaaaatactacacactccctttctccttctggagatcaacccacattagagtgtctaaggactcctgagaattcctgttacagtaaacaaaactaacgtaatctaccatttcctacactatttgagcatggaaatcatagtccccactctgtgaaaacttaacgctttttggaagacatttctgtagcatgtcagtttggagaaatgatgagctacgccttgatgaaagaaccgtgttggtgctgctaagtttagccattatggtttttcctttctctctcttaagccttattcttcaactaaaagatgaggattaagagcaagaagttgggggggatgtgaaaataattttatgaggttgtctaaaataaagagtagtttcttaaaaaaaaaaaacaaaccacacnaacaaaaaaacananaaaaacagacggcacggaccaaaacaaagcaacaacaaccaacacaaaaagacacgaacccggaagagcacaaaacaacaagaaaaacaaaaaagaccagaaagaaagcataatatatatgcggggcaagagaccagccagaacagacagagaaaggaaaaaaaaagaaaagaaacgaaaaaaagggagaaaacaaaggagagaggaagacaggggagacacaagaaaaacaccaggagcatagcaaccccaaaccacgaagat

SEQ ID NO: 736918 - DNA, 2542 bp, Homo sapiens
  misc_feature (2263)..(2263): n is a, c, g, or t
  misc_feature (2276)..(2276): n is a, c, g, or t
  misc_feature (2278)..(2278): n is a, c, g, or t
ttgaagggttgctgactgatttcatagcatatactgttaaaatgctttgccttgtgttttcagcagcagatcatacagtgatactttcacccttgagtggctcatgtgaggataccaacctaaatgagtttacctcttagagaagatgtcagtggttgttttcagtcccatcctctcacttctctctggcttcttttttaggacgtggagaacagcttcttcttgaatgtcaattcccaagtaacaacagtgtgtcaggcacttgctaaggatcctaaattgcagcaaggctacaatgctatgggattctcccagggaggccaatttctgagggcagtggctcagagatgcccttcacctcccatgatcaatctgatctcggttgggggacaacatcaaggtgtttttggactccctcgatgcccaggagagagctctcacatctgtgacttcatccgaaaaacactgaatgctggggcgtactccaaagttgttcaggaacgcctcgtgcaagccgaatactggcatgaccccataaaggaggatgtgtatcgcaaccacagcatcttcttggcagatataaatcaggagcggggtatcaatgagtcctacaagaaaaacctgatggccctgaagaagtttgtgatggtgaaattcctcaatgattccattgtggaccctgtagattcggagtggtttggattttacagaagtggccaagccaaggaaaccattcccttacaggagacctccctgtacacacaggaccgcctggggctaaaggaaatggacaatgcaggacagctagtgtttctggctacagaaggggaccatcttcagttgtctgaagaatggttttatgcccacatcataccattccttggatgaaacccgtatagttcacaatagagctcagggagcccctaactcttccaaaccacatgggagacagtttccttcatgcccaagcctgagctcagatccagcttgcaactaatccttctatcatctaacatgccctacttggaaagatctaagatctgaatcttatcctttgccatcttctgttaccatatggtgttgaatgcaagtttaattaccatggagattgttttacaaacttttgatgtggtcaagttcagttttagaaaagggagtctgttccagatcagggccagaactgtgcccaggcccaaaggagacaactaactaaagtagtgagatagattctaagggcaaacatttttccaagtcttgccatatttcaagcaaagaggtgcccaggcctgaggtactcacataaatgctttgttttgctggtgatttaaccagtgcttggaaaaatcttgcttggctatttctgcatcatttcttaaggctgccttcctctctgagtacgttgccctctgtgctatcaatcatcttatcatcaattattagacaaatcccactggcctacagtcttgcttctgcagcacccactttgtctcctcaggtagtgatgaattagttgctgtcacaaaaggagggaagtagcacccaaattaaattgcttaagagaggaaatgtacatcttgtataacttagggagcgaagaaaatgtaggcgcgaaagtgaaaagtgaggcagctagttcttcctattccattctcgaccaacctgccctttcttaatatgactagtggtcttgatgctagagtcaacttactctgttgctggctttagcagagaataggaggaaccatatgaaaaagatcaggctttctgacttccatccccaaaacacatttaccagcatactccaaactgtttctgatgtgttccatgagaaaaggattgtttgctcaaaaagcttggaaaatactacacactccctttctccttctggagatcaacccacattagagtgtctaaggactcctgagaattcctgttacagtaaacaaaactaacgtaatctaccatttcctacactatttgagcatggaaatcatagtccccactctgtgaaaacttaacgctttttggaagacatttctgtagcatgtcagtttggagaaatgatgagctacgccttgatgaaagaaccgtgttggtgctgctaagtttagccattatggtttttcctttctctctcttaagccttattcttcaactaaaagatgaggattaagagcaagaagttgggggggatgtgaaaataattttatgaggttgtctaaaataaagagtagtttcttaaaaaaaaaaaacaaaccacacnaacaaaaaaacananaaaaacagacggcacggaccaaaacaaagcaacaacaaccaacacaaaaagacacgaacccggaagagcacaaaacaacaagaaaaacaaaaaagaccagaaagaaagcataatatatatgcggggcaagagaccagccagaacagacagagaaaggaaaaaaaaagaaaagaaacgaaaaaaagggagaaaacaaaggagagaggaagacaggggagacacaagaaaaacaccaggagcatagcaaccccaaaccacgaagat

SEQ ID NO: 736919 - DNA, 1704 bp, Homo sapiens
  misc_feature (35)..(35): n is a, c, g, or t
  misc_feature (1425)..(1425): n is a, c, g, or t
  misc_feature (1438)..(1438): n is a, c, g, or t
  misc_feature (1440)..(1440): n is a, c, g, or t
gtggggtcgtctagaggatcccatagcgacacgtnacattccttggatgaaacccgtatagttcacaatagagctcagggagcccctaactcttccaaaccacatgggagacagtttccttcatgcccaagcctgagctcagatccagcttgcaactaatccttctatcatctaacatgccctacttggaaagatctaagatctgaatcttatcctttgccatcttctgttaccatatggtgttgaatgcaagtttaattaccatggagattgttttacaaacttttgatgtggtcaagttcagttttagaaaagggagtctgttccagatcagggccagaactgtgcccaggcccaaaggagacaactaactaaagtagtgagatagattctaagggcaaacatttttccaagtcttgccatatttcaagcaaagaggtgcccaggcctgaggtactcacataaatgctttgttttgctggtgatttaaccagtgcttggaaaaatcttgcttggctatttctgcatcatttcttaaggctgccttcctctctgagtacgttgccctctgtgctatcaatcatcttatcatcaattattagacaaatcccactggcctacagtcttgcttctgcagcacccactttgtctcctcaggtagtgatgaattagttgctgtcacaaaaggagggaagtagcacccaaattaaattgcttaagagaggaaatgtacatcttgtataacttagggagcgaagaaaatgtaggcgcgaaagtgaaaagtgaggcagctagttcttcctattccattctcgaccaacctgccctttcttaatatgactagtggtcttgatgctagagtcaacttactctgttgctggctttagcagagaataggaggaaccatatgaaaaagatcaggctttctgacttccatccccaaaacacatttaccagcatactccaaactgtttctgatgtgttccatgagaaaaggattgtttgctcaaaaagcttggaaaatactacacactccctttctccttctggagatcaacccacattagagtgtctaaggactcctgagaattcctgttacagtaaacaaaactaacgtaatctaccatttcctacactatttgagcatggaaatcatagtccccactctgtgaaaacttaacgctttttggaagacatttctgtagcatgtcagtttggagaaatgatgagctacgccttgatgaaagaaccgtgttggtgctgctaagtttagccattatggtttttcctttctctctcttaagccttattcttcaactaaaagatgaggattaagagcaagaagttgggggggatgtgaaaataattttatgaggttgtctaaaataaagagtagtttcttaaaaaaaaaaaacaaaccacacnaacaaaaaaacananaaaaacagacggcacggaccaaaacaaagcaacaacaaccaacacaaaaagacacgaacccggaagagcacaaaacaacaagaaaaacaaaaaagaccagaaagaaagcataatatatatgcggggcaagagaccagccagaacagacagagaaaggaaaaaaaaagaaaagaaacgaaaaaaagggagaaaacaaaggagagaggaagacaggggagacacaagaaaaacaccaggagcatagcaaccccaaaccacgaagat

SEQ ID NO: 736920 - DNA, 1782 bp, Homo sapiens
  misc_feature (1503)..(1503): n is a, c, g, or t
  misc_feature (1516)..(1516): n is a, c, g, or t
  misc_feature (1518)..(1518): n is a, c, g, or t
agtccgacctccttgttctttgtgaaatggacaatgcaggacagctagtgtttctggctacagaaggggaccatcttcagttgtctgaagaatggttttatgcccacatcataccattccttggatgaaacccgtatagttcacaatagagctcagggagcccctaactcttccaaaccacatgggagacagtttccttcatgcccaagcctgagctcagatccagcttgcaactaatccttctatcatctaacatgccctacttggaaagatctaagatctgaatcttatcctttgccatcttctgttaccatatggtgttgaatgcaagtttaattaccatggagattgttttacaaacttttgatgtggtcaagttcagttttagaaaagggagtctgttccagatcagggccagaactgtgcccaggcccaaaggagacaactaactaaagtagtgagatagattctaagggcaaacatttttccaagtcttgccatatttcaagcaaagaggtgcccaggcctgaggtactcacataaatgctttgttttgctggtgatttaaccagtgcttggaaaaatcttgcttggctatttctgcatcatttcttaaggctgccttcctctctgagtacgttgccctctgtgctatcaatcatcttatcatcaattattagacaaatcccactggcctacagtcttgcttctgcagcacccactttgtctcctcaggtagtgatgaattagttgctgtcacaaaaggagggaagtagcacccaaattaaattgcttaagagaggaaatgtacatcttgtataacttagggagcgaagaaaatgtaggcgcgaaagtgaaaagtgaggcagctagttcttcctattccattctcgaccaacctgccctttcttaatatgactagtggtcttgatgctagagtcaacttactctgttgctggctttagcagagaataggaggaaccatatgaaaaagatcaggctttctgacttccatccccaaaacacatttaccagcatactccaaactgtttctgatgtgttccatgagaaaaggattgtttgctcaaaaagcttggaaaatactacacactccctttctccttctggagatcaacccacattagagtgtctaaggactcctgagaattcctgttacagtaaacaaaactaacgtaatctaccatttcctacactatttgagcatggaaatcatagtccccactctgtgaaaacttaacgctttttggaagacatttctgtagcatgtcagtttggagaaatgatgagctacgccttgatgaaagaaccgtgttggtgctgctaagtttagccattatggtttttcctttctctctcttaagccttattcttcaactaaaagatgaggattaagagcaagaagttgggggggatgtgaaaataattttatgaggttgtctaaaataaagagtagtttcttaaaaaaaaaaaacaaaccacacnaacaaaaaaacananaaaaacagacggcacggaccaaaacaaagcaacaacaaccaacacaaaaagacacgaacccggaagagcacaaaacaacaagaaaaacaaaaaagaccagaaagaaagcataatatatatgcggggcaagagaccagccagaacagacagagaaaggaaaaaaaaagaaaagaaacgaaaaaaagggagaaaacaaaggagagaggaagacaggggagacacaagaaaaacaccaggagcatagcaaccccaaaccacgaagat

SEQ ID NO: 736921 - DNA, 2623 bp, Homo sapiens
  misc_feature (53)..(54): n is a, c, g, or t
  misc_feature (57)..(57): n is a, c, g, or t
  misc_feature (2344)..(2344): n is a, c, g, or t
  misc_feature (2357)..(2357): n is a, c, g, or t
  misc_feature (2359)..(2359): n is a, c, g, or t
tcacaacacaccacaccacaccaacgaaaaaactacggctaggtagcgaggcnnggngttaggtgcctgtggctcttggctgtggctctcctgccatggacctgcgcttctcgggcgctgcagcatctggacccgccggcgccgctgccgttggtgatctggcatgggatgggagacagctgttgcaatcccttaagcatgggtgctattaaaaaaatggtggagaagaaaatacctggaatttacgtcttatctttagagattgggaagaccctgatggaggacgtggagaacagcttcttcttgaatgtcaattcccaagtaacaacagtgtgtcaggcacttgctaaggatcctaaattgcagcaaggctacaatgctatgggattctcccagggaggccaatttctgagggcagtggctcagagatgcccttcacctcccatgatcaatctgatctcggttgggggacaacatcaaggtgtttttggactccctcgatgcccaggagagagctctcacatctgtgacttcatccgaaaaacactgaatgctggggcgtactccaaagttgttcaggaacgcctcgtgcaagccgaatactggcatgaccccataaaggaggatgtgtatcgcaaccacagcatcttcttggcagatataaatcaggagcggggtatcaatgagtcctacaagaaaaacctgatggccctgaagaagtttgtgatggtgaaattcctcaatgattccattgtggaccctgtagattcggagtggtttggattttacagaagtggccaagccaaggaaaccattcccttacaggagacctccctgtacacacaggaccgcctggggctaaaggaaatggacaatgcaggacagctagtgtttctggctacagaaggggaccatcttcagttgtctgaagaatggttttatgcccacatcataccattccttggatgaaacccgtatagttcacaatagagctcagggagcccctaactcttccaaaccacatgggagacagtttccttcatgcccaagcctgagctcagatccagcttgcaactaatccttctatcatctaacatgccctacttggaaagatctaagatctgaatcttatcctttgccatcttctgttaccatatggtgttgaatgcaagtttaattaccatggagattgttttacaaacttttgatgtggtcaagttcagttttagaaaagggagtctgttccagatcagggccagaactgtgcccaggcccaaaggagacaactaactaaagtagtgagatagattctaagggcaaacatttttccaagtcttgccatatttcaagcaaagaggtgcccaggcctgaggtactcacataaatgctttgttttgctggtgatttaaccagtgcttggaaaaatcttgcttggctatttctgcatcatttcttaaggctgccttcctctctgagtacgttgccctctgtgctatcaatcatcttatcatcaattattagacaaatcccactggcctacagtcttgcttctgcagcacccactttgtctcctcaggtagtgatgaattagttgctgtcacaaaaggagggaagtagcacccaaattaaattgcttaagagaggaaatgtacatcttgtataacttagggagcgaagaaaatgtaggcgcgaaagtgaaaagtgaggcagctagttcttcctattccattctcgaccaacctgccctttcttaatatgactagtggtcttgatgctagagtcaacttactctgttgctggctttagcagagaataggaggaaccatatgaaaaagatcaggctttctgacttccatccccaaaacacatttaccagcatactccaaactgtttctgatgtgttccatgagaaaaggattgtttgctcaaaaagcttggaaaatactacacactccctttctccttctggagatcaacccacattagagtgtctaaggactcctgagaattcctgttacagtaaacaaaactaacgtaatctaccatttcctacactatttgagcatggaaatcatagtccccactctgtgaaaacttaacgctttttggaagacatttctgtagcatgtcagtttggagaaatgatgagctacgccttgatgaaagaaccgtgttggtgctgctaagtttagccattatggtttttcctttctctctcttaagccttattcttcaactaaaagatgaggattaagagcaagaagttgggggggatgtgaaaataattttatgaggttgtctaaaataaagagtagtttcttaaaaaaaaaaaacaaaccacacnaacaaaaaaacananaaaaacagacggcacggaccaaaacaaagcaacaacaaccaacacaaaaagacacgaacccggaagagcacaaaacaacaagaaaaacaaaaaagaccagaaagaaagcataatatatatgcggggcaagagaccagccagaacagacagagaaaggaaaaaaaaagaaaagaaacgaaaaaaagggagaaaacaaaggagagaggaagacaggggagacacaagaaaaacaccaggagcatagcaaccccaaaccacgaagat

SEQ ID NO: 736922 - DNA, 930 bp, Homo sapiens
  misc_feature (897)..(897): n is a, c, g, or t
tgaaactgaacattgttttttggggttctcgatgcctgggctcaagacaaaccaaaacctttgcaaaatgagggccctaatagaactctccgtaaagctggggccccaaagggtgacaccctctgtgaactaatagcaaatctgccctcctggcatcccatacaaaagttaaaccttgccacttactggactgaaaaaaaggtcttccttgagaactgagccaaccttcatgtgggtttttgtacatgagaatccaagaatttaagtggtcccactggtcccagaatgttggaagtctcaaacacttgatagaagaaaatgtagatcctacctggacaaagctttattcatatcagctctcaaagaattctccctgataaagtttcaagacatatgagaatcttagggcctactcagtgaccctggatggacaatgaccctcaaggatcatccccaaacatgacctgggccacttcatgatgtactgcctcaccgctgctgagtatgatgggcacagcacctgtccctccccacagtgcgactaggagtctggccccatgtaggacgatagcttgctgggaaatgagcatcaaaggaagggagcaatacattttgagccaagagctttaagttatttttaaaatagaaaagagaaacgaacaggttgcagaaaagctcatcagacacacaaggtaacagagcctcaggtgcaaaataaccaacatcgaaaatcacatggtagaaccagacttatgaagacttcagacatcagaattatcagccatggaatttaggtatgtttaaaaattacttaagaactaaaagatgtgaacataggagcagatttgcaaaagaaccaaaccagtattctggaaataaaaaatacagtagtctggnccccacccctggcatctccaatttccctttctg

SEQ ID NO: 736923 - DNA, 2386 bp, Homo sapiens
  misc_feature (2099)..(2099): n is a, c, g, or t
agcgggggaacggattctccggagccgaggtccgctcggatttgtcttcttagtgcttggatggtgtgagtgaaaacccagaggaatacatttggtggctgagctagtacaatgccatcaccggattccatgaccttcgaggatatcattgtagacttcactcaagaagagtgggccctgctggacacatcccagagaaagctgtttcaagatgtgatgttggagaacatcagtcatctggtctctattggagaagatttcactcaacatatagcattgactcaaaatgtgattacctacatgagaacgaaacactttgtaagcaaaaagtttgggaaaatcttcagtgactggttatcctttaatcaacacaaggaaattcacaccaaatgtaaatcatatggaagtcatctatttgattatgcctttatccaaaactctgcccttagaccacacagtgtgactcacactagagagataacattggaatgtcgtgtgtgtgggaaaacctttagcaaaaattctaatcttaggcgacatgagatgattcacactggagagaaaccacacggatgtcatctatgtgggaaagcctttactcattgctctgatcttcgaaaacatgagagaactcacactggagagaagccatatggatgtcatctatgtgggaaagccttcagtaaaagttctaaccttagacgacatgagatgattcacactagagaaaaagcacagatatgccatctatgtgggaaagccttcactcattgctctgaccttagaaaacatgagagaactcacttaggagataaaccatatggatgtctcctatgtgggaaggctttcagtaaatgttcttaccttagacaacatgaaagaactcacaatggagagaaaccatatgaatgtcatctatgtggaaaagccttctctcattgttctcaccttagacaacatgagcgaagtcacaatggagagaaaccacatggatgtcatctatgtgggaaagcattcactgaatcttctgtgcttaaacgacatgagagaattcacactggagagaaaccatatgagtgccatgtatgtgggaaagccttcactgaatcttctgacctcagacgacatgagagaactcacactggagaaaaaccatatgaatgccatctatgcggaaaagccttcaatcactcttctgtccttagacgacatgagagaactcacactggagagaaaccatatgaatgcaatatatgtggtaaagccttcaatagaagttacaactttagacttcatagaagagttcacactggagagaaaccatatgtatgtcctctatgtgggaaagcctttagtaaattttttaaccttagacaacatgagagaactcacactaaaaaagcaatgaatatgtaagaatcatcagctgtagcgttaacactaaatacaccaaggacaaacatactacaggaatattatgtctgtaatcagtgtggaaaagcctttatttatatttaccactttgctcaacctaaatgaattcaaggtagagagaatccagatgtatttaatgtttatggcacaaacttcagactctaggctgaccatatacaacgtgagagaatgaaactatagatcaaaggaatgtggaggagtcttcatccacagctctgttaaataaatgggagaaatcacatcacgaaaattctgtgcctgtcgtcagtgtgaaaatgcctttgctgataatttatcctctaaacaaatgagtaaaatccacaggcaagcaaccatatgtctgtaattgctgtgcactctcattcagctaagcaccaattttggtgtgtgcaagaaaattcattataaggtaactgataaaaacaggaaatatgtgaaaatattttttattaggtggatgaggcctcttgaacaattccagacattcatagtggagaagttattcaatgaaaactcatgagaaatccttttcttaatacagcagcacttctataatagatcagaattcacatggtgtagaactctcaatgacatgaatggagggtagtcctcagtaaattactcattccttagtcaataccagnatttttccagtgagaaaactatcttgacaggatagtggaaaaaccttcaggcagcttttatgtcaaaaaagtgagacagggatgaaaactctaaaaagccattgatgagatgtatagctgggggacaaaacataaagccatcaagcacgtgcttgagaaaaaaattataattttgaataaagactttctacttaaaatatgtgggttgaaatgtacaattctgaaataacctgggaatattgaatgcagaattatgtaagaagtaataagattaaattagtactgtc

SEQ ID NO: 736924 - DNA, 2596 bp, Homo sapiens
  misc_feature (2309)..(2309): n is a, c, g, or t
agcgggggaacggattctccggagccgaggtccgctcggatttgtcttcttagtgcttggatggtgtgagtgaaaacccagaggaatacatttggtggctgagctagtacaatgccatcaccggattccatgaccttcgaggatatcattgtagacttcactcaagaagagtgggccctgctggacacatcccagagaaagctgtttcaagatgtgatgttggagaacatcagtcatctggtctctattggcaaacagctctgcaaatcagttgtgctttcccaattggagcaagtagagaaactttcaacacaaagaataagcttactgcaaggtagagaagttggcattaaacatcaagagataccattcattcaacatatctatcagaagggcacgtccaccatcagcacaatgagatctcatactcaagaggatccttttctatgcaatgacttaggagaagatttcactcaacatatagcattgactcaaaatgtgattacctacatgagaacgaaacactttgtaagcaaaaagtttgggaaaatcttcagtgactggttatcctttaatcaacacaaggaaattcacaccaaatgtaaatcatatggaagtcatctatttgattatgcctttatccaaaactctgcccttagaccacacagtgtgactcacactagagagataacattggaatgtcgtgtgtgtgggaaaacctttagcaaaaattctaatcttaggcgacatgagatgattcacactggagagaaaccacacggatgtcatctatgtgggaaagcctttactcattgctctgatcttcgaaaacatgagagaactcacactggagagaagccatatggatgtcatctatgtgggaaagccttcagtaaaagttctaaccttagacgacatgagatgattcacactagagaaaaagcacagatatgccatctatgtgggaaagccttcactcattgctctgaccttagaaaacatgagagaactcacttaggagataaaccatatggatgtctcctatgtgggaaggctttcagtaaatgttcttaccttagacaacatgaaagaactcacaatggagagaaaccatatgaatgtcatctatgtggaaaagccttctctcattgttctcaccttagacaacatgagcgaagtcacaatggagagaaaccacatggatgtcatctatgtgggaaagcattcactgaatcttctgtgcttaaacgacatgagagaattcacactggagagaaaccatatgagtgccatgtatgtgggaaagccttcactgaatcttctgacctcagacgacatgagagaactcacactggagaaaaaccatatgaatgccatctatgcggaaaagccttcaatcactcttctgtccttagacgacatgagagaactcacactggagagaaaccatatgaatgcaatatatgtggtaaagccttcaatagaagttacaactttagacttcatagaagagttcacactggagagaaaccatatgtatgtcctctatgtgggaaagcctttagtaaattttttaaccttagacaacatgagagaactcacactaaaaaagcaatgaatatgtaagaatcatcagctgtagcgttaacactaaatacaccaaggacaaacatactacaggaatattatgtctgtaatcagtgtggaaaagcctttatttatatttaccactttgctcaacctaaatgaattcaaggtagagagaatccagatgtatttaatgtttatggcacaaacttcagactctaggctgaccatatacaacgtgagagaatgaaactatagatcaaaggaatgtggaggagtcttcatccacagctctgttaaataaatgggagaaatcacatcacgaaaattctgtgcctgtcgtcagtgtgaaaatgcctttgctgataatttatcctctaaacaaatgagtaaaatccacaggcaagcaaccatatgtctgtaattgctgtgcactctcattcagctaagcaccaattttggtgtgtgcaagaaaattcattataaggtaactgataaaaacaggaaatatgtgaaaatattttttattaggtggatgaggcctcttgaacaattccagacattcatagtggagaagttattcaatgaaaactcatgagaaatccttttcttaatacagcagcacttctataatagatcagaattcacatggtgtagaactctcaatgacatgaatggagggtagtcctcagtaaattactcattccttagtcaataccagnatttttccagtgagaaaactatcttgacaggatagtggaaaaaccttcaggcagcttttatgtcaaaaaagtgagacagggatgaaaactctaaaaagccattgatgagatgtatagctgggggacaaaacataaagccatcaagcacgtgcttgagaaaaaaattataattttgaataaagactttctacttaaaatatgtgggttgaaatgtacaattctgaaataacctgggaatattgaatgcagaattatgtaagaagtaataagattaaattagtactgtc

SEQ ID NO: 736925 - DNA, 1587 bp, Homo sapiens
agcgggggaacggattctccggagccgaggtccgctcggatttgtcttcttagtgcttggatggtgtgagtgaaaacccagaggaatacatttggtggctgagctagtacaatgccatcaccggattccatgaccttcgaggatatcattgtagacttcactcaagaagagtgggccctgctggacacatcccagagaaagctgtttcaagatgtgatgttggagaacatcagtcatctggtctctattggcaaacagctctgcaaatcagttgtgctttcccaattggagcaagtagagaaactttcaacacaaagaataagcttactgcaaggtagagaagttggcattaaacatcaagagataccattcattcaacatatctatcagaagggcacgtccaccatcagcacaatgagatctcatactcaagaggatccttttctatgcaatgacttaggagaagatttcactcaacatatagcattgactcaaaatgtgattacctacatgagaacgaaacactttgtaagcaaaaagtttgggaaaatcttcagtgactggttatcctttaatcaacacaaggaaattcacaccaaatgtaaatcatatggaagtcatctatttgattatgcctttatccaaaactctgcccttagaccacacagtgtgactcacactagagagataacattggaatgtcgtgtgtgtgggaaaacctttagcaaaaattctaatcttaggcgacatgagatgattcacactggagagaaaccacacggatgtcatctatgtgggaaagcctttactcattgctctgatcttcgaaaacatgagagaactcacactggagagaagccatatggatgtcatctatgtgggaaagccttcagtaaaagttctaaccttagacgacatgagatgattcacactagagaaaaagcacagatatgccatctatgtgggaaagccttcactcattgctctgaccttagaaaacatgagagaactcacttaggagataaaccatatggatgtctcctatgtgggaaggctttcagtaaatgttcttaccttagacaacatgaaagaactcacaatggagagaaaccatatgaatgtcatctatgtggaaaagccttctctcattgttctcaccttagacaacatgagcgaagtcacaatggagagaaaccacatggatgtcatctatgtgggaaagcattcactgaatcttctgtgcttaaacgacatgagagaattcacactggagagaaaccatatgagtgccatgtatgtgggaaagccttcactgaatcttctgacctcagacgacatgagagaactcacactggagaaaaaccatatgaatgccatctatgcggaaaagccttcaatcactcttctgtccttagacgacatgagagaactcacactggagagaaaccatatgaatgcaatatatgtggtaaagccttcaatagaagttacaactttagacttcatagaagagttcacactggagagaaaccaacacaggcaacatagtctgaaggtgtagaaatgacgggatcctctagatgcgac

SEQ ID NO: 736926 - DNA, 2009 bp, Homo sapiens
  misc_feature (1722)..(1722): n is a, c, g, or t
agcgggggaacggattctccggagccgaggtccgctcggatttgtcttcttagtgcttggatggtgtgagtgaaaacccagaggaatacatttggtggctgagctagtacaatgccatcaccggattccatgaccttcgaggatatcattgtagacttcactcaagaagagtgggccctgctggacacatcccagagaaagctgtttcaagatgtgatgttggagaacatcagtcatctggtctctattggcaaacagctctgcaaatcagttgtgctttcccaattggagcaagtagagaaactttcaacacaaagaataagcttactgcaaggtagagaagttggcattaaacatcaagagataccattcattcaacatatctatcagaagggcacgtccaccatcagcacaatgagatctcatactcaagaggatccttttctatgcaatgacttaggagaagatttcactcaacatatagcattgactcaaaatgtgattacctacatgagaacgaaacactttgtaagcaaaaagtttgggaaaatcttcagtgactggttatcctttaatcaacacaaggaaattcacaccaaatgtaaatcatatggaagtcatctatttgattatgcctttatccaaaactctgcccttagaccacacagtgtgactcacactagagagataacattggaatgtcgtgtgtgtgggaaaacctttagcaaaaattctaatcttaggcgacatgagatgattcacactggagagaaaccacacggatgtcatctatgtgggaaagcctttactcattgctctgatcttcgaaaacatgagagaactcacaactggagagaaaccatatgaatgcaatatatgtggtaaagccttcaatagaagttacaactttagacttcatagaagagttcacactggagagaaaccatatgtatgtcctctatgtgggaaagcctttagtaaattttttaaccttagacaacatgagagaactcacactaaaaaagcaatgaatatgtaagaatcatcagctgtagcgttaacactaaatacaccaaggacaaacatactacaggaatattatgtctgtaatcagtgtggaaaagcctttatttatatttaccactttgctcaacctaaatgaattcaaggtagagagaatccagatgtatttaatgtttatggcacaaacttcagactctaggctgaccatatacaacgtgagagaatgaaactatagatcaaaggaatgtggaggagtcttcatccacagctctgttaaataaatgggagaaatcacatcacgaaaattctgtgcctgtcgtcagtgtgaaaatgcctttgctgataatttatcctctaaacaaatgagtaaaatccacaggcaagcaaccatatgtctgtaattgctgtgcactctcattcagctaagcaccaattttggtgtgtgcaagaaaattcattataaggtaactgataaaaacaggaaatatgtgaaaatattttttattaggtggatgaggcctcttgaacaattccagacattcatagtggagaagttattcaatgaaaactcatgagaaatccttttcttaatacagcagcacttctataatagatcagaattcacatggtgtagaactctcaatgacatgaatggagggtagtcctcagtaaattactcattccttagtcaataccagnatttttccagtgagaaaactatcttgacaggatagtggaaaaaccttcaggcagcttttatgtcaaaaaagtgagacagggatgaaaactctaaaaagccattgatgagatgtatagctgggggacaaaacataaagccatcaagcacgtgcttgagaaaaaaattataattttgaataaagactttctacttaaaatatgtgggttgaaatgtacaattctgaaataacctgggaatattgaatgcagaattatgtaagaagtaataagattaaattagtactgtc

SEQ ID NO: 736927 - DNA, 1345 bp, Homo sapiens
ccccccccacacggtggggagtttctattggcccgggggatttgggaacccaagagccgtggttgggcccccccccccccccccgggccaaacccccaaacttttccccaaagaagagaagacaaaaaaaaaaaaagattgaacagctctttttcatttttgttttgttcattttatacatgacacaaattgtttatcttgctctcattgggagtttctgttgattccctctttcaatgatcatcaaaagtcatcacccctgacttaaatggttttatgaaattcaagaagttgtgaacaaggctttaacaaaatatttccacttttaatgcctatgctctgattttatataaattttgtatgtaggacatgatgttgaagtaaaaccaataaatagccactcagtattcatctctagcgtcaactgaatcctgacctcaatcttcaaaagaatcagaatagtttcacacttcataagttacatatactccagaataaataaaagcagtttgcttgaagtattatcttggctcatttgtgctgctataacaaaacacacttgagactgggttatttataaagaacagaaatttatttctctacagttctggaggctgggaagtccaagatcaagctgcaagcagattcggtgtctggtgagggctgctgtgtgctttcaaggtggtgccttattgctgtgtctttatatggcagaaggggccaacaatggagaaacagcagaatagcaagaagcagctgaatgctatgtgatgcttcttttataagggccttaaatcccattcatgaaagagaagccttcataatccaatcacctcctaaaggccctacctcttaatattgaagattaagtttcaacatgaattttggaggtacgtattcaaaccatagcaagcatacagtaatttccaatataaacctcactcaaaattacagtcacatgctgcacaaaccagttcaatgcacatatatgatgataagattataatacaatatttttgctatactttttctatgtttacatatacagatatcattgtgttacaattgcctttagtattcagtacagtaacatgctgtacaggtttgtagcctaggagcaatagatcatactttcaagcctaccatctagatttatataattacactctgtgatgttcgctcagtgatgaaatcacctgagaacacgtttctcagatcatatccctgttgttaagcaatgtgactgcaattgtgctctgctgccagtttatttttgaagctttatttttcaattacttactcatggcaattttataagaatcattaaacaaatttaatccagcta

SEQ ID NO: 736928 - DNA, 1869 bp, Homo sapiens
agaaaatgtgctttgcaaagcaaaaaaggcaaaaattggggatgagttcttcagacaagtaccaaaaatgatttctcgtcatttttaatgtatgcatattcatcatagaaaataattttttgttttattgggaataaaatcatgatacttaaaatctgatacacatttcaatgatcgtattaatccaataggttaaattaacaaattcttaggaaaaaaatctgtttatatgaagctatggagaaatctagaaagtaggtaatggtttagattttgagggacctatgaactcagaacaagttcatttagaggtgggaaacctgagattcaaagaggtctgcatggctgccaagattgcagggacagaatccaagcctgggctcactcatgatctgctctcctgtataaatgtcccatgtgcatctatgaccttattgtttgcaaagcaaattcatattccacgacttgtctgcttcttacaacaaactacaaggcaggcattgtgatttctaagtaagaaggaaaaattaagtagtcaagataatatttagaataaatatttttgaagatgatagttaaatagatggctcttcagactcctagctcaggctatttttccagccttcttttcccaaggaagagaagacaaaaaaaaaaaaagattgaacagctctttttcatttttgttttgttcattttatacatgacacaaattgtttatcttgctctcattgggagtttctgttgattccctctttcaatgatcatcaaaagtcatcacccctgacttaaatggttttatgaaattcaagaagttgtgaacaaggctttaacaaaatatttccacttttaatgcctatgctctgattttatataaattttgtatgtaggacatgatgttgaagtaaaaccaataaatagccactcagtattcatctctagcgtcaactgaatcctgacctcaatcttcaaaagaatcagaatagtttcacacttcataagttacatatactccagaataaataaaagcagtttgcttgaagtattatcttggctcatttgtgctgctataacaaaacacacttgagactgggttatttataaagaacagaaatttatttctctacagttctggaggctgggaagtccaagatcaagctgcaagcagattcggtgtctggtgagggctgctgtgtgctttcaaggtggtgccttattgctgtgtctttatatggcagaaggggccaacaatggagaaacagcagaatagcaagaagcagctgaatgctatgtgatgcttcttttataagggccttaaatcccattcatgaaagagaagccttcataatccaatcacctcctaaaggccctacctcttaatattgaagattaagtttcaacatgaattttggaggtacgtattcaaaccatagcaagcatacagtaatttccaatataaacctcactcaaaattacagtcacatgctgcacaaaccagttcaatgcacatatatgatgataagattataatacaatatttttgctatactttttctatgtttacatatacagatatcattgtgttacaattgcctttagtattcagtacagtaacatgctgtacaggtttgtagcctaggagcaatagatcatactttcaagcctaccatctagatttatataattacactctgtgatgttcgctcagtgatgaaatcacctgagaacacgtttctcagatcatatccctgttgttaagcaatgtgactgcaattgtgctctgctgccagtttatttttgaagctttatttttcaattacttactcatggcaattttataagaatcattaaacaaatttaatccagcta

SEQ ID NO: 736929 - DNA, 963 bp, Homo sapiens; identical to SEQ ID NO: 98089
  misc_feature (869)..(869): n is a, c, g, or t
  misc_feature (959)..(959): n is a, c, g, or t

SEQ ID NO: 736930 - DNA, 774 bp, Homo sapiens; identical to SEQ ID NO: 436366

SEQ ID NO: 736931 - DNA, 900 bp, Homo sapiens
gaccgttggtgtgcgtgttagctcgtgaaatatggaggatgtagattgggggtgcgggtgggctggggggtgggggaggtattccttggggaaatggtgcctcttacagtgtaaatttttcctcctttacctttgctaatatcatggcagaatttttcttatcccttgtgaggcagttgttgactgagtttttcatccttacaatcctgtcccatggtatttaacataaaaaaaaataaaactgttaacagattcttgctcgatagcttgtttgtgtctgtcgtgttattagagggaactccactatatatggtcacttgaaattatgatgcaaaggtttctcttgcattgaaaccctcttggatattacagtatttttaattgaaagtcctaattctgttaaggaaaggagttgattaaattttaaggtaccactggtattttgggagattataatcagtttgttttcaagataatagaaaataaggtccatgagaatagaagttatgtgatttcagtgagttgatgtgtacagcatggctgtgctccatctgatttaccccattcttaagttctgagagtatgttctcaaggaagatttaactctctttggttttaaattactttttaaccagcctaataaataagtcttactacttttcataatatttcataatagttaaaagtaggtgtttttttcgtgctcaatttggcactcaaaataatgttcattatggaagtttggtaatactgagcaagcctgtggaattttctttatgaaaaatgattttagcctttgcaaatgttaaccatgtgaaacacattttcagtataagtatgcgttacagggtttgatactttcctgcactccagcctaggcgacagagcaaaactgtctca

SEQ ID NO: 736932 - DNA, 6843 bp, Homo sapiens
acgtaggcacgcagaggccgtcacgtgggtcgccgaggctcgcaagtgcgcgtggccgtggcggctggtgtggggttgagtcagttgtgggacccggagctgctgacccagcgggtggcccaccgaaccggtgacacagcggcaggcgttagggctcgggagccgcgagcctggcctcgtcctagagctcggccgagccgtcgccgccgtcgtcccccgcccccagtcagcaaaccgccgccgcgggcgcgcccccgctctgcgctgtctctccgatggcgtccgcctcaggggccatggcgaagcacgagcagatcctggtcctcgatccgcccacagacctcaaattcaaaggccccttcacagatgtagtcactacaaatcttaaattgcgaaatccatcggatagaaaagtgtgtttcaaagtgaagactacagcacctcgccggtactgtgtgaggcccaacagtggaattattgacccagggtcaactgtgactgtttcagtaatgctacagccctttgactatgatccgaatgaaaagagtaaacacaagtttatggtacagacaatttttgctccaccaaacacttcagatatggaagctgtgtggaaagaggcaaaacctgatgaattaatggattccaaattgagatgcgtatttgaaatgcccaatgaaaatgataaattgaatgatatggaacctagcaaagctgttccactgaatgcatctaagcaagatggacctatgccaaaaccacacagtgtttcacttaatgataccgaaacaaggaaactaatggaagagtgtaaaagacttcagggagaaatgatgaagctatcagaagaaaatcggcacctgagagatgaaggtttaaggctcagaaaggtagcacattcggataaacctggatcaacctcaactgcatccttcagagataatgtcaccagtcctcttccttcacttcttgttgtaattgcagccattttcattggattctttctagggaaattcatcttgtagagtgaagcatgcagagtgctgtttctttttttttttttctcttgaccagaaaaagatttgtttacctaccatttcattggtagtatggcccacggtgaccatttttttgtgtgtacagcgtcatataggctttgcctttaatgatctcttacggttagaaaacacaataaaaacaaactgttcggctactggacaggttgtatattaccagatcatcactagcagatgtcagttgcacattgagtcctttatgaaattcataaataaagaattgttctttctttgtggttttaataagagttcaagaattgttcagagtcttgtaaatgttattttaataatccctttaaattttatctgttgctgttacctcttgaaatatgatttatttagattgctaatcccactcattcaggaaatgccaagaggtattccttggggaaatggtgcctcttacagtgtaaatttttcctcctttacctttgctaatatcatggcagaatttttcttatcccttgtgaggcagttgttgactgagtttttcatccttacaatcctgtcccatggtatttaacataaaaaaaaataaaactgttaacagattcttgctcgatagcttgtttgtgtctgtcgtgttattagagggaactccactatatatggtcacttgaaattatgatgcaaaggtttctcttgcattgaaaccctcttggatattacagtatttttaattgaaagtcctaattctgttaaggaaaggagttgattaaattttaaggtaccactggtattttgggagattataatcagtttgttttcaagataatagaaaataaggtccatgagaatagaagttatgtgatttcagtgagttgatgtgtacagcatggctgtgctccatctgatttaccccattcttaagttctgagagtatgttctcaaggaagatttaactctctttggttttaaattactttttaaccagcctaataaataagtcttactacttttcataatatttcataatagttaaaagtaggtgtttttttcgtgctcaatttggcactcaaaataatgttcattatggaagtttggtaatactgagcaagcctgtggaattttctttatgaaaaatgattttagcctttgcaaatgttaaccatgtgaaacacattttcagtataagtatgcgttacagggtttgatactttcctgcacttaggtttgtcctattcttcatttattcatactaggatagaaaattttggaatcagaaaatagatccagtgtttagctacatacaatctagtacaagtgaatttttattcttaaacataggtgtgttggctctttttttaaaagatgcgctctacctgaaaaggaaattggattttagaactggatgtggtgcagtgaagtattttaggcccaggtctgtgtacacattttatagaagaatgaagtactctgaagtattttggttgccttttcatttcaactgtgttttgaatttgtcagatcacacatatattgtgttattgggcgctgtggtatcttttataaaacctcttgcttgtgtgcaaaagttcctaaaaggaaacacaagtaatgcctatccattactagcatgctatgctgcatgctttactgccattgctgtatgctttactgtctttgtaaaaatccccctctccccttttctggtaactggaaaagcatgctaaaaatagtcttatattttcaccccataagtgcagaatcagtaattccttggcttaaagctcttatataatcaatattattggtggtaaataccaagtttggtatctcatagctatctttttttaaagaaattaagttcttgaaaatttagccaaatcccgttttatgggaatgctctttagaattcattttgttcagcccctttgttctatggttgagaaatctgaggccttacgaaggttaagagaactttccccgtgtctcacaggtaggtagaggcagagctggaactagatatctggtctgttgactctagctcagtgtcttctggtaactgttgaaaattgtcttagtttgagagatggctgaaataatgaacataaaatgctatttataataacaagtatatgtgaaatttcttattgtaagactactaccggcttactgttgaatagtttggttatagtgtttaggctagaaatgcctcccacattggtaataaacattacaaaatacaatgtatttttaggtaggcattttataaaatgcattatgccatggttgcttttgagatagattgtagtctgggtagcatctttaaaatgtatgtgggcttaactgttgttcatatcaggagatgctctgattgtataggtgagactctgtttctgttatttttaattgctgtatgaaatgtgatcagattattttactaccaacagttatagtttgaaagtccaactgtattaattgactgataatatgataatatagagattaaattgtttgtcttcattccttatatgtttagaagtttttgctttgtctgcctgcttacttgtatatgtaagcatgagggaaatacactgttgctaatactgaaattacaatcaagtaactaaggccttgagttcatatgtgacactgaatgcactagcttccttcgttctataactaatgtaccttaacttcccccattcttatatttacaagaagctaagtcattatgttctgagtgtgtggtatgttcccttaaaaaaaaatgacacttggaagaaaaatgtatgaaattcagaaattccgatcaaagaaaagtaattctttcttttttttttgagacagagtcttgctttgttgcccaggctggagggcagtggtgtgatctcacctcactgcagcttccgcctcctgggttcaagtgattctcatggctcagccgcctgagtagctgggattacaggtgtgagccaacaagcccggctaatttttgtatttttagtagagacaaggtttcaccatgttggtcaggctgggctcaaactcctgaatccgcctgcctcggcctcccaaagtgctgggattacaggtgtgagctgccgcacccagccaagaaaaataatactcttaaatacttagatgttcacctaaagttgatattatttggtatgggaattacttttgaactgtaatctttcagattacaccactttgaaaacaagttttaacagtagggtaaaaatatagtttttgagggtattcccaacttgtgatcttctaccactttagagacattcaagtaatagttttcttagagctttgcacattcctattcactgagattttaaaaatttcacctttattagagggaaggatcaatgcttattaccatttggaaaaacgaagatcagaaggtaaatgatctttattttctagctttaaagggaaattaaaccattcatgaataaactttaaaaatgtgaagtgtccttttccttttcacaatacaaaaaaaatttcaacagattgtgtggtttgtgcatttatatcctgttaagcattaatagctaatcactgggacttgaattctgatggcagatagtctcttgcttagtgagatggagttaactattttttagtaggaagtgagaacagctgattttcatgccacgtttcatagccccacttttggtagactaccaccacgcttcttcgcgtaacagttggcatcttgggaatgaatgcccagccgctcgtgggttggtgcaaagaagtataaacatatatcactaaggaaaaagaaagtttgtcttgcccttctgacacagtgtgtgcacttcaggcaatttttggaaaatataaaaaattccaaattctgcctttcagcagcatcaattgctaggaacatttcattcatttccctgtaatattaatgttctttaagcataatcactaattataagttgtatcctatttttttccagcttaatttctgtggtttattgaaaaccaagtataaatgtgactaaaagcattttgctttgtttttatagttaactttcttaaggttatggacattttataatgtaacatttgattggcctggcctcttgacaattcccttctagttatgcatatcctcctgttgccacatttcttgttttaaaactcagtttcttgttttccagttgttgctatgtataacacccatcttgaaagagagtatataggaagttattcagataacttttgtagtagtgatattcaactatagcagtaccttaactcatgatgagcttaggaacataaaagataattgttgcttgaatagcacccccagagatactgacctaattggtctggggtggagatctggcatggtagtttttttcaagctccaatcatcggccagacagttgctttatgtaggtttttaaatgccaaaggcagatatgaagtagatttaattaagacttgacttcagcaatacaggggaacttaaaatacttatttttctttaaactgcaggagtcactgttaggtattgcttaaaaaaaattgcataaaagctttgcttgtcaagttaggattgctggaataccactaaagatttttgacttgtgaataaatgagctgtcatcgcaaaaaggcgatttgagaaatgtgggcttcagtattaattgccattttgctgacacccagtgtacctacctacctgagaaatttattttgtccatcatgtatttctcaaagcaaaaggtggttttcaagtataatgtcgttttcaacatgcttattacttagttttacgtcagctcatttcatcatcattgataacttgtgaaatacttatctccatcctatggaataggggagacgggtttagacaggttcaattagctcaagtctacacagctgaagtagcagagaaagtgggatctagatggtctgatcctagtgatctaccatatgaaggacatagtttgtgtcctggtccaagtcaaatattgactcctcacaaacagtaagtatggcaattttgtgatgcctttgattccactttacatggagtactattatttgtgaaatgtctttaagatttttggtcttaaatttttgaagactgctttccccctttatctcccagaaaattgagaagaagtaaactcctgcccactaacaatctcagtccgtgaacaaaaccaacatgaacattcctaaacaagagtgtgtgttactctaagaagaaggctatagaatttatggaaatggcttatgtaacctacaagactggagaacagaatgtgactggccttttctaatggtcctttaagatttaatgattaaagcaagagttttttataattgactttgtggtctaaattcttgatactgtttataattctacaaagaacaaaaattgttacgtactataggcacttaagaaccctgaggaaaaataatacaatgtgtgtgtgtgagagagagagtgagttactgacattgttccaaaaaaaaaaaaaaaaaaaaaaaaatgtggagggttgaaatggtaaggaattggaatcttttgtattttcgagcaataagaattcctattcttgtttcaaatagaggtttgttaggaattacagttgtggggagcaaactttcttttttgtgctgttttaatccaaaatgtatatccttaattgtatataatatgtagataaatatatgagggtattaagctactttgaattaaatttaaggatatatttcacatgaaaacaaatacaaacttgagaatcaaaataaagttttgcaaagtatttctttg

SEQ ID NO: 736933 - DNA, 6452 bp, Homo sapiens
acgtaggcacgcagaggccgtcacgtgggtcgccgaggctcgcaagtgcgcgtggccgtggcggctggtgtggggttgagtcagttgtgggacccggagctgctgacccagcgggtggcccaccgaaccggtgacacagcggcaggcgttagggctcgggagccgcgagcctggcctcgtcctagagctcggccgagccgtcgccgccgtcgtcccccgcccccagtcagcaaaccgccgccgcgggcgcgcccccgctctgcgctgtctctccgatggcgtccgcctcaggggccatggcgaagcacgagcagatcctggtcctcgatccgcccacagacctcaaattcaaaggccccttcacagatgtagtcactacaaatcttaaattgcgaaatccatcggatagaaaagtgtgtttcaaagtgaagactacagcacctcgccggtactgtgtgaggcccaacagtggaattattgacccagggtcaactgtgactgtttcagtaatgctacagccctttgactatgatccgaatgaaaagagtaaacacaagtttatggtacagacaatttttgctccaccaaacacttcagatatggaagctgtgtggaaagaggcaaaacctgatgaattaatggattccaaattgagatgcgtatttgaaatgcccaatgaaaatgataaattgaatgatatggaacctagcaaagctgttccactgaatgcatctaagcaagatggacctatgccaaaaccacacagtgtttcacttaatgataccgaaacaaggaaactaatggaagagtgtaaaagacttcagggagaaatgatgaagctatcagaagaaaatcggcacctgagagatgaaggtttaaggctcagaaaggtagcacattcggataaacctggatcaacctcaactgcatccttcagagataatgtcaccagtcctcttccttcacttcttgttgtaattgcagccattttcattggattctttctagggaaattcatcttgtagagtgaagcatgcagagtgctgtttctttttttttttttctcttgaccagaaaaagatttgtttacctaccatttcattggtagtatggcccacggtgaccatttttttgtgtgtacagcgtcatataggctttgcctttaatgatctcttacggttagaaaacacaataaaaacaaactgttcggctactggacaggttgtatattaccagatcatcactagcagatgtcagttgcacattgagtcctttatgaaattcataaataaagaattgttctttctttgtggttttaataagagttcaagaattgttcagagtcttgtaaatgttattttaataatccctttaaattttatctgttgctgttacctcttgaaatatgatttatttagattgctaatcccactcattcaggaaatgccaagaggtattccttggggaaatggtgcctcttacagtgtaaatttttcctcctttacctttgctaatatcatggcagaatttttcttatcccttgtgaggcagttgttgactgagtttttcatccttacaatcctgtcccatggtatttaacataaaaaaaaataaaactgttaacagattcttgctcgatagcttgtttgtgtctgtcgtgttattagagggaactccactatatatggtcacttgaaattatgatgcaaaggtttctcttgcattgaaaccctcttggatattacagtatttttaattgaaagtcctaattctgttaaggaaaggagttgattaaattttaaggtaccactggtattttgggagattataatcagtttgttttcaagataatagaaaataaggtccatgagaatagaagttatgtgatttcagtgagttgatgtgtacagcatggctgtgctccatctgatttaccccattcttaagttctgagagtatgttctcaaggaagatttaactctctttggttttaaattactttttaaccagcctaataaataagtcttactacttttcataatatttcataatagttaaaagtaggtgtttttttcgtgctcaatttggcactcaaaataatgttcattatggaagtttggtaatactgagcaagcctgtggaattttctttatgaaaaatgattttagcctttgcaaatgttaaccatgtgaaacacattttcagtataagtatgcgttacagggtttgatactttcctgcacttaggtttgtcctattcttcatttattcatactaggatagaaaattttggaatcagaaaatagatccagtgtttagctacatacaatctagtacaagtgaatttttattcttaaacataggtgtgttggctctttttttaaaagatgcgctctacctgaaaaggaaattggattttagaactggatgtggtgcagtgaagtattttaggcccaggtctgtgtacacattttatagaagaatgaagtactctgaagtattttggttgccttttcatttcaactgtgttttgaatttgtcagatcacacatatattgtgttattgggcgctgtggtatcttttataaaacctcttgcttgtgtgcaaaagttcctaaaaggaaacacaagtaatgcctatccattactagcatgctatgctgcatgctttactgccattgctgtatgctttactgtctttgtaaaaatccccctctccccttttctggtaactggaaaagcatgctaaaaatagtcttatattttcaccccataagtgcagaatcagtaattccttggcttaaagctcttatataatcaatattattggtggtaaataccaagtttggtatctcatagctatctttttttaaagaaattaagttcttgaaaatttagccaaatcccgttttatgggaatgctctttagaattcattttgttcagcccctttgttctatggttgagaaatctgaggccttacgaaggttaagagaactttccccgtgtctcacaggtaggtagaggcagagctggaactagatatctggtctgttgactctagctcagtgtcttctggtaactgttgaaaattgtcttagtttgagagatggctgaaataatgaacataaaatgctatttataataacaagtatatgtgaaatttcttattgtaagactactaccggcttactgttgaatagtttggttatagtgtttaggctagaaatgcctcccacattggtaataaacattacaaaatacaatgtatttttaggtaggcattttataaaatgcattatgccatggttgcttttgagatagattgtagtctgggtagcatctttaaaatgtatgtgggcttaactgttgttcatatcaggagatgctctgattgtataggtgagactctgtttctgttatttttaattgctgtatgaaatgtgatcagattattttactaccaacagttatagtttgaaagtccaactgtattaattgactgataatatgataatatagagattaaattgtttgtcttcattccttatatgtttagaagtttttgctttgtctgcctgcttacttgtatatgtaagcatgagggaaatacactgttgctaatactgaaattacaatcaagtaactaaggccttgagttcatatgtgacactgaatgcactagcttccttcgttctataactaatgtaccttaacttcccccattcttatatttacaagaagctaagtcattatgttctgagtgtgtggtatgttcccttaaaaaaaaatgacacttggaagaaaaatgtatgaaattcagaaattccgatcaaagaaaagtaattctttcttttttttttgagacagagtcttgctttgttgcccaggctggagggcagtggtgtgatctcacctcactgcagcttccgcctcctgggttcaagtgattctcatggctcagccgcctgagtagctgggattacaggtgtgagccaacaagcccggctaatttttgtatttttagtagagacaaggtttcaccatgttggtcaggctgggctcaaactcctgaatccgcctgcctcggcctcccaaagtgctgggattacaggtgtgagctgccgcacccagccaagaaaaataatactcttaaatacttagatgttcacctaaagttgatattatttggtatgggaattacttttgaactgtaatctttcagattacaccactttgaaaacaagttttaacagtagggtaaaaatatagtttttgagggtattcccaacttgtgatcttctaccactttagagacattcaagtaatagttttcttagagctttgcacattcctattcactgagattttaaaaatttcacctttattagagggaaggatcaatgcttattaccatttggaaaaacgaagatcagaaggtaaatgatctttattttctagctttaaagggaaattaaaccattcatgaataaactttaaaaatgtgaagtgtccttttccttttcacaatacaaaaaaaatttcaacagattgtgtggtttgtgcatttatatcctgttaagcattaatagctaatcactgggacttgaattctgatggcagatagtctcttgcttagtgagatggagttaactattttttagtaggaagtgagaacagctgattttcatgccacgtttcatagccccacttttggtagactaccaccacgcttcttcgcgtaacagttggcatcttgggaatgaatgcccagccgctcgtgggttggtgcaaagaagtataaacatatatcactaaggaaaaagaaagtttgtcttgcccttctgacacagtgtgtgcacttcaggcaatttttggaaaatataaaaaattccaaattctgcctttcagcagcatcaattgctaggaacatttcattcatttccctgtaatattaatgttctttaagcataatcactaattataagttgtatcctatttttttccagcttaatttctgtggtttattgaaaaccaagtataaatgtgactaaaagcattttgctttgtttttatagttaactttcttaaggttatggacattttataatgtaacatttgattggcctggcctcttgacaattcccttctagttatgcatatcctcctgttgccacatttcttgttttaaaactcagtttcttgttttccagttgttgctatgtataacacccatcttgaaagagagtatataggaagttattcagataacttttgtagtagtgatattcaactatagcagtaccttaactcatgatgagcttaggaacataaaagataattgttgcttgaatagcacccccagagatactgacctaattggtctggggtggagatctggcatggtagtttttttcaagctccaatcatcggccagacagttgctttatgtaggtttttaaatgccaaaggcagatatgaagtagatttaattaagacttgacttcagcaatacaggggaacttaaaatacttatttttctttaaactgcaggagtcactgttaggtattgcttaaaaaaaattgcataaaagctttgcttgtcaagttaggattgctggaataccactaaagatttttgacttgtgaataaatgagctgtcatcgcaaaaaggcgatttgagaaatgtgggcttcagtattaattgccattttgctgacacccagtgtacctacctacctgagaaatttattttgtccatcatgtatttctcaaagcaaaaggtggttttcaagtataatgtcgttttcaacatgcttattacttagttttacgtcagctcatttcatcatcattgataacttgtgaaatacttatctccatcctatggaataggggagacgggtttagacaggttcaattagctcaagtctacacagctgaagtagcagagaaagtgggatctagatggtctgatcctagtgatctaccatatgaaggacatagtttgtgtcctggtccaagtcaaatattgactcctcacaaacagtaagtatggcaattttgtgatgcctttgattccactttacatggagtactattatttgtgaaatgtctttaagatttttggtcttaaatttttgaagactgctttccccctttatctcccagaaaattgagaagaagtaaactcctgcccactaacaatctcagtccgtgaacaaaaccaacatgaacattcctaaacaagagtgtgtgttactctaagaagaaggctatagaatttatggaaatggcttatgtaacctacaagactggagaacagaatgtgactggccttttctaatggtcctttaagatttaatgattaaagcaagagttttttataattgactttgtagaattataaacagtatcaagaatttagaccacaaagtcagtcgacgcggccg

SEQ ID NO: 736934 - DNA, 1708 bp, Homo sapiens
acgtaggcacgcagaggccgtcacgtgggtcgccgaggctcgcaagtgcgcgtggccgtggcggctggtgtggggttgagtcagttgtgggacccggagctgctgacccagcgggtggcccaccgaaccggtgacacagcggcaggcgttagggctcgggagccgcgagcctggcctcgtcctagagctcggccgagccgtcgccgccgtcgtcccccgcccccagtcagcaaaccgccgccgcgggcgcgcccccgctctgcgctgtctctccgatggcgtccgcctcaggggccatggcgaagcacgagcagatcctggtcctcgatccgcccacagacctcaaattcaaaggccccttcacagatgtagtcactacaaatcttaaattgcgaaatccatcggatagaaaagtgtgtttcaaagtgaagactacagcacctcgccggtactgtgtgaggcccaacagtggaattattgacccagggtcaactgtgactgtttcagtaatgctacagccctttgactatgatccgaatgaaaagagtaaacacaagtttatggtacagacaatttttgctccaccaaacacttcagatatggaagctgtgtggaaagaggcaaaacctgatgaattaatggattccaaattgagatgcgtatttgaaatgcccaatgaaaatgataaattgaatgatatggaacctagcaaagctgttccactgaatgcatctaagcaagatggacctatgccaaaaccacacagtgtttcacttaatgataccgaaacaaggaaactaatggaagagtgtaaaagacttcagggagaaatgatgaagctatcagaagaaaatcggcacctgagagatgaaggtttaaggctcagaaaggtagcacattcggataaacctggatcaacctcaactgcatccttcagagataatgtcaccagtcctcttccttcacttcttgttgtaattgcagccattttcattggattctttctagggaaattcatcttgtagagtgaagcatgcagagtgctgtttctttttttttttttctcttgaccagaaaaagatttgtttacctaccatttcattggtagtatggcccacggtgaccatttttttgtgtgtacagcgtcatataggctttgcctttaatgatctcttacggttagaaaacacaataaaaacaaactgttcggctactggacaggttgtatattaccagatcatcactagcagatgtcagttgcacattgagtcctttatgaaattcataaataaagaattgttctttctttgtggttttaataagagttcaagaattgttcagagtcttgtaaatgttattttaataatccctttaaattttatctgttgctgttacctcttgaaatatgatttatttagattgctaatcccactcattcaggaaatgccaagaggtattccttggggaaatggtgcctcttacagtgtaaatttttcctcctttacctttgctaatatcatggcagaatttttcttatcccttgtgaggcagttgttgactgagtttttcatccttacaatcctgtcccatggtatttaacataaaaaaaaataaaactgttaacagattcttgctcgataaaaaaaaaaaaaaaaaaaaaaaaaaacaaaaaaaaaaaaaaaaaaaaaaaaaaaaaaaaacaaaaaaa

SEQ ID NO: 736935 - DNA, 1663 bp, Homo sapiens
acgtaggcacgcagaggccgtcacgtgggtcgccgaggctcgcaagtgcgcgtggccgtggcggctggtgtggggttgagtcagttgtgggacccggagctgctgacccagcgggtggcccaccgaaccggtgacacagcggcaggcgttagggctcgggagccgcgagcctggcctcgtcctagagctcggccgagccgtcgccgccgtcgtcccccgcccccagtcagcaaaccgccgccgcgggcgcgcccccgctctgcgctgtctctccgatggcgtccgcctcaggggccatggcgaagcacgagcagatcctggtcctcgatccgcccacagacctcaaattcaaaggccccttcacagatgtagtcactacaaatcttaaattgcgaaatccatcggatagaaaagtgtgtttcaaagtgaagactacagcacctcgccggtactgtgtgaggcccaacagtggaattattgacccagggtcaactgtgactgtttcagtaatgctacagccctttgactatgatccgaatgaaaagagtaaacacaagtttatggtacagacaatttttgctccaccaaacacttcagatatggaagctgtgtggaaagaggcaaaacctgatgaattaatggattccaaattgagatgcgtatttgaaatgcccaatgaaaatgataaattgaatgatatggaacctagcaaagctgttccactgaatgcatctaagcaagatggacctatgccaaaaccacacagtgtttcacttaatgataccgaaacaaggaaactaatggaagagtgtaaaagacttcagggagaaatgatgaagctatcagaagaaaatcggcacctgagagatgaaggtttaaggctcagaaaggtagcacattcggataaacctggatcaacctcaactgcatccttcagagataatgtcaccagtcctcttccttcacttcttgttgtaattgcagccattttcattggattctttctagggaaattcatcttgtagagtgaagcatgcagagtgctgtttctttttttttttttctcttgaccagaaaaagatttgtttacctaccatttcattggtagtatggcccacggtgaccatttttttgtgtgtacagcgtcatataggctttgcctttaatgatctcttacggttagaaaacacaataaaaacaaactgttcggctactggacaggttgtatattaccagatcatcactagcagatgtcagttgcacattgagtcctttatgaaattcataaataaagaattgttctttctttgtggttttaataagagttcaagaattgttcagagtcttgtaaatgttattttaataatccctttaaattttatctgttgctgttacctcttgaaatatgatttatttagattgctaatcccactcattcaggaaatgccaagaggtattccttggggaaatggtgcctcttacagtgtaaatttttcctcctttacctttgctaatatcatggcagaatttttcttatcccttgtgaggcagttgttgactgagtttttcatccttacaatcctgtcccatggtatttaacataaaaaaaaataaaactgttaacagattcttgctcgataaaaacaaaaacacacaaaacaca

SEQ ID NO: 736936 - DNA, 1666 bp, Homo sapiens
acgtaggcacgcagaggccgtcacgtgggtcgccgaggctcgcaagtgcgcgtggccgtggcggctggtgtggggttgagtcagttgtgggacccggagctgctgacccagcgggtggcccaccgaaccggtgacacagcggcaggcgttagggctcgggagccgcgagcctggcctcgtcctagagctcggccgagccgtcgccgccgtcgtcccccgcccccagtcagcaaaccgccgccgcgggcgcgcccccgctctgcgctgtctctccgatggcgtccgcctcaggggccatggcgaagcacgagcagatcctggtcctcgatccgcccacagacctcaaattcaaaggccccttcacagatgtagtcactacaaatcttaaattgcgaaatccatcggatagaaaagtgtgtttcaaagtgaagactacagcacctcgccggtactgtgtgaggcccaacagtggaattattgacccagggtcaactgtgactgtttcagtaatgctacagccctttgactatgatccgaatgaaaagagtaaacacaagtttatggtacagacaatttttgctccaccaaacacttcagatatggaagctgtgtggaaagaggcaaaacctgatgaattaatggattccaaattgagatgcgtatttgaaatgcccaatgaaaatgataaattgaatgatatggaacctagcaaagctgttccactgaatgcatctaagcaagatggacctatgccaaaaccacacagtgtttcacttaatgataccgaaacaaggaaactaatggaagagtgtaaaagacttcagggagaaatgatgaagctatcagaagaaaatcggcacctgagagatgaaggtttaaggctcagaaaggtagcacattcggataaacctggatcaacctcaactgcatccttcagagataatgtcaccagtcctcttccttcacttcttgttgtaattgcagccattttcattggattctttctagggaaattcatcttgtagagtgaagcatgcagagtgctgtttctttttttttttttctcttgaccagaaaaagatttgtttacctaccatttcattggtagtatggcccacggtgaccatttttttgtgtgtacagcgtcatataggctttgcctttaatgatctcttacggttagaaaacacaataaaaacaaactgttcggctactggacaggttgtatattaccagatcatcactagcagatgtcagttgcacattgagtcctttatgaaattcataaataaagaattgttctttctttgtggttttaataagagttcaagaattgttcagagtcttgtaaatgttattttaataatccctttaaattttatctgttgctgttacctcttgaaatatgatttatttagattgctaatcccactcattcaggaaatgccaagaggtattccttggggaaatggtgcctcttacagtgtaaatttttcctcctttacctttgctaatatcatggcagaatttttcttatcccttgtgaggcagttgttgactgagtttttcatccttacaatcctgtcccatggtatttaacataaaaaaaaataaacagatgcggcagttctctttctccgtcccggtgatcaaggtgttgatttat

SEQ ID NO: 736937 - DNA, 1665 bp, Homo sapiens
  misc_feature (1634)..(1635): n is a, c, g, or t
acgtaggcacgcagaggccgtcacgtgggtcgccgaggctcgcaagtgcgcgtggccgtggcggctggtgtggggttgagtcagttgtgggacccggagctgctgacccagcgggtggcccaccgaaccggtgacacagcggcaggcgttagggctcgggagccgcgagcctggcctcgtcctagagctcggccgagccgtcgccgccgtcgtcccccgcccccagtcagcaaaccgccgccgcgggcgcgcccccgctctgcgctgtctctccgatggcgtccgcctcaggggccatggcgaagcacgagcagatcctggtcctcgatccgcccacagacctcaaattcaaaggccccttcacagatgtagtcactacaaatcttaaattgcgaaatccatcggatagaaaagtgtgtttcaaagtgaagactacagcacctcgccggtactgtgtgaggcccaacagtggaattattgacccagggtcaactgtgactgtttcagtaatgctacagccctttgactatgatccgaatgaaaagagtaaacacaagtttatggtacagacaatttttgctccaccaaacacttcagatatggaagctgtgtggaaagaggcaaaacctgatgaattaatggattccaaattgagatgcgtatttgaaatgcccaatgaaaatgataaattgaatgatatggaacctagcaaagctgttccactgaatgcatctaagcaagatggacctatgccaaaaccacacagtgtttcacttaatgataccgaaacaaggaaactaatggaagagtgtaaaagacttcagggagaaatgatgaagctatcagaagaaaatcggcacctgagagatgaaggtttaaggctcagaaaggtagcacattcggataaacctggatcaacctcaactgcatccttcagagataatgtcaccagtcctcttccttcacttcttgttgtaattgcagccattttcattggattctttctagggaaattcatcttgtagagtgaagcatgcagagtgctgtttctttttttttttttctcttgaccagaaaaagatttgtttacctaccatttcattggtagtatggcccacggtgaccatttttttgtgtgtacagcgtcatataggctttgcctttaatgatctcttacggttagaaaacacaataaaaacaaactgttcggctactggacaggttgtatattaccagatcatcactagcagatgtcagttgcacattgagtcctttatgaaattcataaataaagaattgttctttctttgtggttttaataagagttcaagaattgttcagagtcttgtaaatgttattttaataatccctttaaattttatctgttgctgttacctcttgaaatatgatttatttagattgctaatcccactcattcaggaaatgccaagaggtattccttggggaaatggtgcctcttacagtgtaaatttttcctcctttacctttgctaatatcatggcagaatttttcttatcccttgtgaggcagttgttgactgagtttttcatccttacaatcctgtcccatggtatttaacataaaaaaaaataaacagatgcggccgacttatnnacaacttacaacctaacactctattcatat

SEQ ID NO: 736938 - DNA, 1615 bp, Homo sapiens
acgtaggcacgcagaggccgtcacgtgggtcgccgaggctcgcaagtgcgcgtggccgtggcggctggtgtggggttgagtcagttgtgggacccggagctgctgacccagcgggtggcccaccgaaccggtgacacagcggcaggcgttagggctcgggagccgcgagcctggcctcgtcctagagctcggccgagccgtcgccgccgtcgtcccccgcccccagtcagcaaaccgccgccgcgggcgcgcccccgctctgcgctgtctctccgatggcgtccgcctcaggggccatggcgaagcacgagcagatcctggtcctcgatccgcccacagacctcaaattcaaaggccccttcacagatgtagtcactacaaatcttaaattgcgaaatccatcggatagaaaagtgtgtttcaaagtgaagactacagcacctcgccggtactgtgtgaggcccaacagtggaattattgacccagggtcaactgtgactgtttcagtaatgctacagccctttgactatgatccgaatgaaaagagtaaacacaagtttatggtacagacaatttttgctccaccaaacacttcagatatggaagctgtgtggaaagaggcaaaacctgatgaattaatggattccaaattgagatgcgtatttgaaatgcccaatgaaaatgataaattgaatgatatggaacctagcaaagctgttccactgaatgcatctaagcaagatggacctatgccaaaaccacacagtgtttcacttaatgataccgaaacaaggaaactaatggaagagtgtaaaagacttcagggagaaatgatgaagctatcagaagaaaatcggcacctgagagatgaaggtttaaggctcagaaaggtagcacattcggataaacctggatcaacctcaactgcatccttcagagataatgtcaccagtcctcttccttcacttcttgttgtaattgcagccattttcattggattctttctagggaaattcatcttgtagagtgaagcatgcagagtgctgtttctttttttttttttctcttgaccagaaaaagatttgtttacctaccatttcattggtagtatggcccacggtgaccatttttttgtgtgtacagcgtcatataggctttgcctttaatgatctcttacggttagaaaacacaataaaaacaaactgttcggctactggacaggttgtatattaccagatcatcactagcagatgtcagttgcacattgagtcctttatgaaattcataaataaagaattgttctttctttgtggttttaataagagttcaagaattgttcagagtcttgtaaatgttattttaataatccctttaaattttatctgttgctgttacctcttgaaatatgatttatttagattgctaatcccactcattcaggaaatgccaagaggtattccttggggaaatggtgcctcttacagtgtaaatttttcctcctttacctttgctaatatcatggcagaatttttcttatcccttgtgaggcagttgttgactgagtttttcatccttacgtaaccctgggttaacaacaaatatctcggttcctctc

SEQ ID NO: 736939 - DNA, 1659 bp, Homo sapiens; identical to SEQ ID NO: 436392

SEQ ID NO: 736940 - DNA, 1670 bp, Homo sapiens
acgtaggcacgcagaggccgtcacgtgggtcgccgaggctcgcaagtgcgcgtggccgtggcggctggtgtggggttgagtcagttgtgggacccggagctgctgacccagcgggtggcccaccgaaccggtgacacagcggcaggcgttagggctcgggagccgcgagcctggcctcgtcctagagctcggccgagccgtcgccgccgtcgtcccccgcccccagtcagcaaaccgccgccgcgggcgcgcccccgctctgcgctgtctctccgatggcgtccgcctcaggggccatggcgaagcacgagcagatcctggtcctcgatccgcccacagacctcaaattcaaaggccccttcacagatgtagtcactacaaatcttaaattgcgaaatccatcggatagaaaagtgtgtttcaaagtgaagactacagcacctcgccggtactgtgtgaggcccaacagtggaattattgacccagggtcaactgtgactgtttcagtaatgctacagccctttgactatgatccgaatgaaaagagtaaacacaagtttatggtacagacaatttttgctccaccaaacacttcagatatggaagctgtgtggaaagaggcaaaacctgatgaattaatggattccaaattgagatgcgtatttgaaatgcccaatgaaaatgataaattgaatgatatggaacctagcaaagctgttccactgaatgcatctaagcaagatggacctatgccaaaaccacacagtgtttcacttaatgataccgaaacaaggaaactaatggaagagtgtaaaagacttcagggagaaatgatgaagctatcagaagaaaatcggcacctgagagatgaaggtttaaggctcagaaaggtagcacattcggataaacctggatcaacctcaactgcatccttcagagataatgtcaccagtcctcttccttcacttcttgttgtaattgcagccattttcattggattctttctagggaaattcatcttgtagagtgaagcatgcagagtgctgtttctttttttttttttctcttgaccagaaaaagatttgtttacctaccatttcattggtagtatggcccacggtgaccatttttttgtgtgtacagcgtcatataggctttgcctttaatgatctcttacggttagaaaacacaataaaaacaaactgttcggctactggacaggttgtatattaccagatcatcactagcagatgtcagttgcacattgagtcctttatgaaattcataaataaagaattgttctttctttgtggttttaataagagttcaagaattgttcagagtcttgtaaatgttattttaataatccctttaaattttatctgttgctgttacctcttgaaatatgatttatttagattgctaatcccactcattcaggaaatgccaagaggtattccttggggaaatggtgcctcttacagtgtaaatttttcctccttaacttgaatacagcgaaatttctacccgtggaagactatgagggtttacctaaacggtctggttaataaaaaaaaaggggggcaaaacaagggaaaacgacacttgaagccagagaatataggcggtaagggaggtgttgaactggggaccaaacatagatgtgctaa

SEQ ID NO: 736941 - DNA, 1316 bp, Homo sapiens
acgtaggcacgcagaggccgtcacgtgggtcgccgaggctcgcaagtgcgcgtggccgtggcggctggtgtggggttgagtcagttgtgggacccggagctgctgacccagcgggtggcccaccgaaccggtgacacagcggcaggcgttagggctcgggagccgcgagcctggcctcgtcctagagctcggccgagccgtcgccgccgtcgtcccccgcccccagtcagcaaaccgccgccgcgggcgcgcccccgctctgcgctgtctctccgatggcgtccgcctcaggggccatggcgaagcacgagcagatcctggtcctcgatccgcccacagacctcaaattcaaaggccccttcacagatgtagtcactacaaatcttaaattgcgaaatccatcggatagaaaagtgtgtttcaaagtgaagactacagcacctcgccggtactgtgtgaggcccaacagtggaattattgacccagggtcaactgtgactgtttcagtaatgctacagccctttgactatgatccgaatgaaaagagtaaacacaagtttatggtacagacaatttttgctccaccaaacacttcagatatggaagctgtgtggaaagaggcaaaacctgatgaattaatggattccaaattgagatgcgtatttgaaatgcccaatgaaaatgataaattgaatgatatggaacctagcaaagctgttccactgaatgcatctaagcaagatggacctatgccaaaaccacacagtgtttcacttaatgataccgaaacaaggaaactaatggaagagtgtaaaagacttcagggagaaatgatgaagctatcagaagaaaatcggcacctgagagatgaaggtttaaggctcagaaaggtagcacattcggataaacctggatcaacctcaactgcatccttcagagataatgtcaccagtcctcttccttcacttcttgttgtaattgcagccattttcattggattctttctagggaaattcatcttgtagagtgaagcatgcagagtgctgtttctttttttttttttctcttgaccagaaaaagatttgtttacctaccatttcattggtagtatggcccacggtgaccatttttttgtgtgtacagcgtcatataggctttgcctttaatgatctcttacggttagaaaacacaataaaaacaaactgttcggctactggacaggttgtatattaccagatcatcatagagaggtgtgacatgagtcttttgattctaataagaagggttcggggggaaacaggccaatggcatgagtg

SEQ ID NO: 736942 - DNA, 865 bp, Homo sapiens
acgtaggcacgcagaggccgtcacgtgggtcgccgaggctcgcaagtgcgcgtggccgtggcggctggtgtggggttgagtcagttgtgggacccggagctgctgacccagcgggtggcccaccgaaccggtgacacagcggcaggcgttagggctcgggagccgcgagcctggcctcgtcctagagctcggccgagccgtcgccgccgtcgtcccccgcccccagtcagcaaaccgccgccgcgggcgcgcccccgctctgcgctgtctctccgatggcgtccgcctcaggggccatggcgaagcacgagcagatcctggtcctcgatccgcccacagacctcaaattcaaaggccccttcacagatgtagtcactacaaatcttaaattgcgaaatccatcggatagaaaagtgtgtttcaaagtgaagactacagcacctcgccggtactgtgtgaggcccaacagtggaattattgacccagggtcaactgtgactgtttcagtaatgctacagccctttgactatgatccgaatgaaaagagtaaacacaagtttatggtacagacaatttttgctccaccaaacacttcagatatggaagctgtgtggaaagaggcaaaacctgatgaattaatggattccaaattgagatgcgtatttgaaatgcccaatgaaaatgataaattgaatgatatggaacctagcaaagctgttccactgaatgcatctaagcaagatggacctatgccaaaaccacacagtgtttcacttaatgataccgaaacaaggaaactaatggaagagtgtaaaagacttcatcatttctccctgaagtcgagcggccgttaatttagtagtag

SEQ ID NO: 736943 - DNA, 760 bp, Homo sapiens
acgtaggcacgcagaggccgtcacgtgggtcgccgaggctcgcaagtgcgcgtggccgtggcggctggtgtggggttgagtcagttgtgggacccggagctgctgacccagcgggtggcccaccgaaccggtgacacagcggcaggcgttagggctcgggagccgcgagcctggcctcgtcctagagctcggccgagccgtcgccgccgtcgtcccccgcccccagtcagcaaaccgccgccgcgggcgcgcccccgctctgcgctgtctctccgatggcgtccgcctcaggggccatggcgaagcacgagcagatcctggtcctcgatccgcccacagacctcaaattcaaaggccccttcacagatgtagtcactacaaatcttaaattgcgaaatccatcggatagaaaagtgtgtttcaaagtgaagactacagcacctcgccggtactgtgtgaggcccaacagtggaattattgacccagggtcaactgtgactgtttcagtaatgctacagccctttgactatgatccgaatgaaaagagtaaacacaagtttatggtacagacaatttttgctccaccaaacacttcagatatggaagctgtgtggaaagaggcaaaacctgatgaattaatggattccaaattgagatgcgtatttgaaatgcccaatgaaaatgataaattgaatgatatggaacctagcaaagctgttccactgaatgcatctaattctctcggaccaatgggtaccgt

SEQ ID NO: 736944 - DNA, 6978 bp, Homo sapiens
acgtaggcacgcagaggccgtcacgtgggtcgccgaggctcgcaagtgcgcgtggccgtggcggctggtgtggggttgagtcagttgtgggacccggagctgctgacccagcgggtggcccaccgaaccggtgacacagcggcaggcgttagggctcgggagccgcgagcctggcctcgtcctagagctcggccgagccgtcgccgccgtcgtcccccgcccccagtcagcaaaccgccgccgcgggcgcgcccccgctctgcgctgtctctccgatggcgtccgcctcaggggccatggcgaagcacgagcagatcctggtcctcgatccgcccacagacctcaaattcaaaggccccttcacagatgtagtcactacaaatcttaaattgcgaaatccatcggatagaaaagtgtgtttcaaagtgaagactacagcacctcgccggtactgtgtgaggcccaacagtggaattattgacccagggtcaactgtgactgtttcagtaatgctacagccctttgactatgatccgaatgaaaagagtaaacacaagtttatggtacagacaatttttgctccaccaaacacttcagatatggaagctgtgtggaaagaggcaaaacctgatgaattaatggattccaaattgagatgcgtatttgaaatgcccaatgaaaatgataaattgggtataactccaccagggaatgctccgactgtcacttcaatgagcagcatcaacaacacagttgcaacacctgccagttatcacacgaaggatgaccccaggggactcagtgtgttgaaacaggagaaacagaagaatgatatggaacctagcaaagctgttccactgaatgcatctaagcaagatggacctatgccaaaaccacacagtgtttcacttaatgataccgaaacaaggaaactaatggaagagtgtaaaagacttcagggagaaatgatgaagctatcagaagaaaatcggcacctgagagatgaaggtttaaggctcagaaaggtagcacattcggataaacctggatcaacctcaactgcatccttcagagataatgtcaccagtcctcttccttcacttcttgttgtaattgcagccattttcattggattctttctagggaaattcatcttgtagagtgaagcatgcagagtgctgtttctttttttttttttctcttgaccagaaaaagatttgtttacctaccatttcattggtagtatggcccacggtgaccatttttttgtgtgtacagcgtcatataggctttgcctttaatgatctcttacggttagaaaacacaataaaaacaaactgttcggctactggacaggttgtatattaccagatcatcactagcagatgtcagttgcacattgagtcctttatgaaattcataaataaagaattgttctttctttgtggttttaataagagttcaagaattgttcagagtcttgtaaatgttattttaataatccctttaaattttatctgttgctgttacctcttgaaatatgatttatttagattgctaatcccactcattcaggaaatgccaagaggtattccttggggaaatggtgcctcttacagtgtaaatttttcctcctttacctttgctaatatcatggcagaatttttcttatcccttgtgaggcagttgttgactgagtttttcatccttacaatcctgtcccatggtatttaacataaaaaaaaataaaactgttaacagattcttgctcgatagcttgtttgtgtctgtcgtgttattagagggaactccactatatatggtcacttgaaattatgatgcaaaggtttctcttgcattgaaaccctcttggatattacagtatttttaattgaaagtcctaattctgttaaggaaaggagttgattaaattttaaggtaccactggtattttgggagattataatcagtttgttttcaagataatagaaaataaggtccatgagaatagaagttatgtgatttcagtgagttgatgtgtacagcatggctgtgctccatctgatttaccccattcttaagttctgagagtatgttctcaaggaagatttaactctctttggttttaaattactttttaaccagcctaataaataagtcttactacttttcataatatttcataatagttaaaagtaggtgtttttttcgtgctcaatttggcactcaaaataatgttcattatggaagtttggtaatactgagcaagcctgtggaattttctttatgaaaaatgattttagcctttgcaaatgttaaccatgtgaaacacattttcagtataagtatgcgttacagggtttgatactttcctgcacttaggtttgtcctattcttcatttattcatactaggatagaaaattttggaatcagaaaatagatccagtgtttagctacatacaatctagtacaagtgaatttttattcttaaacataggtgtgttggctctttttttaaaagatgcgctctacctgaaaaggaaattggattttagaactggatgtggtgcagtgaagtattttaggcccaggtctgtgtacacattttatagaagaatgaagtactctgaagtattttggttgccttttcatttcaactgtgttttgaatttgtcagatcacacatatattgtgttattgggcgctgtggtatcttttataaaacctcttgcttgtgtgcaaaagttcctaaaaggaaacacaagtaatgcctatccattactagcatgctatgctgcatgctttactgccattgctgtatgctttactgtctttgtaaaaatccccctctccccttttctggtaactggaaaagcatgctaaaaatagtcttatattttcaccccataagtgcagaatcagtaattccttggcttaaagctcttatataatcaatattattggtggtaaataccaagtttggtatctcatagctatctttttttaaagaaattaagttcttgaaaatttagccaaatcccgttttatgggaatgctctttagaattcattttgttcagcccctttgttctatggttgagaaatctgaggccttacgaaggttaagagaactttccccgtgtctcacaggtaggtagaggcagagctggaactagatatctggtctgttgactctagctcagtgtcttctggtaactgttgaaaattgtcttagtttgagagatggctgaaataatgaacataaaatgctatttataataacaagtatatgtgaaatttcttattgtaagactactaccggcttactgttgaatagtttggttatagtgtttaggctagaaatgcctcccacattggtaataaacattacaaaatacaatgtatttttaggtaggcattttataaaatgcattatgccatggttgcttttgagatagattgtagtctgggtagcatctttaaaatgtatgtgggcttaactgttgttcatatcaggagatgctctgattgtataggtgagactctgtttctgttatttttaattgctgtatgaaatgtgatcagattattttactaccaacagttatagtttgaaagtccaactgtattaattgactgataatatgataatatagagattaaattgtttgtcttcattccttatatgtttagaagtttttgctttgtctgcctgcttacttgtatatgtaagcatgagggaaatacactgttgctaatactgaaattacaatcaagtaactaaggccttgagttcatatgtgacactgaatgcactagcttccttcgttctataactaatgtaccttaacttcccccattcttatatttacaagaagctaagtcattatgttctgagtgtgtggtatgttcccttaaaaaaaaatgacacttggaagaaaaatgtatgaaattcagaaattccgatcaaagaaaagtaattctttcttttttttttgagacagagtcttgctttgttgcccaggctggagggcagtggtgtgatctcacctcactgcagcttccgcctcctgggttcaagtgattctcatggctcagccgcctgagtagctgggattacaggtgtgagccaacaagcccggctaatttttgtatttttagtagagacaaggtttcaccatgttggtcaggctgggctcaaactcctgaatccgcctgcctcggcctcccaaagtgctgggattacaggtgtgagctgccgcacccagccaagaaaaataatactcttaaatacttagatgttcacctaaagttgatattatttggtatgggaattacttttgaactgtaatctttcagattacaccactttgaaaacaagttttaacagtagggtaaaaatatagtttttgagggtattcccaacttgtgatcttctaccactttagagacattcaagtaatagttttcttagagctttgcacattcctattcactgagattttaaaaatttcacctttattagagggaaggatcaatgcttattaccatttggaaaaacgaagatcagaaggtaaatgatctttattttctagctttaaagggaaattaaaccattcatgaataaactttaaaaatgtgaagtgtccttttccttttcacaatacaaaaaaaatttcaacagattgtgtggtttgtgcatttatatcctgttaagcattaatagctaatcactgggacttgaattctgatggcagatagtctcttgcttagtgagatggagttaactattttttagtaggaagtgagaacagctgattttcatgccacgtttcatagccccacttttggtagactaccaccacgcttcttcgcgtaacagttggcatcttgggaatgaatgcccagccgctcgtgggttggtgcaaagaagtataaacatatatcactaaggaaaaagaaagtttgtcttgcccttctgacacagtgtgtgcacttcaggcaatttttggaaaatataaaaaattccaaattctgcctttcagcagcatcaattgctaggaacatttcattcatttccctgtaatattaatgttctttaagcataatcactaattataagttgtatcctatttttttccagcttaatttctgtggtttattgaaaaccaagtataaatgtgactaaaagcattttgctttgtttttatagttaactttcttaaggttatggacattttataatgtaacatttgattggcctggcctcttgacaattcccttctagttatgcatatcctcctgttgccacatttcttgttttaaaactcagtttcttgttttccagttgttgctatgtataacacccatcttgaaagagagtatataggaagttattcagataacttttgtagtagtgatattcaactatagcagtaccttaactcatgatgagcttaggaacataaaagataattgttgcttgaatagcacccccagagatactgacctaattggtctggggtggagatctggcatggtagtttttttcaagctccaatcatcggccagacagttgctttatgtaggtttttaaatgccaaaggcagatatgaagtagatttaattaagacttgacttcagcaatacaggggaacttaaaatacttatttttctttaaactgcaggagtcactgttaggtattgcttaaaaaaaattgcataaaagctttgcttgtcaagttaggattgctggaataccactaaagatttttgacttgtgaataaatgagctgtcatcgcaaaaaggcgatttgagaaatgtgggcttcagtattaattgccattttgctgacacccagtgtacctacctacctgagaaatttattttgtccatcatgtatttctcaaagcaaaaggtggttttcaagtataatgtcgttttcaacatgcttattacttagttttacgtcagctcatttcatcatcattgataacttgtgaaatacttatctccatcctatggaataggggagacgggtttagacaggttcaattagctcaagtctacacagctgaagtagcagagaaagtgggatctagatggtctgatcctagtgatctaccatatgaaggacatagtttgtgtcctggtccaagtcaaatattgactcctcacaaacagtaagtatggcaattttgtgatgcctttgattccactttacatggagtactattatttgtgaaatgtctttaagatttttggtcttaaatttttgaagactgctttccccctttatctcccagaaaattgagaagaagtaaactcctgcccactaacaatctcagtccgtgaacaaaaccaacatgaacattcctaaacaagagtgtgtgttactctaagaagaaggctatagaatttatggaaatggcttatgtaacctacaagactggagaacagaatgtgactggccttttctaatggtcctttaagatttaatgattaaagcaagagttttttataattgactttgtggtctaaattcttgatactgtttataattctacaaagaacaaaaattgttacgtactataggcacttaagaaccctgaggaaaaataatacaatgtgtgtgtgtgagagagagagtgagttactgacattgttccaaaaaaaaaaaaaaaaaaaaaaaaatgtggagggttgaaatggtaaggaattggaatcttttgtattttcgagcaataagaattcctattcttgtttcaaatagaggtttgttaggaattacagttgtggggagcaaactttcttttttgtgctgttttaatccaaaatgtatatccttaattgtatataatatgtagataaatatatgagggtattaagctactttgaattaaatttaaggatatatttcacatgaaaacaaatacaaacttgagaatcaaaataaagttttgcaaagtatttctttg

SEQ ID NO: 736945 - DNA, 6505 bp, Homo sapiens
acgtaggcacgcagaggccgtcacgtgggtcgccgaggctcgcaagtgcgcgtggccgtggcggctggtgtggggttgagtcagttgtgggacccggagctgctgacccagcgggtggcccaccgaaccggtgacacagcggcaggcgttagggctcgggagccgcgagcctggcctcgtcctagagctcggccgagccgtcgccgccgtcgtcccccgcccccagtcagcaaaccgccgccgcgggcgcgcccccgctctgcgctgtctctccgatggcgtccgcctcaggggccatggcgaagcacgagcagatcctggtcctcgatccgcccacagacctcaaattcaaagaatgatatggaacctagcaaagctgttccactgaatgcatctaagcaagatggacctatgccaaaaccacacagtgtttcacttaatgataccgaaacaaggaaactaatggaagagtgtaaaagacttcagggagaaatgatgaagctatcagaagaaaatcggcacctgagagatgaaggtttaaggctcagaaaggtagcacattcggataaacctggatcaacctcaactgcatccttcagagataatgtcaccagtcctcttccttcacttcttgttgtaattgcagccattttcattggattctttctagggaaattcatcttgtagagtgaagcatgcagagtgctgtttctttttttttttttctcttgaccagaaaaagatttgtttacctaccatttcattggtagtatggcccacggtgaccatttttttgtgtgtacagcgtcatataggctttgcctttaatgatctcttacggttagaaaacacaataaaaacaaactgttcggctactggacaggttgtatattaccagatcatcactagcagatgtcagttgcacattgagtcctttatgaaattcataaataaagaattgttctttctttgtggttttaataagagttcaagaattgttcagagtcttgtaaatgttattttaataatccctttaaattttatctgttgctgttacctcttgaaatatgatttatttagattgctaatcccactcattcaggaaatgccaagaggtattccttggggaaatggtgcctcttacagtgtaaatttttcctcctttacctttgctaatatcatggcagaatttttcttatcccttgtgaggcagttgttgactgagtttttcatccttacaatcctgtcccatggtatttaacataaaaaaaaataaaactgttaacagattcttgctcgatagcttgtttgtgtctgtcgtgttattagagggaactccactatatatggtcacttgaaattatgatgcaaaggtttctcttgcattgaaaccctcttggatattacagtatttttaattgaaagtcctaattctgttaaggaaaggagttgattaaattttaaggtaccactggtattttgggagattataatcagtttgttttcaagataatagaaaataaggtccatgagaatagaagttatgtgatttcagtgagttgatgtgtacagcatggctgtgctccatctgatttaccccattcttaagttctgagagtatgttctcaaggaagatttaactctctttggttttaaattactttttaaccagcctaataaataagtcttactacttttcataatatttcataatagttaaaagtaggtgtttttttcgtgctcaatttggcactcaaaataatgttcattatggaagtttggtaatactgagcaagcctgtggaattttctttatgaaaaatgattttagcctttgcaaatgttaaccatgtgaaacacattttcagtataagtatgcgttacagggtttgatactttcctgcacttaggtttgtcctattcttcatttattcatactaggatagaaaattttggaatcagaaaatagatccagtgtttagctacatacaatctagtacaagtgaatttttattcttaaacataggtgtgttggctctttttttaaaagatgcgctctacctgaaaaggaaattggattttagaactggatgtggtgcagtgaagtattttaggcccaggtctgtgtacacattttatagaagaatgaagtactctgaagtattttggttgccttttcatttcaactgtgttttgaatttgtcagatcacacatatattgtgttattgggcgctgtggtatcttttataaaacctcttgcttgtgtgcaaaagttcctaaaaggaaacacaagtaatgcctatccattactagcatgctatgctgcatgctttactgccattgctgtatgctttactgtctttgtaaaaatccccctctccccttttctggtaactggaaaagcatgctaaaaatagtcttatattttcaccccataagtgcagaatcagtaattccttggcttaaagctcttatataatcaatattattggtggtaaataccaagtttggtatctcatagctatctttttttaaagaaattaagttcttgaaaatttagccaaatcccgttttatgggaatgctctttagaattcattttgttcagcccctttgttctatggttgagaaatctgaggccttacgaaggttaagagaactttccccgtgtctcacaggtaggtagaggcagagctggaactagatatctggtctgttgactctagctcagtgtcttctggtaactgttgaaaattgtcttagtttgagagatggctgaaataatgaacataaaatgctatttataataacaagtatatgtgaaatttcttattgtaagactactaccggcttactgttgaatagtttggttatagtgtttaggctagaaatgcctcccacattggtaataaacattacaaaatacaatgtatttttaggtaggcattttataaaatgcattatgccatggttgcttttgagatagattgtagtctgggtagcatctttaaaatgtatgtgggcttaactgttgttcatatcaggagatgctctgattgtataggtgagactctgtttctgttatttttaattgctgtatgaaatgtgatcagattattttactaccaacagttatagtttgaaagtccaactgtattaattgactgataatatgataatatagagattaaattgtttgtcttcattccttatatgtttagaagtttttgctttgtctgcctgcttacttgtatatgtaagcatgagggaaatacactgttgctaatactgaaattacaatcaagtaactaaggccttgagttcatatgtgacactgaatgcactagcttccttcgttctataactaatgtaccttaacttcccccattcttatatttacaagaagctaagtcattatgttctgagtgtgtggtatgttcccttaaaaaaaaatgacacttggaagaaaaatgtatgaaattcagaaattccgatcaaagaaaagtaattctttcttttttttttgagacagagtcttgctttgttgcccaggctggagggcagtggtgtgatctcacctcactgcagcttccgcctcctgggttcaagtgattctcatggctcagccgcctgagtagctgggattacaggtgtgagccaacaagcccggctaatttttgtatttttagtagagacaaggtttcaccatgttggtcaggctgggctcaaactcctgaatccgcctgcctcggcctcccaaagtgctgggattacaggtgtgagctgccgcacccagccaagaaaaataatactcttaaatacttagatgttcacctaaagttgatattatttggtatgggaattacttttgaactgtaatctttcagattacaccactttgaaaacaagttttaacagtagggtaaaaatatagtttttgagggtattcccaacttgtgatcttctaccactttagagacattcaagtaatagttttcttagagctttgcacattcctattcactgagattttaaaaatttcacctttattagagggaaggatcaatgcttattaccatttggaaaaacgaagatcagaaggtaaatgatctttattttctagctttaaagggaaattaaaccattcatgaataaactttaaaaatgtgaagtgtccttttccttttcacaatacaaaaaaaatttcaacagattgtgtggtttgtgcatttatatcctgttaagcattaatagctaatcactgggacttgaattctgatggcagatagtctcttgcttagtgagatggagttaactattttttagtaggaagtgagaacagctgattttcatgccacgtttcatagccccacttttggtagactaccaccacgcttcttcgcgtaacagttggcatcttgggaatgaatgcccagccgctcgtgggttggtgcaaagaagtataaacatatatcactaaggaaaaagaaagtttgtcttgcccttctgacacagtgtgtgcacttcaggcaatttttggaaaatataaaaaattccaaattctgcctttcagcagcatcaattgctaggaacatttcattcatttccctgtaatattaatgttctttaagcataatcactaattataagttgtatcctatttttttccagcttaatttctgtggtttattgaaaaccaagtataaatgtgactaaaagcattttgctttgtttttatagttaactttcttaaggttatggacattttataatgtaacatttgattggcctggcctcttgacaattcccttctagttatgcatatcctcctgttgccacatttcttgttttaaaactcagtttcttgttttccagttgttgctatgtataacacccatcttgaaagagagtatataggaagttattcagataacttttgtagtagtgatattcaactatagcagtaccttaactcatgatgagcttaggaacataaaagataattgttgcttgaatagcacccccagagatactgacctaattggtctggggtggagatctggcatggtagtttttttcaagctccaatcatcggccagacagttgctttatgtaggtttttaaatgccaaaggcagatatgaagtagatttaattaagacttgacttcagcaatacaggggaacttaaaatacttatttttctttaaactgcaggagtcactgttaggtattgcttaaaaaaaattgcataaaagctttgcttgtcaagttaggattgctggaataccactaaagatttttgacttgtgaataaatgagctgtcatcgcaaaaaggcgatttgagaaatgtgggcttcagtattaattgccattttgctgacacccagtgtacctacctacctgagaaatttattttgtccatcatgtatttctcaaagcaaaaggtggttttcaagtataatgtcgttttcaacatgcttattacttagttttacgtcagctcatttcatcatcattgataacttgtgaaatacttatctccatcctatggaataggggagacgggtttagacaggttcaattagctcaagtctacacagctgaagtagcagagaaagtgggatctagatggtctgatcctagtgatctaccatatgaaggacatagtttgtgtcctggtccaagtcaaatattgactcctcacaaacagtaagtatggcaattttgtgatgcctttgattccactttacatggagtactattatttgtgaaatgtctttaagatttttggtcttaaatttttgaagactgctttccccctttatctcccagaaaattgagaagaagtaaactcctgcccactaacaatctcagtccgtgaacaaaaccaacatgaacattcctaaacaagagtgtgtgttactctaagaagaaggctatagaatttatggaaatggcttatgtaacctacaagactggagaacagaatgtgactggccttttctaatggtcctttaagatttaatgattaaagcaagagttttttataattgactttgtggtctaaattcttgatactgtttataattctacaaagaacaaaaattgttacgtactataggcacttaagaaccctgaggaaaaataatacaatgtgtgtgtgtgagagagagagtgagttactgacattgttccaaaaaaaaaaaaaaaaaaaaaaaaatgtggagggttgaaatggtaaggaattggaatcttttgtattttcgagcaataagaattcctattcttgtttcaaatagaggtttgttaggaattacagttgtggggagcaaactttcttttttgtgctgttttaatccaaaatgtatatccttaattgtatataatatgtagataaatatatgagggtattaagctactttgaattaaatttaaggatatatttcacatgaaaacaaatacaaacttgagaatcaaaataaagttttgcaaagtatttctttg

SEQ ID NO: 736946 - DNA, 6540 bp, Homo sapiens
agtgcgtttacaaatttctttgaatagaagtgtaagtgagctacttgttgggccccttcacagatgtagtcactacaaatcttaaattgcgaaatccatcggatagaaaagtgtgtttcaaagtgaagactacagcacctcgccggtactgtgtgaggcccaacagtggaattattgacccagggtcaactgtgactgtttcagtaatgctacagccctttgactatgatccgaatgaaaagagtaaacacaagtttatggtacagacaatttttgctccaccaaacacttcagatatggaagctgtgtggaaagaggcaaaacctgatgaattaatggattccaaattgagatgcgtatttgaaatgcccaatgaaaatgataaattgaatgatatggaacctagcaaagctgttccactgaatgcatctaagcaagatggacctatgccaaaaccacacagtgtttcacttaatgataccgaaacaaggaaactaatggaagagtgtaaaagacttcagggagaaatgatgaagctatcagaagaaaatcggcacctgagagatgaaggtttaaggctcagaaaggtagcacattcggataaacctggatcaacctcaactgcatccttcagagataatgtcaccagtcctcttccttcacttcttgttgtaattgcagccattttcattggattctttctagggaaattcatcttgtagagtgaagcatgcagagtgctgtttctttttttttttttctcttgaccagaaaaagatttgtttacctaccatttcattggtagtatggcccacggtgaccatttttttgtgtgtacagcgtcatataggctttgcctttaatgatctcttacggttagaaaacacaataaaaacaaactgttcggctactggacaggttgtatattaccagatcatcactagcagatgtcagttgcacattgagtcctttatgaaattcataaataaagaattgttctttctttgtggttttaataagagttcaagaattgttcagagtcttgtaaatgttattttaataatccctttaaattttatctgttgctgttacctcttgaaatatgatttatttagattgctaatcccactcattcaggaaatgccaagaggtattccttggggaaatggtgcctcttacagtgtaaatttttcctcctttacctttgctaatatcatggcagaatttttcttatcccttgtgaggcagttgttgactgagtttttcatccttacaatcctgtcccatggtatttaacataaaaaaaaataaaactgttaacagattcttgctcgatagcttgtttgtgtctgtcgtgttattagagggaactccactatatatggtcacttgaaattatgatgcaaaggtttctcttgcattgaaaccctcttggatattacagtatttttaattgaaagtcctaattctgttaaggaaaggagttgattaaattttaaggtaccactggtattttgggagattataatcagtttgttttcaagataatagaaaataaggtccatgagaatagaagttatgtgatttcagtgagttgatgtgtacagcatggctgtgctccatctgatttaccccattcttaagttctgagagtatgttctcaaggaagatttaactctctttggttttaaattactttttaaccagcctaataaataagtcttactacttttcataatatttcataatagttaaaagtaggtgtttttttcgtgctcaatttggcactcaaaataatgttcattatggaagtttggtaatactgagcaagcctgtggaattttctttatgaaaaatgattttagcctttgcaaatgttaaccatgtgaaacacattttcagtataagtatgcgttacagggtttgatactttcctgcacttaggtttgtcctattcttcatttattcatactaggatagaaaattttggaatcagaaaatagatccagtgtttagctacatacaatctagtacaagtgaatttttattcttaaacataggtgtgttggctctttttttaaaagatgcgctctacctgaaaaggaaattggattttagaactggatgtggtgcagtgaagtattttaggcccaggtctgtgtacacattttatagaagaatgaagtactctgaagtattttggttgccttttcatttcaactgtgttttgaatttgtcagatcacacatatattgtgttattgggcgctgtggtatcttttataaaacctcttgcttgtgtgcaaaagttcctaaaaggaaacacaagtaatgcctatccattactagcatgctatgctgcatgctttactgccattgctgtatgctttactgtctttgtaaaaatccccctctccccttttctggtaactggaaaagcatgctaaaaatagtcttatattttcaccccataagtgcagaatcagtaattccttggcttaaagctcttatataatcaatattattggtggtaaataccaagtttggtatctcatagctatctttttttaaagaaattaagttcttgaaaatttagccaaatcccgttttatgggaatgctctttagaattcattttgttcagcccctttgttctatggttgagaaatctgaggccttacgaaggttaagagaactttccccgtgtctcacaggtaggtagaggcagagctggaactagatatctggtctgttgactctagctcagtgtcttctggtaactgttgaaaattgtcttagtttgagagatggctgaaataatgaacataaaatgctatttataataacaagtatatgtgaaatttcttattgtaagactactaccggcttactgttgaatagtttggttatagtgtttaggctagaaatgcctcccacattggtaataaacattacaaaatacaatgtatttttaggtaggcattttataaaatgcattatgccatggttgcttttgagatagattgtagtctgggtagcatctttaaaatgtatgtgggcttaactgttgttcatatcaggagatgctctgattgtataggtgagactctgtttctgttatttttaattgctgtatgaaatgtgatcagattattttactaccaacagttatagtttgaaagtccaactgtattaattgactgataatatgataatatagagattaaattgtttgtcttcattccttatatgtttagaagtttttgctttgtctgcctgcttacttgtatatgtaagcatgagggaaatacactgttgctaatactgaaattacaatcaagtaactaaggccttgagttcatatgtgacactgaatgcactagcttccttcgttctataactaatgtaccttaacttcccccattcttatatttacaagaagctaagtcattatgttctgagtgtgtggtatgttcccttaaaaaaaaatgacacttggaagaaaaatgtatgaaattcagaaattccgatcaaagaaaagtaattctttcttttttttttgagacagagtcttgctttgttgcccaggctggagggcagtggtgtgatctcacctcactgcagcttccgcctcctgggttcaagtgattctcatggctcagccgcctgagtagctgggattacaggtgtgagccaacaagcccggctaatttttgtatttttagtagagacaaggtttcaccatgttggtcaggctgggctcaaactcctgaatccgcctgcctcggcctcccaaagtgctgggattacaggtgtgagctgccgcacccagccaagaaaaataatactcttaaatacttagatgttcacctaaagttgatattatttggtatgggaattacttttgaactgtaatctttcagattacaccactttgaaaacaagttttaacagtagggtaaaaatatagtttttgagggtattcccaacttgtgatcttctaccactttagagacattcaagtaatagttttcttagagctttgcacattcctattcactgagattttaaaaatttcacctttattagagggaaggatcaatgcttattaccatttggaaaaacgaagatcagaaggtaaatgatctttattttctagctttaaagggaaattaaaccattcatgaataaactttaaaaatgtgaagtgtccttttccttttcacaatacaaaaaaaatttcaacagattgtgtggtttgtgcatttatatcctgttaagcattaatagctaatcactgggacttgaattctgatggcagatagtctcttgcttagtgagatggagttaactattttttagtaggaagtgagaacagctgattttcatgccacgtttcatagccccacttttggtagactaccaccacgcttcttcgcgtaacagttggcatcttgggaatgaatgcccagccgctcgtgggttggtgcaaagaagtataaacatatatcactaaggaaaaagaaagtttgtcttgcccttctgacacagtgtgtgcacttcaggcaatttttggaaaatataaaaaattccaaattctgcctttcagcagcatcaattgctaggaacatttcattcatttccctgtaatattaatgttctttaagcataatcactaattataagttgtatcctatttttttccagcttaatttctgtggtttattgaaaaccaagtataaatgtgactaaaagcattttgctttgtttttatagttaactttcttaaggttatggacattttataatgtaacatttgattggcctggcctcttgacaattcccttctagttatgcatatcctcctgttgccacatttcttgttttaaaactcagtttcttgttttccagttgttgctatgtataacacccatcttgaaagagagtatataggaagttattcagataacttttgtagtagtgatattcaactatagcagtaccttaactcatgatgagcttaggaacataaaagataattgttgcttgaatagcacccccagagatactgacctaattggtctggggtggagatctggcatggtagtttttttcaagctccaatcatcggccagacagttgctttatgtaggtttttaaatgccaaaggcagatatgaagtagatttaattaagacttgacttcagcaatacaggggaacttaaaatacttatttttctttaaactgcaggagtcactgttaggtattgcttaaaaaaaattgcataaaagctttgcttgtcaagttaggattgctggaataccactaaagatttttgacttgtgaataaatgagctgtcatcgcaaaaaggcgatttgagaaatgtgggcttcagtattaattgccattttgctgacacccagtgtacctacctacctgagaaatttattttgtccatcatgtatttctcaaagcaaaaggtggttttcaagtataatgtcgttttcaacatgcttattacttagttttacgtcagctcatttcatcatcattgataacttgtgaaatacttatctccatcctatggaataggggagacgggtttagacaggttcaattagctcaagtctacacagctgaagtagcagagaaagtgggatctagatggtctgatcctagtgatctaccatatgaaggacatagtttgtgtcctggtccaagtcaaatattgactcctcacaaacagtaagtatggcaattttgtgatgcctttgattccactttacatggagtactattatttgtgaaatgtctttaagatttttggtcttaaatttttgaagactgctttccccctttatctcccagaaaattgagaagaagtaaactcctgcccactaacaatctcagtccgtgaacaaaaccaacatgaacattcctaaacaagagtgtgtgttactctaagaagaaggctatagaatttatggaaatggcttatgtaacctacaagactggagaacagaatgtgactggccttttctaatggtcctttaagatttaatgattaaagcaagagttttttataattgactttgtggtctaaattcttgatactgtttataattctacaaagaacaaaaattgttacgtactataggcacttaagaaccctgaggaaaaataatacaatgtgtgtgtgtgagagagagagtgagttactgacattgttccaaaaaaaaaaaaaaaaaaaaaaaaatgtggagggttgaaatggtaaggaattggaatcttttgtattttcgagcaataagaattcctattcttgtttcaaatagaggtttgttaggaattacagttgtggggagcaaactttcttttttgtgctgttttaatccaaaatgtatatccttaattgtatataatatgtagataaatatatgagggtattaagctactttgaattaaatttaaggatatatttcacatgaaaacaaatacaaacttgagaatcaaaataaagttttgcaaagtatttctttg

SEQ ID NO: 736947 - DNA, 6514 bp, Homo sapiens
tctctttaatttttaaactttacaggccccttcacagatgtagtcactacaaatcttaaattgcgaaatccatcggatagaaaagtgtgtttcaaagtgaagactacagcacctcgccggtactgtgtgaggcccaacagtggaattattgacccagggtcaactgtgactgtttcagtaatgctacagccctttgactatgatccgaatgaaaagagtaaacacaagtttatggtacagacaatttttgctccaccaaacacttcagatatggaagctgtgtggaaagaggcaaaacctgatgaattaatggattccaaattgagatgcgtatttgaaatgcccaatgaaaatgataaattgaatgatatggaacctagcaaagctgttccactgaatgcatctaagcaagatggacctatgccaaaaccacacagtgtttcacttaatgataccgaaacaaggaaactaatggaagagtgtaaaagacttcagggagaaatgatgaagctatcagaagaaaatcggcacctgagagatgaaggtttaaggctcagaaaggtagcacattcggataaacctggatcaacctcaactgcatccttcagagataatgtcaccagtcctcttccttcacttcttgttgtaattgcagccattttcattggattctttctagggaaattcatcttgtagagtgaagcatgcagagtgctgtttctttttttttttttctcttgaccagaaaaagatttgtttacctaccatttcattggtagtatggcccacggtgaccatttttttgtgtgtacagcgtcatataggctttgcctttaatgatctcttacggttagaaaacacaataaaaacaaactgttcggctactggacaggttgtatattaccagatcatcactagcagatgtcagttgcacattgagtcctttatgaaattcataaataaagaattgttctttctttgtggttttaataagagttcaagaattgttcagagtcttgtaaatgttattttaataatccctttaaattttatctgttgctgttacctcttgaaatatgatttatttagattgctaatcccactcattcaggaaatgccaagaggtattccttggggaaatggtgcctcttacagtgtaaatttttcctcctttacctttgctaatatcatggcagaatttttcttatcccttgtgaggcagttgttgactgagtttttcatccttacaatcctgtcccatggtatttaacataaaaaaaaataaaactgttaacagattcttgctcgatagcttgtttgtgtctgtcgtgttattagagggaactccactatatatggtcacttgaaattatgatgcaaaggtttctcttgcattgaaaccctcttggatattacagtatttttaattgaaagtcctaattctgttaaggaaaggagttgattaaattttaaggtaccactggtattttgggagattataatcagtttgttttcaagataatagaaaataaggtccatgagaatagaagttatgtgatttcagtgagttgatgtgtacagcatggctgtgctccatctgatttaccccattcttaagttctgagagtatgttctcaaggaagatttaactctctttggttttaaattactttttaaccagcctaataaataagtcttactacttttcataatatttcataatagttaaaagtaggtgtttttttcgtgctcaatttggcactcaaaataatgttcattatggaagtttggtaatactgagcaagcctgtggaattttctttatgaaaaatgattttagcctttgcaaatgttaaccatgtgaaacacattttcagtataagtatgcgttacagggtttgatactttcctgcacttaggtttgtcctattcttcatttattcatactaggatagaaaattttggaatcagaaaatagatccagtgtttagctacatacaatctagtacaagtgaatttttattcttaaacataggtgtgttggctctttttttaaaagatgcgctctacctgaaaaggaaattggattttagaactggatgtggtgcagtgaagtattttaggcccaggtctgtgtacacattttatagaagaatgaagtactctgaagtattttggttgccttttcatttcaactgtgttttgaatttgtcagatcacacatatattgtgttattgggcgctgtggtatcttttataaaacctcttgcttgtgtgcaaaagttcctaaaaggaaacacaagtaatgcctatccattactagcatgctatgctgcatgctttactgccattgctgtatgctttactgtctttgtaaaaatccccctctccccttttctggtaactggaaaagcatgctaaaaatagtcttatattttcaccccataagtgcagaatcagtaattccttggcttaaagctcttatataatcaatattattggtggtaaataccaagtttggtatctcatagctatctttttttaaagaaattaagttcttgaaaatttagccaaatcccgttttatgggaatgctctttagaattcattttgttcagcccctttgttctatggttgagaaatctgaggccttacgaaggttaagagaactttccccgtgtctcacaggtaggtagaggcagagctggaactagatatctggtctgttgactctagctcagtgtcttctggtaactgttgaaaattgtcttagtttgagagatggctgaaataatgaacataaaatgctatttataataacaagtatatgtgaaatttcttattgtaagactactaccggcttactgttgaatagtttggttatagtgtttaggctagaaatgcctcccacattggtaataaacattacaaaatacaatgtatttttaggtaggcattttataaaatgcattatgccatggttgcttttgagatagattgtagtctgggtagcatctttaaaatgtatgtgggcttaactgttgttcatatcaggagatgctctgattgtataggtgagactctgtttctgttatttttaattgctgtatgaaatgtgatcagattattttactaccaacagttatagtttgaaagtccaactgtattaattgactgataatatgataatatagagattaaattgtttgtcttcattccttatatgtttagaagtttttgctttgtctgcctgcttacttgtatatgtaagcatgagggaaatacactgttgctaatactgaaattacaatcaagtaactaaggccttgagttcatatgtgacactgaatgcactagcttccttcgttctataactaatgtaccttaacttcccccattcttatatttacaagaagctaagtcattatgttctgagtgtgtggtatgttcccttaaaaaaaaatgacacttggaagaaaaatgtatgaaattcagaaattccgatcaaagaaaagtaattctttcttttttttttgagacagagtcttgctttgttgcccaggctggagggcagtggtgtgatctcacctcactgcagcttccgcctcctgggttcaagtgattctcatggctcagccgcctgagtagctgggattacaggtgtgagccaacaagcccggctaatttttgtatttttagtagagacaaggtttcaccatgttggtcaggctgggctcaaactcctgaatccgcctgcctcggcctcccaaagtgctgggattacaggtgtgagctgccgcacccagccaagaaaaataatactcttaaatacttagatgttcacctaaagttgatattatttggtatgggaattacttttgaactgtaatctttcagattacaccactttgaaaacaagttttaacagtagggtaaaaatatagtttttgagggtattcccaacttgtgatcttctaccactttagagacattcaagtaatagttttcttagagctttgcacattcctattcactgagattttaaaaatttcacctttattagagggaaggatcaatgcttattaccatttggaaaaacgaagatcagaaggtaaatgatctttattttctagctttaaagggaaattaaaccattcatgaataaactttaaaaatgtgaagtgtccttttccttttcacaatacaaaaaaaatttcaacagattgtgtggtttgtgcatttatatcctgttaagcattaatagctaatcactgggacttgaattctgatggcagatagtctcttgcttagtgagatggagttaactattttttagtaggaagtgagaacagctgattttcatgccacgtttcatagccccacttttggtagactaccaccacgcttcttcgcgtaacagttggcatcttgggaatgaatgcccagccgctcgtgggttggtgcaaagaagtataaacatatatcactaaggaaaaagaaagtttgtcttgcccttctgacacagtgtgtgcacttcaggcaatttttggaaaatataaaaaattccaaattctgcctttcagcagcatcaattgctaggaacatttcattcatttccctgtaatattaatgttctttaagcataatcactaattataagttgtatcctatttttttccagcttaatttctgtggtttattgaaaaccaagtataaatgtgactaaaagcattttgctttgtttttatagttaactttcttaaggttatggacattttataatgtaacatttgattggcctggcctcttgacaattcccttctagttatgcatatcctcctgttgccacatttcttgttttaaaactcagtttcttgttttccagttgttgctatgtataacacccatcttgaaagagagtatataggaagttattcagataacttttgtagtagtgatattcaactatagcagtaccttaactcatgatgagcttaggaacataaaagataattgttgcttgaatagcacccccagagatactgacctaattggtctggggtggagatctggcatggtagtttttttcaagctccaatcatcggccagacagttgctttatgtaggtttttaaatgccaaaggcagatatgaagtagatttaattaagacttgacttcagcaatacaggggaacttaaaatacttatttttctttaaactgcaggagtcactgttaggtattgcttaaaaaaaattgcataaaagctttgcttgtcaagttaggattgctggaataccactaaagatttttgacttgtgaataaatgagctgtcatcgcaaaaaggcgatttgagaaatgtgggcttcagtattaattgccattttgctgacacccagtgtacctacctacctgagaaatttattttgtccatcatgtatttctcaaagcaaaaggtggttttcaagtataatgtcgttttcaacatgcttattacttagttttacgtcagctcatttcatcatcattgataacttgtgaaatacttatctccatcctatggaataggggagacgggtttagacaggttcaattagctcaagtctacacagctgaagtagcagagaaagtgggatctagatggtctgatcctagtgatctaccatatgaaggacatagtttgtgtcctggtccaagtcaaatattgactcctcacaaacagtaagtatggcaattttgtgatgcctttgattccactttacatggagtactattatttgtgaaatgtctttaagatttttggtcttaaatttttgaagactgctttccccctttatctcccagaaaattgagaagaagtaaactcctgcccactaacaatctcagtccgtgaacaaaaccaacatgaacattcctaaacaagagtgtgtgttactctaagaagaaggctatagaatttatggaaatggcttatgtaacctacaagactggagaacagaatgtgactggccttttctaatggtcctttaagatttaatgattaaagcaagagttttttataattgactttgtggtctaaattcttgatactgtttataattctacaaagaacaaaaattgttacgtactataggcacttaagaaccctgaggaaaaataatacaatgtgtgtgtgtgagagagagagtgagttactgacattgttccaaaaaaaaaaaaaaaaaaaaaaaaatgtggagggttgaaatggtaaggaattggaatcttttgtattttcgagcaataagaattcctattcttgtttcaaatagaggtttgttaggaattacagttgtggggagcaaactttcttttttgtgctgttttaatccaaaatgtatatccttaattgtatataatatgtagataaatatatgagggtattaagctactttgaattaaatttaaggatatatttcacatgaaaacaaatacaaacttgagaatcaaaataaagttttgcaaagtatttctttg

SEQ ID NO: 736948 - DNA, 6187 bp, Homo sapiens
gttagttaaaaaattcccaatatctttgtaatgcagaatgatatggaacctagcaaagctgttccactgaatgcatctaagcaagatggacctatgccaaaaccacacagtgtttcacttaatgataccgaaacaaggaaactaatggaagagtgtaaaagacttcagggagaaatgatgaagctatcagaagaaaatcggcacctgagagatgaaggtttaaggctcagaaaggtagcacattcggataaacctggatcaacctcaactgcatccttcagagataatgtcaccagtcctcttccttcacttcttgttgtaattgcagccattttcattggattctttctagggaaattcatcttgtagagtgaagcatgcagagtgctgtttctttttttttttttctcttgaccagaaaaagatttgtttacctaccatttcattggtagtatggcccacggtgaccatttttttgtgtgtacagcgtcatataggctttgcctttaatgatctcttacggttagaaaacacaataaaaacaaactgttcggctactggacaggttgtatattaccagatcatcactagcagatgtcagttgcacattgagtcctttatgaaattcataaataaagaattgttctttctttgtggttttaataagagttcaagaattgttcagagtcttgtaaatgttattttaataatccctttaaattttatctgttgctgttacctcttgaaatatgatttatttagattgctaatcccactcattcaggaaatgccaagaggtattccttggggaaatggtgcctcttacagtgtaaatttttcctcctttacctttgctaatatcatggcagaatttttcttatcccttgtgaggcagttgttgactgagtttttcatccttacaatcctgtcccatggtatttaacataaaaaaaaataaaactgttaacagattcttgctcgatagcttgtttgtgtctgtcgtgttattagagggaactccactatatatggtcacttgaaattatgatgcaaaggtttctcttgcattgaaaccctcttggatattacagtatttttaattgaaagtcctaattctgttaaggaaaggagttgattaaattttaaggtaccactggtattttgggagattataatcagtttgttttcaagataatagaaaataaggtccatgagaatagaagttatgtgatttcagtgagttgatgtgtacagcatggctgtgctccatctgatttaccccattcttaagttctgagagtatgttctcaaggaagatttaactctctttggttttaaattactttttaaccagcctaataaataagtcttactacttttcataatatttcataatagttaaaagtaggtgtttttttcgtgctcaatttggcactcaaaataatgttcattatggaagtttggtaatactgagcaagcctgtggaattttctttatgaaaaatgattttagcctttgcaaatgttaaccatgtgaaacacattttcagtataagtatgcgttacagggtttgatactttcctgcacttaggtttgtcctattcttcatttattcatactaggatagaaaattttggaatcagaaaatagatccagtgtttagctacatacaatctagtacaagtgaatttttattcttaaacataggtgtgttggctctttttttaaaagatgcgctctacctgaaaaggaaattggattttagaactggatgtggtgcagtgaagtattttaggcccaggtctgtgtacacattttatagaagaatgaagtactctgaagtattttggttgccttttcatttcaactgtgttttgaatttgtcagatcacacatatattgtgttattgggcgctgtggtatcttttataaaacctcttgcttgtgtgcaaaagttcctaaaaggaaacacaagtaatgcctatccattactagcatgctatgctgcatgctttactgccattgctgtatgctttactgtctttgtaaaaatccccctctccccttttctggtaactggaaaagcatgctaaaaatagtcttatattttcaccccataagtgcagaatcagtaattccttggcttaaagctcttatataatcaatattattggtggtaaataccaagtttggtatctcatagctatctttttttaaagaaattaagttcttgaaaatttagccaaatcccgttttatgggaatgctctttagaattcattttgttcagcccctttgttctatggttgagaaatctgaggccttacgaaggttaagagaactttccccgtgtctcacaggtaggtagaggcagagctggaactagatatctggtctgttgactctagctcagtgtcttctggtaactgttgaaaattgtcttagtttgagagatggctgaaataatgaacataaaatgctatttataataacaagtatatgtgaaatttcttattgtaagactactaccggcttactgttgaatagtttggttatagtgtttaggctagaaatgcctcccacattggtaataaacattacaaaatacaatgtatttttaggtaggcattttataaaatgcattatgccatggttgcttttgagatagattgtagtctgggtagcatctttaaaatgtatgtgggcttaactgttgttcatatcaggagatgctctgattgtataggtgagactctgtttctgttatttttaattgctgtatgaaatgtgatcagattattttactaccaacagttatagtttgaaagtccaactgtattaattgactgataatatgataatatagagattaaattgtttgtcttcattccttatatgtttagaagtttttgctttgtctgcctgcttacttgtatatgtaagcatgagggaaatacactgttgctaatactgaaattacaatcaagtaactaaggccttgagttcatatgtgacactgaatgcactagcttccttcgttctataactaatgtaccttaacttcccccattcttatatttacaagaagctaagtcattatgttctgagtgtgtggtatgttcccttaaaaaaaaatgacacttggaagaaaaatgtatgaaattcagaaattccgatcaaagaaaagtaattctttcttttttttttgagacagagtcttgctttgttgcccaggctggagggcagtggtgtgatctcacctcactgcagcttccgcctcctgggttcaagtgattctcatggctcagccgcctgagtagctgggattacaggtgtgagccaacaagcccggctaatttttgtatttttagtagagacaaggtttcaccatgttggtcaggctgggctcaaactcctgaatccgcctgcctcggcctcccaaagtgctgggattacaggtgtgagctgccgcacccagccaagaaaaataatactcttaaatacttagatgttcacctaaagttgatattatttggtatgggaattacttttgaactgtaatctttcagattacaccactttgaaaacaagttttaacagtagggtaaaaatatagtttttgagggtattcccaacttgtgatcttctaccactttagagacattcaagtaatagttttcttagagctttgcacattcctattcactgagattttaaaaatttcacctttattagagggaaggatcaatgcttattaccatttggaaaaacgaagatcagaaggtaaatgatctttattttctagctttaaagggaaattaaaccattcatgaataaactttaaaaatgtgaagtgtccttttccttttcacaatacaaaaaaaatttcaacagattgtgtggtttgtgcatttatatcctgttaagcattaatagctaatcactgggacttgaattctgatggcagatagtctcttgcttagtgagatggagttaactattttttagtaggaagtgagaacagctgattttcatgccacgtttcatagccccacttttggtagactaccaccacgcttcttcgcgtaacagttggcatcttgggaatgaatgcccagccgctcgtgggttggtgcaaagaagtataaacatatatcactaaggaaaaagaaagtttgtcttgcccttctgacacagtgtgtgcacttcaggcaatttttggaaaatataaaaaattccaaattctgcctttcagcagcatcaattgctaggaacatttcattcatttccctgtaatattaatgttctttaagcataatcactaattataagttgtatcctatttttttccagcttaatttctgtggtttattgaaaaccaagtataaatgtgactaaaagcattttgctttgtttttatagttaactttcttaaggttatggacattttataatgtaacatttgattggcctggcctcttgacaattcccttctagttatgcatatcctcctgttgccacatttcttgttttaaaactcagtttcttgttttccagttgttgctatgtataacacccatcttgaaagagagtatataggaagttattcagataacttttgtagtagtgatattcaactatagcagtaccttaactcatgatgagcttaggaacataaaagataattgttgcttgaatagcacccccagagatactgacctaattggtctggggtggagatctggcatggtagtttttttcaagctccaatcatcggccagacagttgctttatgtaggtttttaaatgccaaaggcagatatgaagtagatttaattaagacttgacttcagcaatacaggggaacttaaaatacttatttttctttaaactgcaggagtcactgttaggtattgcttaaaaaaaattgcataaaagctttgcttgtcaagttaggattgctggaataccactaaagatttttgacttgtgaataaatgagctgtcatcgcaaaaaggcgatttgagaaatgtgggcttcagtattaattgccattttgctgacacccagtgtacctacctacctgagaaatttattttgtccatcatgtatttctcaaagcaaaaggtggttttcaagtataatgtcgttttcaacatgcttattacttagttttacgtcagctcatttcatcatcattgataacttgtgaaatacttatctccatcctatggaataggggagacgggtttagacaggttcaattagctcaagtctacacagctgaagtagcagagaaagtgggatctagatggtctgatcctagtgatctaccatatgaaggacatagtttgtgtcctggtccaagtcaaatattgactcctcacaaacagtaagtatggcaattttgtgatgcctttgattccactttacatggagtactattatttgtgaaatgtctttaagatttttggtcttaaatttttgaagactgctttccccctttatctcccagaaaattgagaagaagtaaactcctgcccactaacaatctcagtccgtgaacaaaaccaacatgaacattcctaaacaagagtgtgtgttactctaagaagaaggctatagaatttatggaaatggcttatgtaacctacaagactggagaacagaatgtgactggccttttctaatggtcctttaagatttaatgattaaagcaagagttttttataattgactttgtggtctaaattcttgatactgtttataattctacaaagaacaaaaattgttacgtactataggcacttaagaaccctgaggaaaaataatacaatgtgtgtgtgtgagagagagagtgagttactgacattgttccaaaaaaaaaaaaaaaaaaaaaaaaatgtggagggttgaaatggtaaggaattggaatcttttgtattttcgagcaataagaattcctattcttgtttcaaatagaggtttgttaggaattacagttgtggggagcaaactttcttttttgtgctgttttaatccaaaatgtatatccttaattgtatataatatgtagataaatatatgagggtattaagctactttgaattaaatttaaggatatatttcacatgaaaacaaatacaaacttgagaatcaaaataaagttttgcaaagtatttctttg

SEQ ID NO: 736949 - DNA, 773 bp, Homo sapiens
tgagatgagtctcaaaaacaaaaacaaacaaaaaagaaacctggtatgtaagtagctaaatatagagacgtataggaggcatcttgtaatgtgtgattattcatttgattttattcagtgtgctattaagaagggcccttccttctaaagaaaattagaacattttcaaagcttgcgtctgaatcctgtctcactactcagtaatggagtgacccaggaaaccgcatcacctccccaagccccagtccctgtgaaatggggagtgtagtaagacctgcttcctagggctgttgggaggatcaggtgagacaatctgattgaaggacttggaccagtgcctgataaataataagcacttggtaagttattattagggctgggagagcaataacttcagctgcgaaagctaatactagtctatcctgatgacggcatcagatacttattttcaagtttcttctgaagacaaattttaattgacacttgaaaaccaggaagagcatgaaaaagaggactcagtgtagcctctaaaggctgttgagcctgaagaggtgttggaatgccgtgcccgccttgtgttgcaggcttcagcagtttaggcccagaggactgtgggtcccacctgcctgacagcagggcacacaggtgctgagcagttggccattactgggctgtgaaaacagcatgaatggggaatggagactgtgggcaaagcagtacagtccacttgttcgcaggtgggaaagtcaaactctgtctttattctttttttt

SEQ ID NO: 736950 - DNA, 696 bp, Homo sapiens
gagatggagtcttgctctgtcaccgaggctggagtgcagtgtgtgctattaagaagggcccttccttctaaagaaaattagaacattttcaaagcttgcgtctgaatcctgtctcactactcagtaatggagtgacccaggaaaccgcatcacctccccaagccccagtccctgtgaaatggggagtgtagtaagacctgcttcctagggctgttgggaggatcaggtgagacaatctgattgaaggacttggaccagtgcctgataaataataagcacttggtaagttattattagggctgggagagcaataacttcagctgcgaaagctaatactagtctatcctgatgacggcatcagatacttattttcaagtttcttctgaagacaaattttaattgacacttgaaaaccaggaagagcatgaaaaagaggactcagtgtagcctctaaaggctgttgagcctgaagaggtgttggaatgccgtgcccgccttgtgttgcaggcttcagcagtttaggcccagaggactgtgggtcccacctgcctgacagcagggcacacaggtgctgagcagttggccattactgggctgtgaaaacagcatgaatggggaatggagactgtgggcaaagcagtacagtccacttgttcgcaggtgggaaagtcaaactctgtctttattctttttttt

SEQ ID NO: 736951 - DNA, 961 bp, Homo sapiens
tatatttaatcattctctttggctcacaacagcagtccagtccaaagatttactttttctattttcaaccccatcattatttttgtgtaaaaagtatgttttgagttacagcaattcatggagatcaagcttctactctgtagggagaagagagatgtcatttactacagagtttatacacacaaatgttctgctgcatgctgtgttcccactgaaatccagggggtttatttgcatttatacttaaagaagaatgaccgtatttggctgactctaagccaagatgatacaggcccaaagtttttcatggaggaatgggggagtaagggaaataggaacatttggaagaaatagttgttgtttttccctgttttattcagtgggcattttattcacagatcatttgatgcattgcatttactcgtgttattctggttccttttgtgttttttttttccttttgaaacaacttcacacttacaggaaaatggcaaaaatactaaaataagaactcctataaaccttcactgataaaatcccttcagttttctccagttatcccagtaacgtcctttatagcaaaaggatccggttcaggatcactcatacccagctgtcatatctttccagtctccttcattctagaagcattcttcattcttccttcatctttcatgacactgacacttttaattacaggccagctgatgtgtagaatgtccttccttttcttaggagatgttttctgtccttccttgaaaaccccactagtgttacctgccacgaggagagctaggcgctctgccccctaccccaagctggttgctctctcttacaacgcttcattaatcaagtacccttttttggagcattgatgatattcattcatccttttagccagtaaatattttttgatgtctattacgtgccaaatgggatacatttaagaacaaagcagacc

SEQ ID NO: 736952 - DNA, 914 bp, Homo sapiens
  misc_feature (296)..(296): n is a, c, g, or t
gggtcttgctctgtggcccatggtgcagtgcagtgcagtggtgctatcagctcactgcagtctcaaactcctagctcaagcaatcctcctccctcagcctcccaagtaggtaggactacagatatatgccaccacgtccagcaaattttgtttgtttgtagagatggggtcttgctatatttcccaggcttgtctcaaactcctggcctcaagtgatcctcccaccttggctgcctaaagtgctggtattacagacatgagccactgaacccagctgagagcctcactttcatcanctgtgctgtgaggggtaatatatgcttcaggttttctggagaatccttcttgcagagaagtttctgaatgaaacgacagattcatctggattcagaactccaggcagaagctgcttaacagcaaaaatctggcatcttcactacattttaagattttaggtagaactaagagggatcagatatagaggaataaggaatgtgagaaggaaaaagatatagtagtttagctaaatttttcttagagtttcttggtggggctggccatgaagtaactagtctgactcatttcttctgggaaggctaaaagagacacaaatagcttctcttttaccttggctttaaggaaaagccattttattaacaaaagtattagacacgactgcataagaaatttgctgtgtgagaataaagaacaagggagtaggagggtgggacagagaagggtgagaagttggcttcgtgagggccacctgtcagttgtctttgtgccttgtgacatcaaaactgaaatgtttgtattactgttgtccatgactttttttttctgtgtcagacatacaaattgaatttggttgtaatgttttaaacgtaataaagaattcttacctacaaaaaaaa

SEQ ID NO: 736953 - DNA, 6405 bp, Homo sapiens
gggcggcgcggaggggcagggccagagggaagcgctttgttccgcgcgtggttcccgcgcctgggggtgcgcgggagaggcgcgaatccgagtgccgcgcgcggcccggggacttgcacgggcgtgcggggtggaaccgcaggaagcggagctctcgggttcccgccccgccccgccccgccggcggcggaggcagcgagcgcgagagcccagcggagtcgctgggagcctgaggcaccgagacacaaaggcaggcgggatgcgggagcaggcaaagggaaagcgaaagccgcgcgcccggccggtgactgggtgaaggcgccgcgcagctttcccgacgccggctgtacccggacctcctggtcgagcctggcgcgccgcagccatggccatcgctcaactggccacggagtacgtgttctcggatttcttgctgaaggagcccacggagcccaagttcaaggggctgcgactggagctggctgtggacaagatggtcacgtgcattgcggtggggctgcccctgctgctcatctcgctggccttcgcgcaggagatctcgattggtacacagataagctgtttctctccaagttctttctcctggcgtcaggctgcctttgtggattcatattgctgggcggctgttcagcagaagaactcactgcagagcgagtctggaaacctcccactgtggctgcataagtttttcccctacatcctgctgctctttgcgatcctcctgtacctgcccccgctgttctggcgtttcgcagctgctcctcatatttgctcagacttgaagtttatcatggaagaacttgacaaagtttacaaccgtgcaattaaggctgcaaagagtgcgcgtgaccttgacatgagagatggagcctgctcagttccaggtgttaccgagaacttagggcaaagtttgtgggaggtatctgaaagccacttcaagtacccaattgtggagcagtacttgaagacaaagaaaaattctaataatttaatcatcaagtacattagctgccgcctgctgacactcatcattatactgttagcgtgtatctacctgggctattacttcagcctctcctcactctcagacgagtttgtgtgcagcatcaaatcagggatcctgagaaacgacagcaccgtgcccgatcagtttcagtgcaaactcattgccgtgggcatcttccagttgctcagtgtcattaaccttgtggtttatgtcctgctggctcccgtggttgtctacacgctgtttgttccattccgacagaagacagatgttctcaaagtgtacgaaatcctccccacttttgatgttctgcatttcaaatctgaagggtacaacgatttgagcctctacaatctcttcttggaggaaaatataagtgaggtcaagtcatacaagtgtcttaaggtactggagaatattaagagcagtggtcaggggatcgacccaatgctactcctgacaaaccttggcatgatcaagatggatgttgttgatggcaaaactcccatgtctgcagagatgagagaggagcaggggaaccagacggcagagctccaaggtatgaacatagacagtgaaactaaagcaaataatggagagaagaatgcccgacagagacttctggattcttcttgctgatgatttttttccttgagctgtaaatctgtgacttctgcgacatgggatttaatttggctaaagcacccctgttggtttcacagctggtttgcaataaatggttcttggtggagatactgagcatgtcttattgagtccctaatggaaatggtgatcaacaaaaggttatggaagaatggtttatgaacttcccataggaagcacctgagagatagtaaactgcagcaagtaactatgtgtaagtcctcatcaaatgaaaagcagaaagacaagaacaattagtcaagagcagtagccctgtcagagcctcggagcaatacctttctgtacccgtggtgagacaagacccagagctactggaaaacaagcactttggaagatttgttttgttttcatggaataataatatgtcaggatataatttaacgtgagtttcttatgtgcccttaaagactgttagacaagaaaagcattcactggctaataatccataggtcgacctatgtcctaagttaggtgtaaggtccgatgccttggcccacactcgagctctctttacattgttagttgtcaaccttggctgatggaaatcccgtaaccactatttgttgcactgtgccttgaagggcagcaggcccaagtgctgctctgactgaaaactgagttaacaagacgaaatctaaaggatattcacagtgacttcaattcaggaagaatgcttccaaaagagcccagtggggaaatctgacatcacagaagacattaattcagtcactttcaaagagtttgtctacaggcggtttctctgttatcaaaggcatttgaaataggattttacttaaacaataatggaacacaggagtatttaaagtgaagaacactttgcctgaatgtgatcagggcacataagtgacattggcgtgcttcatatggcgtgcttggagccagaaaaacttagcggtttattttgtttatatttaagcacagctttaaaaaattcattatcgtttattcagtgtccgaattgaggccatttgggaagaaaattctagcactggtggagaattatagaataaagattataaatggttggataagaaaaatgtaagcttatttcataaacatttaaagctgattcagaacatgttaaaaactgttcccaattccaactatgtaaatagatcctatgttcacattttacacacacacacaaaaatctttaacatctgtggaacttcccagttttagtcttagaaagttagcatgttgcataagttcagtaatcctcaggaacctccaagtttacttttagctcttacggacagttgtttacataatctaattactgttttctgaagaacggaaattatataagctgctgtctgccttttggaatattcagaaaagcagattttatttgtacttctgtgatgttttctgaaatggaaagctgatgataaatatcaaagtagcaatcagtgcgttaaattattctgttacatgatatttattactgttgaattattctgtgacttagaaatggcagtaacctaaataatggaatttgcaaaattattatattgccgtatctgagatgttccatcacaagtttctacactggtttcttttgaaaatttaaaaagatttacgagatacattttctaggatatgattttttttttacaaaaagcttcatcttctgtagactatccttaatttctattttgaaacggtaaaaattgatattttaggacaccaggaagtctccaagccattcccactctctgaactccagtagggtctgtgatgtcccaggcaccagtaccaagttggatgtgcagatatgcataggcaggtcccatccttgaggacttcagagtccagtaaaaggcagcagaaacatgggctggtgcctaagaggagaaagcgtagccacagtaaaggctatgccagaaaactcctagcaaatgctctgtgttcttgggagagggcacattgtttttgttttctctcctatagttcctgtaactgctggttttgagaatatagtaatcatttttcccagaggcagatgaccaccttaaggttctttagctgcaaatcctctaggttgaagtttgtgtgaaatagtcacagtgattttgaatagtaaggaatccagttgccttttgaaccttccctcacagggatgagagaacaagcctgtggaggttgtggagctactggtaaacaactgtcagggccccagaaggctgatgtggaggcctggggatacatttcatctaataaaagtattactaggtatcagtatcagtaataaaagtattataataaagtatcagtaataaaagtattataataaaaagtattattaggacaggtaaactcatccatctactgtgagctgctggcttggagaacgacttttgaggagccagtttcctgaggagaaatgcttttataaagcactcattgctttgtaaaaggagacaaaactgatcctaaatgaccactccagggttgctgattttgtttctggctcatgtctgcctagtaaaccaccagcaagctgctgaaccaggctggaaacaacattgttgcaactgggagggacatagagtactgtgaaagcagcgttccaacacatcttcacttttacaaagggataggcagagacttccaacatagaggttcttaaacttcgaggggttacaatccccttgcaaatatttttatagctatggaccctctcctcagatctacagccaacattttcagtgcaccttaggaggtcattttagtccacgcctctgaaaaagctgcactccaacggctgaagagcaagccatacggccgagaatggggctccctttgccttcatgaaagctacttcccccaacactaagactcagctgtacgtttgcttagctcagtcacatttacattcttctgggtgaactgtaccttttgagtacctgccttcattttctagaatcagacctaacaaggtcagtagaagcctgggcagcagcgggcctggaaagacgaggcagccagcatgaactgctgttctctccctgaccacaaggcgtcgtcttcctccagggtcaagtaattgttcttgttccgcctcacaggaatgtggggaggaaggacgttaacactataaaatgctgcgtcctaccttaaacttgtactgtgagaaagctggaaacttccacctgtacagtgggtctggtttgcatgtttagtttcatttgtgggaactgcttgtccaagagtgagctcaggtcagggcagtttgtgcctatgagaattagctcagctatcaggcaggtttttagacacctttttaaaatgtgctcgtgtttggtttgttttgcttactgtcagtcctgggtcaatcaaaggtttgtaagggtgagaatttttatgcactgctatatcgcaagtgcttaaaacagagactggcccagatgaggcattcttcaaatgtttgttgaaatgaatggacaaactcttaggataaatcctaatttgttggcaactgttatttgattttagaaggcaaactgattttattttagagaggggaaggggaggggaggctcattagcctcttggtagaaagaggactatttctgcaaatgaataggtttccaccttaagtagtgacagtccttaacttcttattatggagtgagtcttgaccgctttccaagttcaatagaagttcaagattgcctctcagtgattagggaaattgaagcttttaaagctcctggtctcagtaattcctcagaataaacctctttaaaagggatattgatggaaatgtacaattaccagtaattgaggttttatctgaggggatggagatgatgaaatggttccttcttggaagttgttggcattttggctttatttttcacaaataaagtgaaaccatttaaaacgattgacaacgattatatagtgccatgtggaatacaatagatattaatttgtggttggtttttctgcctgctttaaatgaaatgtattatgtttctgggttccttttttagctgtaaaaatacttcgtcactaaagcatgaaatttaatcagcagttgttcttcaagttcctgaaagctataaaagtttctcatgacttgagtggttttttccctgcccaccagaggagaaagcccttgtagaattctgcagtgttacaagtgttccctacaaaaactgaaaccatcagctcctctttaacaagttggctttttaaaagcacgtaattacaatttaatggtattctgtaaagtggtgctctaggcataatttaaattctttttaatgactatatttcttcaaaactttgaaagaaaaatgtgttctttttgctgcatcctttgtaagaagactgccaacagaggaaaaaggactttacaaattaagaccatcttggtttcatttccacaaagatgagaacaaatcatggtgttaggaaaggatccttagaagaacacaagaatttgaaagcccttggtggttatcactactatatttcatatttccacagaagtgacttagccaagctctgcattttgagcctgctgactttcatttaaaaggaatgaaaggctgaaaatccaggctgctgtgtctgtagataaaggtcaaaccatgtttgagttcttcactgttgtgtccacctaaataaaactgagtaagtaatgaaaaaaagtcttaata

SEQ ID NO: 736954 - DNA, 3989 bp, Homo sapiens
ggcggccgctcgcgatctagagacggcagagctccaaggtatgaacatagacagtgaaactaaagcaaataatggagagaagaatgcccgacagagacttctggattcttcttgctgatgatttttttccttgagctgtaaatctgtgacttctgcgacatgggatttaatttggctaaagcacccctgttggtttcacagctggtttgcaataaatggttcttggtggagatactgagcatgtcttattgagtccctaatggaaatggtgatcaacaaaaggttatggaagaaaattctagcactggtggagaattatagaataaagattataaatggttggataagaaaaatgtaagcttatttcataaacatttaaagctgattcagaacatgttaaaaactgttcccaattccaactatgtaaatagatcctatgttcacattttacacacacacacaaaaatctttaacatctgtggaacttcccagttttagtcttagaaagttagcatgttgcataagttcagtaatcctcaggaacctccaagtttacttttagctcttacggacagttgtttacataatctaattactgttttctgaagaacggaaattatataagctgctgtctgccttttggaatattcagaaaagcagattttatttgtacttctgtgatgttttctgaaatggaaagctgatgataaatatcaaagtagcaatcagtgcgttaaattattctgttacatgatatttattactgttgaattattctgtgacttagaaatggcagtaacctaaataatggaatttgcaaaattattatattgccgtatctgagatgttccatcacaagtttctacactggtttcttttgaaaatttaaaaagatttacgagatacattttctaggatatgattttttttttacaaaaagcttcatcttctgtagactatccttaatttctattttgaaacggtaaaaattgatattttaggacaccaggaagtctccaagccattcccactctctgaactccagtagggtctgtgatgtcccaggcaccagtaccaagttggatgtgcagatatgcataggcaggtcccatccttgaggacttcagagtccagtaaaaggcagcagaaacatgggctggtgcctaagaggagaaagcgtagccacagtaaaggctatgccagaaaactcctagcaaatgctctgtgttcttgggagagggcacattgtttttgttttctctcctatagttcctgtaactgctggttttgagaatatagtaatcatttttcccagaggcagatgaccaccttaaggttctttagctgcaaatcctctaggttgaagtttgtgtgaaatagtcacagtgattttgaatagtaaggaatccagttgccttttgaaccttccctcacagggatgagagaacaagcctgtggaggttgtggagctactggtaaacaactgtcagggccccagaaggctgatgtggaggcctggggatacatttcatctaataaaagtattactaggtatcagtatcagtaataaaagtattataataaagtatcagtaataaaagtattataataaaaagtattattaggacaggtaaactcatccatctactgtgagctgctggcttggagaacgacttttgaggagccagtttcctgaggagaaatgcttttataaagcactcattgctttgtaaaaggagacaaaactgatcctaaatgaccactccagggttgctgattttgtttctggctcatgtctgcctagtaaaccaccagcaagctgctgaaccaggctggaaacaacattgttgcaactgggagggacatagagtactgtgaaagcagcgttccaacacatcttcacttttacaaagggataggcagagacttccaacatagaggttcttaaacttcgaggggttacaatccccttgcaaatatttttatagctatggaccctctcctcagatctacagccaacattttcagtgcaccttaggaggtcattttagtccacgcctctgaaaaagctgcactccaacggctgaagagcaagccatacggccgagaatggggctccctttgccttcatgaaagctacttcccccaacactaagactcagctgtacgtttgcttagctcagtcacatttacattcttctgggtgaactgtaccttttgagtacctgccttcattttctagaatcagacctaacaaggtcagtagaagcctgggcagcagcgggcctggaaagacgaggcagccagcatgaactgctgttctctccctgaccacaaggcgtcgtcttcctccagggtcaagtaattgttcttgttccgcctcacaggaatgtggggaggaaggacgttaacactataaaatgctgcgtcctaccttaaacttgtactgtgagaaagctggaaacttccacctgtacagtgggtctggtttgcatgtttagtttcatttgtgggaactgcttgtccaagagtgagctcaggtcagggcagtttgtgcctatgagaattagctcagctatcaggcaggtttttagacacctttttaaaatgtgctcgtgtttggtttgttttgcttactgtcagtcctgggtcaatcaaaggtttgtaagggtgagaatttttatgcactgctatatcgcaagtgcttaaaacagagactggcccagatgaggcattcttcaaatgtttgttgaaatgaatggacaaactcttaggataaatcctaatttgttggcaactgttatttgattttagaaggcaaactgattttattttagagaggggaaggggaggggaggctcattagcctcttggtagaaagaggactatttctgcaaatgaataggtttccaccttaagtagtgacagtccttaacttcttattatggagtgagtcttgaccgctttccaagttcaatagaagttcaagattgcctctcagtgattagggaaattgaagcttttaaagctcctggtctcagtaattcctcagaataaacctctttaaaagggatattgatggaaatgtacaattaccagtaattgaggttttatctgaggggatggagatgatgaaatggttccttcttggaagttgttggcattttggctttatttttcacaaataaagtgaaaccatttaaaacgattgacaacgattatatagtgccatgtggaatacaatagatattaatttgtggttggtttttctgcctgctttaaatgaaatgtattatgtttctgggttccttttttagctgtaaaaatacttcgtcactaaagcatgaaatttaatcagcagttgttcttcaagttcctgaaagctataaaagtttctcatgacttgagtggttttttccctgcccaccagaggagaaagcccttgtagaattctgcagtgttacaagtgttccctacaaaaactgaaaccatcagctcctctttaacaagttggctttttaaaagcacgtaattacaatttaatggtattctgtaaagtggtgctctaggcataatttaaattctttttaatgactatatttcttcaaaactttgaaagaaaaatgtgttctttttgctgcatcctttgtaagaagactgccaacagaggaaaaaggactttacaaattaagaccatcttggtttcatttccacaaagatgagaacaaatcatggtgttaggaaaggatccttagaagaacacaagaatttgaaagcccttggtggttatcactactatatttcatatttccacagaagtgacttagccaagctctgcattttgagcctgctgactttcatttaaaaggaatgaaaggctgaaaatccaggctgctgtgtctgtagataaaggtcaaaccatgtttgagttcttcactgttgtgtccacctaaataaaactgagtaagtaatgaaaaaaagtcttaata

SEQ ID NO: 736955 - DNA, 6783 bp, Homo sapiens
  misc_feature (1)..(2): n is a, c, g, or t
nnttttttctcataaattccttttaatcaattccttttctttccatcttactacatgcttttgtcacttcattaagtagatactatgtgccagtttttctgctaggtcctgataactgttaagatgaacaagacagggtttctagttccaaggagcacagaatctggtggagacagcagatatgccagtgaaggattatgacagaaggtgactgagcctcctgtaaatatgagcagcactctgttttctcctgacctcatattgcgttcccacagcagctccgaggctgttctcagtgtatgctgatcttcacttttattgagtgttttctctggaaaaaggccaataaaaacatttcatttctcttttggacaatatatatttctaagagccaggtttttctgcaccaaaaccttacaaccaatggtctgcactggttttccagccatgcttaagcccgtattaccaacatttctggtcccagtcgcctctgcaggggagtctcttccactagcgtgtttctgtttccagccctcaatggatacctcttcggaaacttcccggagcctgatatgtgtgttggagaatctgtgtcctggcacctatttggaatggggaatgaaatagacatccattctatctatttctatggtaacaccttcatcagcagagggcatcggactgatgtcgtcaacctgttcccagccaccttccttacaacagaaatgatagccgagaatcctgggaagtggatgataacctgccaggtcagcgaccactggccacggagtacgtgttctcggatttcttgctgaaggagcccacggagcccaagttcaaggggctgcgactggagctggctgtggacaagatggtcacgtgcattgcggtggggctgcccctgctgctcatctcgctggccttcgcgcaggagatctcgattggtacacagataagctgtttctctccaagttctttctcctggcgtcaggctgcctttgtggattcatattgctgggcggctgttcagcagaagaactcactgcagagcgagtctggaaacctcccactgtggctgcataagtttttcccctacatcctgctgctctttgcgatcctcctgtacctgcccccgctgttctggcgtttcgcagctgctcctcatatttgctcagacttgaagtttatcatggaagaacttgacaaagtttacaaccgtgcaattaaggctgcaaagagtgcgcgtgaccttgacatgagagatggagcctgctcagttccaggtgttaccgagaacttagggcaaagtttgtgggaggtatctgaaagccacttcaagtacccaattgtggagcagtacttgaagacaaagaaaaattctaataatttaatcatcaagtacattagctgccgcctgctgacactcatcattatactgttagcgtgtatctacctgggctattacttcagcctctcctcactctcagacgagtttgtgtgcagcatcaaatcagggatcctgagaaacgacagcaccgtgcccgatcagtttcagtgcaaactcattgccgtgggcatcttccagttgctcagtgtcattaaccttgtggtttatgtcctgctggctcccgtggttgtctacacgctgtttgttccattccgacagaagacagatgttctcaaagtgtacgaaatcctccccacttttgatgttctgcatttcaaatctgaagggtacaacgatttgagcctctacaatctcttcttggaggaaaatataagtgaggtcaagtcatacaagtgtcttaaggtactggagaatattaagagcagtggtcaggggatcgacccaatgctactcctgacaaaccttggcatgatcaagatggatgttgttgatggcaaaactcccatgtctgcagagatgagagaggagcaggggaaccagacggcagagctccaaggtatgaacatagacagtgaaactaaagcaaataatggagagaagaatgcccgacagagacttctggattcttcttgctgatgatttttttccttgagctgtaaatctgtgacttctgcgacatgggatttaatttggctaaagcacccctgttggtttcacagctggtttgcaataaatggttcttggtggagatactgagcatgtcttattgagtccctaatggaaatggtgatcaacaaaaggttatggaagaatggtttatgaacttcccataggaagcacctgagagatagtaaactgcagcaagtaactatgtgtaagtcctcatcaaatgaaaagcagaaagacaagaacaattagtcaagagcagtagccctgtcagagcctcggagcaatacctttctgtacccgtggtgagacaagacccagagctactggaaaacaagcactttggaagatttgttttgttttcatggaataataatatgtcaggatataatttaacgtgagtttcttatgtgcccttaaagactgttagacaagaaaagcattcactggctaataatccataggtcgacctatgtcctaagttaggtgtaaggtccgatgccttggcccacactcgagctctctttacattgttagttgtcaaccttggctgatggaaatcccgtaaccactatttgttgcactgtgccttgaagggcagcaggcccaagtgctgctctgactgaaaactgagttaacaagacgaaatctaaaggatattcacagtgacttcaattcaggaagaatgcttccaaaagagcccagtggggaaatctgacatcacagaagacattaattcagtcactttcaaagagtttgtctacaggcggtttctctgttatcaaaggcatttgaaataggattttacttaaacaataatggaacacaggagtatttaaagtgaagaacactttgcctgaatgtgatcagggcacataagtgacattggcgtgcttcatatggcgtgcttggagccagaaaaacttagcggtttattttgtttatatttaagcacagctttaaaaaattcattatcgtttattcagtgtccgaattgaggccatttgggaagaaaattctagcactggtggagaattatagaataaagattataaatggttggataagaaaaatgtaagcttatttcataaacatttaaagctgattcagaacatgttaaaaactgttcccaattccaactatgtaaatagatcctatgttcacattttacacacacacacaaaaatctttaacatctgtggaacttcccagttttagtcttagaaagttagcatgttgcataagttcagtaatcctcaggaacctccaagtttacttttagctcttacggacagttgtttacataatctaattactgttttctgaagaacggaaattatataagctgctgtctgccttttggaatattcagaaaagcagattttatttgtacttctgtgatgttttctgaaatggaaagctgatgataaatatcaaagtagcaatcagtgcgttaaattattctgttacatgatatttattactgttgaattattctgtgacttagaaatggcagtaacctaaataatggaatttgcaaaattattatattgccgtatctgagatgttccatcacaagtttctacactggtttcttttgaaaatttaaaaagatttacgagatacattttctaggatatgattttttttttacaaaaagcttcatcttctgtagactatccttaatttctattttgaaacggtaaaaattgatattttaggacaccaggaagtctccaagccattcccactctctgaactccagtagggtctgtgatgtcccaggcaccagtaccaagttggatgtgcagatatgcataggcaggtcccatccttgaggacttcagagtccagtaaaaggcagcagaaacatgggctggtgcctaagaggagaaagcgtagccacagtaaaggctatgccagaaaactcctagcaaatgctctgtgttcttgggagagggcacattgtttttgttttctctcctatagttcctgtaactgctggttttgagaatatagtaatcatttttcccagaggcagatgaccaccttaaggttctttagctgcaaatcctctaggttgaagtttgtgtgaaatagtcacagtgattttgaatagtaaggaatccagttgccttttgaaccttccctcacagggatgagagaacaagcctgtggaggttgtggagctactggtaaacaactgtcagggccccagaaggctgatgtggaggcctggggatacatttcatctaataaaagtattactaggtatcagtatcagtaataaaagtattataataaagtatcagtaataaaagtattataataaaaagtattattaggacaggtaaactcatccatctactgtgagctgctggcttggagaacgacttttgaggagccagtttcctgaggagaaatgcttttataaagcactcattgctttgtaaaaggagacaaaactgatcctaaatgaccactccagggttgctgattttgtttctggctcatgtctgcctagtaaaccaccagcaagctgctgaaccaggctggaaacaacattgttgcaactgggagggacatagagtactgtgaaagcagcgttccaacacatcttcacttttacaaagggataggcagagacttccaacatagaggttcttaaacttcgaggggttacaatccccttgcaaatatttttatagctatggaccctctcctcagatctacagccaacattttcagtgcaccttaggaggtcattttagtccacgcctctgaaaaagctgcactccaacggctgaagagcaagccatacggccgagaatggggctccctttgccttcatgaaagctacttcccccaacactaagactcagctgtacgtttgcttagctcagtcacatttacattcttctgggtgaactgtaccttttgagtacctgccttcattttctagaatcagacctaacaaggtcagtagaagcctgggcagcagcgggcctggaaagacgaggcagccagcatgaactgctgttctctccctgaccacaaggcgtcgtcttcctccagggtcaagtaattgttcttgttccgcctcacaggaatgtggggaggaaggacgttaacactataaaatgctgcgtcctaccttaaacttgtactgtgagaaagctggaaacttccacctgtacagtgggtctggtttgcatgtttagtttcatttgtgggaactgcttgtccaagagtgagctcaggtcagggcagtttgtgcctatgagaattagctcagctatcaggcaggtttttagacacctttttaaaatgtgctcgtgtttggtttgttttgcttactgtcagtcctgggtcaatcaaaggtttgtaagggtgagaatttttatgcactgctatatcgcaagtgcttaaaacagagactggcccagatgaggcattcttcaaatgtttgttgaaatgaatggacaaactcttaggataaatcctaatttgttggcaactgttatttgattttagaaggcaaactgattttattttagagaggggaaggggaggggaggctcattagcctcttggtagaaagaggactatttctgcaaatgaataggtttccaccttaagtagtgacagtccttaacttcttattatggagtgagtcttgaccgctttccaagttcaatagaagttcaagattgcctctcagtgattagggaaattgaagcttttaaagctcctggtctcagtaattcctcagaataaacctctttaaaagggatattgatggaaatgtacaattaccagtaattgaggttttatctgaggggatggagatgatgaaatggttccttcttggaagttgttggcattttggctttatttttcacaaataaagtgaaaccatttaaaacgattgacaacgattatatagtgccatgtggaatacaatagatattaatttgtggttggtttttctgcctgctttaaatgaaatgtattatgtttctgggttccttttttagctgtaaaaatacttcgtcactaaagcatgaaatttaatcagcagttgttcttcaagttcctgaaagctataaaagtttctcatgacttgagtggttttttccctgcccaccagaggagaaagcccttgtagaattctgcagtgttacaagtgttccctacaaaaactgaaaccatcagctcctctttaacaagttggctttttaaaagcacgtaattacaatttaatggtattctgtaaagtggtgctctaggcataatttaaattctttttaatgactatatttcttcaaaactttgaaagaaaaatgtgttctttttgctgcatcctttgtaagaagactgccaacagaggaaaaaggactttacaaattaagaccatcttggtttcatttccacaaagatgagaacaaatcatggtgttaggaaaggatccttagaagaacacaagaatttgaaagcccttggtggttatcactactatatttcatatttccacagaagtgacttagccaagctctgcattttgagcctgctgactttcatttaaaaggaatgaaaggctgaaaatccaggctgctgtgtctgtagataaaggtcaaaccatgtttgagttcttcactgttgtgtccacctaaataaaactgagtaagtaatgaaaaaaagtcttaata

SEQ ID NO: 736956 - DNA, 6648 bp, Homo sapiens
  misc_feature (1)..(2): n is a, c, g, or t
nnttttttctcataaattccttttaatcaattccttttctttccatcttactacatgcttttgtcacttcattaagtagatactatgtgccagtttttctgctaggtcctgataactgttaagatgaacaagacagggtttctagttccaaggagcacagaatctggtggagacagcagatatgccagtgaaggattatgacagaaggtgactgagcctcctgtaaatatgagcagcactctgttttctcctgacctcatattgcgttcccacagcagctccgaggctgttctcagtgtatgctgatcttcacttttattgagtgttttctcaacatttctggtcccagtcgcctctgcaggggagtctcttccactagcgtgtttctgtttccagccctcaatggatacctcttcggaaacttcccggagcctgatatgtgtgttggagaatctgtgtcctggcacctatttggaatggggaatgaaatagacatccattctatctatttctatggtaacaccttcatcagcagagggcatcggactgatgtcgtcaacctgttcccagccaccttccttacaacagaaatgatagccgagaatcctgggaagtggatgataacctgccaggtcagcgaccactggccacggagtacgtgttctcggatttcttgctgaaggagcccacggagcccaagttcaaggggctgcgactggagctggctgtggacaagatggtcacgtgcattgcggtggggctgcccctgctgctcatctcgctggccttcgcgcaggagatctcgattggtacacagataagctgtttctctccaagttctttctcctggcgtcaggctgcctttgtggattcatattgctgggcggctgttcagcagaagaactcactgcagagcgagtctggaaacctcccactgtggctgcataagtttttcccctacatcctgctgctctttgcgatcctcctgtacctgcccccgctgttctggcgtttcgcagctgctcctcatatttgctcagacttgaagtttatcatggaagaacttgacaaagtttacaaccgtgcaattaaggctgcaaagagtgcgcgtgaccttgacatgagagatggagcctgctcagttccaggtgttaccgagaacttagggcaaagtttgtgggaggtatctgaaagccacttcaagtacccaattgtggagcagtacttgaagacaaagaaaaattctaataatttaatcatcaagtacattagctgccgcctgctgacactcatcattatactgttagcgtgtatctacctgggctattacttcagcctctcctcactctcagacgagtttgtgtgcagcatcaaatcagggatcctgagaaacgacagcaccgtgcccgatcagtttcagtgcaaactcattgccgtgggcatcttccagttgctcagtgtcattaaccttgtggtttatgtcctgctggctcccgtggttgtctacacgctgtttgttccattccgacagaagacagatgttctcaaagtgtacgaaatcctccccacttttgatgttctgcatttcaaatctgaagggtacaacgatttgagcctctacaatctcttcttggaggaaaatataagtgaggtcaagtcatacaagtgtcttaaggtactggagaatattaagagcagtggtcaggggatcgacccaatgctactcctgacaaaccttggcatgatcaagatggatgttgttgatggcaaaactcccatgtctgcagagatgagagaggagcaggggaaccagacggcagagctccaaggtatgaacatagacagtgaaactaaagcaaataatggagagaagaatgcccgacagagacttctggattcttcttgctgatgatttttttccttgagctgtaaatctgtgacttctgcgacatgggatttaatttggctaaagcacccctgttggtttcacagctggtttgcaataaatggttcttggtggagatactgagcatgtcttattgagtccctaatggaaatggtgatcaacaaaaggttatggaagaatggtttatgaacttcccataggaagcacctgagagatagtaaactgcagcaagtaactatgtgtaagtcctcatcaaatgaaaagcagaaagacaagaacaattagtcaagagcagtagccctgtcagagcctcggagcaatacctttctgtacccgtggtgagacaagacccagagctactggaaaacaagcactttggaagatttgttttgttttcatggaataataatatgtcaggatataatttaacgtgagtttcttatgtgcccttaaagactgttagacaagaaaagcattcactggctaataatccataggtcgacctatgtcctaagttaggtgtaaggtccgatgccttggcccacactcgagctctctttacattgttagttgtcaaccttggctgatggaaatcccgtaaccactatttgttgcactgtgccttgaagggcagcaggcccaagtgctgctctgactgaaaactgagttaacaagacgaaatctaaaggatattcacagtgacttcaattcaggaagaatgcttccaaaagagcccagtggggaaatctgacatcacagaagacattaattcagtcactttcaaagagtttgtctacaggcggtttctctgttatcaaaggcatttgaaataggattttacttaaacaataatggaacacaggagtatttaaagtgaagaacactttgcctgaatgtgatcagggcacataagtgacattggcgtgcttcatatggcgtgcttggagccagaaaaacttagcggtttattttgtttatatttaagcacagctttaaaaaattcattatcgtttattcagtgtccgaattgaggccatttgggaagaaaattctagcactggtggagaattatagaataaagattataaatggttggataagaaaaatgtaagcttatttcataaacatttaaagctgattcagaacatgttaaaaactgttcccaattccaactatgtaaatagatcctatgttcacattttacacacacacacaaaaatctttaacatctgtggaacttcccagttttagtcttagaaagttagcatgttgcataagttcagtaatcctcaggaacctccaagtttacttttagctcttacggacagttgtttacataatctaattactgttttctgaagaacggaaattatataagctgctgtctgccttttggaatattcagaaaagcagattttatttgtacttctgtgatgttttctgaaatggaaagctgatgataaatatcaaagtagcaatcagtgcgttaaattattctgttacatgatatttattactgttgaattattctgtgacttagaaatggcagtaacctaaataatggaatttgcaaaattattatattgccgtatctgagatgttccatcacaagtttctacactggtttcttttgaaaatttaaaaagatttacgagatacattttctaggatatgattttttttttacaaaaagcttcatcttctgtagactatccttaatttctattttgaaacggtaaaaattgatattttaggacaccaggaagtctccaagccattcccactctctgaactccagtagggtctgtgatgtcccaggcaccagtaccaagttggatgtgcagatatgcataggcaggtcccatccttgaggacttcagagtccagtaaaaggcagcagaaacatgggctggtgcctaagaggagaaagcgtagccacagtaaaggctatgccagaaaactcctagcaaatgctctgtgttcttgggagagggcacattgtttttgttttctctcctatagttcctgtaactgctggttttgagaatatagtaatcatttttcccagaggcagatgaccaccttaaggttctttagctgcaaatcctctaggttgaagtttgtgtgaaatagtcacagtgattttgaatagtaaggaatccagttgccttttgaaccttccctcacagggatgagagaacaagcctgtggaggttgtggagctactggtaaacaactgtcagggccccagaaggctgatgtggaggcctggggatacatttcatctaataaaagtattactaggtatcagtatcagtaataaaagtattataataaagtatcagtaataaaagtattataataaaaagtattattaggacaggtaaactcatccatctactgtgagctgctggcttggagaacgacttttgaggagccagtttcctgaggagaaatgcttttataaagcactcattgctttgtaaaaggagacaaaactgatcctaaatgaccactccagggttgctgattttgtttctggctcatgtctgcctagtaaaccaccagcaagctgctgaaccaggctggaaacaacattgttgcaactgggagggacatagagtactgtgaaagcagcgttccaacacatcttcacttttacaaagggataggcagagacttccaacatagaggttcttaaacttcgaggggttacaatccccttgcaaatatttttatagctatggaccctctcctcagatctacagccaacattttcagtgcaccttaggaggtcattttagtccacgcctctgaaaaagctgcactccaacggctgaagagcaagccatacggccgagaatggggctccctttgccttcatgaaagctacttcccccaacactaagactcagctgtacgtttgcttagctcagtcacatttacattcttctgggtgaactgtaccttttgagtacctgccttcattttctagaatcagacctaacaaggtcagtagaagcctgggcagcagcgggcctggaaagacgaggcagccagcatgaactgctgttctctccctgaccacaaggcgtcgtcttcctccagggtcaagtaattgttcttgttccgcctcacaggaatgtggggaggaaggacgttaacactataaaatgctgcgtcctaccttaaacttgtactgtgagaaagctggaaacttccacctgtacagtgggtctggtttgcatgtttagtttcatttgtgggaactgcttgtccaagagtgagctcaggtcagggcagtttgtgcctatgagaattagctcagctatcaggcaggtttttagacacctttttaaaatgtgctcgtgtttggtttgttttgcttactgtcagtcctgggtcaatcaaaggtttgtaagggtgagaatttttatgcactgctatatcgcaagtgcttaaaacagagactggcccagatgaggcattcttcaaatgtttgttgaaatgaatggacaaactcttaggataaatcctaatttgttggcaactgttatttgattttagaaggcaaactgattttattttagagaggggaaggggaggggaggctcattagcctcttggtagaaagaggactatttctgcaaatgaataggtttccaccttaagtagtgacagtccttaacttcttattatggagtgagtcttgaccgctttccaagttcaatagaagttcaagattgcctctcagtgattagggaaattgaagcttttaaagctcctggtctcagtaattcctcagaataaacctctttaaaagggatattgatggaaatgtacaattaccagtaattgaggttttatctgaggggatggagatgatgaaatggttccttcttggaagttgttggcattttggctttatttttcacaaataaagtgaaaccatttaaaacgattgacaacgattatatagtgccatgtggaatacaatagatattaatttgtggttggtttttctgcctgctttaaatgaaatgtattatgtttctgggttccttttttagctgtaaaaatacttcgtcactaaagcatgaaatttaatcagcagttgttcttcaagttcctgaaagctataaaagtttctcatgacttgagtggttttttccctgcccaccagaggagaaagcccttgtagaattctgcagtgttacaagtgttccctacaaaaactgaaaccatcagctcctctttaacaagttggctttttaaaagcacgtaattacaatttaatggtattctgtaaagtggtgctctaggcataatttaaattctttttaatgactatatttcttcaaaactttgaaagaaaaatgtgttctttttgctgcatcctttgtaagaagactgccaacagaggaaaaaggactttacaaattaagaccatcttggtttcatttccacaaagatgagaacaaatcatggtgttaggaaaggatccttagaagaacacaagaatttgaaagcccttggtggttatcactactatatttcatatttccacagaagtgacttagccaagctctgcattttgagcctgctgactttcatttaaaaggaatgaaaggctgaaaatccaggctgctgtgtctgtagataaaggtcaaaccatgtttgagttcttcactgttgtgtccacctaaataaaactgagtaagtaatgaaaaaaagtcttaata

SEQ ID NO: 736957 - DNA, 6357 bp, Homo sapiens
gggcggcgcggaggggcagggccagagggaagcgctttgttccgcgcgtggttcccgcgcctgggggtgcgcgggagaggcgcgaatccgagtgccgcgcgcggcccggggacttgcacgggcgtgcggggtggaaccgcaggaagcggagctctcgggttcccgccccgccccgccccgccggcggcggaggcagcgagcgcgagagcccagcggagtcgctgggagcctgaggcaccgagacacaaaggcaggcgggatgcgggagcaggcaaagggaaagcgaaagccgcgcgcccggccggtgactgggtgaaggcgccgcgcagctttcccgacgccggctgtacccggacctcctggtcgagcctggcgcgccgcagccatggccatcgctcaactggccacggagtacgtgttctcggatttcttgctgaaggagcccacggagcccaagttcaaggggctgcgactggagctggctgtggacaagatggtcacgtgcattgcggtggggctgcccctgctgctcatctcgctggccttcgcgcaggagatctcgattggtacacagataagctgtttctctccaagttctttctcctggcgtcaggctgcctttgtggattcatattgctgggcggctgttcagcagaagaactcactgcagagcgagtctggaaacctcccactgtggctgcataagtttttcccctacatcctgctgctctttgcgatcctcctgtacctgcccccgctgttctggcgtttcgcagctgctcctcatatttgctcagacttgaagtttatcatggaagaacttgacaaagtttacaaccgtgcaattaaggctgcaaagagtgcgcgtgaccttgacatgagagatggagcctgctcagttccaggtgttaccgagaacttagggcaaagtttgtgggaggtatctgaaagccacttcaagtacccaattgtggagcagtacttgaagacaaagaaaaattctaataatttaatcatcaagtacattagctgccgcctgctgacactcatcattatactgttagcgtgtatctacctgggctattacttcagcctctcctcactctcagacgagtttgtgtgcagcatcaaatcagggatcctgagaaacgacagcaccgtgcccgatcagtttcagtgcaaactcattgccgtgggcatcttccagttgctcagtgtcattaaccttgtggtttatgtcctgctggctcccgtggttgtctacacgctgtttgttccattccgacagaagacagatgttctcaaagtgtacgaaatcctccccacttttgatgttctgcatttcaaatctgaagggtacaacgatttgagcctctacaatctcttcttggaggaaaatataagtgaggtcaagtcatacaagtgtcttaaggtactggagaatattaagagcagtggtcaggggatcgacccaatgctactcctgacaaaccttggcatgatcaagatggatgttgttgatggcaaaactcccatgtgtatgaacatagacagtgaaactaaagcaaataatggagagaagaatgcccgacagagacttctggattcttcttgctgatgatttttttccttgagctgtaaatctgtgacttctgcgacatgggatttaatttggctaaagcacccctgttggtttcacagctggtttgcaataaatggttcttggtggagatactgagcatgtcttattgagtccctaatggaaatggtgatcaacaaaaggttatggaagaatggtttatgaacttcccataggaagcacctgagagatagtaaactgcagcaagtaactatgtgtaagtcctcatcaaatgaaaagcagaaagacaagaacaattagtcaagagcagtagccctgtcagagcctcggagcaatacctttctgtacccgtggtgagacaagacccagagctactggaaaacaagcactttggaagatttgttttgttttcatggaataataatatgtcaggatataatttaacgtgagtttcttatgtgcccttaaagactgttagacaagaaaagcattcactggctaataatccataggtcgacctatgtcctaagttaggtgtaaggtccgatgccttggcccacactcgagctctctttacattgttagttgtcaaccttggctgatggaaatcccgtaaccactatttgttgcactgtgccttgaagggcagcaggcccaagtgctgctctgactgaaaactgagttaacaagacgaaatctaaaggatattcacagtgacttcaattcaggaagaatgcttccaaaagagcccagtggggaaatctgacatcacagaagacattaattcagtcactttcaaagagtttgtctacaggcggtttctctgttatcaaaggcatttgaaataggattttacttaaacaataatggaacacaggagtatttaaagtgaagaacactttgcctgaatgtgatcagggcacataagtgacattggcgtgcttcatatggcgtgcttggagccagaaaaacttagcggtttattttgtttatatttaagcacagctttaaaaaattcattatcgtttattcagtgtccgaattgaggccatttgggaagaaaattctagcactggtggagaattatagaataaagattataaatggttggataagaaaaatgtaagcttatttcataaacatttaaagctgattcagaacatgttaaaaactgttcccaattccaactatgtaaatagatcctatgttcacattttacacacacacacaaaaatctttaacatctgtggaacttcccagttttagtcttagaaagttagcatgttgcataagttcagtaatcctcaggaacctccaagtttacttttagctcttacggacagttgtttacataatctaattactgttttctgaagaacggaaattatataagctgctgtctgccttttggaatattcagaaaagcagattttatttgtacttctgtgatgttttctgaaatggaaagctgatgataaatatcaaagtagcaatcagtgcgttaaattattctgttacatgatatttattactgttgaattattctgtgacttagaaatggcagtaacctaaataatggaatttgcaaaattattatattgccgtatctgagatgttccatcacaagtttctacactggtttcttttgaaaatttaaaaagatttacgagatacattttctaggatatgattttttttttacaaaaagcttcatcttctgtagactatccttaatttctattttgaaacggtaaaaattgatattttaggacaccaggaagtctccaagccattcccactctctgaactccagtagggtctgtgatgtcccaggcaccagtaccaagttggatgtgcagatatgcataggcaggtcccatccttgaggacttcagagtccagtaaaaggcagcagaaacatgggctggtgcctaagaggagaaagcgtagccacagtaaaggctatgccagaaaactcctagcaaatgctctgtgttcttgggagagggcacattgtttttgttttctctcctatagttcctgtaactgctggttttgagaatatagtaatcatttttcccagaggcagatgaccaccttaaggttctttagctgcaaatcctctaggttgaagtttgtgtgaaatagtcacagtgattttgaatagtaaggaatccagttgccttttgaaccttccctcacagggatgagagaacaagcctgtggaggttgtggagctactggtaaacaactgtcagggccccagaaggctgatgtggaggcctggggatacatttcatctaataaaagtattactaggtatcagtatcagtaataaaagtattataataaagtatcagtaataaaagtattataataaaaagtattattaggacaggtaaactcatccatctactgtgagctgctggcttggagaacgacttttgaggagccagtttcctgaggagaaatgcttttataaagcactcattgctttgtaaaaggagacaaaactgatcctaaatgaccactccagggttgctgattttgtttctggctcatgtctgcctagtaaaccaccagcaagctgctgaaccaggctggaaacaacattgttgcaactgggagggacatagagtactgtgaaagcagcgttccaacacatcttcacttttacaaagggataggcagagacttccaacatagaggttcttaaacttcgaggggttacaatccccttgcaaatatttttatagctatggaccctctcctcagatctacagccaacattttcagtgcaccttaggaggtcattttagtccacgcctctgaaaaagctgcactccaacggctgaagagcaagccatacggccgagaatggggctccctttgccttcatgaaagctacttcccccaacactaagactcagctgtacgtttgcttagctcagtcacatttacattcttctgggtgaactgtaccttttgagtacctgccttcattttctagaatcagacctaacaaggtcagtagaagcctgggcagcagcgggcctggaaagacgaggcagccagcatgaactgctgttctctccctgaccacaaggcgtcgtcttcctccagggtcaagtaattgttcttgttccgcctcacaggaatgtggggaggaaggacgttaacactataaaatgctgcgtcctaccttaaacttgtactgtgagaaagctggaaacttccacctgtacagtgggtctggtttgcatgtttagtttcatttgtgggaactgcttgtccaagagtgagctcaggtcagggcagtttgtgcctatgagaattagctcagctatcaggcaggtttttagacacctttttaaaatgtgctcgtgtttggtttgttttgcttactgtcagtcctgggtcaatcaaaggtttgtaagggtgagaatttttatgcactgctatatcgcaagtgcttaaaacagagactggcccagatgaggcattcttcaaatgtttgttgaaatgaatggacaaactcttaggataaatcctaatttgttggcaactgttatttgattttagaaggcaaactgattttattttagagaggggaaggggaggggaggctcattagcctcttggtagaaagaggactatttctgcaaatgaataggtttccaccttaagtagtgacagtccttaacttcttattatggagtgagtcttgaccgctttccaagttcaatagaagttcaagattgcctctcagtgattagggaaattgaagcttttaaagctcctggtctcagtaattcctcagaataaacctctttaaaagggatattgatggaaatgtacaattaccagtaattgaggttttatctgaggggatggagatgatgaaatggttccttcttggaagttgttggcattttggctttatttttcacaaataaagtgaaaccatttaaaacgattgacaacgattatatagtgccatgtggaatacaatagatattaatttgtggttggtttttctgcctgctttaaatgaaatgtattatgtttctgggttccttttttagctgtaaaaatacttcgtcactaaagcatgaaatttaatcagcagttgttcttcaagttcctgaaagctataaaagtttctcatgacttgagtggttttttccctgcccaccagaggagaaagcccttgtagaattctgcagtgttacaagtgttccctacaaaaactgaaaccatcagctcctctttaacaagttggctttttaaaagcacgtaattacaatttaatggtattctgtaaagtggtgctctaggcataatttaaattctttttaatgactatatttcttcaaaactttgaaagaaaaatgtgttctttttgctgcatcctttgtaagaagactgccaacagaggaaaaaggactttacaaattaagaccatcttggtttcatttccacaaagatgagaacaaatcatggtgttaggaaaggatccttagaagaacacaagaatttgaaagcccttggtggttatcactactatatttcatatttccacagaagtgacttagccaagctctgcattttgagcctgctgactttcatttaaaaggaatgaaaggctgaaaatccaggctgctgtgtctgtagataaaggtcaaaccatgtttgagttcttcactgttgtgtccacctaaataaaactgagtaagtaatgaaaaaaagtcttaata

SEQ ID NO: 736958 - DNA, 5703 bp, Homo sapiens; identical to SEQ ID NO: 37240

SEQ ID NO: 736959 - DNA, 751 bp, Homo sapiens
gagctgccaggcgggagcggcgtaggcgcggggtcgccggccagcgtgaaccgggacatggagccgcccggcgggagcctggggcccggccgcgagacccgggacaagaagaagggccggagcccagatgagctgccctcggcgggcggcgacggcggcaaatctaagaaatttctggagagatttaccagcatgagaattaagaaggagaaggaaaagcccaattctgctcatagaaattcttctgcatcatatggggatgatcccacagcacagtcattgcaagatgtttcagatgaacaagtgctggttctctttgaacagatgctgctggatatgaacctgaatgaggagaaacagcaacctttgagggagaaggacatcatcatcaagagggagatggtgtcccaatacttgtacacctccaaggctgtgagtcctgggacaggtacccatgacatgggagactgtgcccttgtcttggacctgttttttttttgccaattttatgtaacattttatgtctgcatcaattctgtttcattccattatataagcctgttcactttttactgtcttatttagttaccgttcttacatacattttgcctggttaaattttcatgaagtatgtaaatatagggaatgggataggcagttctaagtctcatttatgttggtggtatgtgagatgggtatctgccctgataaacgtggcctgacatggtggcttactcctgtaatctgagca

SEQ ID NO: 736960 - DNA, 233 bp, Homo sapiens; identical to SEQ ID NO: 37241
  misc_feature (211)..(211): n is a, c, g, or t

SEQ ID NO: 736961 - DNA, 556 bp, Homo sapiens
gtatgtgactggaataatttttcttctccattttcaattttatcattttctcttagttcagaggacaattgagttggttgggtgtcctctcggtcataaatactaggtaagattgtgtttcttcccagaagtgaacactaagcatcttaaaatttaagaacaattcctaagtgatgggtgctatcctgaatgttccactggtcatcagaggtatagcaaaatgtctcctatatctccattaatatctgtattgtctaggatgagggtttctttttactattcttttttctaaacttctcttctcacttcatttcattaatttgatcttcaatcactgataccctttcttccactagatcgaatcggctactgaagcatgtgtatgtgtcatgtagttctcgcgccatggttttcagctccatcaggtcatttaaggtcttctctacactgtttattctagttaccatttgtctaatctcttttcaagtttttagcttcctgcgatgggttcgacatcctcctttagcttggagatagtcatgttagtacccacttc

SEQ ID NO: 736962 - DNA, 423 bp, Homo sapiens; identical to SEQ ID NO: 37259

SEQ ID NO: 736963 - DNA, 1429 bp, Homo sapiens; identical to SEQ ID NO: 37256

SEQ ID NO: 736964 - DNA, 5679 bp, Homo sapiens; identical to SEQ ID NO: 37243

SEQ ID NO: 736965 - DNA, 5732 bp, Homo sapiens
gagctgccaggcgggagcggcgtaggcgcggggtcgccggccagcgtgaaccgggacatggagccgcccggcgggagcctggggcccggccgcgagacccgggacaagaagaagggccggagcccagatgagctgccctcggcgggcggcgacggcggcaaatctaagaaatttctggagagatttaccagcatgagaattaagaaggagaaggaaaagcccaattctgctcatagaaattcttctgcatcatatggggatgatcccacagcacagtcattgcaagatgtttcagatgaacaagtgctggttctctttgaacagatgctgctggatatgaacctgaatgaggagaaacagcaacctttgagggagaaggacatcatcatcaagagggagatggtgtcccaatacttgtacacctccaaggctggcatgagccagaaggagagctctaagtctgccatgatgtatattcaggagttgaggtcaggcttgcgggatatgcctctgctcagctgcctggagtcccttcgtgtgtctctcaacaacaaccctgtcagttgggtgcaaacatttggtgctgaaggcttggcctccttattggacattcttaaacgacttcatgatgagaaagaagagactgctgggagttacgatagccggaacaagcatgagatcattcgctgcttgaaagcttttatgaacaacaagtttggaatcaagaccatgttggagacagaagaaggaatcctactgctggtcagagccatggatcctgctgttcccaacatgatgattgatgcagctaagctgctttctgctctttgtattctaccgcagccagaggacatgaatgaaagggttttggaggcaatgacagaaagagctgagatggatgaagtggaacgtttccagccgctgctggatggattaaaaagtggaaccactattgcactgaaggttggatgcctacagctgatcaatgctctcatcacaccagcggaggaacttgacttccgagttcacatcagaagtgaactgatgcgtttggggctacatcaggtgttgcaggaccttcgagagattgaaaatgaagatatgagagtgcaactaaatgtgtttgatgaacaaggggaagaggattcctatgacctgaagggacggctggatgacattcgcatggagatggatgactttaatgaagtctttcagattctcttaaacacagtgaaggattcaaaggcagagccacacttcctttccatcctgcagcacttactcttggtccgaaatgactatgaggccagacctcagtactataagttgattgaagaatgtatttcccagatagttctgcacaagaacggggctgatcctgacttcaagtgccggcacctccagattgagattgagggattaattgatcaaatgattgataagacaaaggtggagaaatctgaagccaaagctgcagagctggaaaagaagttggactcagagttaacagcccgacatgagctacaggtggaaatgaaaaagatggaaagtgactttgagcagaagcttcaagatcttcagggagaaaaagatgcactgcattctgaaaagcagcaaattgccacagagaaacaggacctggaagcagaggtgtcccagctcacaggagaggttgccaagctgacaaaggaactggaagatgccaagaaagaaatggcttccctctctgcggcagctattactgtacctccttctgttcctagtcgtgctcctgttccccctgcccctcctttacctggtgactctggcactattattccaccaccacctgctcctggggatagtaccactcctcctcctcctcctcctcctcctcctcctccacctcctttgcctgggggtgtttgcatctcctcacccccttctttacctggaggtactgctatctctccaccccctcctttgtctggggatgctaccatccctccaccccctcctttgcctgagggtgttggcatcccttcaccctcttctttgcctggaggtactgccatccccccacctcctcctttgcctgggagtgctagaatccccccaccaccacctcctttgcctgggagtgctggaattccccccccacctcctcccttgcctggagaagcaggaatgccacctcctcctccccctcttcctggtggtcctggaatccctccacctcctccatttcccggaggccctggcattcctccacctccacccggaatgggtatgcctccacctcccccatttggatttggagttcctgcagccccagttctgccatttggattaacccccaaaaagctttataagccagaggtgcagctccggaggccaaactggtccaagcttgtggctgaggacctctcccaggactgcttctggacaaaggtgaaggaggaccgctttgagaacaatgaacttttcgccaaacttacccttaccttctctgcccagaccaagacttccaaagccaagaaggatcaagaaggtggagaagaaaagaaatctgtgcaaaagaaaaaagtaaaagagttaaaggtgttggattcaaagacagcccagaatctctcaatctttttgggttccttccgcatgccctatcaagagattaagaatgtcatcctggaggtgaatgaggctgttctgactgagtctatgatccagaacctcattaagcaaatgccagagccagagcagttaaaaatgctttctgaactgaaggatgaatatgatgacctggctgagtcagagcagtttggcgtggtgatgggcactgtgccccgactgcggcctcgcctcaatgccattctcttcaagctacaattcagcgagcaagtggagaatatcaagccagagattgtgtctgtcactgctgcatgtgaggagttacgtaagagtgagagcttttccaatctcctagagattaccttgcttgttggaaattacatgaatgctggctccagaaatgctggtgcttttggcttcaatatcagcttcctctgtaagcttcgagacaccaagtccacagatcagaagatgacgttgttacacttcttggctgagttgtgtgagaatgactatcccgatgtcctcaagtttccagacgagcttgcccatgtggagaaagccagccgagtttctgctgaaaacttgcaaaagaacctagatcagatgaagaaacaaatttctgatgtggaacgtgatgttcagaatttcccagctgccacagatgaaaaagacaagtttgttgaaaaaatgaccagctttgtgaaggatgcacaggaacagtataacaagctgcggatgatgcattctaacatggagaccctctataaggagctgggcgagtacttcctctttgaccccaagaagttgtctgttgaagaatttttcatggatcttcacaattttcggaatatgtttttgcaagcagtcaaggagaaccagaagcggcgggagacagaagaaaagatgaggcgagcaaaactagccaaggagaaggcagagaaggagcggctagagaagcagcagaagagagagcaactcatagacatgaatgcagagggcgatgagacaggtgtgatggacagtcttctagaagccctgcagtcaggggcagcattccgacggaagagagggccccgtcaagacaacctcttgtgcccctgggaagtagaggaggaggaggagacctttaaattgccaacaggaaggccgggtgtgcagtcacatctctgctagcttcggagctgaccaaggatgatgccatggctgctgttcctgccaaggtgtccaagaacagtgagacattccccacaatccttgaggaagccaaggagttggttggccgtgcaagctaatgtgggtcctgtgaccgcggcagctcctcagcggagccgcagactgtcctgccctgcagcatgtgcctaaaggctcaaggggatattcctctggggtggccactcccaccaccctgaccctgtctttctctctggcctgctgctctctcaacatcacatacagcttcagctgcctggaggccagaaggaaagggcagtgcaggggaggcctgagcccgacttagccagccctggctgttgtattaccaaagcagggtccatgtttgctgccttaaccctgtctcctctctgttactcagagggcctcatctcagacaaggcccagcctgctttttctcagccctgactttctaatgggctttcccccctaggtcagtcttgctggatttgtgcttttcttttgtggtttctctggccctgagaatagcatggggcttgtaaacctttgggctagatccctcctttcattgctgttgtctctgctcttccctctcctggctgtggttatttattattagtggtgtggcactgggagctgctcctaaggaagcagggagcaaatcccacctttaccccaccttcctgggaaaggcctccaaagcaaaggatctggaccagtttccctgctgtgctgtggcccaggccagagcctgtgggcaggcaggcagggcatagcgacagtgtgggacctgcccccagcttctgccacgctttatgcccttgcctctctggacgctctgcaccaaccccaggctactgagccaccttccctcctcatgccttccctgagctttggtgcatctcatctggactatgggttgtactgtgaccatcccaacacctcaccctctgtctacaaggaaatgggaggtggagcctcctggctgagaaattgttttgcaaatggatctatttttgtatgaaaaaaaaaatttttttaaagaaaactgttccttccccctttcccctccataatgtaagaagctttggtggcaggttacagagttctgggatttcttctcacaggcccaatcctgaatgtgcccctggaccttctggacccttgagtccaaggcagatcctctctcccagggaatccgacacaggaggaaccccttctctggttgagctgggccaggcctaagagtagcaggaactctaagaccacagagttttttataaatgtataaatgtatcaagccaaatgtgcagatgctaactggacattctggggaactgggcaccaggagtgccttcatacactgtaccccagctctcttctaaaagagaagtgggtgggcacactgaactgtttggtggccccaaccacaggaagctgcaattctctggcttagggtgatacttttgccctccttgtgcccctctcagctttccatccccagctaggaagaaagaatggcactcttgggcttggcccagaattagagttattagagcaagagagagcttaggaagcatgagggcaactatagtgaggccttattgccaggagggagggttttggttgctggcgcttgtgtataaaggggcaagagcagctcctttggactattcctgggaggactctgatgcagggcgtctgttgctcccctgggtcacctcctccctgctcgctgacatctggggctttgaccctttcttttttaatctacttttgctaagatgcatttaataaaaaaaaagagagagagagagaggtgtgagggacaaaatgcaaacctatttcccttgcctcataggcttctgggatgtcatcacctccagtttgttggttttgtttccaactgttaataaagcattgaaacagta

SEQ ID NO: 736966 - DNA, 3100 bp, Homo sapiens; identical to SEQ ID NO: 37254
  misc_feature (3058)..(3058): n is a, c, g, or t
  misc_feature (3084)..(3084): n is a, c, g, or t

SEQ ID NO: 736967 - DNA, 2392 bp, Homo sapiens
gagctgccaggcgggagcggcgtaggcgcggggtcgccggccagcgtgaaccgggacatggagccgcccggcgggagcctggggcccggccgcgagacccgggacaagaagaagggccggagcccagatgagctgccctcggcgggcggcgacggcggcaaatctaagaaatttctggagagatttaccagcatgagaattaagaaggagaaggaaaagcccaattctgctcatagaaattcttctgcatcatatggggatgatcccacagcacagtcattgcaagatgtttcagatgaacaagtgctggttctctttgaacagatgctgctggatatgaacctgaatgaggagaaacagcaacctttgagggagaaggacatcatcatcaagagggagatggtgtcccaatacttgtacacctccaaggctggcatgagccagaaggagagctctaagtctgccatgatgtatattcaggagttgaggtcaggcttgcgggatatgcctctgctcagctgcctggagtcccttcgtgtgtctctcaacaacaaccctgtcagttgggtgcaaacatttggtgctgaaggcttggcctccttattggacattcttaaacgacttcatgatgagaaagaagagactgctgggagttacgatagccggaacaagcatgagatcattcgctgcttgaaagcttttatgaacaacaagtttggaatcaagaccatgttggagacagaagaaggaatcctactgctggtcagagccatggatcctgctgttcccaacatgatgattgatgcagctaagctgctttctgctctttgtattctaccgcagccagaggacatgaatgaaagggttttggaggcaatgacagaaagagctgagatggatgaagtggaacgtttccagccgctgctggatggattaaaaagtggaaccactattgcactgaaggttggatgcctacagctgatcaatgctctcatcacaccagcggaggaacttgacttccgagttcacatcagaagtgaactgatgcgtttggggctacatcaggtgttgcaggaccttcgagagattgaaaatgaagatatgagagtgcaactaaatgtgtttgatgaacaaggggaagaggattcctatgacctgaagggacggctggatgacattcgcatggagatggatgactttaatgaagtctttcagattctcttaaacacagtgaaggattcaaaggcagagccacacttcctttccatcctgcagcacttactcttggtccgaaatgactatgaggccagacctcagtactataagttgattgaagaatgtatttcccagatagttctgcacaagaacggggctgatcctgacttcaagtgccggcacctccagattgagattgagggattaattgatcaaatgattgataagacaaaggtggagaaatctgaagccaaagctgcagagctggaaaagaagttggactcagagttaacagcccgacatgagctacaggtggaaatgaaaaagatggaaagtgactttgagcagaagcttcaagatcttcagggagaaaaagatgcactgcattctgaaaagcagcaaattgccacagagaaacaggacctggaagcagaggtgtcccagctcacaggagaggttgccaagctgacaaaggaactggaagatgccaagaaagaaatggcttccctctctgcggcagctattactgtacctccttctgttcctagtcgtgctcctgttccccctgcccctcctttacctggtgactctggcactattattccaccaccacctgctcctggggatagtaccactcctcctcctcctcctcctcctcctcctcctccacctcctttgcctggaggtactgctatctctccaccccctcctttgtctggggatgctaccatccctccaccccctcctttgcctgagggtgttggcatcccttcaccctcttctttgcctggaggtactgccatccccccacctcctcctttgcctgggagtgctagaatccccccaccaccacctcctttgcctgggagtgctggaattccccccccacctcctcccttgcctggagaagcaggaatgccacctcctcctccccctcttcctggtggtcctggaatccctccacctcctcctccctgctcgctgacatctggggctttgaccctttcttttttaatctacttttgctaagatgcatttaataaaaaaaaagagagagagagagaggtgtgagggacaaaatgcaaacctatttcccttgcctcataggcttctgggatgtcatcacctccagtttgttggttttgtttccaactgttaataaagcattgaaacagta

SEQ ID NO: 736968 - DNA, 2166 bp, Homo sapiens; identical to SEQ ID NO: 37250

SEQ ID NO: 736969 - DNA, 3224 bp, Homo sapiens; identical to SEQ ID NO: 37247

SEQ ID NO: 736970 - DNA, 1405 bp, Homo sapiens; identical to SEQ ID NO: 37253

SEQ ID NO: 736971 - DNA, 2411 bp, Homo sapiens; identical to SEQ ID NO: 37249

SEQ ID NO: 736972 - DNA, 2068 bp, Homo sapiens; identical to SEQ ID NO: 37251

SEQ ID NO: 736973 - DNA, 3222 bp, Homo sapiens; identical to SEQ ID NO: 37248

SEQ ID NO: 736974 - DNA, 3598 bp, Homo sapiens
ggtcggaatctgggaatcgtcgaccccgcgtcctgggagtgctggaattccccccccacctcctcccttgcctggagaagcaggaatgccacctcctcctccccctcttcctggtggtcctggaatccctccacctcctccatttcccggaggccctggcattcctccacctccacccggaatgggtatgcctccacctcccccatttggatttggagttcctgcagccccagttctgccatttggattaacccccaaaaagctttataagccagaggtgcagctccggaggccaaactggtccaagcttgtggctgaggacctctcccaggactgcttctggacaaaggtgaaggaggaccgctttgagaacaatgaacttttcgccaaacttacccttaccttctctgcccagaccaagacttccaaagccaagaaggatcaagaaggtggagaagaaaagaaatctgtgcaaaagaaaaaagtaaaagagttaaaggtgttggattcaaagacagcccagaatctctcaatctttttgggttccttccgcatgccctatcaagagattaagaatgtcatcctggaggtgaatgaggctgttctgactgagtctatgatccagaacctcattaagcaaatgccagagccagagcagttaaaaatgctttctgaactgaaggatgaatatgatgacctggctgagtcagagcagtttggcgtggtgatgggcactgtgccccgactgcggcctcgcctcaatgccattctcttcaagctacaattcagcgagcaagtggagaatatcaagccagagattgtgtctgtcactgctgcatgtgaggagttacgtaagagtgagagcttttccaatctcctagagattaccttgcttgttggaaattacatgaatgctggctccagaaatgctggtgcttttggcttcaatatcagcttcctctgtaagcttcgagacaccaagtccacagatcagaagatgacgttgttacacttcttggctgagttgtgtgagaatgactatcccgatgtcctcaagtttccagacgagcttgcccatgtggagaaagccagccgagtttctgctgaaaacttgcaaaagaacctagatcagatgaagaaacaaatttctgatgtggaacgtgatgttcagaatttcccagctgccacagatgaaaaagacaagtttgttgaaaaaatgaccagctttgtgaaggatgcacaggaacagtataacaagctgcggatgatgcattctaacatggagaccctctataaggagctgggcgagtacttcctctttgaccccaagaagttgtctgttgaagaatttttcatggatcttcacaattttcggaatatgtttttgcaagcagtcaaggagaaccagaagcggcgggagacagaagaaaagatgaggcgagcaaaactagccaaggagaaggcagagaaggagcggctagagaagcagcagaagagagagcaactcatagacatgaatgcagagggcgatgagacaggtgtgatggacagtcttctagaagccctgcagtcaggggcagcattccgacggaagagagggccccgtcaagccaacaggaaggccgggtgtgcagtcacatctctgctagcttcggagctgaccaaggatgatgccatggctgctgttcctgccaaggtgtccaagaacagtgagacattccccacaatccttgaggaagccaaggagttggttggccgtgcaagctaatgtgggtcctgtgaccgcggcagctcctcagcggagccgcagactgtcctgccctgcagcatgtgcctaaaggctcaaggggatattcctctggggtggccactcccaccaccctgaccctgtctttctctctggcctgctgctctctcaacatcacatacagcttcagctgcctggaggccagaaggaaagggcagtgcaggggaggcctgagcccgacttagccagccctggctgttgtattaccaaagcagggtccatgtttgctgccttaaccctgtctcctctctgttactcagagggcctcatctcagacaaggcccagcctgctttttctcagccctgactttctaatgggctttcccccctaggtcagtcttgctggatttgtgcttttcttttgtggtttctctggccctgagaatagcatggggcttgtaaacctttgggctagatccctcctttcattgctgttgtctctgctcttccctctcctggctgtggttatttattattagtggtgtggcactgggagctgctcctaaggaagcagggagcaaatcccacctttaccccaccttcctgggaaaggcctccaaagcaaaggatctggaccagtttccctgctgtgctgtggcccaggccagagcctgtgggcaggcaggcagggcatagcgacagtgtgggacctgcccccagcttctgccacgctttatgcccttgcctctctggacgctctgcaccaaccccaggctactgagccaccttccctcctcatgccttccctgagctttggtgcatctcatctggactatgggttgtactgtgaccatcccaacacctcaccctctgtctacaaggaaatgggaggtggagcctcctggctgagaaattgttttgcaaatggatctatttttgtatgaaaaaaaaaatttttttaaagaaaactgttccttccccctttcccctccataatgtaagaagctttggtggcaggttacagagttctgggatttcttctcacaggcccaatcctgaatgtgcccctggaccttctggacccttgagtccaaggcagatcctctctcccagggaatccgacacaggaggaaccccttctctggttgagctgggccaggcctaagagtagcaggaactctaagaccacagagttttttataaatgtataaatgtatcaagccaaatgtgcagatgctaactggacattctggggaactgggcaccaggagtgccttcatacactgtaccccagctctcttctaaaagagaagtgggtgggcacactgaactgtttggtggccccaaccacaggaagctgcaattctctggcttagggtgatacttttgccctccttgtgcccctctcagctttccatccccagctaggaagaaagaatggcactcttgggcttggcccagaattagagttattagagcaagagagagcttaggaagcatgagggcaactatagtgaggccttattgccaggagggagggttttggttgctggcgcttgtgtataaaggggcaagagcagctcctttggactattcctgggaggactctgatgcagggcgtctgttgctcccctgggtcacctcctccctgctcgctgacatctggggctttgaccctttcttttttaatctacttttgctaagatgcatttaataaaaaaaaagagagagagagagaggtgtgagggacaaaatgcaaacctatttcccttgcctcataggcttctgggatgtcatcacctccagtttgttggttttgtttccaactgttaataaagcattgaaacagta

SEQ ID NO: 736975 - DNA, 1973 bp, Homo sapiens; identical to SEQ ID NO: 37252

SEQ ID NO: 736976 - DNA, 3464 bp, Homo sapiens
  misc_feature (18)..(18): n is a, c, g, or t
gggcttccgggaaatggnggaggtggagggattccaggacctccggaatgggtatgcctccacctcccccatttggatttggagttcctgcagccccagttctgccatttggattaacccccaaaaagctttataagccagaggtgcagctccggaggccaaactggtccaagcttgtggctgaggacctctcccaggactgcttctggacaaaggtgaaggaggaccgctttgagaacaatgaacttttcgccaaacttacccttaccttctctgcccagaccaagacttccaaagccaagaaggatcaagaaggtggagaagaaaagaaatctgtgcaaaagaaaaaagtaaaagagttaaaggtgttggattcaaagacagcccagaatctctcaatctttttgggttccttccgcatgccctatcaagagattaagaatgtcatcctggaggtgaatgaggctgttctgactgagtctatgatccagaacctcattaagcaaatgccagagccagagcagttaaaaatgctttctgaactgaaggatgaatatgatgacctggctgagtcagagcagtttggcgtggtgatgggcactgtgccccgactgcggcctcgcctcaatgccattctcttcaagctacaattcagcgagcaagtggagaatatcaagccagagattgtgtctgtcactgctgcatgtgaggagttacgtaagagtgagagcttttccaatctcctagagattaccttgcttgttggaaattacatgaatgctggctccagaaatgctggtgcttttggcttcaatatcagcttcctctgtaagcttcgagacaccaagtccacagatcagaagatgacgttgttacacttcttggctgagttgtgtgagaatgactatcccgatgtcctcaagtttccagacgagcttgcccatgtggagaaagccagccgagtttctgctgaaaacttgcaaaagaacctagatcagatgaagaaacaaatttctgatgtggaacgtgatgttcagaatttcccagctgccacagatgaaaaagacaagtttgttgaaaaaatgaccagctttgtgaaggatgcacaggaacagtataacaagctgcggatgatgcattctaacatggagaccctctataaggagctgggcgagtacttcctctttgaccccaagaagttgtctgttgaagaatttttcatggatcttcacaattttcggaatatgtttttgcaagcagtcaaggagaaccagaagcggcgggagacagaagaaaagatgaggcgagcaaaactagccaaggagaaggcagagaaggagcggctagagaagcagcagaagagagagcaactcatagacatgaatgcagagggcgatgagacaggtgtgatggacagtcttctagaagccctgcagtcaggggcagcattccgacggaagagagggccccgtcaagccaacaggaaggccgggtgtgcagtcacatctctgctagcttcggagctgaccaaggatgatgccatggctgctgttcctgccaaggtgtccaagaacagtgagacattccccacaatccttgaggaagccaaggagttggttggccgtgcaagctaatgtgggtcctgtgaccgcggcagctcctcagcggagccgcagactgtcctgccctgcagcatgtgcctaaaggctcaaggggatattcctctggggtggccactcccaccaccctgaccctgtctttctctctggcctgctgctctctcaacatcacatacagcttcagctgcctggaggccagaaggaaagggcagtgcaggggaggcctgagcccgacttagccagccctggctgttgtattaccaaagcagggtccatgtttgctgccttaaccctgtctcctctctgttactcagagggcctcatctcagacaaggcccagcctgctttttctcagccctgactttctaatgggctttcccccctaggtcagtcttgctggatttgtgcttttcttttgtggtttctctggccctgagaatagcatggggcttgtaaacctttgggctagatccctcctttcattgctgttgtctctgctcttccctctcctggctgtggttatttattattagtggtgtggcactgggagctgctcctaaggaagcagggagcaaatcccacctttaccccaccttcctgggaaaggcctccaaagcaaaggatctggaccagtttccctgctgtgctgtggcccaggccagagcctgtgggcaggcaggcagggcatagcgacagtgtgggacctgcccccagcttctgccacgctttatgcccttgcctctctggacgctctgcaccaaccccaggctactgagccaccttccctcctcatgccttccctgagctttggtgcatctcatctggactatgggttgtactgtgaccatcccaacacctcaccctctgtctacaaggaaatgggaggtggagcctcctggctgagaaattgttttgcaaatggatctatttttgtatgaaaaaaaaaatttttttaaagaaaactgttccttccccctttcccctccataatgtaagaagctttggtggcaggttacagagttctgggatttcttctcacaggcccaatcctgaatgtgcccctggaccttctggacccttgagtccaaggcagatcctctctcccagggaatccgacacaggaggaaccccttctctggttgagctgggccaggcctaagagtagcaggaactctaagaccacagagttttttataaatgtataaatgtatcaagccaaatgtgcagatgctaactggacattctggggaactgggcaccaggagtgccttcatacactgtaccccagctctcttctaaaagagaagtgggtgggcacactgaactgtttggtggccccaaccacaggaagctgcaattctctggcttagggtgatacttttgccctccttgtgcccctctcagctttccatccccagctaggaagaaagaatggcactcttgggcttggcccagaattagagttattagagcaagagagagcttaggaagcatgagggcaactatagtgaggccttattgccaggagggagggttttggttgctggcgcttgtgtataaaggggcaagagcagctcctttggactattcctgggaggactctgatgcagggcgtctgttgctcccctgggtcacctcctccctgctcgctgacatctggggctttgaccctttcttttttaatctacttttgctaagatgcatttaataaaaaaaaagagagagagagagaggtgtgagggacaaaatgcaaacctatttcccttgcctcataggcttctgggatgtcatcacctccagtttgttggttttgtttccaactgttaataaagcattgaaacagta

SEQ ID NO: 736977 - DNA, 5389 bp, Homo sapiens
actgcgctctgctatatctacatcagctaccctaccctatctacgtcaaataatcaaaacttcttgtgatccgcccgcctcggcctcccaaagtgctaggattacaagcgtgagccactgcgcccagccaacttacagatattttttaaagcagatttcactatctgttctaggtgatcatttttacaaatgatactgcagtgaacatccttgtgcatatcttctttcacatttatgcccatatgttggatacatttctagaagtagactatatgttacatgcatgagaaattgattagtactgttaaatgcccctccaaaagttgtatcaatttatacttcattgaataggggacttgatttggtatttatggacaggagcctagggatggattgtagggaatgcatttccctgaagagatggtccttagctttcagcagtttctggaaactgagtggtgagaataataatgtgagaaatccggaacactgataatgtcctgtttcctaatcggtctgtgcccctgtgtaatttactcattatacgtgtccgtgtcacagtacctggaaagttctctccgtttcctttctcttgggcaggaatgaaagggttttggaggcaatgacagaaagagctgagatggatgaagtggaacgtttccagccgctgctggatggattaaaaagtggaaccactattgcactgaaggttggatgcctacagctgatcaatgctctcatcacaccagcggaggaacttgacttccgagttcacatcagaagtgaactgatgcgtttggggctacatcaggtgttgcaggaccttcgagagattgaaaatgaagatatgagagtgcaactaaatgtgtttgatgaacaaggggaagaggattcctatgacctgaagggacggctggatgacattcgcatggagatggatgactttaatgaagtctttcagattctcttaaacacagtgaaggattcaaaggcagagccacacttcctttccatcctgcagcacttactcttggtccgaaatgactatgaggccagacctcagtactataagttgattgaagaatgtatttcccagatagttctgcacaagaacggggctgatcctgacttcaagtgccggcacctccagattgagattgagggattaattgatcaaatgattgataagacaaaggtggagaaatctgaagccaaagctgcagagctggaaaagaagttggactcagagttaacagcccgacatgagctacaggtggaaatgaaaaagatggaaagtgactttgagcagaagcttcaagatcttcagggagaaaaagatgcactgcattctgaaaagcagcaaattgccacagagaaacaggacctggaagcagaggtgtcccagctcacaggagaggttgccaagctgacaaaggaactggaagatgccaagaaagaaatggcttccctctctgcggcagctattactgtacctccttctgttcctagtcgtgctcctgttccccctgcccctcctttacctggtgactctggcactattattccaccaccacctgctcctggggatagtaccactcctcctcctcctcctcctcctcctcctcctccacctcctttgcctggaggtactgctatctctccaccccctcctttgtctggggatgctaccatccctccaccccctcctttgcctgagggtgttggcatcccttcaccctcttctttgcctggaggtactgccatccccccacctcctcctttgcctgggagtgctagaatccccccaccaccacctcctttgcctgggagtgctggaattccccccccacctcctcccttgcctggagaagcaggaatgccacctcctcctccccctcttcctggtggtcctggaatccctccacctcctccatttcccggaggccctggcattcctccacctccacccggaatgggtatgcctccacctcccccatttggatttggagttcctgcagccccagttctgccatttggattaacccccaaaaagctttataagccagaggtgcagctccggaggccaaactggtccaagcttgtggctgaggacctctcccaggactgcttctggacaaaggtgaaggaggaccgctttgagaacaatgaacttttcgccaaacttacccttaccttctctgcccagaccaagacttccaaagccaagaaggatcaagaaggtggagaagaaaagaaatctgtgcaaaagaaaaaagtaaaagagttaaaggtgttggattcaaagacagcccagaatctctcaatctttttgggttccttccgcatgccctatcaagagattaagaatgtcatcctggaggtgaatgaggctgttctgactgagtctatgatccagaacctcattaagcaaatgccagagccagagcagttaaaaatgctttctgaactgaaggatgaatatgatgacctggctgagtcagagcagtttggcgtggtgatgggcactgtgccccgactgcggcctcgcctcaatgccattctcttcaagctacaattcagcgagcaagtggagaatatcaagccagagattgtgtctgtcactgctgcatgtgaggagttacgtaagagtgagagcttttccaatctcctagagattaccttgcttgttggaaattacatgaatgctggctccagaaatgctggtgcttttggcttcaatatcagcttcctctgtaagcttcgagacaccaagtccacagatcagaagatgacgttgttacacttcttggctgagttgtgtgagaatgactatcccgatgtcctcaagtttccagacgagcttgcccatgtggagaaagccagccgagtttctgctgaaaacttgcaaaagaacctagatcagatgaagaaacaaatttctgatgtggaacgtgatgttcagaatttcccagctgccacagatgaaaaagacaagtttgttgaaaaaatgaccagctttgtgaaggatgcacaggaacagtataacaagctgcggatgatgcattctaacatggagaccctctataaggagctgggcgagtacttcctctttgaccccaagaagttgtctgttgaagaatttttcatggatcttcacaattttcggaatatgtttttgcaagcagtcaaggagaaccagaagcggcgggagacagaagaaaagatgaggcgagcaaaactagccaaggagaaggcagagaaggagcggctagagaagcagcagaagagagagcaactcatagacatgaatgcagagggcgatgagacaggtgtgatggacagtcttctagaagccctgcagtcaggggcagcattccgacggaagagagggccccgtcaagccaacaggaaggccgggtgtgcagtcacatctctgctagcttcggagctgaccaaggatgatgccatggctgctgttcctgccaaggtgtccaagaacagtgagacattccccacaatccttgaggaagccaaggagttggttggccgtgcaagctaatgtgggtcctgtgaccgcggcagctcctcagcggagccgcagactgtcctgccctgcagcatgtgcctaaaggctcaaggggatattcctctggggtggccactcccaccaccctgaccctgtctttctctctggcctgctgctctctcaacatcacatacagcttcagctgcctggaggccagaaggaaagggcagtgcaggggaggcctgagcccgacttagccagccctggctgttgtattaccaaagcagggtccatgtttgctgccttaaccctgtctcctctctgttactcagagggcctcatctcagacaaggcccagcctgctttttctcagccctgactttctaatgggctttcccccctaggtcagtcttgctggatttgtgcttttcttttgtggtttctctggccctgagaatagcatggggcttgtaaacctttgggctagatccctcctttcattgctgttgtctctgctcttccctctcctggctgtggttatttattattagtggtgtggcactgggagctgctcctaaggaagcagggagcaaatcccacctttaccccaccttcctgggaaaggcctccaaagcaaaggatctggaccagtttccctgctgtgctgtggcccaggccagagcctgtgggcaggcaggcagggcatagcgacagtgtgggacctgcccccagcttctgccacgctttatgcccttgcctctctggacgctctgcaccaaccccaggctactgagccaccttccctcctcatgccttccctgagctttggtgcatctcatctggactatgggttgtactgtgaccatcccaacacctcaccctctgtctacaaggaaatgggaggtggagcctcctggctgagaaattgttttgcaaatggatctatttttgtatgaaaaaaaaaatttttttaaagaaaactgttccttccccctttcccctccataatgtaagaagctttggtggcaggttacagagttctgggatttcttctcacaggcccaatcctgaatgtgcccctggaccttctggacccttgagtccaaggcagatcctctctcccagggaatccgacacaggaggaaccccttctctggttgagctgggccaggcctaagagtagcaggaactctaagaccacagagttttttataaatgtataaatgtatcaagccaaatgtgcagatgctaactggacattctggggaactgggcaccaggagtgccttcatacactgtaccccagctctcttctaaaagagaagtgggtgggcacactgaactgtttggtggccccaaccacaggaagctgcaattctctggcttagggtgatacttttgccctccttgtgcccctctcagctttccatccccagctaggaagaaagaatggcactcttgggcttggcccagaattagagttattagagcaagagagagcttaggaagcatgagggcaactatagtgaggccttattgccaggagggagggttttggttgctggcgcttgtgtataaaggggcaagagcagctcctttggactattcctgggaggactctgatgcagggcgtctgttgctcccctgggtcacctcctccctgctcgctgacatctggggctttgaccctttcttttttaatctacttttgctaagatgcatttaataaaaaaaaagagagagagagagaggtgtgagggacaaaatgcaaacctatttcccttgcctcataggcttctgggatgtcatcacctccagtttgttggttttgtttccaactgttaataaagcattgaaacagta

SEQ ID NO: 736978 - DNA, 2711 bp, Homo sapiens
ccgatgcgagtatacattcgaatgactgactgttggagggaggtggtgtgttcacgtgagcctacatccgagggtgctcttcgtaaggggtagttgttgttttatagctccaaatggtttttttattctcagtgtagcaactgtttgatttctttctggatacagctgtatgaacacttttctattttatactgaaatcacacaggtttgtgatctaagtgccagaaccatggaggagactctggccttatctgtagggacctaaattttttaagtgctatgaacactgatcaagtagttgtggagagatgagaagaatatatgcagcaaaggtgctgtgagcccagttccaacggctgtgttctggtaatcgtgcagaacagcatgtgggctctgggccttggcaggtgcacagacgggcgggcgtcacgtgtgttcagagcttgtctccacctcacggctctgtgctcttctgtgtgctgcgttgtggccgtgaagtgggagctctcctttccaaaggcagagcttactgtcatggctcagatgttcactcgcatcttcaccccaaacttccctgaattgcagtgatttctgttataaggcacatagcaagcctgtaccactctacagtaaaatctctacactaacagtttaaagcccgaaagctgaagcattcagcctctgcaagtgtagactactggactgtagtagaggcatttggaatacttacaaagtcaagtgctgtggcttcagttcccccggctccccacccctgacatccatacttatgttgtctggaagagccatggacacatcattattttcagcaaccagctgcagtgaaactccatttacagcaaccccatagtataaaaccacaatgcctcattgtaatgggatattgaagttcattgaagaattactaggttgccatgtggctcacttatttaaaaaaaaaaaaaaaaactcacccgttttcctgggatttgttgtaaggagttttcactggcctcactcagaccaatttctgcttcaaaaagcactgaatgtgacctgttgcattcagttgtagcatcaaatccacacctagtcattgcttgaggggccaaattgtgttctgtcccatgcacgctctatttggtgttaaaatggaaccttacggttgtgttttaagtattcattgaaaccagcttcagaaaacaagatgccatagtaaattgagaataacattttttccttcttcagggtggctgtaattccaggtggccgtgatttctttcttccccactgcccactccttcgccaaacccacgtattcagtgttctgatcttgtttgtgcagagtgaactctgatgcagtatcagtcttgtcctgggagccgggtcctgctgctcacaagcccagagctgccagggagctcctggcagtagcacgttgtttagaaagttgggtggcttcattcagcatggaacaagctaatggcacaggagacatcagggcagctgttaattccaaatatttgttcccaagtagctactgaactgctcacaccattggaagattttgtattttcataccaattagtaaaaataagaacattgaggagcagtcagagcccagtgttaatctccggcagagatggggtttatgtatgttcagccagatagtaaatgggatttttggagaaataagataactacaaagtttctatacttactataagtggatttagaagcgattttggttttgtattacatacggtagtcctctgcgtcagggagcacttttttgtttgcctcgagactactcattagcgcactggctaagctgcctttgccttctcgtaggcgtgggttgcctgtgtcatgggctgtgtagaccacaacactcaaacacagttgctgcacttggattttcctttaataccaagtatcatttggttatcttactgggacattttcattgatattctatacaccaaagttttgacggtttaccatcattccattttgtaccagttaaaggcattttgatgatgctttttcttgatgctaagatcactgcagaagaataacctgaccttttctttgcatttgttttgaatgtctaacaccattagcttttgtgatctggttaagaagtattagtgccacaagcctgaaaagacagttctcctgtggcagtggcgatgtggcatccagagggccattgtttctacttttgtgggacttcagtcatgctgataatagaatcttctgttcatacaattctgtaatatttatttgtacagttagtattctaatgaaaggatgaagagtctgaactagaaggtaggtttaagccatcaccaggcctttgcaaatggcctaaatggtgttccctttgaaataacgcttgccacaagtatataataagctatattaattgtgttttgcataaaattgccaaaacacagtaatgtgtatatagtggtataagatcttgaaaaaaatctctataattgtgctctttatctgtgaatgggaaaagccatttttagtaggtgactaccatttgaaaaactcaattggatgtatatctgaatgttgcattgtattgtacagtatgcatattattgtttgtggttgcatatggcaatgaagtgtttgttttatattaaaaaaaacctgttatgtacagttgaaataaattttgcatttgctagcccgtg

SEQ ID NO: 736979 - DNA, 1058 bp, Homo sapiens
ttaacagaagcactctgcctggaggtgcgaccaacatattttgagatgaagaacgaaaaactgctgtccaaagcatcagaaccaaaataccagctttttgttccccagcttgtgactggcagatgcgctacaagagcttttcatagaaaatcacatagtttggatctgaacatcagtgagaaactgactttattacccactttatatgaaatacatagtaagactactgcctattccagactaaatgaaacacagcctattgacctttcaggcttgcctttacaatctagtaaaaatagctattcctttcagaatccatccagttttgatcctagtatgctgctgcaaagattttcagtggccccccatgagacccagacacaaagaggaggagaatttcagtgtggtctagaagctgcttcagtgtattctgaccatactaatactaacaatctgactttcctgatggacctgccctcagctggcaggagcatgccggaggcctcagaccaggaagagcacctctcccctctggacttcctgcactcagccaatttttcattgggcagcattaatcagaggcttaataagagagaaaggagcaagttgaagaatctaagaaggaaacaacgaaggcgtgaaagatggctacagaagcagggtaaatactcaggagtgggattgctggatcatatgactttgaataatgagatgagtacagatgaagacaattctatagacatcaaacgcatgaagcatttcggatctgctttaagactgaggcagactttccatctggacacagccgaccatccatgtgtcattacaatgaatccagcacttccctggaagctggaagggtcaaattcaacttcaactctgccacttcctgcttaacttgctgtttaaccttgggcaagctgccatcccacacgaggccgaaggtgtcggtttttaaaatacagaaattgggttccatgagggattatcaatatactgctggtgggccaaattccatctgctacttgcctttgtaaataaagttttattgaaacaca

SEQ ID NO: 736980 - DNA, 1767 bp, Homo sapiens
ttaacagaagcactctgcctggaggtgcgaccaacatattttgagatgaagaacgaaaaactgctgtccaaagcatcagaaccaaaataccagctttttgttccccagcttgtgactggcagatgcgctacaagagcttttcatagaaaatcacatagtttggatctgaacatcagtgagaaactgactttattacccactttatatgaaatacatagtaagactactgcctattccagactaaatgaaacacagcctattgacctttcaggcttgcctttacaatctagtaaaaatagctattcctttcagaatccatccagttttgatcctagtatgctgctgcaaagattttcagtggccccccatgagacccagacacaaagaggaggagaatttcagtgtggtctagaagctgcttcagtgtattctgaccatactaatactaacaatctgactttcctgatggacctgccctcagctggcaggagcatgccggaggcctcagaccaggaagagcacctctcccctctggacttcctgcactcagccaatttttcattgggcagcattaatcagaggcttaataagagagaaaggagcaagttgaagaatctaagaaggaaacaacgaaggcgtgaaagatggctacagaagcagggtaaatactcaggagtgggattgctggatcatatgactttgaataatgagatgagtacagatgaagacaatgaatatgcagaagaaaaggatagctacatctgtgcagtgtgtctggacgtttatttcaacccttatatgtgttacccttgccatcacatcttctgtgagccctgcttacggactctggccaaagacaatccttcaagcactccatgcccattgtgtcggacaattatttctagagtctttttccaaacagaattgaacaatgccacaaaaactttctttactaaagaatatttgaaaataaaacaaagctttcagaaatccaactctgcaaaatggcccctaccaagctgcagaaaagcatttcatctttttggaggtttccgcagacatgcagctccagttacaagaaggcagttcccacacggtgcacacaggatggattacctgcactttgaggatgatagccgtggatggtggtttgacatggatatggtgatcatatatatttattcagtgaactgggtcattggattcattgttttctgctttctttgctattttttctttccgttttaggaatttcataccttactacaattgaccaatcataaatgatgtaaataacaattgcttaaacatttttaaatgtgctttgaagtttttttaatgttgcattatacaaattgttgatgtttatagaaagcctgagaataatgaatttatttattaatgtttttcatgtaacaaactaaactttattcaagagctaacctacccagcacttagcaacaatgcactattaatttcatagttgttcttgggttaggatttggggctctgattttataatatcactttaatacttattttgattgtaaaaaactgaagttttctctccacttaaaaatagtaaaaatacaaaaagaaatgataatctaggtagatattatctttactgataaaatatttagtcaatcaccacttattctcaggcaaattatatgtattaaagataaaccatattctctgggaactaatctagcagggtatattcagttttggtttctaattgtcactacttatatccctttctag

SEQ ID NO: 736981 - DNA, 871 bp, Homo sapiens
  misc_feature (763)..(763): n is a, c, g, or t
ccgtgatagccgtcagagcctgactctagagtatacctctctcaagctggaaaaagaaggataagcaaacaggtattaccagagaggtaagagaaaaccaggagagtgtggaatgtcatgaaagccaagggaagagaacatttcaagactgacagatactaataataaatgctaacatctgttaagtcccagtcatggccagacattctgctcaggactttgaatacatgattgaatttaatgttaacaactttttgaggtgggagccatttcccttttcatagacaaggaaactgtggcaaagaatggttaagcagctgactcatggtcaggtggctggtaagtgaagctggcatttaagctcaagcagcctgactccgaactttatccacttttctctaatacaacccttagtgcagtttgggaggtcatataagatgaagcctgaagagtggtcggtagacagactgatgaagctgttattcggaatattactaaaggaatgttgtttcaggggagaaacagaatgaaagccaggctggagcccatggttaggaatgctccatgacattctcttttttcagcttgagtgagggaacctcaagagaccaggccaggtgccgtggctcatacctgtaatcccaacactttgtgaggcccaggtgggaggatctcgagcccaggagtttgagaccagcctgggcaacagagcaagaccctgtctctacaaaaaattaaaaaaaaattagctgggcatggtagngtgtgcctgtagtcccagctactcaggaggattgtttaagcctgggagattgaggctatagtaagctatcatcatgccactgcactccagcctgggcaatagagcaag

SEQ ID NO: 736982 - DNA, 733 bp, Homo sapiens
  misc_feature (625)..(625): n is a, c, g, or t
cagtggcttacttccgtaatcccaagcactttgggaggctggggcaggaggatcgctggagttcaagaccagcctgggcaacatagtattaataagaccttgtttctacttaaaataaaaaaaaatggcaaggtgtggtggcatagacaaggaaactgtggcaaagaatggttaagcagctgactcatggtcaggtggctggtaagtgaagctggcatttaagctcaagcagcctgactccgaactttatccacttttctctaatacaacccttagtgcagtttgggaggtcatataagatgaagcctgaagagtggtcggtagacagactgatgaagctgttattcggaatattactaaaggaatgttgtttcaggggagaaacagaatgaaagccaggctggagcccatggttaggaatgctccatgacattctcttttttcagcttgagtgagggaacctcaagagaccaggccaggtgccgtggctcatacctgtaatcccaacactttgtgaggcccaggtgggaggatctcgagcccaggagtttgagaccagcctgggcaacagagcaagaccctgtctctacaaaaaattaaaaaaaaattagctgggcatggtagngtgtgcctgtagtcccagctactcaggaggattgtttaagcctgggagattgaggctatagtaagctatcatcatgccactgcactccagcctgggcaatagagcaag

SEQ ID NO: 736983 - DNA, 601 bp, Homo sapiens
ccctctcccacaacctgtcaaaccagagatgccagtttccccaggactcccaggagctcccgcccctagctggtaccagggagagcctttgcaggctcggtgggcagtgcccccaacccatgccccatgcacctgcttatcgatcactgcctgtctggatgtgtctcgtgtcagagccctctggtgtgaacttgccgagtactgagaggccaagacgtgagacaattacaagcaggggagagaagtggtaccctgtgacaagaggcagctgtggagaaaggggcaggctccatgcccggggtgagcgccatctgggcaggaggcctggcttccagctgtgggggcttgggaagggcagagcctgggaggaatgattttgaagccactactatggagattaaggggatgagaatgtaaatctcaagtaaaaaggtaattgaatgtaatagcaaacactgctcgctctatgttaattttagctcttcccctggatacaagacgctgtattagtgttttattaccattttgtttgcactaataaaatagtaaaatttatttcaaggaagttgaaggatggttttacaatgcaaatttgaagaaa

SEQ ID NO: 736984 - DNA, 905 bp, Homo sapiens
  misc_feature (800)..(800): n is a, c, g, or t
  misc_feature (861)..(861): n is a, c, g, or t
cagattcgctgctcacgtttcttttttccgtggcccttcctgccctttgtttctctcttcatgtcacccgcgggacaactctacgtgcaagtcgctgaaatcgattttctgcttcttatagtaagcggcgggctcgccagcctcgagcgaaagtgtgactgcgaacgggcaggcgcgcgcggggctcggcggaggcgcgcttgggctcccggcggcgacgactacgaccactaggagagcggacggaggcggcgcctgaagcggcggcggagcccatgccccgggacggcgggcggacccggagagacaaatccggggcccggggcatgtccccggggcccccgtgaggaggcggcggcggctatggagatcgcgccgcaggaggcgccgcccgtgccgggcgcggacggcgacattgaagaggccccagctgaggccgggtctcccagccccgcgtcgccccccgccgatgggcgcctcaaggctgcagccaagcgcgtcacattcccgtccgacgaggatatcgtgtctggagcagtggagcccaaagacccctggagacatgggaactgccccaaagggggcccggggcccggggccttggggccctacaggccggcccgccagaagctcgactgggagggcaaacccccaggccccttcgcggggtgggggggattcccaagaccccggggccccgccctccctggttgggcccctgagagggggaaagcgcttccctccaaccctgggggcgccctgggcagagggccccctagggccggtgggtcctcgggcgncggcgacctcggctccctcccctcgcggggccggcgcgccgcctcctcgctccttgtgcgncgcgcgcgccgcggcgggcgcgcaacacacaacaaaaaaaaaaa

SEQ ID NO: 736985 - DNA, 797 bp, Homo sapiens
cagattcgctgctcacgtttcttttttccgtggcccttcctgccctttgtttctctcttcatgtcacccgcgggacaactctacgtgcaagtcgctgaaatcgattttctgcttcttatagtaagcggcgggctcgccagcctcgagcgaaagtgtgactgcgaacgggcaggcgcgcgcggggctcggcggaggcgcgcttgggctcccggcggcgacgactacgaccactaggagagcggacggaggcggcgcctgaagcggcggcggagcccatgccccgggacggcgggcggacccggagagacaaatccggggcccggggcatgtccccggggcccccgtgaggaggcggcggcggctatggagatcgcgccgcaggaggcgccgcccgtgccgggcgcggacggcgacattgaagaggccccagctgaggccgggtctcccagccccgcgtcgccccccgccgatgggcgcctcaaggctgcagccaagcgcgtcacattcccgtccgacgaggatatcgtgtctggagcagtggagcccaaagacccctggagacatggctggagtgcaatggcgcgatctcaggtcatcacaacttccgcctcccaggttcaagcgattctcctgccacagcctcccgagtagctgggattacaggcatgcaccaccacacccggctaattttgtatgttttgtagagacaggatttctccatgttggtcaggctggtctgtaactcccgacctcaggtgatccacgcgccttggcctcccaaagtctgggatgacagg

SEQ ID NO: 736986 - DNA, 312 bp, Homo sapiens; identical to SEQ ID NO: 16387

SEQ ID NO: 736987 - DNA, 6746 bp, Homo sapiens
  misc_feature (4811)..(4811): n is a, c, g, or t
  misc_feature (6113)..(6113): n is a, c, g, or t
cagattcgctgctcacgtttcttttttccgtggcccttcctgccctttgtttctctcttcatgtcacccgcgggacaactctacgtgcaagtcgctgaaatcgattttctgcttcttatagtaagcggcgggctcgccagcctcgagcgaaagtgtgactgcgaacgggcaggcgcgcgcggggctcggcggaggcgcgcttgggctcccggcggcgacgactacgaccactaggagagcggacggaggcggcgcctgaagcggcggcggagcccatgccccgggacggcgggcggacccggagagacaaatccggggcccggggcatgtccccggggcccccgtgaggaggcggcggcggctatggagatcgcgccgcaggaggcgccgcccgtgccgggcgcggacggcgacattgaagaggccccagctgaggccgggtctcccagccccgcgtcgccccccgccgatgggcgcctcaaggctgcagccaagcgcgtcacattcccgtccgacgaggatatcgtgtctggagcagtggagcccaaagacccctggagacatggtgagaagcttgactacaagacctgtgaggccctggaagaggtcttcaagaggctgcagttcaaggtcgtggacctggagcagacaaacctggatgaagatgtgagcggccctgccaccgcccacttggctccctgagctcccgggccccttcgagggtgcctcggccctcttcgacatgatcgagtactacgagtcggccacccacctcaacatctccttcaacaagcacatcggcacccggggctggcaggcggccgcccacatgatgcgcaagacgagctgcctgcagtatctggacgcccgcaacacgcccctgctggaccactcggcgcccttcgtggcccgtgccctgcgcatccgcagcagcctggcagtgctgcacttggagaacgccagcctgtcggggcggcccctcatgctgctcggtgagccccaagcccgggagggtgagcaggatgtgcagcctgttggggggcaggggcctgcccagtcaccgtgccccctccccgtccccagccacggccctgaagatgaacatgaacctgcgggagctgtacctggcggacaacaagctcaacggcctgcaggactcggcccagctgggtaacctgctcaagttcaactgctccctgcagatcctggacctccggaacaaccacgtgctagactcgggtgggtgcagtggcccaccccacccacacccgtcacccagcacccactctgcccggccctgcgctaggtggtgctggggacacagacatggccaagaccaccccaacgctgtcctgctggggctcccaggaggaagacagacccgccctagacagtgacaacctagagtgggcaggactgggctggtggagcccagaggcggggtccgatcagtctgggggccagggagggcttccaggaggaggagacagctcagctgacagccgcaggatgaggcgaagtgaataattacaatctgaaaagaaagcagtgttgctgccataacagggtcagctagaggctgctttcagatgggagaggagggaagaccaccgtggggcggggcctctgggcttccatccggaggctgggagcagaaccagccttgtgagaagcctgggaaagggtccagaccgcgggagcagtgagtgcagtgggaggagctctggtgtttgatgctgggggttgagcagagaatggggagccgtcaaaggaggcgttcctgttgcatcctggaggggtggggtgggtcactgtgtccccaggtggcaggcccagaccccactctactgagcacctgccaagggccatggctgtcggcccctgggctcagctcggagggagacacagggctctgcccttgggagtttgtactccagtctagagagacaacgataagatgagtgaaatctccagcctgtcagatggtgggatctgcattggagggagacagtggtgactgtgggtgggagtgagctggctgtgaggtgaggtgggccagaggtggtcacatttgagcaaagatcagaagcatctggtggaggctgtcatccaggcacccaggcccaggggtcacagatgtgtgcccaggggtgccaggccgaggcagggctgcagggcaaggcctgggactgcggggcctccatggaggtcctaagcagagggggttgctcctaccctgcagtcccctccccaggaagcacccggaccccagacagggctctgactgccggcctcctccaggtctggcctacatctgcgagggcctcaaggagcagaggaaggggctggtgaccctggtgctgtggaacaaccagctcacgcacacaggcatggccttcctgggcatgacactggtgagtcaggctggcagggaagggaggcacctcggtccccgctgccacctcccactccagctctcagcacagttgcctctagctgacggctcctgtcctgcccatcctgcaggttcaagacgatttaaactcagccccacctgcttcctcattcagcttctgtgcctgttttccctgaggaggagcccttctttcattatctcctttttttttttgagaccgagtctcatcctgtcacccaggctggagtgcagtggcgccatctaggctcactgcagccactccagcccccgcctcctgggttcaagccattcttctgcctcagcctcccaagtagctgggactacaggtgcccgccaccccgcctagccaatttttttattttttatttttattttttttgagacggagcctcaatcgcccaggctggagtgcagtggctcgatctccgctcactgcaagccccacctcctgggttcacaccattgtcctgcctcagcctcccgagtagttggaactacaggcacccaccaccacacccagctaatttttttgtatttttttagtagagaggggatttcaccatgttagccaggatggtcgcaatctgaccttgtgatccaccctcctcggcctcccaaagtgctgggattacacgcgtgagccaccgcgcccggcctaatttttgtatttttagtacagacggggtttcaccatgttggccaggccggtcttgaactcctgacctcgagtgatcccccccacctcggcctccgaaagtattgggattatgagtgagtcaccgtgcctggttttcagtttttatgtggtgcttaaagcaagccactcaggtacagagactctcagggcgagcactcgtgtgctcaaaccccgggataagagttgccctccttgggggcttcagggcgctcaaggtccaggccctggccaggggcccaggctgtggggggtagggactgactgggtgcctggggagctgggagtggacgggggacctggcatttggggagacttcaggcacaggagggacttcaggccaggcctgcggcagggcaggacggcgccggtgttcacgcaggcgcgcgaaagaaaaggagcgcccgggcctggctctcttcccggcttctttcctgacttggcctcctgggtctcctccgccatcacggcctcctcctcaccctcacaccccctccctccagccgcacactcagagcctggagacgctgaacctgggccacaaccccatcgggaacgagggtgtgcggcacctcaagaacgggctcatcagcaaccgcagcgtgctgcgcctcgggctggcctccaccaagctcacgtgcgagggcgcggtggcggtggcggagttcatcgctgagagcccccgcctcctgagactggaccttcgggagaacgagatcaagacaggcgggctcatggcactgtcgttggccctcaaggtgaaccactcactgctgcgcctggacctcgaccgtgaacccaagaaagaggcggtgagcaggggacggtcctgcagccctggggcgggcggaaggccgggtggtggggccggcctgagagccctagccaggcgctcccgccacaggtgaagagcttcatcgagacgcagaaggcgctgctggccgagatccagaacggctgcaagcgcaacttggtgctggcgcgggagagggaggagaaggagcagccgccacagctgtcggcctccatgcctgagaccaccgccaccgagccccagcccgacgacgagcccgccgctggggtgcagaacggggcccccagccccgcacccagcccggactcagactcagactcggactcggatggggaggaagaggaggaagaggaaggggagagggacgagaccccctgtcctgccctggtgccccccacggactccctgggccctggggacaggagtcccccaggcagcccctccacacccaccgagcagcggatttccgtgtccagcccgggccggggccacaaggtgtttgtggtgacccgggtggagagcccgcccgagagggcagagccccctgcgtcccccacccctccctctcccccaccccctccctccccacccgcctcaccttccctaccaccagccggggccattgacacccgggacacagggtcctctgagcctcagccaccaccggagccgcctcggtcagggccaccactgcccaacggcctgaagcccgagttcgccctggcactgccccctgagccgcccccggggcctgaggtcaaggggggcagctgcggcctggagcacggtgagaggggccctagggcaggtgttgaggggccctgggtgctgtatgtgaccccaggcaagcccctgcctgttgtggncctcagtttccccctctttaaaatggttctcgcaggggccagcaaagtggggcttagttctcatctccaccctgcttcccttgggtcctgggagctcttcctggggtgggggggcatgtaaggtgtgctgccttgagcctgaccatctcagcggtctctgggcactctgcaggccctgagggtctggctggggccgggctggggacaggttgtatttgccccacccgcctgacgggggtgctggcccgtcctcccacacagaactgagctgctccaagaacgagaaggagctcgaggagctgcttctggaagccagtcaggaatccgggcaggagacactgtgacactttaggtgaggccaggcccggggcccacagcactcgggaggagctgagagagcctctggctctgacagtctctcccccaatctctcctccccaagttccctttttccggtcggtctgcgatgagctgaggccagagccatgagaatctgctcaccttccccccagccttcctgaggcccaggatgccaggggtgggggccattctggggcccccctccccccacagcaacactacaaggggtgcaggagctacagggagtggccctccgcgcgtgactcaagcacttctatttatgagcccagcactggaagactctgggggtgaatgggaggagggggagcaggaggaggaggaggtctccaaggacatcaggcgcctgttctggaggggccaggcttgccctgcggagggcaggcgtcctgggtggtggtgggatggtcccctgtggccccgggcacagggccgggcaggcagcctggtgccggagaggcggtgcgtgctggtggtggttgagatgcgcagaacagccccagacagcgcaggccgggcagggtggggggatgggagcagaggatcagagctttctttttctcaagtgcaataaatctatcagggagctggggcgggagcagccggcactccgggaccctgctgtccaggccactggaggctgcgccctgagaggcactacagccctttgggggcgagtggcatgggtgtgggtgagggtgggcagagggctggggctactcctgtcggtgcaactctgttcacaccttttctaataaactggggctgggttcactttgcccaacgtctgcttcgtgcggatcctggaggtggttgctgggggtgggctgggtggaggccatcacagctcctggttacagagcatctgccagggcactggtcaggcattactgcgtcttcccccacagtcccgtctattctgcntccatgctctggtgtctcgtacggtcacctcccagccaggcgagtttacacccatcctttctgcagggagagacaggccccagatacctcctggcttcaggtctagggtctcaggatgctggatatggagtggctctgcccagtcgcccatcgctcaacaggaacagatcccagcctgtccctggcagccccaggtgttgtgcaggtgggagtatgccccgggcccagccagcactgcaggagcctggtgggcggcttgttcccctttgccagcaggggcctggggggccatgggggtgctgttgcggatttctgagaggtctgtttttccctttaggaaaggggggagcaggccgggcatggtggcccacacctgtaatcccagcactttgggaggctgaggtgggaggattgcttgaacccaggaatttgacaccagcctgggcaacatggtgaaaccccatctccatagaaaatacaaaaattagctgggtgtggtggcgtgtgcctgtagtcccagctactgaggaggctgagttgggaggatcgcttgaacccaggaggttgaggctgcagtgaggtgtgattgcaccactgcacttcagcctgggcaacagagtgagatcctgtctc

SEQ ID NO: 736988 - DNA, 5967 bp, Homo sapiens
cagattcgctgctcacgtttcttttttccgtggcccttcctgccctttgtttctctcttcatgtcacccgcgggacaactctacgtgcaagtcgctgaaatcgattttctgcttcttatagtaagcggcgggctcgccagcctcgagcgaaagtgtgactgcgaacgggcaggcgcgcgcggggctcggcggaggcgcgcttgggctcccggcggcgacgactacgaccactaggagagcggacggaggcggcgcctgaagcggcggcggagcccatgccccgggacggcgggcggacccggagagacaaatccggggcccggggcatgtccccggggcccccgtgaggaggcggcggcggctatggagatcgcgccgcaggaggcgccgcccgtgccgggcgcggacggcgacattgaagaggccccagctgaggccgggtctcccagccccgcgtcgccccccgccgatgggcgcctcaaggctgcagccaagcgcgtcacattcccgtccgacgaggatatcgtgtctggagcagtggagcccaaagacccctggagacatggtgagaagcttgactacaagacctgtgaggccctggaagaggtcttcaagaggctgcagttcaaggtcgtggacctggagcagacaaacctggatgaagatgtgagcggccctgccaccgcccacttggctccctgagctcccgggccccttcgagggtgcctcggccctcttcgacatgatcgagtactacgagtcggccacccacctcaacatctccttcaacaagcacatcggcacccggggctggcaggcggccgcccacatgatgcgcaagacgagctgcctgcagtatctggacgcccgcaacacgcccctgctggaccactcggcgcccttcgtggcccgtgccctgcgcatccgcagcagcctggcagtgctgcacttggagaacgccagcctgtcggggcggcccctcatgctgctcggtgagccccaagcccgggagggtgagcaggatgtgcagcctgttggggggcaggggcctgcccagtcaccgtgccccctccccgtccccagccacggccctgaagatgaacatgaacctgcgggagctgtacctggcggacaacaagctcaacggcctgcaggactcggcccagctgggtaacctgctcaagttcaactgctccctgcagatcctggacctccggaacaaccacgtgctagactcgggtgggtgcagtggcccaccccacccacacccgtcacccagcacccactctgcccggccctgcgctaggtggtgctggggacacagacatggccaagaccaccccaacgctgtcctgctggggctcccaggaggaagacagacccgccctagacagtgacaacctagagtgggcaggactgggctggtggagcccagaggcggggtccgatcagtctgggggccagggagggcttccaggaggaggagacagctcagctgacagccgcaggatgaggcgaagtgaataattacaatctgaaaagaaagcagtgttgctgccataacagggtcagctagaggctgctttcagatgggagaggagggaagaccaccgtggggcggggcctctgggcttccatccggaggctgggagcagaaccagccttgtgagaagcctgggaaagggtccagaccgcgggagcagtgagtgcagtgggaggagctctggtgtttgatgctgggggttgagcagagaatggggagccgtcaaaggaggcgttcctgttgcatcctggaggggtggggtgggtcactgtgtccccaggtggcaggcccagaccccactctactgagcacctgccaagggccatggctgtcggcccctgggctcagctcggagggagacacagggctctgcccttgggagtttgtactccagtctagagagacaacgataagatgagtgaaatctccagcctgtcagatggtgggatctgcattggagggagacagtggtgactgtgggtgggagtgagctggctgtgaggtgaggtgggccagaggtggtcacatttgagcaaagatcagaagcatctggtggaggctgtcatccaggcacccaggcccaggggtcacagatgtgtgcccaggggtgccaggccgaggcagggctgcagggcaaggcctgggactgcggggcctccatggaggtcctaagcagagggggttgctcctaccctgcagtcccctccccaggaagcacccggaccccagacagggctctgactgccggcctcctccaggtctggcctacatctgcgagggcctcaaggagcagaggaaggggctggtgaccctggtgctgtggaacaaccagctcacgcacacaggcatggccttcctgggcatgacactggtgagtcaggctggcagggaagggaggcacctcggtccccgctgccacctcccactccagctctcagcacagttgcctctagctgacggctcctgtcctgcccatcctgcaggttcaagacgatttaaactcagccccacctgcttcctcattcagcttctgtgcctgttttccctgaggaggagcccttctttcattatctcctttttttttttgagaccgagtctcatcctgtcacccaggctggagtgcagtggcgccatctaggctcactgcagccactccagcccccgcctcctgggttcaagccattcttctgcctcagcctcccaagtagctgggactacaggtgcccgccaccccgcctagccaatttttttattttttatttttattttttttgagacggagcctcaatcgcccaggctggagtgcagtggctcgatctccgctcactgcaagccccacctcctgggttcacaccattgtcctgcctcagcctcccgagtagttggaactacaggcacccaccaccacacccagctaatttttttgtatttttttagtagagaggggatttcaccatgttagccaggatggtcgcaatctgaccttgtgatccaccctcctcggcctcccaaagtgctgggattacacgcgtgagccaccgcgcccggcctaatttttgtatttttagtacagacggggtttcaccatgttggccaggccggtcttgaactcctgacctcgagtgatcccccccacctcggcctccgaaagtattgggattatgagtgagtcaccgtgcctggttttcagtttttatgtggtgcttaaagcaagccactcaggtacagagactctcagggcgagcactcgtgtgctcaaaccccgggataagagttgccctccttgggggcttcagggcgctcaaggtccaggccctggccaggggcccaggctgtggggggtagggactgactgggtgcctggggagctgggagtggacgggggacctggcatttggggagacttcaggcacaggagggacttcaggccaggcctgcggcagggcaggacggcgccggtgttcacgcaggcgcgcgaaagaaaaggagcgcccgggcctggctctcttcccggcttctttcctgacttggcctcctgggtctcctccgccatcacggcctcctcctcaccctcacaccccctccctccagccgcacactcagagcctggagacgctgaacctgggccacaaccccatcgggaacgagggtgtgcggcacctcaagaacgggctcatcagcaaccgcagcgtgctgcgcctcgggctggcctccaccaagctcacgtgcgagggcgcggtggcggtggcggagttcatcgctgagagcccccgcctcctgagactggaccttcgggagaacgagatcaagacaggcgggctcatggcactgtcgttggccctcaaggtgaaccactcactgctgcgcctggacctcgaccgtgaacccaagaaagaggcggtgaagagcttcatcgagacgcagaaggcgctgctggccgagatccagaacggctgcaagcgcaacttggtgctggcgcgggagagggaggagaaggagcagccgccacagctgtcggcctccatgcctgagaccaccgccaccgagccccagcccgacgacgagcccgccgctggggtgcagaacggggcccccagccccgcacccagcccggactcagactcagactcggactcggatggggaggaagaggaggaagaggaaggggagagggacgagaccccctgtcctgccctggtgccccccacggactccctgggccctggggacaggagtcccccaggcagcccctccacacccaccgagcagcggatttccgtgtccagcccgggccggggccacaaggtgtttgtggtgacccgggtggagagcccgcccgagagggcagagccccctgcgtcccccacccctccctctcccccaccccctccctccccacccgcctcaccttccctaccaccagccggggccattgacacccgggacacagggtcctctgagcctcagccaccaccggagccgcctcggtcagggccaccactgcccaacggcctgaagcccgagttcgccctggcactgccccctgagccgcccccggggcctgaggtcaaggggggcagctgcggcctggagcacgaactgagctgctccaagaacgagaaggagctcgaggagctgcttctggaagccagtcaggaatccgggcaggagacactgtgacactttagttccctttttccggtcggtctgcgatgagctgaggccagagccatgagaatctgctcaccttccccccagccttcctgaggcccaggatgccaggggtgggggccattctggggcccccctccccccacagcaacactacaaggggtgcaggagctacagggagtggccctccgcgcgtgactcaagcacttctatttatgagcccagcactggaagactctgggggtgaatgggaggagggggagcaggaggaggaggaggtctccaaggacatcaggcgcctgttctggaggggccaggcttgccctgcggagggcaggcgtcctgggtggtggtgggatggtcccctgtggccccgggcacagggccgggcaggcagcctggtgccggagaggcggtgcgtgctggtggtggttgagatgcgcagaacagccccagacagcgcaggccgggcagggtggggggatgggagcagaggatcagagctttctttttctcaagtgcaataaatctatcagggagctggggcgggagcagccggcactccgggaccctgctgtccaggccactggaggctgcgccctgagaggcactacagccctttgggggcgagtggcatgggtgtgggtgagggtgggcagagggctggggctactcctgtcggtgcaactctgttcacaccttttctaataaactggggctgggttaaaaaaaaaaaaaaaaaaaaaaaaaaaaaaaaaaaaaaaaaaaaaaaaaaaaaaaaaaaaaaaaaaaaaaaaggagggggcgcgcgccgccccaaaaattcccccgccgggggcggcgccccgaacgcgccccccccgttttttggcaaaagggggccccccaagggggggtttattaaaacggaaggcgcggggagcgcgcgatagtataataaaacagcgtcgtcgggggcggggaagaaaacgcggctgtgcggggaggaatacctgtgtgggggagggaggggacccccataatagtctggggggggggggaggagaaaatatggtggggcaacaactctccatccctagaaggagatatttgaaacgcgtcctggggaggaagaattaataaaattttcgaggggggattatatggtgtggtgtacacaagacaggagggataatagggcggtggggggaggatgaaagatatttggtgccatacgggaatgatagttttcgaggacaaatttttttacgggg

SEQ ID NO: 736989 - DNA, 5508 bp, Homo sapiens
cagattcgctgctcacgtttcttttttccgtggcccttcctgccctttgtttctctcttcatgtcacccgcgggacaactctacgtgcaagtcgctgaaatcgattttctgcttcttatagtaagcggcgggctcgccagcctcgagcgaaagtgtgactgcgaacgggcaggcgcgcgcggggctcggcggaggcgcgcttgggctcccggcggcgacgactacgaccactaggagagcggacggaggcggcgcctgaagcggcggcggagcccatgccccgggacggcgggcggacccggagagacaaatccggggcccggggcatgtccccggggcccccgtgaggaggcggcggcggctatggagatcgcgccgcaggaggcgccgcccgtgccgggcgcggacggcgacattgaagaggccccagctgaggccgggtctcccagccccgcgtcgccccccgccgatgggcgcctcaaggctgcagccaagcgcgtcacattcccgtccgacgaggatatcgtgtctggagcagtggagcccaaagacccctggagacatggtgagaagcttgactacaagacctgtgaggccctggaagaggtcttcaagaggctgcagttcaaggtcgtggacctggagcagacaaacctggatgaagatgtgagcggccctgccaccgcccacttggctccctgagctcccgggccccttcgagggtgcctcggccctcttcgacatgatcgagtactacgagtcggccacccacctcaacatctccttcaacaagcacatcggcacccggggctggcaggcggccgcccacatgatgcgcaagacgagctgcctgcagtatctggacgcccgcaacacgcccctgctggaccactcggcgcccttcgtggcccgtgccctgcgcatccgcagcagcctggcagtgctgcacttggagaacgccagcctgtcggggcggcccctcatgctgctcggtgagccccaagcccgggagggtgagcaggatgtgcagcctgttggggggcaggggcctgcccagtcaccgtgccccctccccgtccccagccacggccctgaagatgaacatgaacctgcgggagctgtacctggcggacaacaagctcaacggcctgcaggactcggcccagctgggtaacctgctcaagttcaactgctccctgcagatcctggacctccggaacaaccacgtgctagactcgggtgggtgcagtggcccaccccacccacacccgtcacccagcacccactctgcccggccctgcgctaggtggtgctggggacacagacatggccaagaccaccccaacgctgtcctgctggggctcccaggaggaagacagacccgccctagacagtgacaacctagagtgggcaggactgggctggtggagcccagaggcggggtccgatcagtctgggggccagggagggcttccaggaggaggagacagctcagctgacagccgcaggatgaggcgaagtgaataattacaatctgaaaagaaagcagtgttgctgccataacagggtcagctagaggctgctttcagatgggagaggagggaagaccaccgtggggcggggcctctgggcttccatccggaggctgggagcagaaccagccttgtgagaagcctgggaaagggtccagaccgcgggagcagtgagtgcagtgggaggagctctggtgtttgatgctgggggttgagcagagaatggggagccgtcaaaggaggcgttcctgttgcatcctggaggggtggggtgggtcactgtgtccccaggtggcaggcccagaccccactctactgagcacctgccaagggccatggctgtcggcccctgggctcagctcggagggagacacagggctctgcccttgggagtttgtactccagtctagagagacaacgataagatgagtgaaatctccagcctgtcagatggtgggatctgcattggagggagacagtggtgactgtgggtgggagtgagctggctgtgaggtgaggtgggccagaggtggtcacatttgagcaaagatcagaagcatctggtggaggctgtcatccaggcacccaggcccaggggtcacagatgtgtgcccaggggtgccaggccgaggcagggctgcagggcaaggcctgggactgcggggcctccatggaggtcctaagcagagggggttgctcctaccctgcagtcccctccccaggaagcacccggaccccagacagggctctgactgccggcctcctccaggtctggcctacatctgcgagggcctcaaggagcagaggaaggggctggtgaccctggtgctgtggaacaaccagctcacgcacacaggcatggccttcctgggcatgacactggtgagtcaggctggcagggaagggaggcacctcggtccccgctgccacctcccactccagctctcagcacagttgcctctagctgacggctcctgtcctgcccatcctgcaggttcaagacgatttaaactcagccccacctgcttcctcattcagcttctgtgcctgttttccctgaggaggagcccttctttcattatctcctttttttttttgagaccgagtctcatcctgtcacccaggctggagtgcagtggcgccatctaggctcactgcagccactccagcccccgcctcctgggttcaagccattcttctgcctcagcctcccaagtagctgggactacaggtgcccgccaccccgcctagccaatttttttattttttatttttattttttttgagacggagcctcaatcgcccaggctggagtgcagtggctcgatctccgctcactgcaagccccacctcctgggttcacaccattgtcctgcctcagcctcccgagtagttggaactacaggcacccaccaccacacccagctaatttttttgtatttttttagtagagaggggatttcaccatgttagccaggatggtcgcaatctgaccttgtgatccaccctcctcggcctcccaaagtgctgggattacacgcgtgagccaccgcgcccggcctaatttttgtatttttagtacagacggggtttcaccatgttggccaggccggtcttgaactcctgacctcgagtgatcccccccacctcggcctccgaaagtattgggattatgagtgagtcaccgtgcctggttttcagtttttatgtggtgcttaaagcaagccactcaggtacagagactctcagggcgagcactcgtgtgctcaaaccccgggataagagttgccctccttgggggcttcagggcgctcaaggtccaggccctggccaggggcccaggctgtggggggtagggactgactgggtgcctggggagctgggagtggacgggggacctggcatttggggagacttcaggcacaggagggacttcaggccaggcctgcggcagggcaggacggcgccggtgttcacgcaggcgcgcgaaagaaaaggagcgcccgggcctggctctcttcccggcttctttcctgacttggcctcctgggtctcctccgccatcacggcctcctcctcaccctcacaccccctccctccagccgcacactcagagcctggagacgctgaacctgggccacaaccccatcgggaacgagggtgtgcggcacctcaagaacgggctcatcagcaaccgcagcgtgctgcgcctcgggctggcctccaccaagctcacgtgcgagggcgcggtggcggtggcggagttcatcgctgagagcccccgcctcctgagactggaccttcgggagaacgagatcaagacaggcgggctcatggcactgtcgttggccctcaaggtgaaccactcactgctgcgcctggacctcgaccgtgaacccaagaaagaggcggtgaagagcttcatcgagacgcagaaggcgctgctggccgagatccagaacggctgcaagcgcaacttggtgctggcgcgggagagggaggagaaggagcagccgccacagctgtcggcctccatgcctgagaccaccgccaccgagccccagcccgacgacgagcccgccgctggggtgcagaacggggcccccagccccgcacccagcccggactcagactcagactcggactcggatggggaggaagaggaggaagaggaaggggagagggacgagaccccctgtcctgccctggtgccccccacggactccctgggccctggggacaggagtcccccaggcagcccctccacacccaccgagcagcggatttccgtgtccagcccgggccggggccacaaggtgtttgtggtgacccgggtggagagcccgcccgagagggcagagccccctgcgtcccccacccctccctctcccccaccccctccctccccacccgcctcaccttccctaccaccagccggggccattgacacccgggacacagggtcctctgagcctcagccaccaccggagccgcctcggtcagggccaccactgcccaacggcctgaagcccgagttcgccctggcactgccccctgagccgcccccggggcctgaggtcaaggggggcagctgcggcctggagcacgaactgagctgctccaagaacgagaaggagctcgaggagctgcttctggaagccagtcaggaatccgggcaggagacactgtgacactttagttccctttttccggtcggtctgcgatgagctgaggccagagccatgagaatctgctcaccttccccccagccttcctgaggcccaggatgccaggggtgggggccattctggggcccccctccccccacagcaacactacaaggggtgcaggagctacagggagtggccctccgcgcgtgactcaagcacttctatttatgagcccagcactggaagactctgggggtgaatgggaggagggggagcaggaggaggaggaggtctccaaggacatcaggcgcctgttctggaggggccaggcttgccctgcggagggcaggcgtcctgggtggtggtgggatggtcccctgtggccccgggcacagggccgggcaggcagcctggtgccggagaggcggtgcgtgctggtggtggttgagatgcgcagaacagccccagacagcgcaggccgggcagggtggggggatgggagcagaggatcagagctttctttttctcaagtgcaataaatctatcagggagctggggcgggagcagccggcactccgggaccctgctgtccaggccactggaggctgcgccctgagaggcactacagccctttgggggcgagtggcatgggtgtgggtgagggtgggttttatttttctttttctgtgttaacttttgatctagatttttttctttagactttttattgtattacttttattatatgatcatattatgtctctaattgttgcatttttcgttatgttgttgatcatatgctttta

SEQ ID NO: 736990 - DNA, 5745 bp, Homo sapiens
cagattcgctgctcacgtttcttttttccgtggcccttcctgccctttgtttctctcttcatgtcacccgcgggacaactctacgtgcaagtcgctgaaatcgattttctgcttcttatagtaagcggcgggctcgccagcctcgagcgaaagtgtgactgcgaacgggcaggcgcgcgcggggctcggcggaggcgcgcttgggctcccggcggcgacgactacgaccactaggagagcggacggaggcggcgcctgaagcggcggcggagcccatgccccgggacggcgggcggacccggagagacaaatccggggcccggggcatgtccccggggcccccgtgaggaggcggcggcggctatggagatcgcgccgcaggaggcgccgcccgtgccgggcgcggacggcgacattgaagaggccccagctgaggccgggtctcccagccccgcgtcgccccccgccgatgggcgcctcaaggctgcagccaagcgcgtcacattcccgtccgacgaggatatcgtgtctggagcagtggagcccaaagacccctggagacatggtgagaagcttgactacaagacctgtgaggccctggaagaggtcttcaagaggctgcagttcaaggtcgtggacctggagcagacaaacctggatgaagatgtgagcggccctgccaccgcccacttggctccctgagctcccgggccccttcgagggtgcctcggccctcttcgacatgatcgagtactacgagtcggccacccacctcaacatctccttcaacaagcacatcggcacccggggctggcaggcggccgcccacatgatgcgcaagacgagctgcctgcagtatctggacgcccgcaacacgcccctgctggaccactcggcgcccttcgtggcccgtgccctgcgcatccgcagcagcctggcagtgctgcacttggagaacgccagcctgtcggggcggcccctcatgctgctcggtgagccccaagcccgggagggtgagcaggatgtgcagcctgttggggggcaggggcctgcccagtcaccgtgccccctccccgtccccagccacggccctgaagatgaacatgaacctgcgggagctgtacctggcggacaacaagctcaacggcctgcaggactcggcccagctgggtaacctgctcaagttcaactgctccctgcagatcctggacctccggaacaaccacgtgctagactcgggtgggtgcagtggcccaccccacccacacccgtcacccagcacccactctgcccggccctgcgctaggtggtgctggggacacagacatggccaagaccaccccaacgctgtcctgctggggctcccaggaggaagacagacccgccctagacagtgacaacctagagtgggcaggactgggctggtggagcccagaggcggggtccgatcagtctgggggccagggagggcttccaggaggaggagacagctcagctgacagccgcaggatgaggcgaagtgaataattacaatctgaaaagaaagcagtgttgctgccataacagggtcagctagaggctgctttcagatgggagaggagggaagaccaccgtggggcggggcctctgggcttccatccggaggctgggagcagaaccagccttgtgagaagcctgggaaagggtccagaccgcgggagcagtgagtgcagtgggaggagctctggtgtttgatgctgggggttgagcagagaatggggagccgtcaaaggaggcgttcctgttgcatcctggaggggtggggtgggtcactgtgtccccaggtggcaggcccagaccccactctactgagcacctgccaagggccatggctgtcggcccctgggctcagctcggagggagacacagggctctgcccttgggagtttgtactccagtctagagagacaacgataagatgagtgaaatctccagcctgtcagatggtgggatctgcattggagggagacagtggtgactgtgggtgggagtgagctggctgtgaggtgaggtgggccagaggtggtcacatttgagcaaagatcagaagcatctggtggaggctgtcatccaggcacccaggcccaggggtcacagatgtgtgcccaggggtgccaggccgaggcagggctgcagggcaaggcctgggactgcggggcctccatggaggtcctaagcagagggggttgctcctaccctgcagtcccctccccaggaagcacccggaccccagacagggctctgactgccggcctcctccaggtctggcctacatctgcgagggcctcaaggagcagaggaaggggctggtgaccctggtgctgtggaacaaccagctcacgcacacaggcatggccttcctgggcatgacactggtgagtcaggctggcagggaagggaggcacctcggtccccgctgccacctcccactccagctctcagcacagttgcctctagctgacggctcctgtcctgcccatcctgcaggttcaagacgatttaaactcagccccacctgcttcctcattcagcttctgtgcctgttttccctgaggaggagcccttctttcattatctcctttttttttttgagaccgagtctcatcctgtcacccaggctggagtgcagtggcgccatctaggctcactgcagccactccagcccccgcctcctgggttcaagccattcttctgcctcagcctcccaagtagctgggactacaggtgcccgccaccccgcctagccaatttttttattttttatttttattttttttgagacggagcctcaatcgcccaggctggagtgcagtggctcgatctccgctcactgcaagccccacctcctgggttcacaccattgtcctgcctcagcctcccgagtagttggaactacaggcacccaccaccacacccagctaatttttttgtatttttttagtagagaggggatttcaccatgttagccaggatggtcgcaatctgaccttgtgatccaccctcctcggcctcccaaagtgctgggattacacgcgtgagccaccgcgcccggcctaatttttgtatttttagtacagacggggtttcaccatgttggccaggccggtcttgaactcctgacctcgagtgatcccccccacctcggcctccgaaagtattgggattatgagtgagtcaccgtgcctggttttcagtttttatgtggtgcttaaagcaagccactcaggtacagagactctcagggcgagcactcgtgtgctcaaaccccgggataagagttgccctccttgggggcttcagggcgctcaaggtccaggccctggccaggggcccaggctgtggggggtagggactgactgggtgcctggggagctgggagtggacgggggacctggcatttggggagacttcaggcacaggagggacttcaggccaggcctgcggcagggcaggacggcgccggtgttcacgcaggcgcgcgaaagaaaaggagcgcccgggcctggctctcttcccggcttctttcctgacttggcctcctgggtctcctccgccatcacggcctcctcctcaccctcacaccccctccctccagccgcacactcagagcctggagacgctgaacctgggccacaaccccatcgggaacgagggtgtgcggcacctcaagaacgggctcatcagcaaccgcagcgtgctgcgcctcgggctggcctccaccaagctcacgtgcgagggcgcggtggcggtggcggagttcatcgctgagagcccccgcctcctgagactggaccttcgggagaacgagatcaagacaggcgggctcatggcactgtcgttggccctcaaggtgaaccactcactgctgcgcctggacctcgaccgtgaacccaagaaagaggcggtgaagagcttcatcgagacgcagaaggcgctgctggccgagatccagaacggctgcaagcgcaacttggtgctggcgcgggagagggaggagaaggagcagccgccacagctgtcggcctccatgcctgagaccaccgccaccgagccccagcccgacgacgagcccgccgctggggtgcagaacggggcccccagccccgcacccagcccggactcagactcagactcggactcggatggggaggaagaggaggaagaggaaggggagagggacgagaccccctgtcctgccctggtgccccccacggactccctgggccctggggacaggagtcccccaggcagcccctccacacccaccgagcagcggatttccgtgtccagcccgggccggggccacaaggtgtttgtggtgacccgggtggagagcccgcccgagagggcagagccccctgcgtcccccacccctccctctcccccaccccctccctccccacccgcctcaccttccctaccaccagccggggccattgacacccgggacacagggtcctctgagcctcagccaccaccggagccgcctcggtcagggccaccactgcccaacggcctgaagcccgagttcgccctggcactgccccctgagccgcccccggggcctgaggtcaaggggggcagctgcggcctggagcacgaactgagctgctccaagaacgagaaggagctcgaggagctgcttctggaagccagtcaggaatccgggcaggagacactgtgacactttagttccctttttccggtcggtctgcgatgagctgaggccagagccatgagaatctgctcaccttccccccagccttcctgaggcccaggatgccaggggtgggggccattctggggcccccctccccccacagcaacactacaaggggtgcaggagctacagggagtggccctccgcgcgtgactcaagcacttctatttatgagcccagcactggaagactctgggggtgaatgggaggagggggatgggagcagaggatcagagctttctttttctcaagtgcaataaatctatcagggagctggggcgggagcagccggcactccgggaccctgctgtccaggccactggaggctgcgccctgagaggcactacagccctttgggggcgagtggcatgggtgtgggtgagggtgggcagagggctggggctactcctgtcggtgcaactctgttcacaccttttctaataaactggggctgggttaaaaaaaaaaaaaaaaaaaaaaaaaaaaaaaaaaaaaaaaaaaaaaaaaaaaaaaaaaaaaaaaaaaaaaaaggagggggcgcgcgccgccccaaaaattcccccgccgggggcggcgccccgaacgcgccccccccgttttttggcaaaagggggccccccaagggggggtttattaaaacggaaggcgcggggagcgcgcgatagtataataaaacagcgtcgtcgggggcggggaagaaaacgcggctgtgcggggaggaatacctgtgtgggggagggaggggacccccataatagtctggggggggggggaggagaaaatatggtggggcaacaactctccatccctagaaggagatatttgaaacgcgtcctggggaggaagaattaataaaattttcgaggggggattatatggtgtggtgtacacaagacaggagggataatagggcggtggggggaggatgaaagatatttggtgccatacgggaatgatagttttcgaggacaaatttttttacgggg

SEQ ID NO: 736991 - DNA, 1396 bp, Homo sapiens
ccccccccccccctccgagatcgtaactcgggctcctacccagagattctacccagtgaaactcccacagcaacgcaggtagatggggctgacctggcctctccaatgtctcctcgaactagcaaaagccgcatgtccatgaagctgcgtcgttcctctggctcagccaataaatcctaaggagacaagcagcccagcagtgatcagcagtagccaccttagcacgaacatagggttaaccctttcaggccttcatgtctgccataacatgcatgtttcttcctgtacatttatttgagaaaacactggatttaaataattttaaataatttgtagcttaatattaaagatttaagttatttattgtttcattttttttcccacaatccaagctgccatattttgagggcagggggagttttattctacaccctttaccttcctagataattatgtctaagtagttttatctttaatttcatggttaactgtgagccaaaatacaattggacaattagtctcattatttattgtgccccattgcaactttatggttcaataaatatataattttttacaaatgtaaaattttacatttaagcatttgtaaagttacagcaaaagatgtacctgttaatacacagaatgtgtacagattatttgttatgacaataaaacactcaaaataaatggtctttagcatctcaaattccaactgaaatcattttagtattaactcttcttcccaaagcaatgtctcatttcttggctgtgcaggtgatgccatgttatatccaataactagaaaaatcactgtgctgaacttttatgtttagcttccaagtatttttctaatgttttgcatttcaagtggtatcactgttaaatgccatttgttttcagattgtggccttttattattggctgctagatcctggtgtttctatgttcttttttaagcaccaaaaagaagatggggaagaaaagaaggaaaattttctgatataaatatgttgttcaaattatgagtattatttaaaaaagaaaaaggaacataacccaggagtctaagttaaatctaatattgttaatactgaacttgcaggtccaggttggtatacattccaccctctagaagtattttcttacagtagataagctgctcacattttgttttgaatgggcatctcctgaggaaatgtagcatgacattggtactaactgcatgtgtaaatacatcatactggcaaaccgtaaaatataaattatgtatcatcattcatgtagtatctataatttgtaacagtgggggggaaagatgacatggtatttaataatacaataaaaatattcttatcacttcctaaaaaagcacagacacacaaaaaaacgacca

SEQ ID NO: 736992 - DNA, 1412 bp, Homo sapiens
ttgtaggatttgtgactgccggaataagagaaaggggggggtcgagggctcctacccagagattctacccagtgaaactcccacagcaacgcaggtagatggggctgacctggcctctccaatgtctcctcgaactagcaaaagccgcatgtccatgaagctgcgtcgttcctctggctcagccaataaatcctaaggagacaagcagcccagcagtgatcagcagtagccaccttagcacgaacatagggttaaccctttcaggccttcatgtctgccataacatgcatgtttcttcctgtacatttatttgagaaaacactggatttaaataattttaaataatttgtagcttaatattaaagatttaagttatttattgtttcattttttttcccacaatccaagctgccatattttgagggcagggggagttttattctacaccctttaccttcctagataattatgtctaagtagttttatctttaatttcatggttaactgtgagccaaaatacaattggacaattagtctcattatttattgtgccccattgcaactttatggttcaataaatatataattttttacaaatgtaaaattttacatttaagcatttgtaaagttacagcaaaagatgtacctgttaatacacagaatgtgtacagattatttgttatgacaataaaacactcaaaataaatggtctttagcatctcaaattccaactgaaatcattttagtattaactcttcttcccaaagcaatgtctcatttcttggctgtgcaggtgatgccatgttatatccaataactagaaaaatcactgtgctgaacttttatgtttagcttccaagtatttttctaatgttttgcatttcaagtggtatcactgttaaatgccatttgttttcagattgtggccttttattattggctgctagatcctggtgtttctatgttcttttttaagcaccaaaaagaagatggggaagaaaagaaggaaaattttctgatataaatatgttgttcaaattatgagtattatttaaaaaagaaaaaggaacataacccaggagtctaagttaaatctaatattgttaatactgaacttgcaggtccaggttggtatacattccaccctctagaagtattttcttacagtagataagctgctcacattttgttttgaatgggcatctcctgaggaaatgtagcatgacattggtactaactgcatgtgtaaatacatcatactggcaaaccgtaaaatataaattatgtatcatcattcatgtagtatctataatttgtaacagtgggggggaaagatgacatggtatttaataatacaataaaaatattcttatcacttcctaaaaaagcacagacacacaaaaaaacgacca

SEQ ID NO: 736993 - DNA, 1754 bp, Homo sapiens
aaggctcttttcttggttgtaccctgaatcctagagataggaattggtccttctcacctgcttcttgaccccttccctgcatgctgatggtgctttggatccctgttctttctggctcaaagattttgcttcccactgctttttccagggttctagccctgggaatgatgattggcgctttcttgctaatataatgacatgagccaccagattgctgggttttaaatacattagtaggctattgtaacaagcaagtttggggcttgctttttccctcgaaagatcttattaagggatgggatccttgctgcagattagtagcagaaagattatttctcaggggatgagaggctggataactgtagtaatgctcttgctgtttcctacaggctcctacccagagattctacccagtgaaactcccacagcaacgcaggtagatggggctgacctggcctctccaatgtctcctcgaactagcaaaagccgcatgtccatgaagctgcgtcgttcctctggctcagccaataaatcctaaggagacaagcagcccagcagtgatcagcagtagccaccttagcacgaacatagggttaaccctttcaggccttcatgtctgccataacatgcatgtttcttcctgtacatttatttgagaaaacactggatttaaataattttaaataatttgtagcttaatattaaagatttaagttatttattgtttcattttttttcccacaatccaagctgccatattttgagggcagggggagttttattctacaccctttaccttcctagataattatgtctaagtagttttatctttaatttcatggttaactgtgagccaaaatacaattggacaattagtctcattatttattgtgccccattgcaactttatggttcaataaatatataattttttacaaatgtaaaattttacatttaagcatttgtaaagttacagcaaaagatgtacctgttaatacacagaatgtgtacagattatttgttatgacaataaaacactcaaaataaatggtctttagcatctcaaattccaactgaaatcattttagtattaactcttcttcccaaagcaatgtctcatttcttggctgtgcaggtgatgccatgttatatccaataactagaaaaatcactgtgctgaacttttatgtttagcttccaagtatttttctaatgttttgcatttcaagtggtatcactgttaaatgccatttgttttcagattgtggccttttattattggctgctagatcctggtgtttctatgttcttttttaagcaccaaaaagaagatggggaagaaaagaaggaaaattttctgatataaatatgttgttcaaattatgagtattatttaaaaaagaaaaaggaacataacccaggagtctaagttaaatctaatattgttaatactgaacttgcaggtccaggttggtatacattccaccctctagaagtattttcttacagtagataagctgctcacattttgttttgaatgggcatctcctgaggaaatgtagcatgacattggtactaactgcatgtgtaaatacatcatactggcaaaccgtaaaatataaattatgtatcatcattcatgtagtatctataatttgtaacagtgggggggaaagatgacatggtatttaataatacaataaaaatattcttatcacttcctaaaaaagcacagacacacaaaaaaacgacca

SEQ ID NO: 736994 - DNA, 2389 bp, Homo sapiens
gaaattgcttttaaagatataatattttatagggctatatctgcccaataattagcagctttaaaccagtcatacctgtcaccaaacagtacaaacgaaaccacaataaaaaatgatcttttgagctccctcttataatccctatatatcccaaaagtcatatccattatgttaattgtaataatagtttattgtaatcaatgtgcaatatatgaatcaatttatcccatcagattacacagtctgtgtgagcactgtaagaatgttagtaacagatacggtatgcacaaacataggagctcatgtgtacttttaaaacctcatccttgaggatatattaataatagaaataaatcagcattctttatgactcaagtagtataaatcaataggtagagtaggatgtgaaatgaaatgtaggttgttactacattttttacatctaaaattgaggtctttctactgtaaattatttatagagtttgggaatgttgaatatataccacaaatgtaatttgctaaattgttaggaagtactgataactatacaccacacacactaaaaatccttatttgactctgttgagtgaagggagatttcactttaaaggcagtgaggaagacatggaagaattgtttttgaggaaaatattatttgagtttgccataatgtagagcaatgctctctgataaagccctccttctatggtgatggaaatgttctatatctgcactgtctaatgtggaagccgctaactacatgtggctgttgaacaattgaaatgtggctagtgtactgaggaactgaatttttatttaattcattttaattcaataaatttaaacttaatgtggctgtggctaccacattggacaatgcagctctagagattttatgtctgagtgattaggataacatgccaacagtacagtgaacactttaaaaggtagatatttacagaatctctcatagaccttttttcttcttttcttttttcctatttgaacttgttttgttagttgggctcctacccagagattctacccagtgaaactcccacagcaacgcaggtagatggggctgacctggcctctccaatgtctcctcgaactagcaaaagccgcatgtccatgaagctgcgtcgttcctctggctcagccaataaatcctaaggagacaagcagcccagcagtgatcagcagtagccaccttagcacgaacatagggttaaccctttcaggccttcatgtctgccataacatgcatgtttcttcctgtacatttatttgagaaaacactggatttaaataattttaaataatttgtagcttaatattaaagatttaagttatttattgtttcattttttttcccacaatccaagctgccatattttgagggcagggggagttttattctacaccctttaccttcctagataattatgtctaagtagttttatctttaatttcatggttaactgtgagccaaaatacaattggacaattagtctcattatttattgtgccccattgcaactttatggttcaataaatatataattttttacaaatgtaaaattttacatttaagcatttgtaaagttacagcaaaagatgtacctgttaatacacagaatgtgtacagattatttgttatgacaataaaacactcaaaataaatggtctttagcatctcaaattccaactgaaatcattttagtattaactcttcttcccaaagcaatgtctcatttcttggctgtgcaggtgatgccatgttatatccaataactagaaaaatcactgtgctgaacttttatgtttagcttccaagtatttttctaatgttttgcatttcaagtggtatcactgttaaatgccatttgttttcagattgtggccttttattattggctgctagatcctggtgtttctatgttcttttttaagcaccaaaaagaagatggggaagaaaagaaggaaaattttctgatataaatatgttgttcaaattatgagtattatttaaaaaagaaaaaggaacataacccaggagtctaagttaaatctaatattgttaatactgaacttgcaggtccaggttggtatacattccaccctctagaagtattttcttacagtagataagctgctcacattttgttttgaatgggcatctcctgaggaaatgtagcatgacattggtactaactgcatgtgtaaatacatcatactggcaaaccgtaaaatataaattatgtatcatcattcatgtagtatctataatttgtaacagtgggggggaaagatgacatggtatttaataatacaataaaaatattcttatcacttcctaaaaaagcacagacacacaaaaaaacgacca

SEQ ID NO: 736995 - DNA, 1054 bp, Homo sapiens; identical to SEQ ID NO: 427522

SEQ ID NO: 736996 - DNA, 1020 bp, Homo sapiens
ctgatgttgctactgtaatgtggcgaagaatgctaggcattttgggagatgtaaattcaatcatggatcctgaaatacatgctcaagtttttgattacctctgtgaactttggcagaatctagctaagattagagataaccttggcatttcaactgataacctgacctccccttctccaccagttttaattcctccactgagaattcttacaccttggctttttaaggcaaccatgttgactgataaatataaacaaggtaaattacatgcatataaacttatttgtaatacaatgaaaagaagacaagatgtttctccaaatagagattttctaacacatttctacaatataatgcattgtggattacttcatattgaccaggatattgtcaatacaatcatcaaacactgctcacctcaatttttttcacttggtttgcctggtgccacaatgcttattatggattttattgtagcagctggtagagtggcttcttcagcttttctcaatgcaccaagagtagaagcacaagttcttctgggatctttggtttgctttcccaacttatattgtgaactgccttctcttcatcccaacattcctgatgttgctgtgtctcagtttacagatgttaaggaacttataatcaaaactgtattaagctcggcaagagatgagccctctggtcctgcacgatgtgtagcactttgtagtttaggtatttggatttgtgaagaactagtccatgagtctcatcatcctcaaattaaggaagctctgaatgtgatttgtgtttccttaaagtttactaataaaacagtagcccacgtagcttgtaacatgcttcacatgctggttcattatgtacctagacttcagatttaccagcctgattctcccttgaaaattattcaaatcctaatagctaccatcacccatcttttaccaagtacagaggcttcatcttatgaaatggacaagagggtaatttaaattttgtttgatgattagtatgtgg

SEQ ID NO: 736997 - DNA, 2388 bp, Homo sapiens
ctgatgttgctactgtaatgtggcgaagaatgctaggcattttgggagatgtaaattcaatcatggatcctgaaatacatgctcaagtttttgattacctctgtgaactttggcagaatctagctaagattagagataaccttggcatttcaactgataacctgacctccccttctccaccagttttaattcctccactgagaattcttacaccttggctttttaaggcaaccatgttgactgataaatataaacaaggtaaattacatgcatataaacttatttgtaatacaatgaaaagaagacaagatgtttctccaaatagagattttctaacacatttctacaatataatgcattgtggattacttcatattgaccaggatattgtcaatacaatcatcaaacactgctcacctcaatttttttcacttggtttgcctggtgccacaatgcttattatggattttattgtagcagctggtagagtggcttcttcagcttttctcaatgcaccaagagtagaagcacaagttcttctgggatctttggtttgctttcccaacttatattgtgaactgccttctcttcatcccaacattcctgatgttgctgtgtctcagtttacagatgttaaggaacttataatcaaaactgtattaagctcggcaagagatgagccctctggtcctgcacgatgtgtagcactttgtagtttaggtatttggatttgtgaagaactagtccatgagtctcatcatcctcaaattaaggaagctctgaatgtgatttgtgtttccttaaagtttactaataaaacagtagcccacgtagcttgtaacatgcttcacatgctggttcattatgtacctagacttcagatttaccagcctgattctcccttgaaaattattcaaatcctaatagctaccatcacccatcttttaccaagtacagaggcttcatcttatgaaatggacaagaggttggtagtatctttacttctctgccttctggactggatcatggccttacctctaaagacactgctccaaccatttcatgctacgggagcagaaagcgataaaacagaaaaatctgttctcaattgcatttataaggttttacatgggtgtgtttatggagctcagtgttttagcaatccaaggtattttcccatgagcctctctgatttggcatctgtagattatgatccttttatgcatttggaaagtctgaaagagcctgagcctctgcactctcctgactcagaacgatcttctaaactccagccagtaacagaagtgaaaactcaaatgcagcatggattaatctctatagcagcccgcactgttattacacatctggtaaatcacctgggccattatccaatgagcggtggtcctgctatgctaacaagtcaggtgtgtgaaaatcacgacaatcattacagtgaaagtactgaactttctcctgaactctttgagagtccaaatatccagttctttgtgttaaataatacaaccttagtgtcctgtatccagatcagatcagaagagaatatgcctggaggaggtttatctgctggccttgcatcagccaattcaaatgtcagaatcatagtacgtgatctctctggaaaatattcatgggattctgctatactgtatggcccacctcctgtaagtggcttgtcagaacctacatctttcatgctttcattgtctcaccaagagaagccagaagagcctccgacatctaatgaatgcttagaagatataaccgtaaaagatggactttctctccagtttaaaagatttagagaaactgtaccaacttgggatacaataagagatgaagaagatgttcttgatgagctcttgcagtatttgggtgttactagtcctgaatgcttacagagaactggaatctcacttaatattcctgctccacaacctgtgtgcatttctgaaaaacaagaaaatgatgttattaatgctatccttaagcaacatacagaagaaaaagaatttgttgagaagcactttaatgacttaaacatgaaagctgtggaacaagatgaaccaatacctcaaaaacctcagtcagcattttattattgcagattgcttcttagtatattgggaatgaattcctgggacaaacggaggagctttcatctcctgaagaaaaatgaaaagctacttagagaacttaggaacttggattcaaggcagtgccgagagacacacaagattgcagtattttatgttgctgaaggacaagaagacaaacactccattctcaccaatacaggaggaagtcaagcatatgaagattttgtagctggtcttggttgggagcttattatttttaaattatacgaaa

SEQ ID NO: 736998 - DNA, 4328 bp, Homo sapiens
ctgatgttgctactgtaatgtggcgaagaatgctaggcattttgggagatgtaaattcaatcatggatcctgaaatacatgctcaagtttttgattacctctgtgaactttggcagaatctagctaagattagagataaccttggcatttcaactgataacctgacctccccttctccaccagttttaattcctccactgagaattcttacaccttggctttttaaggcaaccatgttgactgataaatataaacaaggtaaattacatgcatataaacttatttgtaatacaatgaaaagaagacaagatgtttctccaaatagagattttctaacacatttctacaatataatgcattgtggattacttcatattgaccaggatattgtcaatacaatcatcaaacactgctcacctcaatttttttcacttggtttgcctggtgccacaatgcttattatggattttattgtagcagctggtagagtggcttcttcagcttttctcaatgcaccaagagtagaagcacaagttcttctgggatctttggtttgctttcccaacttatattgtgaactgccttctcttcatcccaacattcctgatgttgctgtgtctcagtttacagatgttaaggaacttataatcaaaactgtattaagctcggcaagagatgagccctctggtcctgcacgatgtgtagcactttgtagtttaggtatttggatttgtgaagaactagtccatgagtctcatcatcctcaaattaaggaagctctgaatgtgatttgtgtttccttaaagtttactaataaaacagtagcccacgtagcttgtaacatgcttcacatgctggttcattatgtacctagacttcagatttaccagcctgattctcccttgaaaattattcaaatcctaatagctaccatcacccatcttttaccaagtacagaggcttcatcttatgaaatggacaagaggttggtagtatctttacttctctgccttctggactggatcatggccttacctctaaagacactgctccaaccatttcatgctacgggagcagaaagcgataaaacagaaaaatctgttctcaattgcatttataaggttttacatgggtgtgtttatggagctcagtgttttagcaatccaaggtattttcccatgagcctctctgatttggcatctgtagattatgatccttttatgcatttggaaagtctgaaagagcctgagcctctgcactctcctgactcagaacgatcttctaaactccagccagtaacagaagtgaaaactcaaatgcagcatggattaatctctatagcagcccgcactgttattacacatctggtaaatcacctgggccattatccaatgagcggtggtcctgctatgctaacaagtcaggtgtgtgaaaatcacgacaatcattacagtgaaagtactgaactttctcctgaactctttgagagtccaaatatccagttctttgtgttaaataatacaaccttagtgtcctgtatccagatcagatcagaagagaatatgcctggaggaggtttatctgctggccttgcatcagccaattcaaatgtcagaatcatagtacgtgatctctctggaaaatattcatgggattctgctatactgtatggcccacctcctgtaagtggcttgtcagaacctacatctttcatgctttcattgtctcaccaagagaagccagaagagcctccgacatctaatgaatgcttagaagatataaccgtaaaagatggactttctctccagtttaaaagatttagagaaactgtaccaacttgggatacaataagagatgaagaagatgttcttgatgagctcttgcagtatttgggtgttactagtcctgaatgcttacagagaactggaatctcacttaatattcctgctccacaacctgtgtgcatttctgaaaaacaagaaaatgatgttattaatgctatccttaagcaacatacagaagaaaaagaatttgttgagaagcactttaatgacttaaacatgaaagctgtggaacaagatgaaccaatacctcaaaaacctcagtcagcattttattattgcagattgcttcttagtatattgggaatgaattcctgggacaaacggaggagctttcatctcctgaagaaaaatgaaaagctacttagagaacttaggaacttggattcaaggcagtgccgagagacacacaagattgcagtattttatgttgctgaaggacaagaagacaaacactccattctcaccaatacaggaggaagtcaagcatatgaagattttgtagctggtcttggttgggaggtaaatcttacaaaccattgtggttttatgggaggactacaaaaaaacaaaagcactggattgaccactccatattttgctacctctacagtagaggtaatatttcacgtgtcaacaagaatgccttctgattctgatgattctttgaccaaaaaattgagacatttgggaaatgatgaagtgcacattgtttggtcagagcatactagagactacaggagaggaattattcccacagaatttggtgatgtccttattgtaatatatccaatgaaaaatcacatgttcagtattcagataatgaaaaaaccagaggttcccttctttggtcccctttttgatggtgctattgtgaatggaaaggttctacccattatggttagagcaacagctataaatgcaagccgtgctctgaaatctctgattccattgtatcaaaacttctatgaggagagagcacgatacctgcaaacaattgtccagcaccacttagaaccaacaacatttgaagattttgcagcacaggttttttctccagctccctaccaccatttaccatctgatgccgatcattaaatatcagttctgtttatctgaagggctcctacccagagattctacccagtgaaactcccacagcaacgcaggtagatggggctgacctggcctctccaatgtctcctcgaactagcaaaagccgcatgtccatgaagctgcgtcgttcctctggctcagccaataaatcctaaggagacaagcagcccagcagtgatcagcagtagccaccttagcacgaacatagggttaaccctttcaggccttcatgtctgccataacatgcatgtttcttcctgtacatttatttgagaaaacactggatttaaataattttaaataatttgtagcttaatattaaagatttaagttatttattgtttcattttttttcccacaatccaagctgccatattttgagggcagggggagttttattctacaccctttaccttcctagataattatgtctaagtagttttatctttaatttcatggttaactgtgagccaaaatacaattggacaattagtctcattatttattgtgccccattgcaactttatggttcaataaatatataattttttacaaatgtaaaattttacatttaagcatttgtaaagttacagcaaaagatgtacctgttaatacacagaatgtgtacagattatttgttatgacaataaaacactcaaaataaatggtctttagcatctcaaattccaactgaaatcattttagtattaactcttcttcccaaagcaatgtctcatttcttggctgtgcaggtgatgccatgttatatccaataactagaaaaatcactgtgctgaacttttatgtttagcttccaagtatttttctaatgttttgcatttcaagtggtatcactgttaaatgccatttgttttcagattgtggccttttattattggctgctagatcctggtgtttctatgttcttttttaagcaccaaaaagaagatggggaagaaaagaaggaaaattttctgatataaatatgttgttcaaattatgagtattatttaaaaaagaaaaaggaacataacccaggagtctaagttaaatctaatattgttaatactgaacttgcaggtccaggttggtatacattccaccctctagaagtattttcttacagtagataagctgctcacattttgttttgaatgggcatctcctgaggaaatgtagcatgacattggtactaactgcatgtgtaaatacatcatactggcaaaccgtaaaatataaattatgtatcatcattcatgtagtatctataatttgtaacagtgggggggaaagatgacatggtatttaataatacaataaaaatattcttatcacttcctaaaaaagcacagacacacaaaaaaacgacca

SEQ ID NO: 736999 - DNA, 4297 bp, Homo sapiens
ctgatgttgctactgtaatgtggcgaagaatgctaggcattttgggagatgtaaattcaatcatggatcctgaaatacatgctcaagtttttgattacctctgtgaactttggcagaatctagctaagattagagataaccttggcatttcaactgataacctgacctccccttctccaccagttttaattcctccactgagaattcttacaccttggctttttaaggcaaccatgttgactgataaatataaacaaggtaaattacatgcatataaacttatttgtaatacaatgaaaagaagacaagatgtttctccaaatagagattttctaacacatttctacaatataatgcattgtggattacttcatattgaccaggatattgtcaatacaatcatcaaacactgctcacctcaatttttttcacttggtttgcctggtgccacaatgcttattatggattttattgtagcagctggtagagtggcttcttcagcttttctcaatgcaccaagagtagaagcacaagttcttctgggatctttggtttgctttcccaacttatattgtgaactgccttctcttcatcccaacattcctgatgttgctgtgtctcagtttacagatgttaaggaacttataatcaaaactgtattaagctcggcaagagatgagccctctggtcctgcacgatgtgtagcactttgtagtttaggtatttggatttgtgaagaactagtccatgagtctcatcatcctcaaattaaggaagctctgaatgtgatttgtgtttccttaaagtttactaataaaacagtagcccacgtagcttgtaacatgcttcacatgctggttcattatgtacctagacttcagatttaccagcctgattctcccttgaaaattattcaaatcctaatagctaccatcacccatcttttaccaagtacagaggcttcatcttatgaaatggacaagaggttggtagtatctttacttctctgccttctggactggatcatggccttacctctaaagacactgctccaaccatttcatgctacgggagcagaaagcgataaaacagaaaaatctgttctcaattgcatttataaggttttacatgggtgtgtttatggagctcagtgttttagcaatccaaggtattttcccatgagcctctctgatttggcatctgtagattatgatccttttatgcatttggaaagtctgaaagagcctgagcctctgcactctcctgactcagaacgatcttctaaactccagccagtaacagaagtgaaaactcaaatgcagcatggattaatctctatagcagcccgcactgttattacacatctggtaaatcacctgggccattatccaatgagcggtggtcctgctatgctaacaagtcaggtgtgtgaaaatcacgacaatcattacagtgaaagtactgaactttctcctgaactctttgagagtccaaatatccagttctttgtgttaaataatacaaccttagtgtcctgtatccagatcagatcagaagagaatatgcctggaggaggtttatctgctggccttgcatcagccaattcaaatgtcagaatcatagtacgtgatctctctggaaaatattcatgggattctgctatactgtatggcccacctcctgtaagtggcttgtcagaacctacatctttcatgctttcattgtctcaccaagagaagccagaagagcctccgacatctaatgaatgcttagaagatataaccgtaaaagatggactttctctccagtttaaaagatttagagaaactgtaccaacttgggatacaataagagatgaagaagatgttcttgatgagctcttgcagtatttgggtgttactagtcctgaatgcttacagagaactggaatctcacttaatattcctgctccacaacctgtgtgcatttctgaaaaacaagaaaatgatgttattaatgctatccttaagcaacatacagaagaaaaagaatttgttgagaagcactttaatgacttaaacatgaaagctgtggaacaagatgaaccaatacctcaaaaacctcagtcagcattttattattgcagattgcttcttagtatattgggaatgaattcctgggacaaacggaggagctttcatctcctgaagaaaaatgaaaagctacttagagaacttaggaacttggattcaaggcagtgccgagagacacacaagattgcagtattttatgttgctgaaggacaagaagacaaacactccattctcaccaatacaggaggaagtcaagcatatgaagattttgtagctggtcttggttgggaggtaaatcttacaaaccattgtggttttatgggaggactacaaaaaaacaaaagcactggattgaccactccatattttgctacctctacagtagaggtaatatttcacgtgtcaacaagaatgccttctgattctgatgattctttgaccaaaaaattgagacatttgggaaatgatgaagtgcacattgtttggtcagagcatactagagactacaggagaggaattattcccacagaatttggtgatgtccttattgtaatatatccaatgaaaaatcacatgttcagtattcagataatgaaaaaaccagaggttcccttctttggtcccctttttgatggtgctattgtgaatggaaaggttctacccattatggttagagcaacagctataaatgcaagccgtgctctgaaatctctgattccattgtatcaaaacttctatgaggagagagcacgatacctgcaaacaattgtccagcaccacttagaaccaacaacatttgaagattttgcagcacaggttttttctccagctccctaccaccatttaccatctgatgccgggctcctacccagagattctacccagtgaaactcccacagcaacgcaggtagatggggctgacctggcctctccaatgtctcctcgaactagcaaaagccgcatgtccatgaagctgcgtcgttcctctggctcagccaataaatcctaaggagacaagcagcccagcagtgatcagcagtagccaccttagcacgaacatagggttaaccctttcaggccttcatgtctgccataacatgcatgtttcttcctgtacatttatttgagaaaacactggatttaaataattttaaataatttgtagcttaatattaaagatttaagttatttattgtttcattttttttcccacaatccaagctgccatattttgagggcagggggagttttattctacaccctttaccttcctagataattatgtctaagtagttttatctttaatttcatggttaactgtgagccaaaatacaattggacaattagtctcattatttattgtgccccattgcaactttatggttcaataaatatataattttttacaaatgtaaaattttacatttaagcatttgtaaagttacagcaaaagatgtacctgttaatacacagaatgtgtacagattatttgttatgacaataaaacactcaaaataaatggtctttagcatctcaaattccaactgaaatcattttagtattaactcttcttcccaaagcaatgtctcatttcttggctgtgcaggtgatgccatgttatatccaataactagaaaaatcactgtgctgaacttttatgtttagcttccaagtatttttctaatgttttgcatttcaagtggtatcactgttaaatgccatttgttttcagattgtggccttttattattggctgctagatcctggtgtttctatgttcttttttaagcaccaaaaagaagatggggaagaaaagaaggaaaattttctgatataaatatgttgttcaaattatgagtattatttaaaaaagaaaaaggaacataacccaggagtctaagttaaatctaatattgttaatactgaacttgcaggtccaggttggtatacattccaccctctagaagtattttcttacagtagataagctgctcacattttgttttgaatgggcatctcctgaggaaatgtagcatgacattggtactaactgcatgtgtaaatacatcatactggcaaaccgtaaaatataaattatgtatcatcattcatgtagtatctataatttgtaacagtgggggggaaagatgacatggtatttaataatacaataaaaatattcttatcacttcctaaaaaagcacagacacacaaaaaaacgacca

SEQ ID NO: 737000 - DNA, 2955 bp, Homo sapiens
ctgatgttgctactgtaatgtggcgaagaatgctaggcattttgggagatgtaaattcaatcatggatcctgaaatacatgctcaagtttttgattacctctgtgaactttggcagaatctagctaagattagagataaccttggcatttcaactgataacctgacctccccttctccaccagttttaattcctccactgagaattcttacaccttggctttttaaggcaaccatgttgactgataaatataaacaaggtaaattacatgcatataaacttatttgtaatacaatgaaaagaagacaagatgtttctccaaatagagattttctaacacatttctacaatataatgcattgtggattacttcatattgaccaggatattgtcaatacaatcatcaaacactgctcacctcaatttttttcacttggtttgcctggtgccacaatgcttattatggattttattgtagcagctggtagagtggcttcttcagcttttctcaatgcaccaagagtagaagcacaagttcttctgggatctttggtttgctttcccaacttatattgtgaactgccttctcttcatcccaacattcctgatgttgctgtgtctcagtttacagatgttaaggaacttataatcaaaactgtattaagctcggcaagagatgagccctctggtcctgcacgatgtgtagcactttgtagtttaggtatttggatttgtgaagaactagtccatgagtctcatcatcctcaaattaaggaagctctgaatgtgatttgtgtttccttaaagtttactaataaaacagtagcccacgtagcttgtaacatgcttcacatgctggttcattatgtacctagacttcagatttaccagcctgattctcccttgaaaattattcaaatcctaatagctaccatcacccatcttttaccaagtacagaggcttcatcttatgaaatggacaagaggttggtagtatctttacttctctgccttctggactggatcatggccttacctctaaagacactgctccaaccatttcatgctacgggagcagaaagcgataaaacagaaaaatctgttctcaattgcatttataaggttttacatgggtgtgtttatggagctcagtgttttagcaatccaaggtattttcccatgagcctctctgatttggcatctgtagattatgatccttttatgcatttggaaagtctgaaagagcctgagcctctgcactctcctgactcagaacgatcttctaaactccagccagtaacagaagtgaaaactcaaatgcagcatggattaatctctatagcagcccgcactgttattacacatctggtaaatcacctgggccattatccaatgagcggtggtcctgctatgctaacaagtcaggtgtgtgaaaatcacgacaatcattacagtgaaagtactgaactttctcctgaactctttgagagtccaaatatccagttctttgtgttaaataatacaaccttagtgtcctgtatccagatcagatcagaagagaatatgcctggaggaggtttatctgctggccttgcatcagccaattcaaatgtcagaatcatagtacgtgatctctctggaaaatattcatgggattctgctatactgtatggcccacctcctgtaagtggcttgtcagaacctacatctttcatgctttcattgtctcaccaagagaagccagaagagcctccgacatctaatgaatgcttagaagatataaccgtaaaagatggactttctctccagtttaaaagatttagagaaactgtaccaacttgggatacaataagagatgaagaagatgttcttgatgagctcttgcagtatttgggtgttactagtcctgaatgcttacagagaactggaatctcacttaatattcctgctccacaacctgtgtgcatttctgaaaaacaagaaaatgatgttattaatgctatccttaagcaacatacagaagaaaaagaatttgttgagaagcactttaatgacttaaacatgaaagctgtggaacaagatgaaccaatacctcaaaaacctcagtcagcattttattattgcagattgcttcttagtatattgggaatgaattcctgggacaaacggaggagctttcatctcctgaagaaaaatgaaaagctacttagagaacttaggaacttggattcaaggcagtgccgagagacacacaagattgcagtattttatgttgctgaaggacaagaagacaaacactccattctcaccaatacaggaggaagtcaagcatatgaagattttgtagctggtcttggttgggaggtaaatcttacaaaccattgtggttttatgggaggactacaaaaaaacaaaagcactggattgaccactccatattttgctacctctacagtagaggtaatatttcacgtgtcaacaagaatgccttctgattctgatgattctttgaccaaaaaattgagacatttgggaaatgatgaagtgcacattgtttggtcagagcatactagagactacaggagaggaattattcccacagaatttggtgatgtccttattgtaatatatccaatgaaaaatcacatgttcagtattcagataatgaaaaaaccagaggttcccttctttggtcccctttttgatggtgctattgtgaatggaaaggttctacccattatggttagagcaacagctataaatgcaagccgtgctctgaaatctctgattccattgtatcaaaactttttattctccctcaagctctgctactcaaatgtccagtacctgttgcaaagtaggaaagccaaaactaagtggaatggaattgatgaattgattggttctgctaatgcagttgcctttcgttataataaaacattataaaaccttttgg

SEQ ID NO: 737001 - DNA, 2263 bp, Homo sapiens
tcgacgatccccgtgtgcggaccatcctcaaaaacctcagtcagcattttattattgcagattgcttcttagtatattgggaatgaattcctgggacaaacggaggagctttcatctcctgaagaaaaatgaaaagctacttagagaacttaggaacttggattcaaggcagtgccgagagacacacaagattgcagtattttatgttgctgaaggacaagaagacaaacactccattctcaccaatacaggaggaagtcaagcatatgaagattttgtagctggtcttggttgggaggtaaatcttacaaaccattgtggttttatgggaggactacaaaaaaacaaaagcactggattgaccactccatattttgctacctctacagtagaggtaatatttcacgtgtcaacaagaatgccttctgattctgatgattctttgaccaaaaaattgagacatttgggaaatgatgaagtgcacattgtttggtcagagcatactagagactacaggagaggaattattcccacagaatttggtgatgtccttattgtaatatatccaatgaaaaatcacatgttcagtattcagataatgaaaaaaccagaggttcccttctttggtcccctttttgatggtgctattgtgaatggaaaggttctacccattatggttagagcaacagctataaatgcaagccgtgctctgaaatctctgattccattgtatcaaaacttctatgaggagagagcacgatacctgcaaacaattgtccagcaccacttagaaccaacaacatttgaagattttgcagcacaggttttttctccagctccctaccaccatttaccatctgatgccgatcattaaatatcagttctgtttatctgaagggctcctacccagagattctacccagtgaaactcccacagcaacgcaggtagatggggctgacctggcctctccaatgtctcctcgaactagcaaaagccgcatgtccatgaagctgcgtcgttcctctggctcagccaataaatcctaaggagacaagcagcccagcagtgatcagcagtagccaccttagcacgaacatagggttaaccctttcaggccttcatgtctgccataacatgcatgtttcttcctgtacatttatttgagaaaacactggatttaaataattttaaataatttgtagcttaatattaaagatttaagttatttattgtttcattttttttcccacaatccaagctgccatattttgagggcagggggagttttattctacaccctttaccttcctagataattatgtctaagtagttttatctttaatttcatggttaactgtgagccaaaatacaattggacaattagtctcattatttattgtgccccattgcaactttatggttcaataaatatataattttttacaaatgtaaaattttacatttaagcatttgtaaagttacagcaaaagatgtacctgttaatacacagaatgtgtacagattatttgttatgacaataaaacactcaaaataaatggtctttagcatctcaaattccaactgaaatcattttagtattaactcttcttcccaaagcaatgtctcatttcttggctgtgcaggtgatgccatgttatatccaataactagaaaaatcactgtgctgaacttttatgtttagcttccaagtatttttctaatgttttgcatttcaagtggtatcactgttaaatgccatttgttttcagattgtggccttttattattggctgctagatcctggtgtttctatgttcttttttaagcaccaaaaagaagatggggaagaaaagaaggaaaattttctgatataaatatgttgttcaaattatgagtattatttaaaaaagaaaaaggaacataacccaggagtctaagttaaatctaatattgttaatactgaacttgcaggtccaggttggtatacattccaccctctagaagtattttcttacagtagataagctgctcacattttgttttgaatgggcatctcctgaggaaatgtagcatgacattggtactaactgcatgtgtaaatacatcatactggcaaaccgtaaaatataaattatgtatcatcattcatgtagtatctataatttgtaacagtgggggggaaagatgacatggtatttaataatacaataaaaatattcttatcacttcctaaaaaagcacagacacacaaaaaaacgacca

SEQ ID NO: 737002 - DNA, 3051 bp, Homo sapiens
cccattcatttatattttttatttccagtgaaaactcaaatgcagcatggattaatctctatagcagcccgcactgttattacacatctggtaaatcacctgggccattatccaatgagcggtggtcctgctatgctaacaagtcaggtgtgtgaaaatcacgacaatcattacagtgaaagtactgaactttctcctgaactctttgagagtccaaatatccagttctttgtgttaaataatacaaccttagtgtcctgtatccagatcagatcagaagagaatatgcctggaggaggtttatctgctggccttgcatcagccaattcaaatgtcagaatcatagtacgtgatctctctggaaaatattcatgggattctgctatactgtatggcccacctcctgtaagtggcttgtcagaacctacatctttcatgctttcattgtctcaccaagagaagccagaagagcctccgacatctaatgaatgcttagaagatataaccgtaaaagatggactttctctccagtttaaaagatttagagaaactgtaccaacttgggatacaataagagatgaagaagatgttcttgatgagctcttgcagtatttgggtgttactagtcctgaatgcttacagagaactggaatctcacttaatattcctgctccacaacctgtgtgcatttctgaaaaacaagaaaatgatgttattaatgctatccttaagcaacatacagaagaaaaagaatttgttgagaagcactttaatgacttaaacatgaaagctgtggaacaagatgaaccaatacctcaaaaacctcagtcagcattttattattgcagattgcttcttagtatattgggaatgaattcctgggacaaacggaggagctttcatctcctgaagaaaaatgaaaagctacttagagaacttaggaacttggattcaaggcagtgccgagagacacacaagattgcagtattttatgttgctgaaggacaagaagacaaacactccattctcaccaatacaggaggaagtcaagcatatgaagattttgtagctggtcttggttgggaggtaaatcttacaaaccattgtggttttatgggaggactacaaaaaaacaaaagcactggattgaccactccatattttgctacctctacagtagaggtaatatttcacgtgtcaacaagaatgccttctgattctgatgattctttgaccaaaaaattgagacatttgggaaatgatgaagtgcacattgtttggtcagagcatactagagactacaggagaggaattattcccacagaatttggtgatgtccttattgtaatatatccaatgaaaaatcacatgttcagtattcagataatgaaaaaaccagaggttcccttctttggtcccctttttgatggtgctattgtgaatggaaaggttctacccattatggttagagcaacagctataaatgcaagccgtgctctgaaatctctgattccattgtatcaaaacttctatgaggagagagcacgatacctgcaaacaattgtccagcaccacttagaaccaacaacatttgaagattttgcagcacaggttttttctccagctccctaccaccatttaccatctgatgccgatcattaaatatcagttctgtttatctgaagggctcctacccagagattctacccagtgaaactcccacagcaacgcaggtagatggggctgacctggcctctccaatgtctcctcgaactagcaaaagccgcatgtccatgaagctgcgtcgttcctctggctcagccaataaatcctaaggagacaagcagcccagcagtgatcagcagtagccaccttagcacgaacatagggttaaccctttcaggccttcatgtctgccataacatgcatgtttcttcctgtacatttatttgagaaaacactggatttaaataattttaaataatttgtagcttaatattaaagatttaagttatttattgtttcattttttttcccacaatccaagctgccatattttgagggcagggggagttttattctacaccctttaccttcctagataattatgtctaagtagttttatctttaatttcatggttaactgtgagccaaaatacaattggacaattagtctcattatttattgtgccccattgcaactttatggttcaataaatatataattttttacaaatgtaaaattttacatttaagcatttgtaaagttacagcaaaagatgtacctgttaatacacagaatgtgtacagattatttgttatgacaataaaacactcaaaataaatggtctttagcatctcaaattccaactgaaatcattttagtattaactcttcttcccaaagcaatgtctcatttcttggctgtgcaggtgatgccatgttatatccaataactagaaaaatcactgtgctgaacttttatgtttagcttccaagtatttttctaatgttttgcatttcaagtggtatcactgttaaatgccatttgttttcagattgtggccttttattattggctgctagatcctggtgtttctatgttcttttttaagcaccaaaaagaagatggggaagaaaagaaggaaaattttctgatataaatatgttgttcaaattatgagtattatttaaaaaagaaaaaggaacataacccaggagtctaagttaaatctaatattgttaatactgaacttgcaggtccaggttggtatacattccaccctctagaagtattttcttacagtagataagctgctcacattttgttttgaatgggcatctcctgaggaaatgtagcatgacattggtactaactgcatgtgtaaatacatcatactggcaaaccgtaaaatataaattatgtatcatcattcatgtagtatctataatttgtaacagtgggggggaaagatgacatggtatttaataatacaataaaaatattcttatcacttcctaaaaaagcacagacacacaaaaaaacgacca

SEQ ID NO: 737003 - DNA, 2462 bp, Homo sapiens
tcaaccatgggattcggctacattgcaaaacagacaactcttaagatgcttatgtattcacacctatgtgtccttcctgatgctctttctcttcatttgtcaaatctttcttaccttcatctaactcaattttatcttctcctttaagtttctgtttttgcagtcaaaagtgatcgtgcctgtcttttattctaatggcaattttgtagtaattttttacttacattgcatttatatctccttctgtagactataagatctaattctttttcatctttttattgctacatactttgtacatagaacttaattgttggatgaatgagtagataaaatagtgattaaattaatggtgtaatcttttgttttatagccgagagacacacaagattgcagtattttatgttgctgaaggacaagaagacaaacactccattctcaccaatacaggaggaagtcaagcatatgaagattttgtagctggtcttggttgggaggtaaatcttacaaaccattgtggttttatgggaggactacaaaaaaacaaaagcactggattgaccactccatattttgctacctctacagtagaggtaatatttcacgtgtcaacaagaatgccttctgattctgatgattctttgaccaaaaaattgagacatttgggaaatgatgaagtgcacattgtttggtcagagcatactagagactacaggagaggaattattcccacagaatttggtgatgtccttattgtaatatatccaatgaaaaatcacatgttcagtattcagataatgaaaaaaccagaggttcccttctttggtcccctttttgatggtgctattgtgaatggaaaggttctacccattatggttagagcaacagctataaatgcaagccgtgctctgaaatctctgattccattgtatcaaaacttctatgaggagagagcacgatacctgcaaacaattgtccagcaccacttagaaccaacaacatttgaagattttgcagcacaggttttttctccagctccctaccaccatttaccatctgatgccgatcattaaatatcagttctgtttatctgaagggctcctacccagagattctacccagtgaaactcccacagcaacgcaggtagatggggctgacctggcctctccaatgtctcctcgaactagcaaaagccgcatgtccatgaagctgcgtcgttcctctggctcagccaataaatcctaaggagacaagcagcccagcagtgatcagcagtagccaccttagcacgaacatagggttaaccctttcaggccttcatgtctgccataacatgcatgtttcttcctgtacatttatttgagaaaacactggatttaaataattttaaataatttgtagcttaatattaaagatttaagttatttattgtttcattttttttcccacaatccaagctgccatattttgagggcagggggagttttattctacaccctttaccttcctagataattatgtctaagtagttttatctttaatttcatggttaactgtgagccaaaatacaattggacaattagtctcattatttattgtgccccattgcaactttatggttcaataaatatataattttttacaaatgtaaaattttacatttaagcatttgtaaagttacagcaaaagatgtacctgttaatacacagaatgtgtacagattatttgttatgacaataaaacactcaaaataaatggtctttagcatctcaaattccaactgaaatcattttagtattaactcttcttcccaaagcaatgtctcatttcttggctgtgcaggtgatgccatgttatatccaataactagaaaaatcactgtgctgaacttttatgtttagcttccaagtatttttctaatgttttgcatttcaagtggtatcactgttaaatgccatttgttttcagattgtggccttttattattggctgctagatcctggtgtttctatgttcttttttaagcaccaaaaagaagatggggaagaaaagaaggaaaattttctgatataaatatgttgttcaaattatgagtattatttaaaaaagaaaaaggaacataacccaggagtctaagttaaatctaatattgttaatactgaacttgcaggtccaggttggtatacattccaccctctagaagtattttcttacagtagataagctgctcacattttgttttgaatgggcatctcctgaggaaatgtagcatgacattggtactaactgcatgtgtaaatacatcatactggcaaaccgtaaaatataaattatgtatcatcattcatgtagtatctataatttgtaacagtgggggggaaagatgacatggtatttaataatacaataaaaatattcttatcacttcctaaaaaagcacagacacacaaaaaaacgacca

SEQ ID NO: 737004 - DNA, 1951 bp, Homo sapiens
tttgtgtttcatatgtaaaactgatcaagtgcaatttaacaattttttaatttcgtttttcccctttttatgttgtatgtgactgtatgactgtactcaaagagcttttaaagcagtataaattgttttcttgtctttccagttgagacatttgggaaatgatgaagtgcacattgtttggtcagagcatactagagactacaggagaggaattattcccacagaatttggtgatgtccttattgtaatatatccaatgaaaaatcacatgttcagtattcagataatgaaaaaaccagaggttcccttctttggtcccctttttgatggtgctattgtgaatggaaaggttctacccattatggttagagcaacagctataaatgcaagccgtgctctgaaatctctgattccattgtatcaaaacttctatgaggagagagcacgatacctgcaaacaattgtccagcaccacttagaaccaacaacatttgaagattttgcagcacaggttttttctccagctccctaccaccatttaccatctgatgccgatcattaaatatcagttctgtttatctgaagggctcctacccagagattctacccagtgaaactcccacagcaacgcaggtagatggggctgacctggcctctccaatgtctcctcgaactagcaaaagccgcatgtccatgaagctgcgtcgttcctctggctcagccaataaatcctaaggagacaagcagcccagcagtgatcagcagtagccaccttagcacgaacatagggttaaccctttcaggccttcatgtctgccataacatgcatgtttcttcctgtacatttatttgagaaaacactggatttaaataattttaaataatttgtagcttaatattaaagatttaagttatttattgtttcattttttttcccacaatccaagctgccatattttgagggcagggggagttttattctacaccctttaccttcctagataattatgtctaagtagttttatctttaatttcatggttaactgtgagccaaaatacaattggacaattagtctcattatttattgtgccccattgcaactttatggttcaataaatatataattttttacaaatgtaaaattttacatttaagcatttgtaaagttacagcaaaagatgtacctgttaatacacagaatgtgtacagattatttgttatgacaataaaacactcaaaataaatggtctttagcatctcaaattccaactgaaatcattttagtattaactcttcttcccaaagcaatgtctcatttcttggctgtgcaggtgatgccatgttatatccaataactagaaaaatcactgtgctgaacttttatgtttagcttccaagtatttttctaatgttttgcatttcaagtggtatcactgttaaatgccatttgttttcagattgtggccttttattattggctgctagatcctggtgtttctatgttcttttttaagcaccaaaaagaagatggggaagaaaagaaggaaaattttctgatataaatatgttgttcaaattatgagtattatttaaaaaagaaaaaggaacataacccaggagtctaagttaaatctaatattgttaatactgaacttgcaggtccaggttggtatacattccaccctctagaagtattttcttacagtagataagctgctcacattttgttttgaatgggcatctcctgaggaaatgtagcatgacattggtactaactgcatgtgtaaatacatcatactggcaaaccgtaaaatataaattatgtatcatcattcatgtagtatctataatttgtaacagtgggggggaaagatgacatggtatttaataatacaataaaaatattcttatcacttcctaaaaaagcacagacacacaaaaaaacgacca

SEQ ID NO: 737005 - DNA, 1915 bp, Homo sapiens
gaaattggctaagtgtgtaaattatttactcagttacatgaagcacatagttcttttgaatagacaccctataaacctttgacatttttattgtcctagtatgagtgacccatcacagaaaagaattgaattcaaatagtatttttactgaaggaagaactaaagaagcagcagaaatacttttggatgcaaagtgtcttgattgctcttatttacaatctgtctgtaatttgaatgtaaaattatgttctgatttctcaatcaggttcccttctttggtcccctttttgatggtgctattgtgaatggaaaggttctacccattatggttagagcaacagctataaatgcaagccgtgctctgaaatctctgattccattgtatcaaaacttctatgaggagagagcacgatacctgcaaacaattgtccagcaccacttagaaccaacaacatttgaagattttgcagcacaggttttttctccagctccctaccaccatttaccatctgatgccgatcattaaatatcagttctgtttatctgaagggctcctacccagagattctacccagtgaaactcccacagcaacgcaggtagatggggctgacctggcctctccaatgtctcctcgaactagcaaaagccgcatgtccatgaagctgcgtcgttcctctggctcagccaataaatcctaaggagacaagcagcccagcagtgatcagcagtagccaccttagcacgaacatagggttaaccctttcaggccttcatgtctgccataacatgcatgtttcttcctgtacatttatttgagaaaacactggatttaaataattttaaataatttgtagcttaatattaaagatttaagttatttattgtttcattttttttcccacaatccaagctgccatattttgagggcagggggagttttattctacaccctttaccttcctagataattatgtctaagtagttttatctttaatttcatggttaactgtgagccaaaatacaattggacaattagtctcattatttattgtgccccattgcaactttatggttcaataaatatataattttttacaaatgtaaaattttacatttaagcatttgtaaagttacagcaaaagatgtacctgttaatacacagaatgtgtacagattatttgttatgacaataaaacactcaaaataaatggtctttagcatctcaaattccaactgaaatcattttagtattaactcttcttcccaaagcaatgtctcatttcttggctgtgcaggtgatgccatgttatatccaataactagaaaaatcactgtgctgaacttttatgtttagcttccaagtatttttctaatgttttgcatttcaagtggtatcactgttaaatgccatttgttttcagattgtggccttttattattggctgctagatcctggtgtttctatgttcttttttaagcaccaaaaagaagatggggaagaaaagaaggaaaattttctgatataaatatgttgttcaaattatgagtattatttaaaaaagaaaaaggaacataacccaggagtctaagttaaatctaatattgttaatactgaacttgcaggtccaggttggtatacattccaccctctagaagtattttcttacagtagataagctgctcacattttgttttgaatgggcatctcctgaggaaatgtagcatgacattggtactaactgcatgtgtaaatacatcatactggcaaaccgtaaaatataaattatgtatcatcattcatgtagtatctataatttgtaacagtgggggggaaagatgacatggtatttaataatacaataaaaatattcttatcacttcctaaaaaagcacagacacacaaaaaaacgacca

SEQ ID NO: 737006 - DNA, 1510 bp, Homo sapiens
gtgtttttcaaagtactgagaggttgatgggactgttcgattagctcctctgagaagaagagaaaaggttcttggacctctccctgtttcttccttagaataatttggatgggatttgtgatgcaggaaagcctaagggaaaaagaatattcattctgtgtggtgaaaattttttgaaaaaaaaattgccttcttcaaacaagggtgtcattctgatatttatgaggactgttgttctcactatgaaggcatctgttattgaaatgttccttgttttgctggtgactggagtacattcaaacaaagaaacggcaaagaagattaaaaggcccaagttcactgtgcctcagatcaactgcgatgtcaaagccggaaagatcatcgatcctgagttcattgtgaaatgtccagcaggatgccaagaccccaaataccatgtttatggcactgacgtgtatgcatcctactccagtgtgtgtggcgctgccgtacacagtggtgtgcttgataattcaggagggaaaatacttgttcggaaggttgctggacagtctggttacaaagggagttattccaacggtgtccaatcgttatccctaccacgatggagagaatcctttatcgtcttagaaagtaaacccaaaaagggtgtaacctacccatcagctcttacatactcatcatcgaaaagtccagctgcccaagcaggtgagaccacaaaagcctatcagaggccacctattccagggacaactgcacagccggtcactctgatgcagcttctggctgtcactgtagctgtggccacccccaccaccttgccaaggccatccccttctgctgcttctaccaccagcatccccagaccacaatcagtgggccacaggagccaggagatggatctctggtccactgccacctacacaagcagccaaaacaggcccagagctgatccaggtatccaaaggcaagatccttcaggagctgccttccagaaacctgttggagcggatgtcagcctgggacttgttccaaaagaagaattgagcacacagtctttggagccagtatccctgggagatccaaactgcaaaattgacttgtcgtttttaattgatgggagcaccagcattggcaaacggcgattccgaatccagaagcagctcctggctgatgttgcccaagctcttgacattggccctgccggtccactgatgggtgttgtccagtatgggcccctgcactggtactggaaaaactcaccaggcaatggagaagaatgggtgggaagagagacggcccccatcagtcagctgagcacctagatgactttcgccaacctgctctattattatacttaggatagaaatggagggctcgtgttgacatccagtctcaatctttcatttggcggtaataaatcactcttatttcagatatgaataggtttctcactgaaacagatacatagatattgataataaacaatcaaaagaacaagcgtgcataa

SEQ ID NO: 737007 - DNA, 2700 bp, Homo sapiens
gtgtttttcaaagtactgagaggttgatgggactgttcgattagctcctctgagaagaagagaaaaggttcttggacctctccctgtttcttccttagaataatttggatgggatttgtgatgcaggaaagcctaagggaaaaagaatattcattctgtgtggtgaaaattttttgaaaaaaaaattgccttcttcaaacaagggtgtcattctgatatttatgaggactgttgttctcactatgaaggcatctgttattgaaatgttccttgttttgctggtgactggagtacattcaaacaaagaaacggcaaagaagattaaaaggcccaagttcactgtgcctcagatcaactgcgatgtcaaagccggaaagatcatcgatcctgagttcattgtgaaatgtccagcaggatgccaagaccccaaataccatgtttatggcactgacgtgtatgcatcctactccagtgtgtgtggcgctgccgtacacagtggtgtgcttgataattcaggagggaaaatacttgttcggaaggttgctggacagtctggttacaaagggagttattccaacggtgtccaatcgttatccctaccacgatggagagaatcctttatcgtcttagaaagtaaacccaaaaagggtgtaacctacccatcagctcttacatactcatcatcgaaaagtccagctgcccaagcaggtgagaccacaaaagcctatcagaggccacctattccagggacaactgcacagccggtcactctgatgcagcttctggctgtcactgtagctgtggccacccccaccaccttgccaaggccatccccttctgctgcttctaccaccagcatccccagaccacaatcagtgggccacaggagccaggagatggatctctggtccactgccacctacacaagcagccaaaacaggcccagagctgatccaggtatccaaaggcaagatccttcaggagctgccttccagaaacctgttggagcggatgtcagcctgggacttgttccaaaagaagaattgagcacacagtctttggagccagtatccctgggagatccaaactgcaaaattgacttgtcgtttttaattgatgggagcaccagcattggcaaacggcgattccgaatccagaagcagctcctggctgatgttgcccaagctcttgacattggccctgccggtccactgatgggtgttgtccagtatggagacaaccctgctactcactttaacctcaagacacacacgaattctcgagatctgaagacagccatagagaaaattactcagagaggaggactttctaatgtaggtcgggccatctcctttgtgaccaagaacttcttttccaaagccaatggaaacagaagcggggctcccaatgtggtggtggtgatggtggatggctggcccacggacaaagtggaggaggcttcaagacttgcgagagagtcaggaatcaacattttcttcatcaccattgaaggtgctgctgaaaatgagaagcagtatgtggtggagcccaactttgcaaacaaggccgtgtgcagaacaaacggcttctactcgctccacgtgcagagctggtttggcctccacaagaccctgcagcctctggtgaagcgggtctgcgacactgaccgcctggcctgcagcaagacctgcttgaactcggctgacattggcttcgtcatcgacggctccagcagtgtggggacgggcaacttccgcaccgtcctccagtttgtgaccaacctcaccaaagagtttgagatttccgacacggacacgcgcatcggggccgtgcagtacacctacgaacagcggctggagtttgggttcgacaagtacagcagcaagcctgacatcctcaacgccatcaagagggtgggctactggagtggtggcaccagcacgggggctgccatcaacttcgccctggagcagctcttcaagaagtccaagcccaacaagaggaagttaatgatcctcatcaccgacgggaggtcctacgacgacgtccggatcccagccatggctgcccatctgaagggagtgatcacctatgcgataggcgttgcctgggctgcccaagaggagctagaagtcattgccactcaccccgccagagaccactccttctttgtggacgagtttgacaacctccatcagtatgtccccaggatcatccagaacatttgtacagagttcaactcacagcctcggaactgaattcagagcaggcagagcaccagcaagtgctgctttactaactgacgtgttggaccaccccaccgcttaatggggcacgcacggtgcatcaagtcttgggcagggcatggagaaacaaatgtcttgttattattctttgccatcatgctttttcatattccaaaacttggagttacaaagatgatcacaaacgtatagaatgagccaaaaggctacatcatgttgagggtgctggagattttacattttgacaattgttttcaaaataaatgttcggaatacagtgcagcccttacgacaggcttacgtagagcttttgtgagatttttaagttgttatttctgattagaactctgtaaccctcagcaagtttcatttttgtcatgacaatgtaggaattgctgaattaaatgtttagaaggatgacaaaaaaaatttctga

SEQ ID NO: 737008 - DNA, 1279 bp, Homo sapiens
gtgtttttcaaagtactgagaggttgatgggactgttcgattagctcctctgagaagaagagaaaaggttcttggacctctccctgtttcttccttagaataatttggatgggatttgtgatgcaggaaagcctaagggaaaaagaatattcattctgtgtggtgaaaattttttgaaaaaaaaattgccttcttcaaacaagggtgtcattctgatatttatgaggactgttgttctcactatgaaggcatctgttattgaaatgttccttgttttgctggtgactggagtacattcaaacaaagaaacggcaaagaagattaaaaggcccaagttcactgtgcctcagatcaactgcgatgtcaaagccggaaagatcatcgatcctgagttcattgtgaaatgtccagcaggatgccaagaccccaaataccatgtttatggcactgacgtgtatgcatcctactccagtgtgtgtggcgctgccgtacacagtggtgtgcttgataattcaggagggaaaatacttgttcggaaggttgctggacagtctggttacaaagggagttattccaacggtgtccaatcgttatccctaccacgatggagagaatcctttatcgtcttagaaagtaaacccaaaaagggtgtaacctacccatcagctcttacatactcatcatcgaaaagtccagctgcccaagcaggcaagtgctcacgtgtgattgaatctaaaccttctgagtccatgaacacgcgacgtgttttgggagatagcggagaaattaacatcttaaccggtcaagctccactggctctggcaatattttaacagatgccaggaacatgggcacagaaatcaatgagatcagatggctggggctgaagaatgaaagctttattttttgtttttgcaattccgagattgtgtctctatatttgtgtcattttcattcagattgactgttgccttgagttttaatgtattgttgctttagaaaatgacatgacattctgtccggaaatgtttcctggcagctaaaaggaaaaagctgtatctacttaggtatgaaatgaagagaagcaaagagaacgaggtggtttatgtgataacagcaagctgctcatccaaataacccaggccaaaaatacactgtctacaaggttgtgccaactcagctttcatgtgaaccacaaaagggagtatcggtagacctcaggccaagaaaatacctttttccaggtttctgtgttaaatcaagaactgtactatgcatt

SEQ ID NO: 737009 - DNA, 2634 bp, Homo sapiens
gtgtttttcaaagtactgagaggttgatgggactgttcgattagctcctctgagaagaagagaaaaggttcttggacctctccctgtttcttccttagaataatttggatgggatttgtgatgcaggaaagcctaagggaaaaagaatattcattctgtgtggtgaaaattttttgaaaaaaaaattgccttcttcaaacaagggtgtcattctgatatttatgaggactgttgttctcactatgaaggcatctgttattgaaatgttccttgttttgctggtgactggagtacattcaaacaaagaaacggcaaagaagattaaaaggcccaagttcactgtgcctcagatcaactgcgatgtcaaagccggaaagatcatcgatcctgagttcattgtgaaatgtccagcaggatgccaagaccccaaataccatgtttatggcactgacgtgtatgcatcctactccagtgtgtgtggcgctgccgtacacagtggtgtgcttgataattcaggagggaaaatacttgttcggaaggttgctggacagtctggttacaaagggagttattccaacggtgtccaatcgttatccctaccacgatggagagaatcctttatcgtcttagaaagtaaacccaaaaagggtgtaacctacccatcagctcttacatactcatcatcgaaaagtccagctgcccaagcaggtgagaccacaaaagcctatcagaggccacctattccagggacaactgcacagccggtcactctgatgcagcttctggctgtcactgtagctgtggccacccccaccaccttgccaaggccatccccttctgctgcttctaccaccagcatccccagaccacaatcagtgggccacaggagccaggagatggatctctggtccactgccacctacacaagcagccaaaacaggcccagagctgatccaggacttgttccaaaagaagaattgagcacacagtctttggagccagtatccctgggagatccaaactgcaaaattgacttgtcgtttttaattgatgggagcaccagcattggcaaacggcgattccgaatccagaagcagctcctggctgatgttgcccaagctcttgacattggccctgccggtccactgatgggtgttgtccagtatggagacaaccctgctactcactttaacctcaagacacacacgaattctcgagatctgaagacagccatagagaaaattactcagagaggaggactttctaatgtaggtcgggccatctcctttgtgaccaagaacttcttttccaaagccaatggaaacagaagcggggctcccaatgtggtggtggtgatggtggatggctggcccacggacaaagtggaggaggcttcaagacttgcgagagagtcaggaatcaacattttcttcatcaccattgaaggtgctgctgaaaatgagaagcagtatgtggtggagcccaactttgcaaacaaggccgtgtgcagaacaaacggcttctactcgctccacgtgcagagctggtttggcctccacaagaccctgcagcctctggtgaagcgggtctgcgacactgaccgcctggcctgcagcaagacctgcttgaactcggctgacattggcttcgtcatcgacggctccagcagtgtggggacgggcaacttccgcaccgtcctccagtttgtgaccaacctcaccaaagagtttgagatttccgacacggacacgcgcatcggggccgtgcagtacacctacgaacagcggctggagtttgggttcgacaagtacagcagcaagcctgacatcctcaacgccatcaagagggtgggctactggagtggtggcaccagcacgggggctgccatcaacttcgccctggagcagctcttcaagaagtccaagcccaacaagaggaagttaatgatcctcatcaccgacgggaggtcctacgacgacgtccggatcccagccatggctgcccatctgaagggagtgatcacctatgcgataggcgttgcctgggctgcccaagaggagctagaagtcattgccactcaccccgccagagaccactccttctttgtggacgagtttgacaacctccatcagtatgtccccaggatcatccagaacatttgtacagagttcaactcacagcctcggaactgaattcagagcaggcagagcaccagcaagtgctgctttactaactgacgtgttggaccaccccaccgcttaatggggcacgcacggtgcatcaagtcttgggcagggcatggagaaacaaatgtcttgttattattctttgccatcatgctttttcatattccaaaacttggagttacaaagatgatcacaaacgtatagaatgagccaaaaggctacatcatgttgagggtgctggagattttacattttgacaattgttttcaaaataaatgttcggaatacagtgcagcccttacgacaggcttacgtagagcttttgtgagatttttaagttgttatttctgattagaactctgtaaccctcagcaagtttcatttttgtcatgacaatgtaggaattgctgaattaaatgtttagaaggatgacaaaaaaaatttctga

SEQ ID NO: 737010 - DNA, 2745 bp, Homo sapiens
gtgtttttcaaagtactgagaggttgatgggactgttcgattagctcctctgagaagaagagaaaaggttcttggacctctccctgtttcttccttagaataatttggatgggatttgtgatgcaggaaagcctaagggaaaaagaatattcattctgtgtggtgaaaattttttgaaaaaaaaattgccttcttcaaacaagggtgtcattctgatatttatgaggactgttgttctcactatgaaggcatctgttattgaaatgttccttgttttgctggtgactggagtacattcaaacaaagaaacggcaaagaagattaaaaggcccaagttcactgtgcctcagatcaactgcgatgtcaaagccggaaagatcatcgatcctgagttcattgtgaaatgtccagcaggatgccaagaccccaaataccatgtttatggcactgacgtgtatgcatcctactccagtgtgtgtggcgctgccgtacacagtggtgtgcttgataattcaggagggaaaatacttgttcggaaggttgctggacagtctggttacaaagggagttattccaacggtgtccaatcgttatccctaccacgatggagagaatcctttatcgtcttagaaagtaaacccaaaaagggtgtaacctacccatcagctcttacatactcatcatcgaaaagtccagctgcccaagcaggtgagaccacaaaagcctatcagaggccacctattccagggacaactgcacagccggtcactctgatgcagcttctggctgtcactgtagctgtggccacccccaccaccttgccaaggccatccccttctgctgcttctaccaccagcatccccagaccacaatcagtgggccacaggagccaggagatggatctctggtccactgccacctacacaagcagccaaaacaggcccagagctgatccaggtatccaaaggcaagatccttcaggagctgccttccagaaacctgttggagcggatgtcagcctgggagagatggactcatggaaacctggatcggtccttttagatgaaggacttgttccaaaagaagaattgagcacacagtctttggagccagtatccctgggagatccaaactgcaaaattgacttgtcgtttttaattgatgggagcaccagcattggcaaacggcgattccgaatccagaagcagctcctggctgatgttgcccaagctcttgacattggccctgccggtccactgatgggtgttgtccagtatggagacaaccctgctactcactttaacctcaagacacacacgaattctcgagatctgaagacagccatagagaaaattactcagagaggaggactttctaatgtaggtcgggccatctcctttgtgaccaagaacttcttttccaaagccaatggaaacagaagcggggctcccaatgtggtggtggtgatggtggatggctggcccacggacaaagtggaggaggcttcaagacttgcgagagagtcaggaatcaacattttcttcatcaccattgaaggtgctgctgaaaatgagaagcagtatgtggtggagcccaactttgcaaacaaggccgtgtgcagaacaaacggcttctactcgctccacgtgcagagctggtttggcctccacaagaccctgcagcctctggtgaagcgggtctgcgacactgaccgcctggcctgcagcaagacctgcttgaactcggctgacattggcttcgtcatcgacggctccagcagtgtggggacgggcaacttccgcaccgtcctccagtttgtgaccaacctcaccaaagagtttgagatttccgacacggacacgcgcatcggggccgtgcagtacacctacgaacagcggctggagtttgggttcgacaagtacagcagcaagcctgacatcctcaacgccatcaagagggtgggctactggagtggtggcaccagcacgggggctgccatcaacttcgccctggagcagctcttcaagaagtccaagcccaacaagaggaagttaatgatcctcatcaccgacgggaggtcctacgacgacgtccggatcccagccatggctgcccatctgaagggagtgatcacctatgcgataggcgttgcctgggctgcccaagaggagctagaagtcattgccactcaccccgccagagaccactccttctttgtggacgagtttgacaacctccatcagtatgtccccaggatcatccagaacatttgtacagagttcaactcacagcctcggaactgaattcagagcaggcagagcaccagcaagtgctgctttactaactgacgtgttggaccaccccaccgcttaatggggcacgcacggtgcatcaagtcttgggcagggcatggagaaacaaatgtcttgttattattctttgccatcatgctttttcatattccaaaacttggagttacaaagatgatcacaaacgtatagaatgagccaaaaggctacatcatgttgagggtgctggagattttacattttgacaattgttttcaaaataaatgttcggaatacagtgcagcccttacgacaggcttacgtagagcttttgtgagatttttaagttgttatttctgattagaactctgtaaccctcagcaagtttcatttttgtcatgacaatgtaggaattgctgaattaaatgtttagaaggatgacaaaaaaaatttctga

SEQ ID NO: 737011 - DNA, 463 bp, Homo sapiens
  misc_feature (12)..(12): n is a, c, g, or t
  misc_feature (28)..(28): n is a, c, g, or t
  misc_feature (32)..(33): n is a, c, g, or t
  misc_feature (35)..(35): n is a, c, g, or t
  misc_feature (461)..(461): n is a, c, g, or t
tttttttttttntttttttttttttttntttnntntttttttttcttccttaaatacatgtttattttacttcaatatcgctcagggttgtatgtatttgaatacttcagtactattttgaacattctaaatatgaaataccataaagcgttcaaatttatcaaacagtggtacaatatggttactaaacttgcaacttaatttacaatgacgttcaatttttcctcttcaaataaaatcactgactttggtccatttgatgagaaactaggacatatgccatgacagcatacttctagcactctatgtaataagcaaaagataatttagctaatatagacaggttacctgactgaaattctactttctgcttaattgatcacgatcaagaaaactacaaaaaaaaaacaaaaaacaaaacaaaacaactaccacagacctcgtgccgaattcctgcagcncg

SEQ ID NO: 737012 - DNA, 1529 bp, Homo sapiens
  misc_feature (12)..(12): n is a, c, g, or t
  misc_feature (28)..(28): n is a, c, g, or t
  misc_feature (32)..(33): n is a, c, g, or t
  misc_feature (35)..(35): n is a, c, g, or t
tttttttttttntttttttttttttttntttnntntttttttttcttccttaaatacatgtttattttacttcaatatcgctcagggttgtatgtatttgaatacttcagtactattttgaacattctaaatatgaaataccataaagcgttcaaatttatcaaacagtggtacaatatggttactaaacttgcaacttaatttacaatgacgttcaatttttcctcttcaaataaaatcactgactttggtccatttgatgagaaactaggacatatgccatgacagcatacttctagcactctatgtaataagcaaaagataatttagctaatatagacaggttacctgactgaaattctactttctgcttaattgatcacgatcaagaaaactacaaaaaaaaaacaaaaaacaaaacaaaacaactaccacagactacagctctcagccaagaaagtaatgatatataagccgggcgcggtgtctcatgcctgtaagcctagcactttgggaggctgaggtgggtggatcgcctgaggtcaggagttcaagaccaggttggccaacatggtgaaaccccatctctactaaaaatacaaaaattagccaggcatggtggcaggcgcctgtaattccagttactagggaggctgagacaggagaatcacttgaatccgggaggcaaaggttgcagtgtgtcaagatcacaccactgcactccagcctgggcaacagagtgagacttcatctcaaaaaagaaaaacaaagaaatatgtggtacagatattgctcttcttcaggtaacatacataaaatccaatgttatatactaaaataataatccacaaatccaaacattgttataattatacaacaggtgactgatagtagataactaggaacagactgcatttgacaagattttctttaataacatcataaacatccctaatatgatgaaagaccaagagctataatcaagatgaatatgccaaaacagccaaggagctagtagctagtcttcagacaggctacgagtttgttttataggaccactccgcccttgggtctggtgacactttaagttttctaggcaggagtgaaaaggagttaataatgccaattccaggtataaatacaaatgagaggcacatagtagtaggcataaccaaaatccaggccaaatttttggctcaaaggtgatctgcaatagttccatgatcagttatttataatttcagcttactataaagttgacttccaggtcaaaggcaaattttcctttcacattacctcataaaagccatttaagggctgggtgcctgcgtcacgcctgtaatcctaccactttgggaggccaaggcaggcggatcacctgaggtcgtgagtttgaaaccagcctgaccaatatggtgaaaccctgtctctactaaaaatacaaaaattgccgggcacggtggctcacacctgtaatcccagcactttgggagaccaaggtgggtggatcacgagatcaggagctcgag

SEQ ID NO: 737013 - DNA, 1446 bp, Homo sapiens; identical to SEQ ID NO: 7609

SEQ ID NO: 737014 - DNA, 833 bp, Homo sapiens
tggatttctggtgttggcaaggaaacgctttccaattccgtgattttacaagccagactaatttctttcaatttatcattttcactttttggagacaaaagagtcagatctaccttcttattcaaactatctgaacctttggaatttctatcttgagcattttggtcctcacaaaaactgagcttttgtgctttgtcttccagtaagtcaggaatctgaactgcaacagacccttctttagtctctttctcttcattcactggatgtgctgggaaattacctctatctgcatatccttctagggctctggcctctcctggtaggctctggtcttctactggcactccaggaaggaggtgaccttttgctagctctgtgactttctctactgaatgcttagacgcaccactgtgcactgactcagattctcctatcacatgcccttcatcgatccctgcttcatttttcatggaatcagcaagctcagctttattcttaagagagtgatctccatgaatgttaactgtttctatggctgttgtaataggtagagcaactcctcctgtgcttgtagagggcacaacagcagagggacccttgggtctttcttgacctgggactccatctttggtgtagttatctaccattaatgatttggaaatctgggctggggctatctcttgcccattttttgccaaggtatctggaaaggaatcaccttcctttactacttgaggagtaggagtgggcagtttttcacaggctgctgattccagaacctctagagagactcggtaccggcatcgaaattacaccgcggacgcctctatctc

SEQ ID NO: 737015 - DNA, 835 bp, Homo sapiens
tggatttctggtgttggcaaggaaacgctttccaattccgtgattttacaagccagactaatttctttcaatttatcattttcactttttggagacaaaagagtcagatctaccttcttattcaaactatctgaacctttggaatttctatcttgagcattttggtcctcacaaaaactgagcttttgtgctttgtcttccagtaagtcaggaatctgaactgcaacagacccttctttagtctctttctcttcattcactggatgtgctgggaaattacctctatctgcatatccttctagggctctggcctctcctggtaggctctggtcttctactggcactccaggaaggaggtgaccttttgctagctctgtgactttctctactgaatgcttagacgcaccactgtgcactgactcagattctcctatcacatgcccttcatcgatccctgcttcatttttcatggaatcagcaagctcagctttattcttaagagagtgatctccatgaatgttaactgtttctatggctgttgtaataggtagagcaactcctcctgtgcttgtagagggcacaacagcagagggacccttgggtctttcttgacctgggactccatctttggtgtagttatctaccattaatgatttggaaatctgggctggggctatctcttgcccattttttgccaaggtatctggaaaggaatcaccttcctttactacttgaggagtaggagtgggcagtttttcacaggctgctgattccagaacctctagaggagatgatttatttatcagctcttccccaccggcctgctacctgaccc

SEQ ID NO: 737016 - DNA, 1010 bp, Homo sapiens
tggatttctggtgttggcaaggaaacgctttccaattccgtgattttacaagccagactaatttctttcaatttatcattttcactttttggagacaaaagagtcagatctaccttcttattcaaactatctgaacctttggaatttctatcttgagcattttggtcctcacaaaaactgagcttttgtgctttgtcttccagtaagtcaggaatctgaactgcaacagacccttctttagtctctttctcttcattcactggatgtgctgggaaattacctctatctgcatatccttctagggctctggcctctcctggtaggctctggtcttctactggcactccaggaaggaggtgaccttttgctagctctgtgactttctctactgaatgcttagacgcaccactgtgcactgactcagattctcctatcacatgcccttcatcgatccctgcttcatttttcatggaatcagcaagctcagctttattcttaagagagtgatctccatgaatgttaactgtttctatggctgttgtaataggtagagcaactcctcctgtgcttgtagagggcacaacagcagagggacccttgggtctttcttgacctgggactccatctttggtgtagttatctaccattaatgatttggaaatctgggctggggctatctcttgcccattttttgccaaggtatctggaaaggaatcaccttcctttactacttgaggagtaggagtgggcagtttttcacaggctgctgattccagaacctctagaggagatgatttatttatcagctctgatggtgttctgggacaggtaaatgtaatatttctattttcgtccatataggccattccttcaattccctggtcccctgtggtttccatgggaacatgtatttttgttgcatctatcttattctccagaatgtgcttctcaggagaactatttttaacctttttactttttccatcattactccttttacttggtttgtc

SEQ ID NO: 737017 - DNA, 1357 bp, Homo sapiens
  misc_feature (719)..(719): n is a, c, g, or t
  misc_feature (767)..(767): n is a, c, g, or t
  misc_feature (917)..(917): n is a, c, g, or t
  misc_feature (927)..(927): n is a, c, g, or t
  misc_feature (929)..(929): n is a, c, g, or t
  misc_feature (942)..(942): n is a, c, g, or t
gttctaatttaaaattttgcaattctgattttaatctcatatattaaagtacacttctaagcatttatttggatagttatccacactctgtgcattagaaataacccagaagcatattaaaaatacacacgttgaaggcccacgtccataaattctgggcccaggcgtctgttctgttagcatatgtgatgttggaaaactactagtccagtgtctctcagacttcaaaatgcctaggaatcacctggggatcttgcctaaaaatccagattctaagtcagtcagtctgaggtgagtgcctgagattcggcgatcccgatcctaatgagctcccaagacgaggtagctgctgctggtgcatacatcacaccaatagcaaggcctgggcaccacacccagatgcagacgctcaccagctggcagctgggtccacactggagggcagggaaaataatcagactctttaggactgggcttccaacactaaaacatgaaatgattaacaacggactttacatacataatctcagttcatccacacatatacacactccataagatcattaccattttttatggttgaggaagccaagactcagaaagtcatacagctagaaagtatattggttgtctattgtggctttaacaaaggaccacaaacttagtggcttaaaatgagacaactttatgaccttatggttttgcagacaagaggttcnaaaatcaaggcattggcaaggctgtgtcccttttgggagctctagganagaatctgctttcttacctttccagtgtctagaggctgcctgcatttcttaattcgtggtccctttatccatcttcatgtcagcaacaccacatctctctgacactttttccttcatcacctctctctctaaccacagctgggaaaggtnctctgctttnanggattaagtaatnagactgcgcccacttggataatgcaagatactctcctctcctagagtctgtacctgaatcaaaatctgcaaagtcctttttgcccatgtaaatgaacatattccacagttgaatggggattagggaatacacatctttgggggaacattattctgccttccacagtgggaaaaaaacaggatttagagcctgaaagcaaattcaaatctgtctgattccaaagtccatgctcctagcacacaattcaaaagagtaactaaattgaatgttgttgtagtctggaggccaaatcatgaatggtgttaaagtgtatattctctgtacgcagcctgaatgccactatcattttaaattgaactgaatgatgctgaagtggattttgtttattgcaatgcgttttgcattctccttaggc

SEQ ID NO: 737018 - DNA, 1188 bp, Homo sapiens; identical to SEQ ID NO: 306093

SEQ ID NO: 737019 - DNA, 1156 bp, Homo sapiens; identical to SEQ ID NO: 306094

SEQ ID NO: 737020 - DNA, 521 bp, Homo sapiens
tagaggatcccggtcattgctacaccaatagctagtgattctaatactcagcaaatgcctggttctgaagggtcacggggctgtcaacaggtgttccttactcataattgattattcaaacctttaagttagctttccataattcactgcacttaaataagtttaaatcaaatacagttattttagttacaggttaggaagatggtctttaaataaccaaaaatatgtttattttttattatagtgtagacatacccttcatctattatatcataatacatgttacattggactgaattagattttcccatttctaatagttggcaccattataagctataaggttcagaatcagaattttagtaacaactcaagagaaagttgttgaatataatccttagtgaaaacagtgtcctctaaccaatgcctatacaactaaatttatgctgggtttttggttttgtttttttaaaaatatttttatgtgttcaaactattttggtaaatttttagcaaaaaaa

SEQ ID NO: 737021 - DNA, 438 bp, Homo sapiens; identical to SEQ ID NO: 306095

SEQ ID NO: 737022 - DNA, 2536 bp, Homo sapiens; identical to SEQ ID NO: 306096

SEQ ID NO: 737023 - DNA, 1569 bp, Homo sapiens; identical to SEQ ID NO: 306100

SEQ ID NO: 737024 - DNA, 1836 bp, Homo sapiens; identical to SEQ ID NO: 306098

SEQ ID NO: 737025 - DNA, 956 bp, Homo sapiens
agatcttaacggctaggtagcgaggcctgggtgttgtgagttatttctgttggccgcattaggaacctgacatttgattcattcagtgggtcctgcctaggtcctttaaaacagaatggactgttagggaaaggctgccctgggccatgcaggccgaggagaccaaggggattggaataaccagtatggcaaaatgcttggtcaagatccagactcgacgaagcctccaattgcacatggtgaaccactgcaacagtaatgtgtttgttcgtctgctgagactcggctccaaggtcacagctcgtaacactggtgttccattgcctaaagaggagaacatttctgctcccttgatctccagctccccagtgaaggcagcccgggagtatgaagatccccctagtgaagaggaagataaaataaaagaagaacctttaaccatctctgaactagtgtacaacccaagtgccagcctgctccccacccctgtggatgacgatgagattgacatgctctttgactgtccttctaggcttgagttggaaagagaagacacagattcatttgaggatctggaagcagatgaaaacgcctttttgattgctgaagaagaggagctgaaggaggctcgccgtgctttgtcgtggagctatgacattctgactggccatattcgggtgaacccactggtcaagagtttttccaggctccatgttccagcctccgtctgtgactgggtgggtaagttcggtgggccccacccagtgggctcggcagccgtcacttcacagaagaagaaaggaaccttgcttaggcctcagatcccagctgtgctctccaatccattaataaagctgcttttaaccctctcctggccattgtatctattatctactgggaactggggtggcggcagggatggtggtgaatattttggatctcggcaacctccaatg

SEQ ID NO: 737026 - DNA, 1499 bp, Homo sapiens
cacatgtgtgtccagctgggtgtgcacacatgagttaatcaggagatgtcaggggaggaaaaaggctgtggaaatgtcctagattaaagaggacaggacccccaagatgcaggaaggactctggactggaccctgttccgtaaatcatcataagttatttccttgtccttaggaaataactcaggacaaagggccaagatgaatgcaacctattcttaaatgattcagagaaaatactatgttattatatattatacatacagcatacatatagagtgagagagctgtgtacagacacacagctgctaaacacttgtatgggtgtctttgtacttattctagtaactttaagcttaaaattctttacaaataaaatgttaaaaaaaatgagaaggctaataagcacatgagaagcttaacgtcatgattcattaggggaatgcaaggcaaaaccatgatgagatgcccctagacacctcttagaagagctgctaagaaggcagacagcaccaagcgctaaatgagatggggcacctggtgctcttctgtgctactggtaggggtgcagcagagtggtcagtctggacagtagctgacatcacgtgacccaacacacgcattcctggctacttaccaaggagaatagaaagcaggcagatctctacagcagctctctacctgattgcaaaacaatggaaatgcccacatgtccacaaacaagtgtgtggtctgcctgtgccatgaagcacagtgtggctgagcgtcaagagtccccacactcaaaggaggcagcagatacagggctgcacactgtgtgattccacacatgtgacattctggacacggacatgctggatggcaaaacgagcatcgggctgagaggactgctgagaaggggaacggggctgctgggatgtgggttgattgtagcagtagctcatggagatgtgacctcaaaagagtgatttttactatgtgcatactatacctccacaaacttgactttaaaaaaataaaatattcacagaaaaaaacaaaaacaaatgtaaaaccatcagactactttatcagaggtgttatttttagatagaggtctttgaactccatcctaggaacattgtacccatgtcctcccagaactgcatcttgcactgggtgtcggaagacagccctgcaagacctgtatgctctgtaccattcagtggtttttaaggttaactaccagaagtcatatctgaggcctcccagaagcattactctaaggaaagtagttaaatgtggacagtgacagcagaaacatttacacattaaaccagtttatagaacatgagaatgttcagagcataaagaagcttgtcagctcaatgacttacgaggcgtgggccattaaaaaaaaaggtctggagtttgggaaggagaaaggaatggggatctgcagctcagagtgagagatggaattctgtaaaggaacagtgtggagagggactccaggcaagtca

SEQ ID NO: 737027 - DNA, 1517 bp, Homo sapiens
cacatgtgtgtccagctgggtgtgcacacatgagttaatcaggagatgtcaggggaggaaaaaggctgtggaaatgtcctagattaaagaggacaggacccccaagatgcaggaaggactctggactggaccctgttccgtaaatcatcataagttatttccttgtccttaggaaataactcaggacaaagggccaagatgaatgcaacctattcttaaatgattcagagaaaatactatgttattatatattatacatacagcatacatatagagtgagagagctgtgtacagacacacagctgctaaacacttgtatgggtgtctttgtacttattctagtaactttaagcttaaaattctttacaaataaaatgttaaaaaaaatgagaaggctaataagcacatgagaagcttaacgtcatgattcattaggggaatgcaaggcaaaaccatgatgagatgcccctagacacctcttagaagagctgctaagaaggcagacagcaccaagcgctaaatgagatggggcacctggtgctcttctgtgctactggtaggggtgcagcagagtggtcagtctggacagtagctgacatcacgtgacccaacacacgcattcctggctacttaccaaggagaatagaaagcaggcagatctctacagcagctctctacctgattgcaaaacaatggaaatgcccacatgtccacaaacaagtgtgtggtctgcctgtgccatgaagcacagtgtggctgagcgtcaagagtccccacactcaaaggaggcagcagatacagggctgcacactgtgtgattccacacatgtgacattctggacacggacatgctggatggcaaaacgagcatcgggctgagaggactgctgagaaggggaacggggctgctgggatgtgggttgattgtagcagtagctcatggagatgtgacctcaaaagagtgatttttactatgtgcatactatacctccacaaacttgactttaaaaaaataaaatattcacagaaaaaaacaaaaacaaatgtaaaaccatcagactactttatcagaggtgttatttttagatagaggtctttgaactccatcctaggaacattgtacccatgtcctcccagaactgcatcttgcactgggtgtcggaagacagccctgcaagacctgtatgctctgtaccattcagtggtttttaaggttaactaccagaagtcatatctgaggcctcccagaagcattactctaaggaaagtagttaaatgtggacagtgacagcagaaacatttacacattaaaccagtttatagaacatgagaatgttcagagcataaagaagcttgtcagctcaatgacttacgaggcgtgggccattaaaaaaaaaggtctggagtttgggaaggagaaaggaatggggatgtgacctcaaaagagtgatttttactatgtgcatactatacctccacaaacttgactttaaaaaaataaaatattcacagaaaaa

SEQ ID NO: 737028 - DNA, 738 bp, Homo sapiens
agtacaaagagcaggcataaatgtcacaccccttttgggcggaagtattactaaattaagtgtcagatcatgagctgaagtaagaatactatgtttattctatatgaaggcaataactaatttatgtacaatctctgttttgcagtttcttaaacttaagtgaggaagaattttgacacatttgtggaaagcactcctcccattttccgattaaaaactgattttttttcctagaggaagatatggcaatgcttcccaaacattctgaaaaacatagtcctcaaacatagtttcacaaataatgttttaaaaaggtaccctcaaaaaataaatttttgaaaaaggtatataatattaacttggaaaatactggattgaagaaaatataactagattctctccttcaagatgtcacaggcttttgatattctagggtgcactgtgattttctaagataggaataaaatatacactgcttcccaaatttatttgaccatgaaaccatttttattcttgatttaccttttgaaactacaaggctaattcaggaaacagtgacttctttcatgcacttttctagtgttggtcaagccagtttaccaatattgaatgtttactgcacataagatactctgctctgttataggttcttatttaaaggaaaaacatagtctctttacttaagggaaaaacaaaaaaattgtaattatctaatgagagaaataattgacaaatgat

SEQ ID NO: 737029 - DNA, 139 bp, Homo sapiens
tttcttcgagagcagaccatttctcttcctgagtgtgccacacagatgtttttctttctgggctttgcatccaacaactgtttcatcatggccgctatgtcctacgaccgctacacggccatccacaacccactgcaga

SEQ ID NO: 737030 - DNA, 1006 bp, Homo sapiens
gtaagctggatatttaaagggattgcagtctttgctgatgagactaagcatatgacgacaggaatgagtgtgagagagaacctcaagaaactgaaaggccagactctcagagggtgaatattgaagtcaccaagaattatgacagaagtgtgagtgcctgggtttgaatcctgatactatgtacttaccaggtatatgtccttgggcaagttatataaccttagtttcctcatcagttaaaatgaggataatgatagtatagttctctgaattatcaggagtaaacaatttaatacttatgaaactcttagtatgtggtatatggcaaatgacatataaatgtttataatattatcagaatcataataaccattattatttgtatgatccagtcctgtgtgagtctccgcttttcattcactagaaatttattaagcgactatttcatgccaggcattttgctaggtatcctgttaaaacttctgaattattttatttggctgttttaggcttcaggaatttcaagtggaacagaaataatatactgcagcctcaccaaaataaaagttattcttgaagtctttgccatgagttctccttgctgaattaaaatgctgtttagtaaggatacagacccagggggaaatggagcaaaccaaagcagtgattacttggatctctatactggacaggctcactgtagcaaaagagatgcttagaagcagactcagctgtaggacatgaaagagaatctaaccatatttttgaggcatggtggtgtccaaaatgtatggtgataggagatgggaagcagcgaagataaaaagttatccttgtggtgttccaacttgaaacagtgggttaatgtctggtagtcaggttaaacacagagagctaccattttggaggttggctgtcaagatatagacacttggatgttaggaaataagatagagatccagttactgagtaaaatcacttatatgattatcttctttaaaaaaaa

SEQ ID NO: 737031 - DNA, 1338 bp, Homo sapiens
atatgatactgggcatatggcaatgctcagtgaatattggacagctaatacaatttgcagagtcactgaggaaaagtatagcttcagagagcttctgtgtccagatttcaacgattttctttcatcattatttcgtggggctcccaggaccatatgtggctcacaaaccacaggctaggatgtgtttaacgttaaaagcaagcagtgtgtttctctgaagtgtggctccaccatggtgttcggttacacccagaggaggaggctggtgggcagtcatagaagtgcatcttccagagcaggaagggatcaacagctcttcctgggagacttccattctcctaccccagtttctgaggcacagcatggaatctaggagggagtttctcttcttgctttttcctcctagttttgtttcctctatcccttttccttgctaaagtgtgttggatggtcaggaatgtgggcggagaagagggggagctggagacatctcatcctttcatccagcttgtgtaaaaatgcctcagaactccctcataccacatgcaccataaattataaggtcaagctttgtaagcctgcagccctcttggctttttgcatgttggttagaatgcctaaatagaaagcctctgttaatgttgattgcctcttgtctgttccaggttggcaaggcccccagtggccaaggcatgagcctggatgccctgcaaattgagtacgtgttagggatgggggccattctttatagtttgactctggagagctaggaccacctttcccagcctcaggggtgcacatcctcaggagctgcctacctccagatattgtaagtccatgcagaagaggaagggcccagctggggcacctcttggttgaggaatgagtatgtgacattttcatgtgggcacattttgatactactttaaaaatagaccaagcacagtggctcacacctgtaattcccagcacttcgggacgctgagagaggtggatcacctgaggtcaggagttcgagatcagcctggcccaacatggagaaaccccgcctctactaaaaatacaaaacattagctgggtgtggtggcacacacctgtaattcccagctactcgggaggcagaagcaggagaatcgcttgaatccaggaggcggaggttgcagtaagccgagatcacgccactacactccagcttacactggacatgatgaggaggaggaggatgatcttctgcacggtaggtgatcttctgcacgatgaggtgatcttctgcacgataaggtgatcttctgcacgatgaggtgatcttctgcacgctaaggtgatcttctgcacgat

SEQ ID NO: 737032 - DNA, 1335 bp, Homo sapiens
atatgatactgggcatatggcaatgctcagtgaatattggacagctaatacaatttgcagagtcactgaggaaaagtatagcttcagagagcttctgtgtccagatttcaacgattttctttcatcattatttcgtggggctcccaggaccatatgtggctcacaaaccacaggctaggatgtgtttaacgttaaaagcaagcagtgtgtttctctgaagtgtggctccaccatggtgttcggttacacccagaggaggaggctggtgggcagtcatagaagtgcatcttccagagcaggaagggatcaacagctcttcctgggagacttccattctcctaccccagtttctgaggcacagcatggaatctaggagggagtttctcttcttgctttttcctcctagttttgtttcctctatcccttttccttgctaaagtgtgttggatggtcaggaatgtgggcggagaagagggggagctggagacatctcatcctttcatccagcttgtgtaaaaatgcctcagaactccctcataccacatgcaccataaattataaggtcaagctttgtaagcctgcagccctcttggctttttgcatgttggttagaatgcctaaatagaaagcctctgttaatgttgattgcctcttgtctgttccaggttggcaaggcccccagtggccaaggcatgagcctggatgccctgcaaattgagtacgtgttagggatgggggccattctttatagtttgactctggagagctaggaccacctttcccagcctcaggggtgcacatcctcaggagctgcctacctccagatattgtaagtccatgcagaagaggaagggcccagctggggcacctcttggttgaggaatgagtatgtgacattttcatgtgggcacattttgatactactttaaaaatagaccaagcacagtggctcacacctgtaattcccagcacttcgggacgctgagagaggtggatcacctgaggtcaggagttcgagatcagcctggcccaacatggagaaaccccgcctctactaaaaatacaaaacattagctgggtgtggtggcacacacctgtaattcccagctactcgggaggcagaagcaggagaatcgcttgaatccaggaggcggaggttgcagtaagccgagatcacgccactacactccagcttacactggacatgatgaggaggaggaggatgatggtggtgattatgatagaaatggtgatggtgatgatgacaatggtgatagtagggatggtcttgctctgtcgcaatcaataaatgaatgcataaacacaaaaaaaaaa

SEQ ID NO: 737033 - DNA, 655 bp, Homo sapiens
actcactgttgggttgagaccagttgattctgttcccccaatcccttacccctccccagaagtcccctttcttggtcaggtaccacctcctgctggtggcacagaagaagtggccacaatccgggtgtcgggagttggaaataacatcagctttgaggagaagaaaaaggttctaattcagaggcaggggaacggcacctttgtacagactgacaaacctctctacaccccagggcagcaagtgtatttccgcattgtcaccatggatagcaacttcgttccagtgaatgacaagtactccatggtggaactacaggatccaaatagcaacaggattgcacagtggctggaagtggtacctgagcaaggcattgtagacctgtccttccaactggcaccagaggcaatgctgggcacctacactgtggcagtggctgagggcaagacctttggtactttcagtgtggaggaatatgtgctgccgaagtttaaggtggaagtggtggaacccaaggagttatcaacggtgcaggaatctttcttagtaaaaatttgttgtaggtacacctatggaaagcccatgctaggggcagtgcaggtatctgtgtgtcagaaggcaaatacttactggtatcgagaggtggaacgggaacag

SEQ ID NO: 737034 - DNA, 328 bp, Homo sapiens; identical to SEQ ID NO: 158487

SEQ ID NO: 737035 - DNA, 1972 bp, Homo sapiens
tgttggcccaaaaaaaaaatttattttcctttcaaataaaatgtacaaccaaaatttagggtttggagcagtagggaagacaggagataccagggagcccattttacagtagagatctgcatctgacccctctatcccatacctttgcaaaggaggggaggggtctacaagccagaactttcagaagagaagaaaatacatgctgtgctggtgctgtttctggagcaggtcatcctttaggtatagaacaccacctccacccgatgacatcagaaccactgactggtagagtccttggaaatcatacagtccacccatcccccgccagacacatggacacaccgaggctcagatggggaagggtacataccctagggcacacaccaaatcaaaaaggtgaagtcaggactagaacacctgagcaactttagcaggggactgtggccacaggcctggatgtgcacagtagatcatgaaatacattagtcctatgaatgacccccgtgcagagaaatggctgtggttgtcagggagcagccactgctcaggggctcctgacctcagtgaaaggtgactgtgtaaaggccagaaactggatggtggtcatgaacctcaggacgtttttttttttagcaccaaatggtggagctctctgccagctcagcttcttggggcctctcaggtaaaggtgatgtttgaggaccccacgcccatatgaggggtggagaggagaagccagcagcactggggtgagccttggcctacacccttccttcttacccttcccccatcttcagtaaggccaagagaggatgtggggtggggaaggccagaatggtatcgtgtttcttgtttctgggcagtgggctgcgtcctcccaagcaggactgaagggttcagaatcgcttttcctcaggctgagaggttatgagcagctccttgttcccgaagtcccaccaggccgtcatgtggaacgccatgttggttaagacaacagtgtactccaggatggcaaagatggtgtacactccagcctcacaatacatgttgtgccgaaagtagacagccagcgccgagaagaaggagatgaagttgatgatgaagagccgctgtttccagctgtaggacttgcgatcctcctgacttactgtgtgcttcttggtcaaccgccagagaatgcaggtgaggagcatgtgcccgagggatgaggcaatgaacacaatgaaagcattttcgtggatggtgaagtcctcggaggaggagacataagtgagcactagcaacgcgaggttctccacgacattgaggccgaagttgaggcggcagagcgggcgatagcaggaacacggggaggtgcagctgaggtagtggttccagtaggcgaaggccaccaagaagcgaggcgccgagtgcaggccgatgcagaaacgccacacgtagcgctggggcacctccccgccgatggctgagctcaccgagggcaggtaattgggcaccccacagtcagtggccaccgtgtactcaaagtggaacaccagggaccagatgatgcagaagaagaagccgaacacaggaaaagtgatggcccaccagaccatggctgtgaagcgaagccggaacaaggtcccatcggggtccaaaggctgggaggccgcagagaacatcctgcagggcgtggccccacagtgtgtggccgttgtctccttgaagtggaagagcagggaccagaggatgcagaagaggaaggcgacaagtggacagcagaccgtgaccagggccaccatggtgaagcggagccgtaccagggtcccatcccgatccagtggtagtgggacctggtacatcttgtcagacccacgcggtggtggcgagagtgccggcggaacccgggggcccaggtggcccggggtcgggggctggctctgcgggctggtcagagcgcgaacggcgggttttcgcgattggtaaggcc

SEQ ID NO: 737036 - DNA, 3001 bp, Homo sapiens
  misc_feature (3000)..(3001): n is a, c, g, or t
tgttggcccaaaaaaaaaatttattttcctttcaaataaaatgtacaaccaaaatttagggtttggagcagtagggaagacaggagataccagggagcccattttacagtagagatctgcatctgacccctctatcccatacctttgcaaaggaggggaggggtctacaagccagaactttcagaagagaagaaaatacatgctgtgctggtgctgtttctggagcaggtcatcctttaggtatagaacaccacctccacccgatgacatcagaaccactgactggtagagtccttggaaatcatacagtccacccatcccccgccagacacatggacacaccgaggctcagatggggaagggtacataccctagggcacacaccaaatcaaaaaggtgaagtcaggactagaacacctgagcaactttagcaggggactgtggccacaggcctggatgtgcacagtagatcatgaaatacattagtcctatgaatgacccccgtgcagagaaatggctgtggttgtcagggagcagccactgctcaggggctcctgacctcagtgaaaggtgactgtgtaaaggccagaaactggatggtggtcatgaacctcaggacgtttttttttttagcaccaaatggtggagctctctgccagctcagcttcttggggcctctcaggtaaaggtgatgtttgaggaccccacgcccatatgaggggtggagaggagaagccagcagcactggggtgagccttggcctacacccttccttcttacccttcccccatcttcagtaaggccaagagaggatgtggggtggggaaggccagaatggtatcgtgtttcttgtttctgggcagtgggctgcgtcctcccaagcaggactgaagggttcagaatcgcttttcctcaggctgagaggttatgagcagctccttgttcccgaagtcccaccaggccgtcatgtggaacgccatgttggttaagacaacagtgtactccaggatggcaaagatggtgtacactccagcctcacaatacatgttgtgccgaaagtagacagccagcgccgagaagaaggagatgaagttgatgatgaagagccgctgtttccagctgtaggacttgcgatcctagggaatgggctgtctgatcactctgcagcttgctgggtatgagagcgtgggctcccctctcagccctaactcctaagggctgggccttatctcccttggctcccactagcggtcatggaagggagcacaggcaggggcagcaagaatgacgactatgtgttcacgtccctgcctctgggggagtgatgggccgaggagcagtggtattcctgccgcttccacttcagggggatggagtatgaaagttacatggagtcacccaccaaccccacctccaaatactgtgggggaaaagaaacccatgtacatgggtggggcgctggaattatgacagaccagtcctctgacactgttcctaactcactgccgcctagatgcgactcctcattctatccccatttgcagcctccatctcttctattctccagtctcccacactacccaaacacagtgctatagtcctagattctgaccaaccaccctcagtttgttcccaagccccagccccaaccccagcacccctctgccagggttcccattagaactcagttcccacctcaccattacccgaatcctgaggacagatgtccttgattttcttctgggctgccttggagcccccgctagggatagaccgtacctctcctgacttactgtgtgcttcttggtcaaccgccagagaatgcaggtgaggagcatgtgcccgagggatgaggcaatgaacacaatgaaagcattttcgtggatggctggagggaaagaggattgggagccacattgcagggagtgcccacaccacgaagtaggaaggtccgaatgtggtaggggcaggcccgtcccctcagggaacacttccccactcctccctcatccaggcacccactgaagtcctcggaggaggagacataagtgagcactagcaacgcgaggttctccacgacattgaggccgaagttgaggcggcagagcgggcgatagcaggaacacggggaggtgcagctgaggtagtggttccagtaggcgaaggccaccaagaagcgaggcgccgagtgcaggccgatgcagaaacgccacacgtagcgctggggcacctccccgccgatggctgagctcaccgagggcaggtaattgggcacctagagagttgtgacctgtctgggcatctgcctctgccagccccgcccatgtggagaaccttctctccatctgacaaaatcactcttgcctctgctccagcccctccccttccaagaagtcctccttcagatgtccccatacctctcccaaaagacctctccttccaggtcctaggcccaaagtgctggattctcattccccagctatcctgggatttgtgcagcagcatggtggcaccttctccatctcccccgcagactggaacctgcctgtgtttggtcaatgtgtagatgggttcagatgctctacacccatagctcagagctgtacctccactaagaccctgggtgagttccaaggcctcagattcagtccagaggacagggatgagtcacagaccatctgagcttccttagaacagtgctggattcactgctcagctaagatgttcctcagtctgctcccagcgccactcactcctctaggcaggtgtgccaaggtggtagaatggcacccctgctctgatcatgattaacaaagtgggtgggctgggcacgatggctcacatctgtaatcccagcaagaatatggatttttaaaagtttccaaaactgtggaaatggccagtccattgcccacactttctgtgcacttctgcagacctccaacgagggccagcgcagtgccagagcccagcaacccagcaagggaatgaatttgctcnn

SEQ ID NO: 737037 - DNA, 1210 bp, Homo sapiens
gtcacatgacgactttatcgaccgaccgacgcctgttgcgctgcgcggcgtaatgtactcgatccacgaggtgtgtccgccgtcgctcatcagtttagcgacgtatggtgttggccctcgctttgttgtcacgctggtgggtgtgtgccctcgttttgtgcttcctgtatggtttgttggcctcccctcgctagtggggctggagataccccgcacctttgggtgctccgggggcgaaacccccggctgtgagccgtgcccgctgtgcgtatgcccagcgtatctcggcgtggtaagccagaatggtatcgtgtttcttgtttctgggcagtgggctgcgtcctcccaagcaggactgaagggttcagaatcgcttttcctcaggctgagaggttatgagcagctccttgttcccgaagtcccaccaggccgtcatgtggaacgccatgttggttaagacaacagtgtactccaggatggcaaagatggtgtacactccagcctcacaatacatgttgtgccgaaagtagacagccagcgccgagaagaaggagatgaagttgatgatgaagagccgctgtttccagctgtaggacttgcgatcctcctgacttactgtgtgcttcttggtcaaccgccagagaatgcaggtgaggagcatgtgcccgagggatgaggcaatgaacacaatgaaagcattttcgtggatggtgaagtcctcggaggaggagacataagtgagcactagcaacgcgaggttctccacgacattgaggccgaagttgaggcggcagagcgggcgatagcaggaacacggggaggtgcagctgaggtagtggttccagtaggcgaaggccaccaagaagcgaggcgccgagtgcaggccgatgcagaaacgccacacgtagcgctggggcacctccccgccgatggctgagctcaccgagggcaggtaattgggcacctctcccaaaagacctctccttccaggtcctaggcccaaagtgctggattctcattccccagctatcctgggatttgtgcagcagcatggtggcaccttctccatctcccccgcagactggaacctgcccacgcggtggtggcgagagtgccggcggaacccgggggcccaggtggcccggggtcgggggctggctctgcgggctggtcagagcgcgaacggcgggttttcgcgattggtaaggcc

SEQ ID NO: 737038 - DNA, 274 bp, Homo sapiens
aaaagaaaaaagaaagtgggtgctcctaacctggggtagtctaaggaaatgaccatgttcttgtgcatctccaccatccatcttaatgcctggaactcctattgaagcttcagtccttaaggaaaaaggagaagataatacacagctgcagggactggtgtcttgcttgtttgagaggtgaaaggatgggggatgactgtacaagggtttagatggggacacggaagccaaagatgggagaggctctcttaacatcagccggatccactagagc

SEQ ID NO: 737039 - DNA, 1414 bp, Homo sapiens
attttgttttgtttttgagacagggttttactcctgtcacccaggctggagtataatggtgtgaactcagctcactgaaatgtccacctcccagcctcaagcaattctcctgccttagcctcccaagtagctgggactacaggggcatgccagggcacccagctaatttttttgcattttttgtacagacggggtttcaccatgctgcccaggctggtctcgaactgaactcgagtgatccactggcttcgccctcccgaggtgctgagattacaggtatgagccactgcgcccgtcatctcccttgcatttctatcatcatcttccaactcagggagggctgtgattctattctctctgagtctccccccatgaattatctctgactctgacttacctacccttcccccatccccttgtccctttccctctctctgatcctccacttcctctccactatctaattctaccctaactgccacctcctgacctggccctgacccaggggctggggagctggcactcaccccacagtcagtggccaccgtgtactcaaagtggaacaccagggaccagatgatgcagaagaagaagccgaacacaggaaaagtgatggcccaccagaccatggctgtgaagcgaagccggaacaaggtcccatcggggtccaaaggctgggaggccgcagagaacatcctgcagggcgtggcctaagcagcacgagggatacaacttggggcctggtaggacacctgggtctgggaaagtggggccttttccagagatggctcctcagagtataaggaaaagccagagcagaaagggtagaaaaggcataaggggaaaaggaagacagtgcagaggagaaggatcagagggagatggggcaggagcagcagagacaggcagggtcagagcttaggaatccccctggcacagtgatactctaggtccacctcttgaagagcctacagaagagaggctcccggtggcttggacagggagctctggtggcccacctcactctcacaaccctcatagccactcaggagaagggtcagaggtagaaaggttattattcccatttcacagaaggggagactgaggcccagaactatgccaggatcaacaccaggactaaggcctcttgccacctgacagcttcaggttctaagtcatggcttctttcaggccaactaacaaaggaccgttggctcagaatggccaaagccctcccactgaccctgtctgaccacattcctgttccttacccaagttcaactaggaacagagggagtgccccagagcctatttcaatggggccacaggctgccagccattccacccccaggctctgaatgatccaagcctcaggccagcggtaccctgatcctaaaataccaggtccctgtgg

SEQ ID NO: 737040 - DNA, 309 bp, Homo sapiens; identical to SEQ ID NO: 288156

SEQ ID NO: 737041 - DNA, 337 bp, Homo sapiens; identical to SEQ ID NO: 405551

SEQ ID NO: 737042 - DNA, 1139 bp, Homo sapiens
cgcgcatgcgcctctgtgcgtttgtcccatgctggttccgtgagtctggccttaggtgtctcgtgtctggggttgatccgagctgtcgccgccgccgccgcaatgggcaaaacggccaactctccgggttcgggagcccgacccgacccggtgcggagcttcaatcgctggaagaaaaaacacagccataggcagaacaaaaagaagcagttgaggaagcaactgaagaaacccgaatggcaggtcgagcgcgagagtatcagccgcctcatgcagaactatgaaaagataaatgtaaatgaaatcacaagattttcagattttcccttgtccaaaaaaacattgaaaggtttgcaagaagctcagtaccgtttggtgactgagatacagaagcagaccattggattggctttgcaaggtaaagatgtacttggagcggccaaaactggatctggcaagactctggcttttcttgttccagtgctggaagccttatatcgtctgcaatggacttcaacagatgggctgggggttctcataatatcacctacgagagaactggcctatcagacctttgaggttctccgaaaagtaggaaagaatcatgacttctcagctggtctcatcattggtggaaaggatctaaaacacgaagctgagaggatcaacaacataaatatactcgtgtgcacaccaggtcggcttcttcaacacatggatgaaacagtatcttttcatgctaccgacctccaaatgttagctttgacagatccaaatgcttctgctgcccagcaggctgttctccagcagcacatcaatagtctaacatactcaccttttggagactctcctctcttccggaatccgatgtcagaccctaagaagaaggaagagagattgaaaccaacaaatccagcagcccagaaggctcttactacacctactcattataaactgacaccccgccctgccactagagtccggccaaaggctttacaaacaacaggcacagccaagtcacatctctttgatgggctggatgacgatgaaccatccctagccaatggagcattcatgcccaagaagagcattaagaagttggttttgaagaaccttaataatagcaatctcttttctcc

SEQ ID NO: 737043 - DNA, 556 bp, Homo sapiens
ctagaggatcccccaaagatgccatcgactggatttattttgaagagttttgccacttttgggattataaggaacaaatcacaggaaaagccagaatcagtaagctatataaagggcttgttgcattccactgtcactacacatttagcctggtagcttcctgttttcttttctttttattttttaaatagagatggggtctgtatgttgaccaggctggccaacatggtgaaacaccgtctccactaaaaatagaaaaattaactgggtgtggtggagggcgcctgtaatcccagctaatcaggaagctgagacaggaggatcgcttgaacccaggaggcggaggttgcagtgagccgagattgctccattgcactccagcctgggcgatagagtgagactcagcctcaaaaaaaaaaaaaaaaaaaaaattccggcagggggggggggggcgcctataaccccagttactcgggaggcagaggacaagaagggctggatcattggacccggggaggcagagtcacaaggacgcgagatgggccatggactcaag

SEQ ID NO: 737044 - DNA, 596 bp, Homo sapiens; identical to SEQ ID NO: 405570

SEQ ID NO: 737045 - DNA, 1006 bp, Homo sapiens
cgcgcatgcgcctctgtgcgtttgtcccatgctggttccgtgagtctggccttaggtgtctcgtgtctggggttgatccgagctgtcgccgccgccgccgcaatgggcaaaacggccaactctccgggttcgggagcccgacccgacccggtgcggagcttcaatcgctggaagaaaaaacacagccataggcagaacaaaaagaagcagttgaggaagcaactgaagaaacccgaatggcaggtcgagcgcgagagtatcagccgcctcatgcagaactatgaaaagataaatgtaaatgaaatcacaagattttcagattttcccttgtccaaaaaaacattgaaaggtttgcaagaagctcagtaccgtttggtgactgagatacagaagcagaccattggattggctttgcaaggtaaagatgtacttggagcggccaaaactggatctggcaagactctggcttttcttgttccagtgctggaagccttatatcgtctgcaatggacttcaacagatgggctgggggttctcataatatcacctacgagagaactggcctatcagacctttgaggttctccgaaaagtaggaaagaatcatgacttctcagctggtctcatcattggtggaaaggatctaaaacacgaagctgagaggatcaacaacataaatatactcgtgtgcacaccaggtcggcttcttcaacacatggatgaaacagtatcttttcatgctaccgacctccaaatgttagttcttgatgaagcagatagaatcttggatatgggctttgctgataccatgaatgctgttattgaaaatctccccaagaaacgtcagactttacttttctcagcaacacaaactaaatctgtaaaggaccttgcacgcttgagtttgaaaaaccctgagtatgtctgggttcatgaaaaagcaaaatatagaagagcattaagaagttggttttgaagaaccttaataatagcaatctcttttctcc

SEQ ID NO: 737046 - DNA, 294 bp, Homo sapiens
gtaggtgtactgactaatttcttttcttttgctactatctaaataacaaagcatgcttttccaactgcagataaacgaagaaaggaatcaggtaagtgagtgctggtttggcattttgtggtgtgagttgacagctactgtaaatcattatggctaagacttgattagtgctgcaaaaaatccataaaaatcttattttagtttgtttaaactttcttgtactttacttttcagcaaaactgctcattgaaagtcatctcattgaatcctaatgacctgtcagttaggtctagg

SEQ ID NO: 737047 - DNA, 1225 bp, Homo sapiens
tgttggcccaaaaaaaaaatttattttcctttcaaataaaatgtacaaccaaaatttagggtttggagcagtagggaagacaggagataccagggagcccattttacagtagagatctgcatctgacccctctatcccatacctttgcaaaggaggggaggggtctacaagccagaactttcagaagagaagaaaatacatgctgtgctggtgctgtttctggagcaggtcatcctttaggtatagaacaccacctccacccgatgacatcagaaccactgactggtagagtccttggaaatcatacagtccacccatcccccgccagacacatggacacaccgaggctcagatggggaagggtacataccctagggcacacaccaaatcaaaaaggtgaagtcaggactagaacacctgagcaactttagcaggggactgtggccacaggcctggatgtgcacagtagatcatgaaatacattagtcctatgaatgacccccgtgcagagaaatggctgtggttgtcagggagcagccactgctcaggggctcctgacctcagtgaaaggtgactgtgtaaaggccagaaactggatggtggtcatgaacctcaggacgtttttttttttagcaccaaatggtggagctctctgccagctcagcttcttggggcctctcaggtaaaggtgatgtttgaggaccccacgcccatatgaggggtggagaggagaagccagcagcactggggtgagccttggcctacacccttccttcttacccttcccccatcttcagtaaggccaagagaggatgtggggtggggaaggccagaatggtatcgtgtttcttgtttctgggcagtgggctgcgtcctcccaagcaggactgaagggttcagaatcgcttttcctcaggctgagaggttatgagcagctccttgttcccgaagtcccaccaggccgtcatgtggaacgccatgttggttaagacaacagtgtactccaggatggcaaagatggtgtacactgttgtgaggacacaaggaacaggacatggtgaacttccagctacccgctcagaggcctcttgataaatcacaccaccattggtctgccacagagaacacaatggcagccagtccccaagaccattgcccattatcaaaaacatcattgctgccccgcagccactcatgaccgcctgtggatcctatcctggcctca

SEQ ID NO: 737048 - DNA, 4264 bp, Homo sapiens
tgttggcccaaaaaaaaaatttattttcctttcaaataaaatgtacaaccaaaatttagggtttggagcagtagggaagacaggagataccagggagcccattttacagtagagatctgcatctgacccctctatcccatacctttgcaaaggaggggaggggtctacaagccagaactttcagaagagaagaaaatacatgctgtgctggtgctgtttctggagcaggtcatcctttaggtatagaacaccacctccacccgatgacatcagaaccactgactggtagagtccttggaaatcatacagtccacccatcccccgccagacacatggacacaccgaggctcagatggggaagggtacataccctagggcacacaccaaatcaaaaaggtgaagtcaggactagaacacctgagcaactttagcaggggactgtggccacaggcctggatgtgcacagtagatcatgaaatacattagtcctatgaatgacccccgtgcagagaaatggctgtggttgtcagggagcagccactgctcaggggctcctgacctcagtgaaaggtgactgtgtaaaggccagaaactggatggtggtcatgaacctcaggacgtttttttttttagcaccaaatggtggagctctctgccagctcagcttcttggggcctctcaggtaaaggtgatgtttgaggaccccacgcccatatgaggggtggagaggagaagccagcagcactggggtgagccttggcctacacccttccttcttacccttcccccatcttcagtaaggccaagagaggatgtggggtggggaaggccagaatggtatcgtgtttcttgtttctgggcagtgggctgcgtcctcccaagcaggactgaagggttcagaatcgcttttcctcaggctgagaggttatgagcagctccttgttcccgaagtcccaccaggccgtcatgtggaacgccatgttggttaagacaacagtgtactccaggatggcaaagatggtgtacactccagcctcacaatacatgttgtgccgaaagtagacagccagcgccgagaagaaggagatgaagttgatgatgaagagccgctgtttccagctgtaggacttgcgatcctagggaatgggctgtctgatcactctgcagcttgctgggtatgagagcgtgggctcccctctcagccctaactcctaagggctgggccttatctcccttggctcccactagcggtcatggaagggagcacaggcaggggcagcaagaatgacgactatgtgttcacgtccctgcctctgggggagtgatgggccgaggagcagtggtattcctgccgcttccacttcagggggatggagtatgaaagttacatggagtcacccaccaaccccacctccaaatactgtgggggaaaagaaacccatgtacatgggtggggcgctggaattatgacagaccagtcctctgacactgttcctaactcactgccgcctagatgcgactcctcattctatccccatttgcagcctccatctcttctattctccagtctcccacactacccaaacacagtgctatagtcctagattctgaccaaccaccctcagtttgttcccaagccccagccccaaccccagcacccctctgccagggttcccattagaactcagttcccacctcaccattacccgaatcctgaggacagatgtccttgattttcttctgggctgccttggagcccccgctagggatagaccgtacctctcctgacttactgtgtgcttcttggtcaaccgccagagaatgcaggtgaggagcatgtgcccgagggatgaggcaatgaacacaatgaaagcattttcgtggatggctggagggaaagaggattgggagccacattgcagggagtgcccacaccacgaagtaggaaggtccgaatgtggtaggggcaggcccgtcccctcagggaacacttccccactcctccctcatccaggcacccactgaagtcctcggaggaggagacataagtgagcactagcaacgcgaggttctccacgacattgaggccgaagttgaggcggcagagcgggcgatagcaggaacacggggaggtgcagctgaggtagtggttccagtaggcgaaggccaccaagaagcgaggcgccgagtgcaggccgatgcagaaacgccacacgtagcgctggggcacctccccgccgatggctgagctcaccgagggcaggtaattgggcacctagagagttgtgacctgtctgggcatctgcctctgccagccccgcccatgtggagaaccttctctccatctgacaaaatcactcttgcctctgctccagcccctccccttccaagaagtcctccttcagatgtccccatacctctcccaaaagacctctccttccaggtcctaggcccaaagtgctggattctcattccccagctatcctgggatttgtgcagcagcatggtggcaccttctccatctcccccgcagactggaacctgcctggggtagtctaaggaaatgaccatgttcttgtgcatctccaccatccatcttaatgcctggaactcctattgaagcttcagtccccacagtgtgtggccgttgtctccttgaagtggaagagcagggaccagaggatgcagaagaggaaggcgacaagtggacagcagaccgtgaccagggccaccatggtgaagcggagccgtaccagggtcccatcccgatccagtggtagtgggacctggtacatcttgtcagacctctcagctgcgttccatctaccatgccattctggggccgtccctctgattggcccgagctccctcagcccgagtcgcggcgctccaaggaagggggcggagtctctatgttgcgtcaccacccttcccgacaccccgccggtgcttcccaatctagccattcacaagcccacttcgagaggccctgtgtgacgtcacgacacgctcccgccaaccgcggcggcgaggggcgggactccacggccctctcaccgctcctaccctgtgcctccccgaactccttctgcccctcctcttccctctcgccccttcccccttcagttcggtttcaaaagacgcgtgcccaatgaataacagggtcgacccagagtggcggccgcgtccaccaattcgcggacggcgagggcggagcgtccgcaacgagcctctgacgccgggcggcgtgtgacgcagtcgggccctctgcgcgctgcgcccgaagcggcggtcggtggcaggggtggtagcggcggcggcgacggtttcgtgggggccgcgcgctgctctgtgagcggcgggtggcagcaggggactcctgacacttccccttccccaccgaaccgcgctttctgaaacaaagactcattttgaagatgtttaacaaatcatttggaacaccctttgggggtggcacaggtggctttggcacaacttcaacatttggacagaatactggctttggcactactagtggaggggcatttggaacatctgcatttggttctagcaacaatactggaggcctctttggaaattcacagactaaaccaggaggattgtttggaaccagttcatttagccagccagctacctccacaagcactggctttgggtttggtacgtcaacaggaacagcaaataccttgtttggaactgcaagcacagggaccagtctcttctcatcccaaaacaatgcctttgcacaaaataaaccaactggctttggcaattttggaaccagtactagcagtggaggactctttggaaccacaaataccacctctaatccttttggcagcacatctggctccctctttgggccaagtagttttacagctgctcctactgggactactattaaatttaaccctccaactggtacagatactatggtcaaagctggagttagcactaacataagtaccaagcaccagtgtattactgctatgaaagaatatgaaagcaagtcactagaggaacttcgtttagaggattatcaggctaacaggaagggcccacagaaccaggtgggagcaggtaccacaactggcttgtttgggtcttctccagccacttccagcgcaacaggactcttcagctcctccaccactaattcaggctttgcatatggtcagaacaaaactgcctttggaactagtaagcacttgatatcatgttagattatactgaggagagacag

SEQ ID NO: 737049 - DNA, 5002 bp, Homo sapiens
tgttggcccaaaaaaaaaatttattttcctttcaaataaaatgtacaaccaaaatttagggtttggagcagtagggaagacaggagataccagggagcccattttacagtagagatctgcatctgacccctctatcccatacctttgcaaaggaggggaggggtctacaagccagaactttcagaagagaagaaaatacatgctgtgctggtgctgtttctggagcaggtcatcctttaggtatagaacaccacctccacccgatgacatcagaaccactgactggtagagtccttggaaatcatacagtccacccatcccccgccagacacatggacacaccgaggctcagatggggaagggtacataccctagggcacacaccaaatcaaaaaggtgaagtcaggactagaacacctgagcaactttagcaggggactgtggccacaggcctggatgtgcacagtagatcatgaaatacattagtcctatgaatgacccccgtgcagagaaatggctgtggttgtcagggagcagccactgctcaggggctcctgacctcagtgaaaggtgactgtgtaaaggccagaaactggatggtggtcatgaacctcaggacgtttttttttttagcaccaaatggtggagctctctgccagctcagcttcttggggcctctcaggtaaaggtgatgtttgaggaccccacgcccatatgaggggtggagaggagaagccagcagcactggggtgagccttggcctacacccttccttcttacccttcccccatcttcagtaaggccaagagaggatgtggggtggggaaggccagaatggtatcgtgtttcttgtttctgggcagtgggctgcgtcctcccaagcaggactgaagggttcagaatcgcttttcctcaggctgagaggttatgagcagctccttgttcccgaagtcccaccaggccgtcatgtggaacgccatgttggttaagacaacagtgtactccaggatggcaaagatggtgtacactccagcctcacaatacatgttgtgccgaaagtagacagccagcgccgagaagaaggagatgaagttgatgatgaagagccgctgtttccagctgtaggacttgcgatcctagggaatgggctgtctgatcactctgcagcttgctgggtatgagagcgtgggctcccctctcagccctaactcctaagggctgggccttatctcccttggctcccactagcggtcatggaagggagcacaggcaggggcagcaagaatgacgactatgtgttcacgtccctgcctctgggggagtgatgggccgaggagcagtggtattcctgccgcttccacttcagggggatggagtatgaaagttacatggagtcacccaccaaccccacctccaaatactgtgggggaaaagaaacccatgtacatgggtggggcgctggaattatgacagaccagtcctctgacactgttcctaactcactgccgcctagatgcgactcctcattctatccccatttgcagcctccatctcttctattctccagtctcccacactacccaaacacagtgctatagtcctagattctgaccaaccaccctcagtttgttcccaagccccagccccaaccccagcacccctctgccagggttcccattagaactcagttcccacctcaccattacccgaatcctgaggacagatgtccttgattttcttctgggctgccttggagcccccgctagggatagaccgtacctctcctgacttactgtgtgcttcttggtcaaccgccagagaatgcaggtgaggagcatgtgcccgagggatgaggcaatgaacacaatgaaagcattttcgtggatggctggagggaaagaggattgggagccacattgcagggagtgcccacaccacgaagtaggaaggtccgaatgtggtaggggcaggcccgtcccctcagggaacacttccccactcctccctcatccaggcacccactgaagtcctcggaggaggagacataagtgagcactagcaacgcgaggttctccacgacattgaggccgaagttgaggcggcagagcgggcgatagcaggaacacggggaggtgcagctgaggtagtggttccagtaggcgaaggccaccaagaagcgaggcgccgagtgcaggccgatgcagaaacgccacacgtagcgctggggcacctccccgccgatggctgagctcaccgagggcaggtaattgggcacctagagagttgtgacctgtctgggcatctgcctctgccagccccgcccatgtggagaaccttctctccatctgacaaaatcactcttgcctctgctccagcccctccccttccaagaagtcctccttcagatgtccccatacctctcccaaaagacctctccttccaggtcctaggcccaaagtgctggattctcattccccagctatcctgggatttgtgcagcagcatggtggcaccttctccatctcccccgcagactggaacctgcctggggtagtctaaggaaatgaccatgttcttgtgcatctccaccatccatcttaatgcctggaactcctattgaagcttcagtccccacagtgtgtggccgttgtctccttgaagtggaagagcagggaccagaggatgcagaagaggaaggcgacaagtggacagcagaccgtgaccagggccaccatggtgaagcggagccgtaccagggtcccatcccgatccagtggtagtgggacctggtacatcttgtcagacctctcagctgcgttccatctaccatgccattctggggccgtccctctgattggcccgagctccctcagcccgagtcgcggcgctccaaggaagggggcggagtctctatgttgcgtcaccacccttcccgacaccccgccggtgcttcccaatctagccattcacaagcccacttcgagaggccctgtgtgacgtcacgacacgctcccgccaaccgcggcggcgaggggcgggactccacggccctctcaccgctcctaccctgtgcctccccgaactccttctgcccctcctcttccctctcgccccttcccccttcagttcggtttcaaaagacgcgtgcccaatgaataacagggtcgacccagagtggcggccgcgtccaccaattcgcggacggcgagggcggagcgtccgcaacgagcctctgacgccgggcggcgtgtgacgcagtcgggccctctgcgcgctgcgcccgaagcggcggtcggtggcaggggtggtagcggcggcggcgacggtttcgtgggggccgcgcgctgctctgtgagcggcgggtggcagcaggggactcctgacacttccccttccccaccgaaccgcgctttctgaaacaaagactcattttgaagatgtttaacaaatcatttggaacaccctttgggggtggcacaggtggctttggcacaacttcaacatttggacagaatactggctttggcactactagtggaggggcatttggaacatctgcatttggttctagcaacaatactggaggcctctttggaaattcacagactaaaccaggaggattgtttggaaccagttcatttagccagccagctacctccacaagcactggctttgggtttggtacgtcaacaggaacagcaaataccttgtttggaactgcaagcacagggaccagtctcttctcatcccaaaacaatgcctttgcacaaaataaaccaactggctttggcaattttggaaccagtactagcagtggaggactctttggaaccacaaataccacctctaatccttttggcagcacatctggctccctctttgggccaagtagttttacagctgctcctactgggactactattaaatttaaccctccaactggtacagatactatggtcaaagctggagttagcactaacataagtaccaagcaccagtgtattactgctatgaaagaatatgaaagcaagtcactagaggaacttcgtttagaggattatcaggctaacaggaagggcccacagaaccaggtgggagcaggtaccacaactggcttgtttgggtcttctccagccacttccagcgcaacaggactcttcagctcctccaccactaattcaggctttgcatatggtcagaacaaaactgcctttggaactagtacaactggatttggaacaaatccaggtggtctctttggccaacagaatcagcagactaccagcctcttcagcaaaccatttggccaggctacaaccacccagaacactggcttttcctttggtaataccagcaccataggacagccaagcaccaacaccatgggattatttggagtaacccaagcctcacagcctggaggtctttttgggacagctacaaacaccagcactgggacagcatttggaacaggaacaggtctctttgggcagaccaatactggatttggtgctgttggttcgaccctgtttggcaataacaagcttactacatttggaagcagcacaaccagtgcaccttcatttggtacaaccagtggcgggctctttggtaacaaaccaaccctgactttaggaaccaatacaaacacttctaattttggtacatataaaaagcaggtttggctctcttaaagttacactgactataccacacgttattctcctgattcgtatgattggaaatatttaaaagttctcaggtaagcggtagcttgatgtgaagtaccagagggaaaggtttaaagtcctggatatggcttgagataattagtaggcatgtaaattgcctttcatttactttggattacttcagcaatagctgagaaaccataaaggaaacacatttggttaagtaacacattgtatgaggccaggtttcaaacctgtggtagcatacagaagataattggttattcttatttttgtcgttgttggtttgt

SEQ ID NO: 737050 - DNA, 5480 bp, Homo sapiens
tgttggcccaaaaaaaaaatttattttcctttcaaataaaatgtacaaccaaaatttagggtttggagcagtagggaagacaggagataccagggagcccattttacagtagagatctgcatctgacccctctatcccatacctttgcaaaggaggggaggggtctacaagccagaactttcagaagagaagaaaatacatgctgtgctggtgctgtttctggagcaggtcatcctttaggtatagaacaccacctccacccgatgacatcagaaccactgactggtagagtccttggaaatcatacagtccacccatcccccgccagacacatggacacaccgaggctcagatggggaagggtacataccctagggcacacaccaaatcaaaaaggtgaagtcaggactagaacacctgagcaactttagcaggggactgtggccacaggcctggatgtgcacagtagatcatgaaatacattagtcctatgaatgacccccgtgcagagaaatggctgtggttgtcagggagcagccactgctcaggggctcctgacctcagtgaaaggtgactgtgtaaaggccagaaactggatggtggtcatgaacctcaggacgtttttttttttagcaccaaatggtggagctctctgccagctcagcttcttggggcctctcaggtaaaggtgatgtttgaggaccccacgcccatatgaggggtggagaggagaagccagcagcactggggtgagccttggcctacacccttccttcttacccttcccccatcttcagtaaggccaagagaggatgtggggtggggaaggccagaatggtatcgtgtttcttgtttctgggcagtgggctgcgtcctcccaagcaggactgaagggttcagaatcgcttttcctcaggctgagaggttatgagcagctccttgttcccgaagtcccaccaggccgtcatgtggaacgccatgttggttaagacaacagtgtactccaggatggcaaagatggtgtacactccagcctcacaatacatgttgtgccgaaagtagacagccagcgccgagaagaaggagatgaagttgatgatgaagagccgctgtttccagctgtaggacttgcgatcctagggaatgggctgtctgatcactctgcagcttgctgggtatgagagcgtgggctcccctctcagccctaactcctaagggctgggccttatctcccttggctcccactagcggtcatggaagggagcacaggcaggggcagcaagaatgacgactatgtgttcacgtccctgcctctgggggagtgatgggccgaggagcagtggtattcctgccgcttccacttcagggggatggagtatgaaagttacatggagtcacccaccaaccccacctccaaatactgtgggggaaaagaaacccatgtacatgggtggggcgctggaattatgacagaccagtcctctgacactgttcctaactcactgccgcctagatgcgactcctcattctatccccatttgcagcctccatctcttctattctccagtctcccacactacccaaacacagtgctatagtcctagattctgaccaaccaccctcagtttgttcccaagccccagccccaaccccagcacccctctgccagggttcccattagaactcagttcccacctcaccattacccgaatcctgaggacagatgtccttgattttcttctgggctgccttggagcccccgctagggatagaccgtacctctcctgacttactgtgtgcttcttggtcaaccgccagagaatgcaggtgaggagcatgtgcccgagggatgaggcaatgaacacaatgaaagcattttcgtggatggctggagggaaagaggattgggagccacattgcagggagtgcccacaccacgaagtaggaaggtccgaatgtggtaggggcaggcccgtcccctcagggaacacttccccactcctccctcatccaggcacccactgaagtcctcggaggaggagacataagtgagcactagcaacgcgaggttctccacgacattgaggccgaagttgaggcggcagagcgggcgatagcaggaacacggggaggtgcagctgaggtagtggttccagtaggcgaaggccaccaagaagcgaggcgccgagtgcaggccgatgcagaaacgccacacgtagcgctggggcacctccccgccgatggctgagctcaccgagggcaggtaattgggcacctagagagttgtgacctgtctgggcatctgcctctgccagccccgcccatgtggagaaccttctctccatctgacaaaatcactcttgcctctgctccagcccctccccttccaagaagtcctccttcagatgtccccatacctctcccaaaagacctctccttccaggtcctaggcccaaagtgctggattctcattccccagctatcctgggatttgtgcagcagcatggtggcaccttctccatctcccccgcagactggaacctgcctggggtagtctaaggaaatgaccatgttcttgtgcatctccaccatccatcttaatgcctggaactcctattgaagcttcagtccccacagtgtgtggccgttgtctccttgaagtggaagagcagggaccagaggatgcagaagaggaaggcgacaagtggacagcagaccgtgaccagggccaccatggtgaagcggagccgtaccagggtcccatcccgatccagtggtagtgggacctggtacatcttgtcagacctctcagctgcgttccatctaccatgccattctggggccgtccctctgattggcccgagctccctcagcccgagtcgcggcgctccaaggaagggggcggagtctctatgttgcgtcaccacccttcccgacaccccgccggtgcttcccaatctagccattcacaagcccacttcgagaggccctgtgtgacgtcacgacacgctcccgccaaccgcggcggcgaggggcgggactccacggccctctcaccgctcctaccctgtgcctccccgaactccttctgcccctcctcttccctctcgccccttcccccttcagttcggtttcaaaagacgcgtgcccaatgaataacagggtcgacccagagtggcggccgcgtccaccaattcgcggacggcgagggcggagcgtccgcaacgagcctctgacgccgggcggcgtgtgacgcagtcgggccctctgcgcgctgcgcccgaagcggcggtcggtggcaggggtggtagcggcggcggcgacggtttcgtgggggccgcgcgctgctctgtgagcggcgggtggcagcaggggactcctgacacttccccttccccaccgaaccgcgctttctgaaacaaagactcattttgaagatgtttaacaaatcatttggaacaccctttgggggtggcacaggtggctttggcacaacttcaacatttggacagaatactggctttggcactactagtggaggggcatttggaacatctgcatttggttctagcaacaatactggaggcctctttggaaattcacagactaaaccaggaggattgtttggaaccagttcatttagccagccagctacctccacaagcactggctttgggtttggtacgtcaacaggaacagcaaataccttgtttggaactgcaagcacagggaccagtctcttctcatcccaaaacaatgcctttgcacaaaataaaccaactggctttggcaattttggaaccagtactagcagtggaggactctttggaaccacaaataccacctctaatccttttggcagcacatctggctccctctttgggccaagtagttttacagctgctcctactgggactactattaaatttaaccctccaactggtacagatactatggtcaaagctggagttagcactaacataagtaccaagcaccagtgtattactgctatgaaagaatatgaaagcaagtcactagaggaacttcgtttagaggattatcaggctaacaggaagggcccacagaaccaggtgggagcaggtaccacaactggcttgtttgggtcttctccagccacttccagcgcaacaggactcttcagctcctccaccactaattcaggctttgcatatggtcagaacaaaactgcctttggaactagtacaactggatttggaacaaatccaggtggtctctttggccaacagaatcagcagactaccagcctcttcagcaaaccatttggccaggctacaaccacccagaacactggcttttcctttggtaataccagcaccataggacagccaagcaccaacaccatgggattatttggagtaacccaagcctcacagcctggaggtctttttgggacagctacaaacaccagcactgggacagcatttggaacaggaacaggtctctttgggcagaccaatactggatttggtgctgttggttcgaccctgtttggcaataacaagcttactacatttggaagcagcacaaccagtgcaccttcatttggtacaaccagtggcgggctctttggtaacaaaccaaccctgactttaggaaccaatacaaacacttctaattttggttttggcacaaataccagtgggaatagtatttttggaagtaaaccagcacctgggactcttggaactgggcttggtgcaggatttggaacaggtaagaaactgctaccatgagatctaggaagtgacacagcttgactttctagtttctggaacttgagagatctgtttgattatgttactggaattaagaagtctaccttttcgtttttccagttgcgtttataagacattcccagcagttatgctttaccaggctttaaaatattggcatgtttgtgttagaagctgtatgctcccttttctacaaaatgtcctctgatagtcctggtctttttgggatttttagtatttaatgtgagaattgtcatgaggacattaactttcagtttccccatgttacttttgtaacagggatttgagaccttaaactgttcatcaaagtaagccctaatagaaaggcagagcaataagagcacatgctgatgtaattctcctttgcaaggagaatttcatttagttccattgtcatatagaccagtgtcaccccttttccctgattcctactgttaacaactatttttcagtgcctttgaagatactgacccttctacctgcccagctgtttttaaacagctggagcgtgatgatggtcataaaatatataagtgttttagcatgtacagtaaaactaggttgtttagttaaacatagagttttgcctactttttcaattcgtttgactgcaggtgtggtcatttagttgcaaaccatttccatagtctgcttccactgtccagttaatctgttttttttttc

SEQ ID NO: 737051 - DNA, 7239 bp, Homo sapiens
tgttggcccaaaaaaaaaatttattttcctttcaaataaaatgtacaaccaaaatttagggtttggagcagtagggaagacaggagataccagggagcccattttacagtagagatctgcatctgacccctctatcccatacctttgcaaaggaggggaggggtctacaagccagaactttcagaagagaagaaaatacatgctgtgctggtgctgtttctggagcaggtcatcctttaggtatagaacaccacctccacccgatgacatcagaaccactgactggtagagtccttggaaatcatacagtccacccatcccccgccagacacatggacacaccgaggctcagatggggaagggtacataccctagggcacacaccaaatcaaaaaggtgaagtcaggactagaacacctgagcaactttagcaggggactgtggccacaggcctggatgtgcacagtagatcatgaaatacattagtcctatgaatgacccccgtgcagagaaatggctgtggttgtcagggagcagccactgctcaggggctcctgacctcagtgaaaggtgactgtgtaaaggccagaaactggatggtggtcatgaacctcaggacgtttttttttttagcaccaaatggtggagctctctgccagctcagcttcttggggcctctcaggtaaaggtgatgtttgaggaccccacgcccatatgaggggtggagaggagaagccagcagcactggggtgagccttggcctacacccttccttcttacccttcccccatcttcagtaaggccaagagaggatgtggggtggggaaggccagaatggtatcgtgtttcttgtttctgggcagtgggctgcgtcctcccaagcaggactgaagggttcagaatcgcttttcctcaggctgagaggttatgagcagctccttgttcccgaagtcccaccaggccgtcatgtggaacgccatgttggttaagacaacagtgtactccaggatggcaaagatggtgtacactccagcctcacaatacatgttgtgccgaaagtagacagccagcgccgagaagaaggagatgaagttgatgatgaagagccgctgtttccagctgtaggacttgcgatcctagggaatgggctgtctgatcactctgcagcttgctgggtatgagagcgtgggctcccctctcagccctaactcctaagggctgggccttatctcccttggctcccactagcggtcatggaagggagcacaggcaggggcagcaagaatgacgactatgtgttcacgtccctgcctctgggggagtgatgggccgaggagcagtggtattcctgccgcttccacttcagggggatggagtatgaaagttacatggagtcacccaccaaccccacctccaaatactgtgggggaaaagaaacccatgtacatgggtggggcgctggaattatgacagaccagtcctctgacactgttcctaactcactgccgcctagatgcgactcctcattctatccccatttgcagcctccatctcttctattctccagtctcccacactacccaaacacagtgctatagtcctagattctgaccaaccaccctcagtttgttcccaagccccagccccaaccccagcacccctctgccagggttcccattagaactcagttcccacctcaccattacccgaatcctgaggacagatgtccttgattttcttctgggctgccttggagcccccgctagggatagaccgtacctctcctgacttactgtgtgcttcttggtcaaccgccagagaatgcaggtgaggagcatgtgcccgagggatgaggcaatgaacacaatgaaagcattttcgtggatggctggagggaaagaggattgggagccacattgcagggagtgcccacaccacgaagtaggaaggtccgaatgtggtaggggcaggcccgtcccctcagggaacacttccccactcctccctcatccaggcacccactgaagtcctcggaggaggagacataagtgagcactagcaacgcgaggttctccacgacattgaggccgaagttgaggcggcagagcgggcgatagcaggaacacggggaggtgcagctgaggtagtggttccagtaggcgaaggccaccaagaagcgaggcgccgagtgcaggccgatgcagaaacgccacacgtagcgctggggcacctccccgccgatggctgagctcaccgagggcaggtaattgggcacctagagagttgtgacctgtctgggcatctgcctctgccagccccgcccatgtggagaaccttctctccatctgacaaaatcactcttgcctctgctccagcccctccccttccaagaagtcctccttcagatgtccccatacctctcccaaaagacctctccttccaggtcctaggcccaaagtgctggattctcattccccagctatcctgggatttgtgcagcagcatggtggcaccttctccatctcccccgcagactggaacctgcctggggtagtctaaggaaatgaccatgttcttgtgcatctccaccatccatcttaatgcctggaactcctattgaagcttcagtccccacagtgtgtggccgttgtctccttgaagtggaagagcagggaccagaggatgcagaagaggaaggcgacaagtggacagcagaccgtgaccagggccaccatggtgaagcggagccgtaccagggtcccatcccgatccagtggtagtgggacctggtacatcttgtcagacctctcagctgcgttccatctaccatgccattctggggccgtccctctgattggcccgagctccctcagcccgagtcgcggcgctccaaggaagggggcggagtctctatgttgcgtcaccacccttcccgacaccccgccggtgcttcccaatctagccattcacaagcccacttcgagaggccctgtgtgacgtcacgacacgctcccgccaaccgcggcggcgaggggcgggactccacggccctctcaccgctcctaccctgtgcctccccgaactccttctgcccctcctcttccctctcgccccttcccccttcagttcggtttcaaaagacgcgtgcccaatgaataacagggtcgacccagagtggcggccgcgtccaccaattcgcggacggcgagggcggagcgtccgcaacgagcctctgacgccgggcggcgtgtgacgcagtcgggccctctgcgcgctgcgcccgaagcggcggtcggtggcaggggtggtagcggcggcggcgacggtttcgtgggggccgcgcgctgctctgtgagcggcgggtggcagcaggggactcctgacacttccccttccccaccgaaccgcgctttctgaaacaaagactcattttgaagatgtttaacaaatcatttggaacaccctttgggggtggcacaggtggctttggcacaacttcaacatttggacagaatactggctttggcactactagtggaggggcatttggaacatctgcatttggttctagcaacaatactggaggcctctttggaaattcacagactaaaccaggaggattgtttggaaccagttcatttagccagccagctacctccacaagcactggctttgggtttggtacgtcaacaggaacagcaaataccttgtttggaactgcaagcacagggaccagtctcttctcatcccaaaacaatgcctttgcacaaaataaaccaactggctttggcaattttggaaccagtactagcagtggaggactctttggaaccacaaataccacctctaatccttttggcagcacatctggctccctctttgggccaagtagttttacagctgctcctactgggactactattaaatttaaccctccaactggtacagatactatggtcaaagctggagttagcactaacataagtaccaagcaccagtgtattactgctatgaaagaatatgaaagcaagtcactagaggaacttcgtttagaggattatcaggctaacaggaagggcccacagaaccaggtgggagcaggtaccacaactggcttgtttgggtcttctccagccacttccagcgcaacaggactcttcagctcctccaccactaattcaggctttgcatatggtcagaacaaaactgcctttggaactagtacaactggatttggaacaaatccaggtggtctctttggccaacagaatcagcagactaccagcctcttcagcaaaccatttggccaggctacaaccacccagaacactggcttttcctttggtaataccagcaccataggacagccaagcaccaacaccatgggattatttggagtaacccaagcctcacagcctggaggtctttttgggacagctacaaacaccagcactgggacagcatttggaacaggaacaggtctctttgggcagaccaatactggatttggtgctgttggttcgaccctgtttggcaataacaagcttactacatttggaagcagcacaaccagtgcaccttcatttggtacaaccagtggcgggctctttggtaacaaaccaaccctgactttaggaaccaatacaaacacttctaattttggttttggcacaaataccagtgggaatagtatttttggaagtaaaccagcacctgggactcttggaactgggcttggtgcaggatttggaacagctcttggtgctggacaggcatctttgtttgggaacaaccaacctaagattggagggcctcttggtacaggagcctttggggcccctggatttaatactacgacagccactttgggctttggagccccccaggccccagtagctttgacagatccaaatgcttctgctgcccagcaggctgttctccagcagcacatcaatagtctaacatactcaccttttggagactctcctctcttccggaatccgatgtcagaccctaagaagaaggaagagagattgaaaccaacaaatccagcagcccagaaggctcttactacacctactcattataaactgacaccccgccctgccactagagtccggccaaaggctttacaaacaacaggcacagccaagtcacatctctttgatgggctggatgacgatgaaccatccctagccaatggagcattcatgcccaagaagagcattaagaagttggttttgaagaaccttaataatagcaatctcttttctcctgttaatcgtgattcagaaaatctagcttcaccatctgaatatccagaaaatggagagagatttagtttcctaagcaaacctgttgatgagaatcaccagcaggatggagatgaagattcccttgtttcacatttttatactaaccctattgccaaacctattcctcaaaccccagaaagtgctggaaataaacacagcaacagcaacagtgtggatgataccattgttgcattaaacatgcgtgctgctttgcgaaatgggctggaaggaagcagtgaagaaacgtcttttcatgatgagtcacttcaggatgaccgagaagaaatagaaaataattcttaccatatgcacccagcaggtattattctcactaaggttggttactatactattccatctatggatgaccttgctaaaattaccaatgaaaaaggagagtgcattgtctctgatttcactattggtcggaaaggttatggttcaatctattttgaaggagatgtgaatttgacaaatctaaatttggatgatattgtgcatatccggaggaaagaagtagttgtctacttagatgataaccaaaaaccacctgtgggtgaagggctaaataggaaggctgaagttacattggatggagtttggccaacagataaaacatctcgttgtttaataaagagcccagatcgccttgctgatatcaactatgaaggaagattggaagcagtttcaaggaaacagggagctcaattcaaagaataccggcctgaaactggttcttgggtgtttaaggtctcccatttttctaagtatggccttcaggattctgatgaagaggaggaggagcatccgtctaaaactagtacaaagaagttgaagactgctcctttgcctcctgcaagccagactacgcccttgcagatggctcttaatggcaaacctgcacctccacctcaggtagagaaaaaaggacagtgaatttgaatggaatccgtgataccgaagttgaaagcaagtcattcagctaatacaaagctgttttatgacccttggaactttgaagagtacaaacattggcaatcacgttgaaacaagtgcaagggagggcgtgaggtcttgcaggcatctgtctttttactggagagatttaaagaattctcttgctgtttggattattcctctacagattgtcatttttaaaccctttgttctctctcatttggacttgctgaattctctgctcagtgattaacttaagatttgctcatgtgggttcatgcacagtaaattctgcctttattgactacctgatgtgcagtttaatctttttctttacctccatggttttttaaaagttaaattagctttctgaaagggtttttaatctccatttttttaaagttgtttgcttatacttcgggtaaccttgatatttgtattttaatagtacataatctttatgaaaaatagtttgggaatgtaaatgaattattatttggcttggggagattagggcctacattgtttatcgcaattacttgtatcattgatacgggatttctttgtaaagcatcctctacctctcagctgctgaaagctagacctttggtattttccatgctataattcttatggctgctgaaatgtgtggtttttatgatttattaaataatctcttaggaggcatttctggagaatgtgtgtatatacatgtttgcgcgtacaggggaggggagggtatgataaatgtgggaaactggaaatatattgacttttatgtttataatcttggtagcatttagaatgcccctaagaaatctccattgacaaatgaaatgctatagacttggttttccagttatccatattcattttgtctgtcatatgctttgtatcatctccttctttcctaattttttataaccttatatatatatttattataaatatatgtatttctgaggga

SEQ ID NO: 737052 - DNA, 7305 bp, Homo sapiens
tgttggcccaaaaaaaaaatttattttcctttcaaataaaatgtacaaccaaaatttagggtttggagcagtagggaagacaggagataccagggagcccattttacagtagagatctgcatctgacccctctatcccatacctttgcaaaggaggggaggggtctacaagccagaactttcagaagagaagaaaatacatgctgtgctggtgctgtttctggagcaggtcatcctttaggtatagaacaccacctccacccgatgacatcagaaccactgactggtagagtccttggaaatcatacagtccacccatcccccgccagacacatggacacaccgaggctcagatggggaagggtacataccctagggcacacaccaaatcaaaaaggtgaagtcaggactagaacacctgagcaactttagcaggggactgtggccacaggcctggatgtgcacagtagatcatgaaatacattagtcctatgaatgacccccgtgcagagaaatggctgtggttgtcagggagcagccactgctcaggggctcctgacctcagtgaaaggtgactgtgtaaaggccagaaactggatggtggtcatgaacctcaggacgtttttttttttagcaccaaatggtggagctctctgccagctcagcttcttggggcctctcaggtaaaggtgatgtttgaggaccccacgcccatatgaggggtggagaggagaagccagcagcactggggtgagccttggcctacacccttccttcttacccttcccccatcttcagtaaggccaagagaggatgtggggtggggaaggccagaatggtatcgtgtttcttgtttctgggcagtgggctgcgtcctcccaagcaggactgaagggttcagaatcgcttttcctcaggctgagaggttatgagcagctccttgttcccgaagtcccaccaggccgtcatgtggaacgccatgttggttaagacaacagtgtactccaggatggcaaagatggtgtacactccagcctcacaatacatgttgtgccgaaagtagacagccagcgccgagaagaaggagatgaagttgatgatgaagagccgctgtttccagctgtaggacttgcgatcctagggaatgggctgtctgatcactctgcagcttgctgggtatgagagcgtgggctcccctctcagccctaactcctaagggctgggccttatctcccttggctcccactagcggtcatggaagggagcacaggcaggggcagcaagaatgacgactatgtgttcacgtccctgcctctgggggagtgatgggccgaggagcagtggtattcctgccgcttccacttcagggggatggagtatgaaagttacatggagtcacccaccaaccccacctccaaatactgtgggggaaaagaaacccatgtacatgggtggggcgctggaattatgacagaccagtcctctgacactgttcctaactcactgccgcctagatgcgactcctcattctatccccatttgcagcctccatctcttctattctccagtctcccacactacccaaacacagtgctatagtcctagattctgaccaaccaccctcagtttgttcccaagccccagccccaaccccagcacccctctgccagggttcccattagaactcagttcccacctcaccattacccgaatcctgaggacagatgtccttgattttcttctgggctgccttggagcccccgctagggatagaccgtacctctcctgacttactgtgtgcttcttggtcaaccgccagagaatgcaggtgaggagcatgtgcccgagggatgaggcaatgaacacaatgaaagcattttcgtggatggctggagggaaagaggattgggagccacattgcagggagtgcccacaccacgaagtaggaaggtccgaatgtggtaggggcaggcccgtcccctcagggaacacttccccactcctccctcatccaggcacccactgaagtcctcggaggaggagacataagtgagcactagcaacgcgaggttctccacgacattgaggccgaagttgaggcggcagagcgggcgatagcaggaacacggggaggtgcagctgaggtagtggttccagtaggcgaaggccaccaagaagcgaggcgccgagtgcaggccgatgcagaaacgccacacgtagcgctggggcacctccccgccgatggctgagctcaccgagggcaggtaattgggcacctagagagttgtgacctgtctgggcatctgcctctgccagccccgcccatgtggagaaccttctctccatctgacaaaatcactcttgcctctgctccagcccctccccttccaagaagtcctccttcagatgtccccatacctctcccaaaagacctctccttccaggtcctaggcccaaagtgctggattctcattccccagctatcctgggatttgtgcagcagcatggtggcaccttctccatctcccccgcagactggaacctgcctggggtagtctaaggaaatgaccatgttcttgtgcatctccaccatccatcttaatgcctggaactcctattgaagcttcagtccccacagtgtgtggccgttgtctccttgaagtggaagagcagggaccagaggatgcagaagaggaaggcgacaagtggacagcagaccgtgaccagggccaccatggtgaagcggagccgtaccagggtcccatcccgatccagtggtagtgggacctggtacatcttgtcagacctctcagctgcgttccatctaccatgccattctggggccgtccctctgattggcccgagctccctcagcccgagtcgcggcgctccaaggaagggggcggagtctctatgttgcgtcaccacccttcccgacaccccgccggtgcttcccaatctagccattcacaagcccacttcgagaggccctgtgtgacgtcacgacacgctcccgccaaccgcggcggcgaggggcgggactccacggccctctcaccgctcctaccctgtgcctccccgaactccttctgcccctcctcttccctctcgccccttcccccttcagttcggtttcaaaagacgcgtgcccaatgaataacagggtcgacccagagtggcggccgcgtccaccaattcgcggacggcgagggcggagcgtccgcaacgagcctctgacgccgggcggcgtgtgacgcagtcgggccctctgcgcgctgcgcccgaagcggcggtcggtggcaggggtggtagcggcggcggcgacggtttcgtgggggccgcgcgctgctctgtgagcggcgggtggcagcaggggactcctgacacttccccttccccaccgaaccgcgctttctgaaacaaagactcattttgaagatgtttaacaaatcatttggaacaccctttgggggtggcacaggtggctttggcacaacttcaacatttggacagaatactggctttggcactactagtggaggggcatttggaacatctgcatttggttctagcaacaatactggaggcctctttggaaattcacagactaaaccaggaggattgtttggaaccagttcatttagccagccagctacctccacaagcactggctttgggtttggtacgtcaacaggaacagcaaataccttgtttggaactgcaagcacagggaccagtctcttctcatcccaaaacaatgcctttgcacaaaataaaccaactggctttggcaattttggaaccagtactagcagtggaggactctttggaaccacaaataccacctctaatccttttggcagcacatctggctccctctttgggccaagtagttttacagctgctcctactgggactactattaaatttaaccctccaactggtacagatactatggtcaaagctggagttagcactaacataagtaccaagcaccagtgtattactgctatgaaagaatatgaaagcaagtcactagaggaacttcgtttagaggattatcaggctaacaggaagggcccacagaaccaggtgggagcaggtaccacaactggcttgtttgggtcttctccagccacttccagcgcaacaggactcttcagctcctccaccactaattcaggctttgcatatggtcagaacaaaactgcctttggaactagtacaactggatttggaacaaatccaggtggtctctttggccaacagaatcagcagactaccagcctcttcagcaaaccatttggccaggctacaaccacccagaacactggcttttcctttggtaataccagcaccataggacagccaagcaccaacaccatgggattatttggagtaacccaagcctcacagcctggaggtctttttgggacagctacaaacaccagcactgggacagcatttggaacaggaacaggtctctttgggcagaccaatactggatttggtgctgttggttcgaccctgtttggcaataacaagcttactacatttggaagcagcacaaccagtgcaccttcatttggtacaaccagtggcgggctctttggtaacaaaccaaccctgactttaggaaccaatacaaacacttctaattttggttttggcacaaataccagtgggaatagtatttttggaagtaaaccagcacctgggactcttggaactgggcttggtgcaggatttggaacagctcttggtgctggacaggcatctttgtttgggaacaaccaacctaagattggagggcctcttggtacaggagcctttggggcccctggatttaatactacgacagccactttgggctttggagccccccaggccccagtagctttgacagatccaaatgcttctgctgcccagcaggctgttctccagcagcacatcaatagtctaacatactcaccttttggagactctcctctcttccggaatccgatgtcagaccctaagaagaaggaagagagattgaaaccaacaaatccagcagcccagaaggctcttactacacctactcattataaactgacaccccgccctgccactagagtccggccaaaggctttacaaacaacaggcacagccaagtcacatctctttgatgggctggatgacgatgaaccatccctagccaatggagcattcatgcccaagaagagcattaagaagttggttttgaagaaccttaataatagcaatctcttttctcctgttaatcgtgattcagaaaatctagcttcaccatctgaatatccagaaaatggagagagatttagtttcctaagcaaacctgttgatgagaatcaccagcaggatggagatgaagattcccttgtttcacatttttatactaaccctattgccaaacctattcctcaaaccccagaaagtgctggaaataaacacagcaacagcaacagtgtggatgataccattgttgcattaaacatgcgtgctgctttgcgaaatgggctggaaggaagcagtgaagaaacgtcttttcatgatgagtcacttcaggatgaccgagaagaaatagaaaataattcttaccatatgcacccagcaggtattattctcactaaggttggttactatactattccatctatggatgaccttgctaaaattaccaatgaaaaaggagagtgcattgtctctgatttcactattggtcggaaaggttatggttcaatctattttgaaggagatgtgaatttgacaaatctaaatttggatgatattgtgcatatccggaggaaagaagtagttgtctacttagatgataaccaaaaaccacctgtgggtgaagggctaaataggaaggctgaagttacattggatggagtttggccaacagataaaacatctcgttgtttaataaagagcccagatcgccttgctgatatcaactatgaaggaagattggaagcagtttcaaggaaacagggagctcaattcaaagaataccggcctgaaactggttcttgggtgtttaaggtctcccatttttctaagtatggccttcaggattctgatgaagaggaggaggagcatccgtctaaaactagtacaaagaagttgaagactgctcctttgcctcctgcaagccagactacgcccttgcagatggctcttaatggcaaacctgcacctccacctcagagccagagcccagaggtggagcagttagggagggttgtggaactggacagtgacatggtagatatcacccaggagccagttttggataccatgttagaagagagcatgcctgaggatcaggaacctgtgtctgcctcaacacatattgcatcttcactgggaattaatccacatgtcttacagatcatgaaagcatcattgcttactgatgaagaagatgtagatatggcactggatcaacgcttcagtcgcctgccttccaaagcagatacttctcaagaaatctgttctcccagactccccatttcagcatcccactcgtcgaaaactcgttcactagttggtgggttactacaatcaaaatttacaagtggagcttttctttcaccaagtgtctctgtgcaagaatgtcgtactcccagagcagcatctttaatgaatatcccatccacatcctcttggtctgtccctccacccctgacttctgtgttcacaatgcccagcccagcccctgaggttccgttgaaaacagtgggtacacgtaggcaactaggcctagtccctcgtgaaaagtctgtcacctatggcaagggaaaactcttgatggacatggccctattcatgggacgctcatttcgtgttggttggggccccaactggactcttgctaatagtggagaacagctgaatggctctcatgaactagaaaatcatcagattgccgattccatggagtttggattcctgcccaatccagtagctgttaaaccgtgagtcacatttcttgatgctttttgagaaaggcaacatgataggtgaaaaaaactaatcaggaggatagggccctgctttgtcatctttctagagagagagagagagagagagagtgtgtgtgtgtgtgtgtgtgtgtgtgtgtgtgtgtgtgtgtttttgagtctcagttttgctctgtttcccaggagaatggtgtgaacccgggaggcggagcttgcagtgagctgagatcgcgccattgcactctagcctgggcaactgaatgagactcagtctcaaaaaaaaaaaagagagaaaagaa

SEQ ID NO: 737053 - DNA, 7569 bp, Homo sapiens
tgttggcccaaaaaaaaaatttattttcctttcaaataaaatgtacaaccaaaatttagggtttggagcagtagggaagacaggagataccagggagcccattttacagtagagatctgcatctgacccctctatcccatacctttgcaaaggaggggaggggtctacaagccagaactttcagaagagaagaaaatacatgctgtgctggtgctgtttctggagcaggtcatcctttaggtatagaacaccacctccacccgatgacatcagaaccactgactggtagagtccttggaaatcatacagtccacccatcccccgccagacacatggacacaccgaggctcagatggggaagggtacataccctagggcacacaccaaatcaaaaaggtgaagtcaggactagaacacctgagcaactttagcaggggactgtggccacaggcctggatgtgcacagtagatcatgaaatacattagtcctatgaatgacccccgtgcagagaaatggctgtggttgtcagggagcagccactgctcaggggctcctgacctcagtgaaaggtgactgtgtaaaggccagaaactggatggtggtcatgaacctcaggacgtttttttttttagcaccaaatggtggagctctctgccagctcagcttcttggggcctctcaggtaaaggtgatgtttgaggaccccacgcccatatgaggggtggagaggagaagccagcagcactggggtgagccttggcctacacccttccttcttacccttcccccatcttcagtaaggccaagagaggatgtggggtggggaaggccagaatggtatcgtgtttcttgtttctgggcagtgggctgcgtcctcccaagcaggactgaagggttcagaatcgcttttcctcaggctgagaggttatgagcagctccttgttcccgaagtcccaccaggccgtcatgtggaacgccatgttggttaagacaacagtgtactccaggatggcaaagatggtgtacactccagcctcacaatacatgttgtgccgaaagtagacagccagcgccgagaagaaggagatgaagttgatgatgaagagccgctgtttccagctgtaggacttgcgatcctagggaatgggctgtctgatcactctgcagcttgctgggtatgagagcgtgggctcccctctcagccctaactcctaagggctgggccttatctcccttggctcccactagcggtcatggaagggagcacaggcaggggcagcaagaatgacgactatgtgttcacgtccctgcctctgggggagtgatgggccgaggagcagtggtattcctgccgcttccacttcagggggatggagtatgaaagttacatggagtcacccaccaaccccacctccaaatactgtgggggaaaagaaacccatgtacatgggtggggcgctggaattatgacagaccagtcctctgacactgttcctaactcactgccgcctagatgcgactcctcattctatccccatttgcagcctccatctcttctattctccagtctcccacactacccaaacacagtgctatagtcctagattctgaccaaccaccctcagtttgttcccaagccccagccccaaccccagcacccctctgccagggttcccattagaactcagttcccacctcaccattacccgaatcctgaggacagatgtccttgattttcttctgggctgccttggagcccccgctagggatagaccgtacctctcctgacttactgtgtgcttcttggtcaaccgccagagaatgcaggtgaggagcatgtgcccgagggatgaggcaatgaacacaatgaaagcattttcgtggatggctggagggaaagaggattgggagccacattgcagggagtgcccacaccacgaagtaggaaggtccgaatgtggtaggggcaggcccgtcccctcagggaacacttccccactcctccctcatccaggcacccactgaagtcctcggaggaggagacataagtgagcactagcaacgcgaggttctccacgacattgaggccgaagttgaggcggcagagcgggcgatagcaggaacacggggaggtgcagctgaggtagtggttccagtaggcgaaggccaccaagaagcgaggcgccgagtgcaggccgatgcagaaacgccacacgtagcgctggggcacctccccgccgatggctgagctcaccgagggcaggtaattgggcacctagagagttgtgacctgtctgggcatctgcctctgccagccccgcccatgtggagaaccttctctccatctgacaaaatcactcttgcctctgctccagcccctccccttccaagaagtcctccttcagatgtccccatacctctcccaaaagacctctccttccaggtcctaggcccaaagtgctggattctcattccccagctatcctgggatttgtgcagcagcatggtggcaccttctccatctcccccgcagactggaacctgcctggggtagtctaaggaaatgaccatgttcttgtgcatctccaccatccatcttaatgcctggaactcctattgaagcttcagtccccacagtgtgtggccgttgtctccttgaagtggaagagcagggaccagaggatgcagaagaggaaggcgacaagtggacagcagaccgtgaccagggccaccatggtgaagcggagccgtaccagggtcccatcccgatccagtggtagtgggacctggtacatcttgtcagacctctcagctgcgttccatctaccatgccattctggggccgtccctctgattggcccgagctccctcagcccgagtcgcggcgctccaaggaagggggcggagtctctatgttgcgtcaccacccttcccgacaccccgccggtgcttcccaatctagccattcacaagcccacttcgagaggccctgtgtgacgtcacgacacgctcccgccaaccgcggcggcgaggggcgggactccacggccctctcaccgctcctaccctgtgcctccccgaactccttctgcccctcctcttccctctcgccccttcccccttcagttcggtttcaaaagacgcgtgcccaatgaataacagggtcgacccagagtggcggccgcgtccaccaattcgcggacggcgagggcggagcgtccgcaacgagcctctgacgccgggcggcgtgtgacgcagtcgggccctctgcgcgctgcgcccgaagcggcggtcggtggcaggggtggtagcggcggcggcgacggtttcgtgggggccgcgcgctgctctgtgagcggcgggtggcagcaggggactcctgacacttccccttccccaccgaaccgcgctttctgaaacaaagactcattttgaagatgtttaacaaatcatttggaacaccctttgggggtggcacaggtggctttggcacaacttcaacatttggacagaatactggctttggcactactagtggaggggcatttggaacatctgcatttggttctagcaacaatactggaggcctctttggaaattcacagactaaaccaggaggattgtttggaaccagttcatttagccagccagctacctccacaagcactggctttgggtttggtacgtcaacaggaacagcaaataccttgtttggaactgcaagcacagggaccagtctcttctcatcccaaaacaatgcctttgcacaaaataaaccaactggctttggcaattttggaaccagtactagcagtggaggactctttggaaccacaaataccacctctaatccttttggcagcacatctggctccctctttgggccaagtagttttacagctgctcctactgggactactattaaatttaaccctccaactggtacagatactatggtcaaagctggagttagcactaacataagtaccaagcaccagtgtattactgctatgaaagaatatgaaagcaagtcactagaggaacttcgtttagaggattatcaggctaacaggaagggcccacagaaccaggtgggagcaggtaccacaactggcttgtttgggtcttctccagccacttccagcgcaacaggactcttcagctcctccaccactaattcaggctttgcatatggtcagaacaaaactgcctttggaactagtacaactggatttggaacaaatccaggtggtctctttggccaacagaatcagcagactaccagcctcttcagcaaaccatttggccaggctacaaccacccagaacactggcttttcctttggtaataccagcaccataggacagccaagcaccaacaccatgggattatttggagtaacccaagcctcacagcctggaggtctttttgggacagctacaaacaccagcactgggacagcatttggaacaggaacaggtctctttgggcagaccaatactggatttggtgctgttggttcgaccctgtttggcaataacaagcttactacatttggaagcagcacaaccagtgcaccttcatttggtacaaccagtggcgggctctttggtaacaaaccaaccctgactttaggaaccaatacaaacacttctaattttggttttggcacaaataccagtgggaatagtatttttggaagtaaaccagcacctgggactcttggaactgggcttggtgcaggatttggaacagctcttggtgctggacaggcatctttgtttgggaacaaccaacctaagattggagggcctcttggtacaggagcctttggggcccctggatttaatactacgacagccactttgggctttggagccccccaggccccagtagctttgacagatccaaatgcttctgctgcccagcaggctgttctccagcagcacatcaatagtctaacatactcaccttttggagactctcctctcttccggaatccgatgtcagaccctaagaagaaggaagagagattgaaaccaacaaatccagcagcccagaaggctcttactacacctactcattataaactgacaccccgccctgccactagagtccggccaaaggctttacaaacaacaggcacagccaagtcacatctctttgatgggctggatgacgatgaaccatccctagccaatggagcattcatgcccaagaagagcattaagaagttggttttgaagaaccttaataatagcaatctcttttctcctgttaatcgtgattcagaaaatctagcttcaccatctgaatatccagaaaatggagagagatttagtttcctaagcaaacctgttgatgagaatcaccagcaggatggagatgaagattcccttgtttcacatttttatactaaccctattgccaaacctattcctcaaaccccagaaagtgctggaaataaacacagcaacagcaacagtgtggatgataccattgttgcattaaacatgcgtgctgctttgcgaaatgggctggaaggaagcagtgaagaaacgtcttttcatgatgagtcacttcaggatgaccgagaagaaatagaaaataattcttaccatatgcacccagcaggtattattctcactaaggttggttactatactattccatctatggatgaccttgctaaaattaccaatgaaaaaggagagtgcattgtctctgatttcactattggtcggaaaggttatggttcaatctattttgaaggagatgtgaatttgacaaatctaaatttggatgatattgtgcatatccggaggaaagaagtagttgtctacttagatgataaccaaaaaccacctgtgggtgaagggctaaataggaaggctgaagttacattggatggagtttggccaacagataaaacatctcgttgtttaataaagagcccagatcgccttgctgatatcaactatgaaggaagattggaagcagtttcaaggaaacagggagctcaattcaaagaataccggcctgaaactggttcttgggtgtttaaggtctcccatttttctaagtatggccttcaggattctgatgaagaggaggaggagcatccgtctaaaactagtacaaagaagttgaagactgctcctttgcctcctgcaagccagactacgcccttgcagatggctcttaatggcaaacctgcacctccacctcagagccagagcccagaggtggagcagttagggagggttgtggaactggacagtgacatggtagatatcacccaggagccagttttggataccatgttagaagagagcatgcctgaggatcaggaacctgtgtctgcctcaacacatattgcatcttcactgggaattaatccacatgtcttacagatcatgaaagcatcattgcttactgatgaagaagatgtagatatggcactggatcaacgcttcagtcgcctgccttccaaagcagatacttctcaagaaatctgttctcccagactccccatttcagcatcccactcgtcgaaaactcgttcactagttggtgggttactacaatcaaaatttacaagtggagcttttctttcaccaagtgtctctgtgcaagaatgtcgtactcccagagcagcatctttaatgaatatcccatccacatcctcttggtctgtccctccacccctgacttctgtgttcacaatgcccagcccagcccctgaggttccgttgaaaacagtgggtacacgtaggcaactaggcctagtccctcgtgaaaagtctgtcacctatggcaagggaaaactcttgatggacatggccctattcatgggacgctcatttcgtgttggttggggccccaactggactcttgctaatagtggagaacagctgaatggctctcatgaactagaaaatcatcagattgccgattccatggagtttggattcctgcccaatccagtagctgttaaacccctaactgagtccccattcaaagttcacttagaaaaactcagtttgagacaaagaaagccagatgaagacatgaaattatatcagacacctctggagctcaaattaaaacacagcactgtccatgtggatgaactgtgtcctctcattgtccccaatctgggagttgctgtcattcatgactatgcagattgggttaaagaagcatcaggagacttaccagaagcacaaattgtgaagcactggagcctgacatggacactatgtgaagccctatggggccacctgaaggagcttgacagccagctaaatgaaccccgtgaatacattcaaattctggagcgaagaagagctttctcccgctggctatcctgtactgccacacctcagattgaagaggaagtctccttaacccaaaaaaacagccctgtggaggctgtattcagctacctcacaggcaaaaggatcagtgaggcctgctctctggcccagcagtcaggtggggaaggcatatggtccttctctgcgcctctgtcgccttcctactcactgcctcctaccgctccccgct

SEQ ID NO: 737054 - DNA, 10037 bp, Homo sapiens
tgttggcccaaaaaaaaaatttattttcctttcaaataaaatgtacaaccaaaatttagggtttggagcagtagggaagacaggagataccagggagcccattttacagtagagatctgcatctgacccctctatcccatacctttgcaaaggaggggaggggtctacaagccagaactttcagaagagaagaaaatacatgctgtgctggtgctgtttctggagcaggtcatcctttaggtatagaacaccacctccacccgatgacatcagaaccactgactggtagagtccttggaaatcatacagtccacccatcccccgccagacacatggacacaccgaggctcagatggggaagggtacataccctagggcacacaccaaatcaaaaaggtgaagtcaggactagaacacctgagcaactttagcaggggactgtggccacaggcctggatgtgcacagtagatcatgaaatacattagtcctatgaatgacccccgtgcagagaaatggctgtggttgtcagggagcagccactgctcaggggctcctgacctcagtgaaaggtgactgtgtaaaggccagaaactggatggtggtcatgaacctcaggacgtttttttttttagcaccaaatggtggagctctctgccagctcagcttcttggggcctctcaggtaaaggtgatgtttgaggaccccacgcccatatgaggggtggagaggagaagccagcagcactggggtgagccttggcctacacccttccttcttacccttcccccatcttcagtaaggccaagagaggatgtggggtggggaaggccagaatggtatcgtgtttcttgtttctgggcagtgggctgcgtcctcccaagcaggactgaagggttcagaatcgcttttcctcaggctgagaggttatgagcagctccttgttcccgaagtcccaccaggccgtcatgtggaacgccatgttggttaagacaacagtgtactccaggatggcaaagatggtgtacactccagcctcacaatacatgttgtgccgaaagtagacagccagcgccgagaagaaggagatgaagttgatgatgaagagccgctgtttccagctgtaggacttgcgatcctagggaatgggctgtctgatcactctgcagcttgctgggtatgagagcgtgggctcccctctcagccctaactcctaagggctgggccttatctcccttggctcccactagcggtcatggaagggagcacaggcaggggcagcaagaatgacgactatgtgttcacgtccctgcctctgggggagtgatgggccgaggagcagtggtattcctgccgcttccacttcagggggatggagtatgaaagttacatggagtcacccaccaaccccacctccaaatactgtgggggaaaagaaacccatgtacatgggtggggcgctggaattatgacagaccagtcctctgacactgttcctaactcactgccgcctagatgcgactcctcattctatccccatttgcagcctccatctcttctattctccagtctcccacactacccaaacacagtgctatagtcctagattctgaccaaccaccctcagtttgttcccaagccccagccccaaccccagcacccctctgccagggttcccattagaactcagttcccacctcaccattacccgaatcctgaggacagatgtccttgattttcttctgggctgccttggagcccccgctagggatagaccgtacctctcctgacttactgtgtgcttcttggtcaaccgccagagaatgcaggtgaggagcatgtgcccgagggatgaggcaatgaacacaatgaaagcattttcgtggatggctggagggaaagaggattgggagccacattgcagggagtgcccacaccacgaagtaggaaggtccgaatgtggtaggggcaggcccgtcccctcagggaacacttccccactcctccctcatccaggcacccactgaagtcctcggaggaggagacataagtgagcactagcaacgcgaggttctccacgacattgaggccgaagttgaggcggcagagcgggcgatagcaggaacacggggaggtgcagctgaggtagtggttccagtaggcgaaggccaccaagaagcgaggcgccgagtgcaggccgatgcagaaacgccacacgtagcgctggggcacctccccgccgatggctgagctcaccgagggcaggtaattgggcacctagagagttgtgacctgtctgggcatctgcctctgccagccccgcccatgtggagaaccttctctccatctgacaaaatcactcttgcctctgctccagcccctccccttccaagaagtcctccttcagatgtccccatacctctcccaaaagacctctccttccaggtcctaggcccaaagtgctggattctcattccccagctatcctgggatttgtgcagcagcatggtggcaccttctccatctcccccgcagactggaacctgcctggggtagtctaaggaaatgaccatgttcttgtgcatctccaccatccatcttaatgcctggaactcctattgaagcttcagtccccacagtgtgtggccgttgtctccttgaagtggaagagcagggaccagaggatgcagaagaggaaggcgacaagtggacagcagaccgtgaccagggccaccatggtgaagcggagccgtaccagggtcccatcccgatccagtggtagtgggacctggtacatcttgtcagacctctcagctgcgttccatctaccatgccattctggggccgtccctctgattggcccgagctccctcagcccgagtcgcggcgctccaaggaagggggcggagtctctatgttgcgtcaccacccttcccgacaccccgccggtgcttcccaatctagccattcacaagcccacttcgagaggccctgtgtgacgtcacgacacgctcccgccaaccgcggcggcgaggggcgggactccacggccctctcaccgctcctaccctgtgcctccccgaactccttctgcccctcctcttccctctcgccccttcccccttcagttcggtttcaaaagacgcgtgcccaatgaataacagggtcgacccagagtggcggccgcgtccaccaattcgcggacggcgagggcggagcgtccgcaacgagcctctgacgccgggcggcgtgtgacgcagtcgggccctctgcgcgctgcgcccgaagcggcggtcggtggcaggggtggtagcggcggcggcgacggtttcgtgggggccgcgcgctgctctgtgagcggcgggtggcagcaggggactcctgacacttccccttccccaccgaaccgcgctttctgaaacaaagactcattttgaagatgtttaacaaatcatttggaacaccctttgggggtggcacaggtggctttggcacaacttcaacatttggacagaatactggctttggcactactagtggaggggcatttggaacatctgcatttggttctagcaacaatactggaggcctctttggaaattcacagactaaaccaggaggattgtttggaaccagttcatttagccagccagctacctccacaagcactggctttgggtttggtacgtcaacaggaacagcaaataccttgtttggaactgcaagcacagggaccagtctcttctcatcccaaaacaatgcctttgcacaaaataaaccaactggctttggcaattttggaaccagtactagcagtggaggactctttggaaccacaaataccacctctaatccttttggcagcacatctggctccctctttgggccaagtagttttacagctgctcctactgggactactattaaatttaaccctccaactggtacagatactatggtcaaagctggagttagcactaacataagtaccaagcaccagtgtattactgctatgaaagaatatgaaagcaagtcactagaggaacttcgtttagaggattatcaggctaacaggaagggcccacagaaccaggtgggagcaggtaccacaactggcttgtttgggtcttctccagccacttccagcgcaacaggactcttcagctcctccaccactaattcaggctttgcatatggtcagaacaaaactgcctttggaactagtacaactggatttggaacaaatccaggtggtctctttggccaacagaatcagcagactaccagcctcttcagcaaaccatttggccaggctacaaccacccagaacactggcttttcctttggtaataccagcaccataggacagccaagcaccaacaccatgggattatttggagtaacccaagcctcacagcctggaggtctttttgggacagctacaaacaccagcactgggacagcatttggaacaggaacaggtctctttgggcagaccaatactggatttggtgctgttggttcgaccctgtttggcaataacaagcttactacatttggaagcagcacaaccagtgcaccttcatttggtacaaccagtggcgggctctttggtaacaaaccaaccctgactttaggaaccaatacaaacacttctaattttggttttggcacaaataccagtgggaatagtatttttggaagtaaaccagcacctgggactcttggaactgggcttggtgcaggatttggaacagctcttggtgctggacaggcatctttgtttgggaacaaccaacctaagattggagggcctcttggtacaggagcctttggggcccctggatttaatactacgacagccactttgggctttggagccccccaggccccagtagctttgacagatccaaatgcttctgctgcccagcaggctgttctccagcagcacatcaatagtctaacatactcaccttttggagactctcctctcttccggaatccgatgtcagaccctaagaagaaggaagagagattgaaaccaacaaatccagcagcccagaaggctcttactacacctactcattataaactgacaccccgccctgccactagagtccggccaaaggctttacaaacaacaggcacagccaagtcacatctctttgatgggctggatgacgatgaaccatccctagccaatggagcattcatgcccaagaagagcattaagaagttggttttgaagaaccttaataatagcaatctcttttctcctgttaatcgtgattcagaaaatctagcttcaccatctgaatatccagaaaatggagagagatttagtttcctaagcaaacctgttgatgagaatcaccagcaggatggagatgaagattcccttgtttcacatttttatactaaccctattgccaaacctattcctcaaaccccagaaagtgctggaaataaacacagcaacagcaacagtgtggatgataccattgttgcattaaacatgcgtgctgctttgcgaaatgggctggaaggaagcagtgaagaaacgtcttttcatgatgagtcacttcaggatgaccgagaagaaatagaaaataattcttaccatatgcacccagcaggtattattctcactaaggttggttactatactattccatctatggatgaccttgctaaaattaccaatgaaaaaggagagtgcattgtctctgatttcactattggtcggaaaggttatggttcaatctattttgaaggagatgtgaatttgacaaatctaaatttggatgatattgtgcatatccggaggaaagaagtagttgtctacttagatgataaccaaaaaccacctgtgggtgaagggctaaataggaaggctgaagttacattggatggagtttggccaacagataaaacatctcgttgtttaataaagagcccagatcgccttgctgatatcaactatgaaggaagattggaagcagtttcaaggaaacagggagctcaattcaaagaataccggcctgaaactggttcttgggtgtttaaggtctcccatttttctaagtatggccttcaggattctgatgaagaggaggaggagcatccgtctaaaactagtacaaagaagttgaagactgctcctttgcctcctgcaagccagactacgcccttgcagatggctcttaatggcaaacctgcacctccacctcagagccagagcccagaggtggagcagttagggagggttgtggaactggacagtgacatggtagatatcacccaggagccagttttggataccatgttagaagagagcatgcctgaggatcaggaacctgtgtctgcctcaacacatattgcatcttcactgggaattaatccacatgtcttacagatcatgaaagcatcattgcttactgatgaagaagatgtagatatggcactggatcaacgcttcagtcgcctgccttccaaagcagatacttctcaagaaatctgttctcccagactccccatttcagcatcccactcgtcgaaaactcgttcactagttggtgggttactacaatcaaaatttacaagtggagcttttctttcaccaagtgtctctgtgcaagaatgtcgtactcccagagcagcatctttaatgaatatcccatccacatcctcttggtctgtccctccacccctgacttctgtgttcacaatgcccagcccagcccctgaggttccgttgaaaacagtgggtacacgtaggcaactaggcctagtccctcgtgaaaagtctgtcacctatggcaagggaaaactcttgatggacatggccctattcatgggacgctcatttcgtgttggttggggccccaactggactcttgctaatagtggagaacagctgaatggctctcatgaactagaaaatcatcagattgccgattccatggagtttggattcctgcccaatccagtagctgttaaacccctaactgagtccccattcaaagttcacttagaaaaactcagtttgagacaaagaaagccagatgaagacatgaaattatatcagacacctctggagctcaaattaaaacacagcactgtccatgtggatgaactgtgtcctctcattgtccccaatctgggagttgctgtcattcatgactatgcagattgggttaaagaagcatcaggagacttaccagaagcacaaattgtgaagcactggagcctgacatggacactatgtgaagccctatggggccacctgaaggagcttgacagccagctaaatgaaccccgtgaatacattcaaattctggagcgaagaagagctttctcccgctggctatcctgtactgccacacctcagattgaagaggaagtctccttaacccaaaaaaacagccctgtggaggctgtattcagctacctcacaggcaaaaggatcagtgaggcctgctctctggcccagcagtcaggggatcatcgtcttgctcttcttttatctcagtttgtgggtagccagtcagtccgggagctgctcaccatgcagttggtggactggcatcagctccaagcagactccttcatccaggatgagagactgcgcatctttgctctgttggctggaaaaccggtgtggcagctctcagaaaagaagcaaataaacgtgtgctcccagttggattggaaacgctccctggctatccatctttggtatttgcttccaccaacagcctccatttctagggcgctcagcatgtatgaagaagcatttcagaatacctctgacagtgacagatatgcctgctccccacttccttcgtatctggagggttctggctgtgtgatagcggaggagcaaaactcacagacaccacttcgagatgtctgctttcaccttctaaaactctacagtgacagacattatgatctcaaccagctgctggagcctcgaagcataacagcagatcctttggactaccgcctaagctggcacttgtgggaagtgctgagggctcttaactacacccatctctcagcgcagtgtgaaggtgtgctacaggccagttacgctggccagcttgaaagtgaggggctctgggagtgggccatctttgtcctcctgcacattgacaactcaggcatacgtgagaaggctgttcgagagctgcttacccggcactgccagctgttggagacccctgaatcttgggctaaagagactttccttacccagaagctccgtgtacctgccaaatggatccacgaggccaaagctgtgcgagcacacatggaatctgacaagcacttagaggccctttgcttatttaaggctgagcactggaaccgctgccacaagctcatcatccgacacttagcttctgatgccatcattaatgagaactatgactacctgaaggggttcttggaagacctggcacctccagagcgcagcagcctaattcaggattgggaaacatctgggcttgtttacctggactatattagagtcattgaaatgctccgccatatacagcaggtggattgctcaggtaatgacctggagcagttacacatcaaagtgacttcactgtgcagtcggatagagcagattcagtgttacagtgctaaagatcgcctggctcagtcagacatggccaaacgtgtagccaacctgctgcgcgtggtgctgagtctgcatcatcctcctgatagaacctccgactcaacaccagaccctcagcgagtccctttgcgcctcttggctccccacattggccggcttcccatgcctgaggactatgccatggacgaactgcgcagccttacccagtcctatctgcgagaactggctgttgggagcctgtgagccccaggcactttgcatcacagtcacatgcccattcacaccacacagaggttccctgccttgtttggattggcactgtttgccattctctgggttggctgtggcatctaccctccctccctgctgccagaagcagcatcctccacttgttcagggcttttcttaatactgaacgtagcataagggcttctggaacccagaagaggagacagtttaccatcctcaagatcattcagtgtttttcctttaaaaaaatggtcaataaagctcctttggcagaatcccccaaagaaccagggtattctttttccatccctagccattctggatcttgtgaccctccatgccaaccagcttccctactcctaccctggcccttttatactaggactccttaggaggagtgagacaggtgataatggatccttaacagatgaactatccacagaaggaagagggatccgtctcttaagtaattggttagttaacactgaattttggaggcaaaggagggttggcctgagttaggaaacaaaatgggatctttctgacacacttagggcagaagtgaatgcctgtcacggagggattgatcttcagggctgtttttgttcctgcctttagagttccatgaacaccatacctttgctactactatgtgcaggaacccttggtcacatgtgacatgtctgtgggaagctcccagagtttggtttggtccctggttttcagtcttgctgagactctgtctggatttgcctgcagagtttggataaaaaatggcaggttgggtaaccctccctgttcatcccatgttagctccaaagcatttcccaccctccatctaccccttccagaagcaaaaacaaaccatgactgaggcaggcatggagttgggcgttaggggcaggcagagggcctttgctacactgctgacagctatagggagccccaggtaatggcatgagatagctggtgttagggctatctcaggcaatatggccacacctgggtctttatgcatgaagataatgtaaaggtttttattaaaaaatatatatatgtataaataaatgatctagatattttcctctttttctgaagctactttcttaaaaaataaataaaatgtttatagcattcctg

SEQ ID NO: 737055 - DNA, 9882 bp, Homo sapiens
tgttggcccaaaaaaaaaatttattttcctttcaaataaaatgtacaaccaaaatttagggtttggagcagtagggaagacaggagataccagggagcccattttacagtagagatctgcatctgacccctctatcccatacctttgcaaaggaggggaggggtctacaagccagaactttcagaagagaagaaaatacatgctgtgctggtgctgtttctggagcaggtcatcctttaggtatagaacaccacctccacccgatgacatcagaaccactgactggtagagtccttggaaatcatacagtccacccatcccccgccagacacatggacacaccgaggctcagatggggaagggtacataccctagggcacacaccaaatcaaaaaggtgaagtcaggactagaacacctgagcaactttagcaggggactgtggccacaggcctggatgtgcacagtagatcatgaaatacattagtcctatgaatgacccccgtgcagagaaatggctgtggttgtcagggagcagccactgctcaggggctcctgacctcagtgaaaggtgactgtgtaaaggccagaaactggatggtggtcatgaacctcaggacgtttttttttttagcaccaaatggtggagctctctgccagctcagcttcttggggcctctcaggtaaaggtgatgtttgaggaccccacgcccatatgaggggtggagaggagaagccagcagcactggggtgagccttggcctacacccttccttcttacccttcccccatcttcagtaaggccaagagaggatgtggggtggggaaggccagaatggtatcgtgtttcttgtttctgggcagtgggctgcgtcctcccaagcaggactgaagggttcagaatcgcttttcctcaggctgagaggttatgagcagctccttgttcccgaagtcccaccaggccgtcatgtggaacgccatgttggttaagacaacagtgtactccaggatggcaaagatggtgtacactccagcctcacaatacatgttgtgccgaaagtagacagccagcgccgagaagaaggagatgaagttgatgatgaagagccgctgtttccagctgtaggacttgcgatcctagggaatgggctgtctgatcactctgcagcttgctgggtatgagagcgtgggctcccctctcagccctaactcctaagggctgggccttatctcccttggctcccactagcggtcatggaagggagcacaggcaggggcagcaagaatgacgactatgtgttcacgtccctgcctctgggggagtgatgggccgaggagcagtggtattcctgccgcttccacttcagggggatggagtatgaaagttacatggagtcacccaccaaccccacctccaaatactgtgggggaaaagaaacccatgtacatgggtggggcgctggaattatgacagaccagtcctctgacactgttcctaactcactgccgcctagatgcgactcctcattctatccccatttgcagcctccatctcttctattctccagtctcccacactacccaaacacagtgctatagtcctagattctgaccaaccaccctcagtttgttcccaagccccagccccaaccccagcacccctctgccagggttcccattagaactcagttcccacctcaccattacccgaatcctgaggacagatgtccttgattttcttctgggctgccttggagcccccgctagggatagaccgtacctctcctgacttactgtgtgcttcttggtcaaccgccagagaatgcaggtgaggagcatgtgcccgagggatgaggcaatgaacacaatgaaagcattttcgtggatggctggagggaaagaggattgggagccacattgcagggagtgcccacaccacgaagtaggaaggtccgaatgtggtaggggcaggcccgtcccctcagggaacacttccccactcctccctcatccaggcacccactgaagtcctcggaggaggagacataagtgagcactagcaacgcgaggttctccacgacattgaggccgaagttgaggcggcagagcgggcgatagcaggaacacggggaggtgcagctgaggtagtggttccagtaggcgaaggccaccaagaagcgaggcgccgagtgcaggccgatgcagaaacgccacacgtagcgctggggcacctccccgccgatggctgagctcaccgagggcaggtaattgggcacctagagagttgtgacctgtctgggcatctgcctctgccagccccgcccatgtggagaaccttctctccatctgacaaaatcactcttgcctctgctccagcccctccccttccaagaagtcctccttcagatgtccccatacctctcccaaaagacctctccttccaggtcctaggcccaaagtgctggattctcattccccagctatcctgggatttgtgcagcagcatggtggcaccttctccatctcccccgcagactggaacctgcctggggtagtctaaggaaatgaccatgttcttgtgcatctccaccatccatcttaatgcctggaactcctattgaagcttcagtccccacagtgtgtggccgttgtctccttgaagtggaagagcagggaccagaggatgcagaagaggaaggcgacaagtggacagcagaccgtgaccagggccaccatggtgaagcggagccgtaccagggtcccatcccgatccagtggtagtgggacctggtacatcttgtcagacctctcagctgcgttccatctaccatgccattctggggccgtccctctgattggcccgagctccctcagcccgagtcgcggcgctccaaggaagggggcggagtctctatgttgcgtcaccacccttcccgacaccccgccggtgcttcccaatctagccattcacaagcccacttcgagaggccctgtgtgacgtcacgacacgctcccgccaaccgcggcggcgaggggcgggactccacggccctctcaccgctcctaccctgtgcctccccgaactccttctgcccctcctcttccctctcgccccttcccccttcagttcggtttcaaaagacgcgtgcccaatgaataacagggtcgacccagagtggcggccgcgtccaccaattcgcggacggcgagggcggagcgtccgcaacgagcctctgacgccgggcggcgtgtgacgcagtcgggccctctgcgcgctgcgcccgaagcggcggtcggtggcaggggtggtagcggcggcggcgacggtttcgtgggggccgcgcgctgctctgtgagcggcgggtggcagcaggggactcctgacacttccccttccccaccgaaccgcgctttctgaaacaaagactcattttgaagatgtttaacaaatcatttggaacaccctttgggggtggcacaggtggctttggcacaacttcaacatttggacagaatactggctttggcactactagtggaggggcatttggaacatctgcatttggttctagcaacaatactggaggcctctttggaaattcacagactaaaccaggaggattgtttggaaccagttcatttagccagccagctacctccacaagcactggctttgggtttggtacgtcaacaggaacagcaaataccttgtttggaactgcaagcacagggaccagtctcttctcatcccaaaacaatgcctttgcacaaaataaaccaactggctttggcaattttggaaccagtactagcagtggaggactctttggaaccacaaataccacctctaatccttttggcagcacatctggctccctctttgggccaagtagttttacagctgctcctactgggactactattaaatttaaccctccaactggtacagatactatggtcaaagctggagttagcactaacataagtaccaagcaccagtgtattactgctatgaaagaatatgaaagcaagtcactagaggaacttcgtttagaggattatcaggctaacaggaagggcccacagaaccaggtgggagcaggtaccacaactggcttgtttgggtcttctccagccacttccagcgcaacaggactcttcagctcctccaccactaattcaggctttgcatatggtcagaacaaaactgcctttggaactagtacaactggatttggaacaaatccaggtggtctctttggccaacagaatcagcagactaccagcctcttcagcaaaccatttggccaggctacaaccacccagaacactggcttttcctttggtaataccagcaccataggacagccaagcaccaacaccatgggattatttggagtaacccaagcctcacagcctggaggtctttttgggacagctacaaacaccagcactgggacagcatttggaacaggaacaggtctctttgggcagaccaatactggatttggtgctgttggttcgaccctgtttggcaataacaagcttactacatttggaagcagcacaaccagtgcaccttcatttggtacaaccagtggcgggctctttggtaacaaaccaaccctgactttaggaaccaatacaaacacttctaattttggttttggcacaaataccagtgggaatagtatttttggaagtaaaccagcacctgggactcttggaactgggcttggtgcaggatttggaacagctcttggtgctggacaggcatctttgtttgggaacaaccaacctaagattggagggcctcttggtacaggagcctttggggcccctggatttaatactacgacagccactttgggctttggagccccccaggccccagtagctttgacagatccaaatgcttctgctgcccagcaggctgttctccagcagcacatcaatagtctaacatactcaccttttggagactctcctctcttccggaatccgatgtcagaccctaagaagaaggaagagagattgaaaccaacaaatccagcagcccagaaggctcttactacacctactcattataaactgacaccccgccctgccactagagtccggccaaaggctttacaaacaacaggcacagccaagtcacatctctttgatgggctggatgacgatgaaccatccctagccaatggagcattcatgcccaagaagagcattaagaagttggttttgaagaaccttaataatagcaatctcttttctcctgttaatcgtgattcagaaaatctagcttcaccatctgaatatccagaaaatggagagagatttagtttcctaagcaaacctgttgatgagaatcaccagcaggatggagatgaagattcccttgtttcacatttttatactaaccctattgccaaacctattcctcaaaccccagaaagtgctggaaataaacacagcaacagcaacagtgtggatgataccattgttgcattaaacatgcgtgctgctttgcgaaatgggctggaaggaagcagtgaagaaacgtcttttcatgatgagtcacttcaggatgaccgagaagaaatagaaaataattcttaccatatgcacccagcaggtattattctcactaaggttggttactatactattccatctatggatgaccttgctaaaattaccaatgaaaaaggagagtgcattgtctctgatttcactattggtcggaaaggttatggttcaatctattttgaaggagatgtgaatttgacaaatctaaatttggatgatattgtgcatatccggaggaaagaagtagttgtctacttagatgataaccaaaaaccacctgtgggtgaagggctaaataggaaggctgaagttacattggatggagtttggccaacagataaaacatctcgttgtttaataaagagcccagatcgccttgctgatatcaactatgaaggaagattggaagcagtttcaaggaaacagggagctcaattcaaagaataccggcctgaaactggttcttgggtgtttaaggtctcccatttttctaagtatggccttcaggattctgatgaagaggaggaggagcatccgtctaaaactagtacaaagaagttgaagactgctcctttgcctcctgcaagccagactacgcccttgcagatggctcttaatggcaaacctgcacctccacctcagagccagagcccagaggtggagcagttagggagggttgtggaactggacagtgacatggtagatatcacccaggagccagttttggataccatgttagaagagagcatgcctgaggatcaggaacctgtgtctgcctcaacacatattgcatcttcactgggaattaatccacatgtcttacagatcatgaaagcatcattgcttactgatgaagaagatgtagatatggcactggatcaacgcttcagtcgcctgccttccaaagcagatacttctcaagaaatctgttctcccagactccccatttcagcatcccactcgtcgaaaactcgttcactagttggtgggttactacaatcaaaatttacaagtggagcttttctttcaccaagtgtctctgtgcaagaatgtcgtactcccagagcagcatctttaatgaatatcccatccacatcctcttggtctgtccctccacccctgacttctgtgttcacaatgcccagcccagcccctgaggttccgttgaaaacagtgggtacacgtaggcaactaggcctagtccctcgtgaaaagtctgtcacctatggcaagggaaaactcttgatggacatggccctattcatgggacgctcatttcgtgttggttggggccccaactggactcttgctaatagtggagaacagctgaatggctctcatgaactagaaaatcatcagattgccgattccatggagtttggattcctgcccaatccagtagctgttaaacccctaactgagtccccattcaaagttcacttagaaaaactcagtttgagacaaagaaagccagatgaagacatgaaattatatcagacacctctggagctcaaattaaaacacagcactgtccatgtggatgaactgtgtcctctcattgtccccaatctgggagttgctgtcattcatgactatgcagattgggttaaagaagcatcaggagacttaccagaagcacaaattgtgaagcactggagcctgacatggacactatgtgaagccctatggggccacctgaaggagcttgacagccagctaaatgaaccccgtgaatacattcaaattctggagcgaagaagagctttctcccgctggctatcctgtactgccacacctcagattgaagaggaagtctccttaacccaaaaaaacagccctgtggaggctgtattcagctacctcacaggcaaaaggatcagtgaggcctgctctctggcccagcagtcaggggatcatcgtcttgctcttcttttatctcagtttgtgggtagccagtcagtccgggagctgctcaccatgcagttggtggactggcatcagctccaagcagactccttcatccaggatgagagactgcgcatctttgctctgttggctggaaaaccggtgtggcagctctcagaaaagaagcaaataaacgtgtgctcccagttggattggaaacgctccctggctatccatctttggtatttgcttccaccaacagcctccatttctagggcgctcagcatgtatgaagaagcatttcagaatacctctgacagtgacagatatgcctgctccccacttccttcgtatctggagggttctggctgtgtgatagcggaggagcaaaactcacagacaccacttcgagatgtctgctttcaccttctaaaactctacagtgacagacattatgatctcaaccagctgctggagcctcgaagcataacagcagatcctttggactaccgcctaagctggcacttgtgggaagtgctgagggctcttaactacacccatctctcagcgcagtgtgaaggtgtgctacaggccagttacgctggccagcttgaaagtgaggggctctgggagtgggccatctttgtcctcctgcacattgacaactcaggcatacgtgagaaggctgttcgagagctgcttacccggcactgccagctgttggagacccctgaatcttgggctaaagagactttccttacccagaagctccgtgtacctgccaaatggatccacgaggccaaagctgtgcgagcacacatggaatctgacaagcacttagaggccctttgcttatttaaggctgagcactggaaccgctgccacaagctcatcatccgacacttagcttctggtggattgctcaggtaatgacctggagcagttacacatcaaagtgacttcactgtgcagtcggatagagcagattcagtgttacagtgctaaagatcgcctggctcagtcagacatggccaaacgtgtagccaacctgctgcgcgtggtgctgagtctgcatcatcctcctgatagaacctccgactcaacaccagaccctcagcgagtccctttgcgcctcttggctccccacattggccggcttcccatgcctgaggactatgccatggacgaactgcgcagccttacccagtcctatctgcgagaactggctgttgggagcctgtgagccccaggcactttgcatcacagtcacatgcccattcacaccacacagaggttccctgccttgtttggattggcactgtttgccattctctgggttggctgtggcatctaccctccctccctgctgccagaagcagcatcctccacttgttcagggcttttcttaatactgaacgtagcataagggcttctggaacccagaagaggagacagtttaccatcctcaagatcattcagtgtttttcctttaaaaaaatggtcaataaagctcctttggcagaatcccccaaagaaccagggtattctttttccatccctagccattctggatcttgtgaccctccatgccaaccagcttccctactcctaccctggcccttttatactaggactccttaggaggagtgagacaggtgataatggatccttaacagatgaactatccacagaaggaagagggatccgtctcttaagtaattggttagttaacactgaattttggaggcaaaggagggttggcctgagttaggaaacaaaatgggatctttctgacacacttagggcagaagtgaatgcctgtcacggagggattgatcttcagggctgtttttgttcctgcctttagagttccatgaacaccatacctttgctactactatgtgcaggaacccttggtcacatgtgacatgtctgtgggaagctcccagagtttggtttggtccctggttttcagtcttgctgagactctgtctggatttgcctgcagagtttggataaaaaatggcaggttgggtaaccctccctgttcatcccatgttagctccaaagcatttcccaccctccatctaccccttccagaagcaaaaacaaaccatgactgaggcaggcatggagttgggcgttaggggcaggcagagggcctttgctacactgctgacagctatagggagccccaggtaatggcatgagatagctggtgttagggctatctcaggcaatatggccacacctgggtctttatgcatgaagataatgtaaaggtttttattaaaaaatatatatatgtataaataaatgatctagatattttcctctttttctgaagctactttcttaaaaaataaataaaatgtttatagcattcctg

SEQ ID NO: 737056 - DNA, 9815 bp, Homo sapiens
tgttggcccaaaaaaaaaatttattttcctttcaaataaaatgtacaaccaaaatttagggtttggagcagtagggaagacaggagataccagggagcccattttacagtagagatctgcatctgacccctctatcccatacctttgcaaaggaggggaggggtctacaagccagaactttcagaagagaagaaaatacatgctgtgctggtgctgtttctggagcaggtcatcctttaggtatagaacaccacctccacccgatgacatcagaaccactgactggtagagtccttggaaatcatacagtccacccatcccccgccagacacatggacacaccgaggctcagatggggaagggtacataccctagggcacacaccaaatcaaaaaggtgaagtcaggactagaacacctgagcaactttagcaggggactgtggccacaggcctggatgtgcacagtagatcatgaaatacattagtcctatgaatgacccccgtgcagagaaatggctgtggttgtcagggagcagccactgctcaggggctcctgacctcagtgaaaggtgactgtgtaaaggccagaaactggatggtggtcatgaacctcaggacgtttttttttttagcaccaaatggtggagctctctgccagctcagcttcttggggcctctcaggtaaaggtgatgtttgaggaccccacgcccatatgaggggtggagaggagaagccagcagcactggggtgagccttggcctacacccttccttcttacccttcccccatcttcagtaaggccaagagaggatgtggggtggggaaggccagaatggtatcgtgtttcttgtttctgggcagtgggctgcgtcctcccaagcaggactgaagggttcagaatcgcttttcctcaggctgagaggttatgagcagctccttgttcccgaagtcccaccaggccgtcatgtggaacgccatgttggttaagacaacagtgtactccaggatggcaaagatggtgtacactccagcctcacaatacatgttgtgccgaaagtagacagccagcgccgagaagaaggagatgaagttgatgatgaagagccgctgtttccagctgtaggacttgcgatcctagggaatgggctgtctgatcactctgcagcttgctgggtatgagagcgtgggctcccctctcagccctaactcctaagggctgggccttatctcccttggctcccactagcggtcatggaagggagcacaggcaggggcagcaagaatgacgactatgtgttcacgtccctgcctctgggggagtgatgggccgaggagcagtggtattcctgccgcttccacttcagggggatggagtatgaaagttacatggagtcacccaccaaccccacctccaaatactgtgggggaaaagaaacccatgtacatgggtggggcgctggaattatgacagaccagtcctctgacactgttcctaactcactgccgcctagatgcgactcctcattctatccccatttgcagcctccatctcttctattctccagtctcccacactacccaaacacagtgctatagtcctagattctgaccaaccaccctcagtttgttcccaagccccagccccaaccccagcacccctctgccagggttcccattagaactcagttcccacctcaccattacccgaatcctgaggacagatgtccttgattttcttctgggctgccttggagcccccgctagggatagaccgtacctctcctgacttactgtgtgcttcttggtcaaccgccagagaatgcaggtgaggagcatgtgcccgagggatgaggcaatgaacacaatgaaagcattttcgtggatggctggagggaaagaggattgggagccacattgcagggagtgcccacaccacgaagtaggaaggtccgaatgtggtaggggcaggcccgtcccctcagggaacacttccccactcctccctcatccaggcacccactgaagtcctcggaggaggagacataagtgagcactagcaacgcgaggttctccacgacattgaggccgaagttgaggcggcagagcgggcgatagcaggaacacggggaggtgcagctgaggtagtggttccagtaggcgaaggccaccaagaagcgaggcgccgagtgcaggccgatgcagaaacgccacacgtagcgctggggcacctccccgccgatggctgagctcaccgagggcaggtaattgggcacctagagagttgtgacctgtctgggcatctgcctctgccagccccgcccatgtggagaaccttctctccatctgacaaaatcactcttgcctctgctccagcccctccccttccaagaagtcctccttcagatgtccccatacctctcccaaaagacctctccttccaggtcctaggcccaaagtgctggattctcattccccagctatcctgggatttgtgcagcagcatggtggcaccttctccatctcccccgcagactggaacctgcctggggtagtctaaggaaatgaccatgttcttgtgcatctccaccatccatcttaatgcctggaactcctattgaagcttcagtccccacagtgtgtggccgttgtctccttgaagtggaagagcagggaccagaggatgcagaagaggaaggcgacaagtggacagcagaccgtgaccagggccaccatggtgaagcggagccgtaccagggtcccatcccgatccagtggtagtgggacctggtacatcttgtcagacctctcagctgcgttccatctaccatgccattctggggccgtccctctgattggcccgagctccctcagcccgagtcgcggcgctccaaggaagggggcggagtctctatgttgcgtcaccacccttcccgacaccccgccggtgcttcccaatctagccattcacaagcccacttcgagaggccctgtgtgacgtcacgacacgctcccgccaaccgcggcggcgaggggcgggactccacggccctctcaccgctcctaccctgtgcctccccgaactccttctgcccctcctcttccctctcgccccttcccccttcagttcggtttcaaaagacgcgtgcccaatgaataacagggtcgacccagagtggcggccgcgtccaccaattcgcggacggcgagggcggagcgtccgcaacgagcctctgacgccgggcggcgtgtgacgcagtcgggccctctgcgcgctgcgcccgaagcggcggtcggtggcaggggtggtagcggcggcggcgacggtttcgtgggggccgcgcgctgctctgtgagcggcgggtggcagcaggggactcctgacacttccccttccccaccgaaccgcgctttctgaaacaaagactcattttgaagatgtttaacaaatcatttggaacaccctttgggggtggcacaggtggctttggcacaacttcaacatttggacagaatactggctttggcactactagtggaggggcatttggaacatctgcatttggttctagcaacaatactggaggcctctttggaaattcacagactaaaccaggaggattgtttggaaccagttcatttagccagccagctacctccacaagcactggctttgggtttggtacgtcaacaggaacagcaaataccttgtttggaactgcaagcacagggaccagtctcttctcatcccaaaacaatgcctttgcacaaaataaaccaactggctttggcaattttggaaccagtactagcagtggaggactctttggaaccacaaataccacctctaatccttttggcagcacatctggctccctctttgggccaagtagttttacagctgctcctactgggactactattaaatttaaccctccaactggtacagatactatggtcaaagctggagttagcactaacataagtaccaagcaccagtgtattactgctatgaaagaatatgaaagcaagtcactagaggaacttcgtttagaggattatcaggctaacaggaagggcccacagaaccaggtgggagcaggtaccacaactggcttgtttgggtcttctccagccacttccagcgcaacaggactcttcagctcctccaccactaattcaggctttgcatatggtcagaacaaaactgcctttggaactagtacaactggatttggaacaaatccaggtggtctctttggccaacagaatcagcagactaccagcctcttcagcaaaccatttggccaggctacaaccacccagaacactggcttttcctttggtaataccagcaccataggacagccaagcaccaacaccatgggattatttggagtaacccaagcctcacagcctggaggtctttttgggacagctacaaacaccagcactgggacagcatttggaacaggaacaggtctctttgggcagaccaatactggatttggtgctgttggttcgaccctgtttggcaataacaagcttactacatttggaagcagcacaaccagtgcaccttcatttggtacaaccagtggcgggctctttggtaacaaaccaaccctgactttaggaaccaatacaaacacttctaattttggttttggcacaaataccagtgggaatagtatttttggaagtaaaccagcacctgggactcttggaactgggcttggtgcaggatttggaacagctcttggtgctggacaggcatctttgtttgggaacaaccaacctaagattggagggcctcttggtacaggagcctttggggcccctggatttaatactacgacagccactttgggctttggagccccccaggccccagtagctttgacagatccaaatgcttctgctgcccagcaggctgttctccagcagcacatcaatagtctaacatactcaccttttggagactctcctctcttccggaatccgatgtcagaccctaagaagaaggaagagagattgaaaccaacaaatccagcagcccagaaggctcttactacacctactcattataaactgacaccccgccctgccactagagtccggccaaaggctttacaaacaacaggcacagccaagtcacatctctttgatgggctggatgacgatgaaccatccctagccaatggagcattcatgcccaagaagagcattaagaagttggttttgaagaaccttaataatagcaatctcttttctcctgttaatcgtgattcagaaaatctagcttcaccatctgaatatccagaaaatggagagagatttagtttcctaagcaaacctgttgatgagaatcaccagcaggatggagatgaagattcccttgtttcacatttttatactaaccctattgccaaacctattcctcaaaccccagaaagtgctggaaataaacacagcaacagcaacagtgtggatgataccattgttgcattaaacatgcgtgctgctttgcgaaatgggctggaaggaagcagtgaagaaacgtcttttcatgatgagtcacttcaggatgaccgagaagaaatagaaaataattcttaccatatgcacccagcaggtattattctcactaaggttggttactatactattccatctatggatgaccttgctaaaattaccaatgaaaaaggagagtgcattgtctctgatttcactattggtcggaaaggttatggttcaatctattttgaaggagatgtgaatttgacaaatctaaatttggatgatattgtgcatatccggaggaaagaagtagttgtctacttagatgataaccaaaaaccacctgtgggtgaagggctaaataggaaggctgaagttacattggatggagtttggccaacagataaaacatctcgttgtttaataaagagcccagatcgccttgctgatatcaactatgaaggaagattggaagcagtttcaaggaaacagggagctcaattcaaagaataccggcctgaaactggttcttgggtgtttaaggtctcccatttttctaagtatggccttcaggattctgatgaagaggaggaggagcatccgtctaaaactagtacaaagaagttgaagactgctcctttgcctcctgcaagccagactacgcccttgcagatggctcttaatggcaaacctgcacctccacctcagagccagagcccagaggtggagcagttagggagggttgtggaactggacagtgacatggtagatatcacccaggagccagttttggataccatgttagaagagagcatgcctgaggatcaggaacctgtgtctgcctcaacacatattgcatcttcactgggaattaatccacatgtcttacagatcatgaaagcatcattgcttactgatgaagaagatgtagatatggcactggatcaacgcttcagtcgcctgccttccaaagcagatacttctcaagaaatctgttctcccagactccccatttcagcatcccactcgtcgaaaactcgttcactagttggtgggttactacaatcaaaatttacaagtggagcttttctttcaccaagtgtctctgtgcaagaatgtcgtactcccagagcagcatctttaatgaatatcccatccacatcctcttggtctgtccctccacccctgacttctgtgttcacaatgcccagcccagcccctgaggttccgttgaaaacagtgggtacacgtaggcaactaggcctagtccctcgtgaaaagtctgtcacctatggcaagggaaaactcttgatggacatggccctattcatgggacgctcatttcgtgttggttggggccccaactggactcttgctaatagtggagaacagctgaatggctctcatgaactagaaaatcatcagattgccgattccatggagtttggattcctgcccaatccagtagctgttaaacccctaactgagtccccattcaaagttcacttagaaaaactcagtttgagacaaagaaagccagatgaagacatgaaattatatcagacacctctggagctcaaattaaaacacagcactgtccatgtggatgaactgtgtcctctcattgtccccaatctgggagttgctgtcattcatgactatgcagattgggttaaagaagcatcaggagacttaccagaagcacaaattgtgaagcactggagcctgacatggacactatgtgaagccctatggggccacctgaaggagcttgacagccagctaaatgaaccccgtgaatacattcaaattctggagcgaagaagagctttctcccgctggctatcctgtactgccacacctcagattgaagaggaagtctccttaacccaaaaaaacagccctgtggaggctgtattcagctacctcacaggcaaaaggatcagtgaggcctgctctctggcccagcagtcaggggatcatcgtcttgctcttcttttatctcagtttgtgggtagccagtcagtccgggagctgctcaccatgcagttggtggactggcatcagctccaagcagactccttcatccaggatgagagactgcgcatctttgctctgttggctggaaaaccggtgtggcagctctcagaaaagaagcaaataaacgtgtgctcccagttggattggaaacgctccctggctatccatctttggtatttgcttccaccaacagcctccatttctagggcgctcagcatgtatgaagaagcatttcagaatacctctgacagtgacagatatgcctgctccccacttccttcgtatctggagggttctggctgtgtgatagcggaggagcaaaactcacagacaccacttcgagatgtctgctttcaccttctaaaactctacagtgacagcatacgtgagaaggctgttcgagagctgcttacccggcactgccagctgttggagacccctgaatcttgggctaaagagactttccttacccagaagctccgtgtacctgccaaatggatccacgaggccaaagctgtgcgagcacacatggaatctgacaagcacttagaggccctttgcttatttaaggctgagcactggaaccgctgccacaagctcatcatccgacacttagcttctgatgccatcattaatgagaactatgactacctgaaggggttcttggaagacctggcacctccagagcgcagcagcctaattcaggattgggaaacatctgggcttgtttacctggactatattagagtcattgaaatgctccgccatatacagcaggtggattgctcaggtaatgacctggagcagttacacatcaaagtgacttcactgtgcagtcggatagagcagattcagtgttacagtgctaaagatcgcctggctcagtcagacatggccaaacgtgtagccaacctgctgcgcgtggtgctgagtctgcatcatcctcctgatagaacctccgactcaacaccagaccctcagcgagtccctttgcgcctcttggctccccacattggccggcttcccatgcctgaggactatgccatggacgaactgcgcagccttacccagtcctatctgcgagaactggctgttgggagcctgtgagccccaggcactttgcatcacagtcacatgcccattcacaccacacagaggttccctgccttgtttggattggcactgtttgccattctctgggttggctgtggcatctaccctccctccctgctgccagaagcagcatcctccacttgttcagggcttttcttaatactgaacgtagcataagggcttctggaacccagaagaggagacagtttaccatcctcaagatcattcagtgtttttcctttaaaaaaatggtcaataaagctcctttggcagaatcccccaaagaaccagggtattctttttccatccctagccattctggatcttgtgaccctccatgccaaccagcttccctactcctaccctggcccttttatactaggactccttaggaggagtgagacaggtgataatggatccttaacagatgaactatccacagaaggaagagggatccgtctcttaagtaattggttagttaacactgaattttggaggcaaaggagggttggcctgagttaggaaacaaaatgggatctttctgacacacttagggcagaagtgaatgcctgtcacggagggattgatcttcagggctgtttttgttcctgcctttagagttccatgaacaccatacctttgctactactatgtgcaggaacccttggtcacatgtgacatgtctgtgggaagctcccagagtttggtttggtccctggttttcagtcttgctgagactctgtctggatttgcctgcagagtttggataaaaaatggcaggttgggtaaccctccctgttcatcccatgttagctccaaagcatttcccaccctccatctaccccttccagaagcaaaaacaaaccatgactgaggcaggcatggagttgggcgttaggggcaggcagagggcctttgctacactgctgacagctatagggagccccaggtaatggcatgagatagctggtgttagggctatctcaggcaatatggccacacctgggtctttatgcatgaagataatgtaaaggtttttattaaaaaatatatatatgtataaataaatgatctagatattttcctctttttctgaagctactttcttaaaaaataaataaaatgtttatagcattcctg

SEQ ID NO: 737057 - DNA, 7744 bp, Homo sapiens
tgttggcccaaaaaaaaaatttattttcctttcaaataaaatgtacaaccaaaatttagggtttggagcagtagggaagacaggagataccagggagcccattttacagtagagatctgcatctgacccctctatcccatacctttgcaaaggaggggaggggtctacaagccagaactttcagaagagaagaaaatacatgctgtgctggtgctgtttctggagcaggtcatcctttaggtatagaacaccacctccacccgatgacatcagaaccactgactggtagagtccttggaaatcatacagtccacccatcccccgccagacacatggacacaccgaggctcagatggggaagggtacataccctagggcacacaccaaatcaaaaaggtgaagtcaggactagaacacctgagcaactttagcaggggactgtggccacaggcctggatgtgcacagtagatcatgaaatacattagtcctatgaatgacccccgtgcagagaaatggctgtggttgtcagggagcagccactgctcaggggctcctgacctcagtgaaaggtgactgtgtaaaggccagaaactggatggtggtcatgaacctcaggacgtttttttttttagcaccaaatggtggagctctctgccagctcagcttcttggggcctctcaggtaaaggtgatgtttgaggaccccacgcccatatgaggggtggagaggagaagccagcagcactggggtgagccttggcctacacccttccttcttacccttcccccatcttcagtaaggccaagagaggatgtggggtggggaaggccagaatggtatcgtgtttcttgtttctgggcagtgggctgcgtcctcccaagcaggactgaagggttcagaatcgcttttcctcaggctgagaggttatgagcagctccttgttcccgaagtcccaccaggccgtcatgtggaacgccatgttggttaagacaacagtgtactccaggatggcaaagatggtgtacactccagcctcacaatacatgttgtgccgaaagtagacagccagcgccgagaagaaggagatgaagttgatgatgaagagccgctgtttccagctgtaggacttgcgatcctagggaatgggctgtctgatcactctgcagcttgctgggtatgagagcgtgggctcccctctcagccctaactcctaagggctgggccttatctcccttggctcccactagcggtcatggaagggagcacaggcaggggcagcaagaatgacgactatgtgttcacgtccctgcctctgggggagtgatgggccgaggagcagtggtattcctgccgcttccacttcagggggatggagtatgaaagttacatggagtcacccaccaaccccacctccaaatactgtgggggaaaagaaacccatgtacatgggtggggcgctggaattatgacagaccagtcctctgacactgttcctaactcactgccgcctagatgcgactcctcattctatccccatttgcagcctccatctcttctattctccagtctcccacactacccaaacacagtgctatagtcctagattctgaccaaccaccctcagtttgttcccaagccccagccccaaccccagcacccctctgccagggttcccattagaactcagttcccacctcaccattacccgaatcctgaggacagatgtccttgattttcttctgggctgccttggagcccccgctagggatagaccgtacctctcctgacttactgtgtgcttcttggtcaaccgccagagaatgcaggtgaggagcatgtgcccgagggatgaggcaatgaacacaatgaaagcattttcgtggatggctggagggaaagaggattgggagccacattgcagggagtgcccacaccacgaagtaggaaggtccgaatgtggtaggggcaggcccgtcccctcagggaacacttccccactcctccctcatccaggcacccactgaagtcctcggaggaggagacataagtgagcactagcaacgcgaggttctccacgacattgaggccgaagttgaggcggcagagcgggcgatagcaggaacacggggaggtgcagctgaggtagtggttccagtaggcgaaggccaccaagaagcgaggcgccgagtgcaggccgatgcagaaacgccacacgtagcgctggggcacctccccgccgatggctgagctcaccgagggcaggtaattgggcacctagagagttgtgacctgtctgggcatctgcctctgccagccccgcccatgtggagaaccttctctccatctgacaaaatcactcttgcctctgctccagcccctccccttccaagaagtcctccttcagatgtccccatacctctcccaaaagacctctccttccaggtcctaggcccaaagtgctggattctcattccccagctatcctgggatttgtgcagcagcatggtggcaccttctccatctcccccgcagactggaacctgcctggggtagtctaaggaaatgaccatgttcttgtgcatctccaccatccatcttaatgcctggaactcctattgaagcttcagtccccacagtgtgtggccgttgtctccttgaagtggaagagcagggaccagaggatgcagaagaggaaggcgacaagtggacagcagaccgtgaccagggccaccatggtgaagcggagccgtaccagggtcccatcccgatccagtggtagtgggacctggtacatcttgtcagacctctcagctgcgttccatctaccatgccattctggggccgtccctctgattggcccgagctccctcagcccgagtcgcggcgctccaaggaagggggcggagtctctatgttgcgtcaccacccttcccgacaccccgccggtgcttcccaatctagccattcacaagcccacttcgagaggccctgtgtgacgtcacgacacgctcccgccaaccgcggcggcgaggggcgggactccacggccctctcaccgctcctaccctgtgcctccccgaactccttctgcccctcctcttccctctcgccccttcccccttcagttcggtttcaaaagacgcgtgcccaatgaataacagggtcgacccagagtggcggccgcgtccaccaattcgcggacggcgagggcggagcgtccgcaacgagcctctgacgccgggcggcgtgtgacgcagtcgggccctctgcgcgctgcgcccgaagcggcggtcggtggcaggggtggtagcggcggcggcgacggtttcgtgggggccgcgcgctgctctgtgagcggcgggtggcagcaggggactcctgacacttccccttccccaccgaaccgcgctttctgaaacaaagactcattttgaagatgtttaacaaatcatttggaacaccctttgggggtggcacaggtggctttggcacaacttcaacatttggacagaatactggctttggcactactagtggaggggcatttggaacatctgcatttggttctagcaacaatactggaggcctctttggaaattcacagactaaaccaggaggattgtttggaaccagttcatttagccagccagctacctccacaagcactggctttgggtttggtacgtcaacaggaacagcaaataccttgtttggaactgcaagcacagggaccagtctcttctcatcccaaaacaatgcctttgcacaaaataaaccaactggctttggcaattttggaaccagtactagcagtggaggactctttggaaccacaaataccacctctaatccttttggcagcacatctggctccctctttgggccaagtagttttacagctgctcctactgggactactattaaatttaaccctccaactggtacagatactatggtcaaagctggagttagcactaacataagtaccaagcaccagtgtattactgctatgaaagaatatgaaagcaagtcactagaggaacttcgtttagaggattatcaggctaacaggaagggcccacagaaccaggtgggagcaggtaccacaactggcttgtttgggtcttctccagccacttccagcgcaacaggactcttcagctcctccaccactaattcaggctttgcatatggtcagaacaaaactgcctttggaactagtacaactggatttggaacaaatccaggtggtctctttggccaacagaatcagcagactaccagcctcttcagcaaaccatttggccaggctacaaccacccagaacactggcttttcctttggtaataccagcaccataggacagccaagcaccaacaccatgggattatttggagtaacccaagcctcacagcctggaggtctttttgggacagctacaaacaccagcactgggacagcatttggaacaggaacaggtctctttgggcagaccaatactggatttggtgctgttggttcgaccctgtttggcaataacaagcttactacatttggaagcagcacaaccagtgcaccttcatttggtacaaccagtggcgggctctttggtaacaaaccaaccctgactttaggaaccaatacaaacacttctaattttggttttggcacaaataccagtgggaatagtatttttggaagtaaaccagcacctgggactcttggaactgggcttggtgcaggatttggaacagctcttggtgctggacaggcatctttgtttgggaacaaccaacctaagattggagggcctcttggtacaggagcctttggggcccctggatttaatactacgacagccactttgggctttggagccccccaggccccagtagctttgacagatccaaatgcttctgctgcccagcaggctgttctccagcagcacatcaatagtctaacatactcaccttttggagactctcctctcttccggaatccgatgtcagaccctaagaagaaggaagagagattgaaaccaacaaatccagcagcccagaaggctcttactacacctactcattataaactgacaccccgccctgccactagagtccggccaaaggctttacaaacaacaggcacagccaagtcacatctctttgatgggctggatgacgatgaaccatccctagccaatggagcattcatgcccaagaagagcattaagaagttggttttgaagaaccttaataatagcaatctcttttctcctgttaatcgtgattcagaaaatctagcttcaccatctgaatatccagaaaatggagagagatttagtttcctaagcaaacctgttgatgagaatcaccagcaggatggagatgaagattcccttgtttcacatttttatactaaccctattgccaaacctattcctcaaaccccagaaagtgctggaaataaacacagcaacagcaacagtgtggatgataccattgttgcattaaacatgcgtgctgctttgcgaaatgggctggaaggaagcagtgaagaaacgtcttttcatgatgagtcacttcaggatgaccgagaagaaatagaaaataattcttaccatatgcacccagcaggtattattctcactaaggttggttactatactattccatctatggatgaccttgctaaaattaccaatgaaaaaggagagtgcattgtctctgatttcactattggtcggaaaggttatggttcaatctattttgaaggagatgtgaatttgacaaatctaaatttggatgatattgtgcatatccggaggaaagaagtagttgtctacttagatgataaccaaaaaccacctgtgggtgaagggctaaataggaaggctgaagttacattggatggagtttggccaacagataaaacatctcgttgtttaataaagagcccagatcgccttgctgatatcaactatgaaggaagattggaagcagtttcaaggaaacagggagctcaattcaaagaataccggcctgaaactggttcttgggtgtttaaggtctcccatttttctaagtatggccttcaggattctgatgaagaggaggaggagcatccgtctaaaactagtacaaagaagttgaagactgctcctttgcctcctgcaagccagactacgcccttgcagatggctcttaatggcaaacctgcacctccacctcagagccagagcccagaggtggagcagttagggagggttgtggaactggacagtgacatggtagatatcacccaggagccagttttggataccatgttagaagagagcatgcctgaggatcaggaacctgtgtctgcctcaacacatattgcatcttcactgggaattaatccacatgtcttacagatcatgaaagcatcattgcttactgatgaagaagatgtagatatggcactggatcaacgcttcagtcgcctgccttccaaagcagatacttctcaagaaatctgttctcccagactccccatttcagcatcccactcgtcgaaaactcgttcactagttggtgggttactacaatcaaaatttacaagtggagcttttctttcaccaagtgtctctgtgcaagaatgtcgtactcccagagcagcatctttaatgaatatcccatccacatcctcttggtctgtccctccacccctgacttctgtgttcacaatgcccagcccagcccctgaggttccgttgaaaacagtgggtacacgtaggcaactaggcctagtccctcgtgaaaagtctgtcacctatggcaagggaaaactcttgatggacatggccctattcatgggacgctcatttcgtgttggttggggccccaactggactcttgctaatagtggagaacagctgaatggctctcatgaactagaaaatcatcagattgccgattccatggagtttggattcctgcccaatccagtagctgttaaaccttgtgaagcactggagcctgacatggacactatgtgaagccctatggggccacctgaaggagcttgacagccagctaaatgaaccccgtgaatacattcaaattctggagcgaagaagagctttctcccgctggctatcctgtactgccacacctcagattgaagaggaagtctccttaacccaaaaaaacagccctgtggaggctgtattcagctacctcacaggcaaaaggatcagtgaggcctgctctctggcccagcagtcaggggatcatcgtcttgctcttcttttatctcagtttgtgggtagccagtcagtccgggagctgctcaccatgcagttggtggactggcatcagctccaagcagactccttcatccaggatgagagactgcgcatctttgctctgttggctggaaaaccggtgtggcagctctcagaaaagaagcaaataaacgtgtgctcccagttggattggaaacgctccctggctatccatctttggtatttgcttccaccaacagcctccatttctagggcgctcagcatgtatgaagaagcatttcaggtatatgtggccaatagagccaagcaaaaatcttgctgggtgttaaagtattgtcaaattgaagcggagccaggaaatctgatgggaaactatcctttactccttcctctggacaaggctacttccccaagtgtctgtttttattttattaaatatcatgagattccacagttga

SEQ ID NO: 737058 - DNA, 9728 bp, Homo sapiens
tgttggcccaaaaaaaaaatttattttcctttcaaataaaatgtacaaccaaaatttagggtttggagcagtagggaagacaggagataccagggagcccattttacagtagagatctgcatctgacccctctatcccatacctttgcaaaggaggggaggggtctacaagccagaactttcagaagagaagaaaatacatgctgtgctggtgctgtttctggagcaggtcatcctttaggtatagaacaccacctccacccgatgacatcagaaccactgactggtagagtccttggaaatcatacagtccacccatcccccgccagacacatggacacaccgaggctcagatggggaagggtacataccctagggcacacaccaaatcaaaaaggtgaagtcaggactagaacacctgagcaactttagcaggggactgtggccacaggcctggatgtgcacagtagatcatgaaatacattagtcctatgaatgacccccgtgcagagaaatggctgtggttgtcagggagcagccactgctcaggggctcctgacctcagtgaaaggtgactgtgtaaaggccagaaactggatggtggtcatgaacctcaggacgtttttttttttagcaccaaatggtggagctctctgccagctcagcttcttggggcctctcaggtaaaggtgatgtttgaggaccccacgcccatatgaggggtggagaggagaagccagcagcactggggtgagccttggcctacacccttccttcttacccttcccccatcttcagtaaggccaagagaggatgtggggtggggaaggccagaatggtatcgtgtttcttgtttctgggcagtgggctgcgtcctcccaagcaggactgaagggttcagaatcgcttttcctcaggctgagaggttatgagcagctccttgttcccgaagtcccaccaggccgtcatgtggaacgccatgttggttaagacaacagtgtactccaggatggcaaagatggtgtacactccagcctcacaatacatgttgtgccgaaagtagacagccagcgccgagaagaaggagatgaagttgatgatgaagagccgctgtttccagctgtaggacttgcgatcctagggaatgggctgtctgatcactctgcagcttgctgggtatgagagcgtgggctcccctctcagccctaactcctaagggctgggccttatctcccttggctcccactagcggtcatggaagggagcacaggcaggggcagcaagaatgacgactatgtgttcacgtccctgcctctgggggagtgatgggccgaggagcagtggtattcctgccgcttccacttcagggggatggagtatgaaagttacatggagtcacccaccaaccccacctccaaatactgtgggggaaaagaaacccatgtacatgggtggggcgctggaattatgacagaccagtcctctgacactgttcctaactcactgccgcctagatgcgactcctcattctatccccatttgcagcctccatctcttctattctccagtctcccacactacccaaacacagtgctatagtcctagattctgaccaaccaccctcagtttgttcccaagccccagccccaaccccagcacccctctgccagggttcccattagaactcagttcccacctcaccattacccgaatcctgaggacagatgtccttgattttcttctgggctgccttggagcccccgctagggatagaccgtacctctcctgacttactgtgtgcttcttggtcaaccgccagagaatgcaggtgaggagcatgtgcccgagggatgaggcaatgaacacaatgaaagcattttcgtggatggctggagggaaagaggattgggagccacattgcagggagtgcccacaccacgaagtaggaaggtccgaatgtggtaggggcaggcccgtcccctcagggaacacttccccactcctccctcatccaggcacccactgaagtcctcggaggaggagacataagtgagcactagcaacgcgaggttctccacgacattgaggccgaagttgaggcggcagagcgggcgatagcaggaacacggggaggtgcagctgaggtagtggttccagtaggcgaaggccaccaagaagcgaggcgccgagtgcaggccgatgcagaaacgccacacgtagcgctggggcacctccccgccgatggctgagctcaccgagggcaggtaattgggcacctagagagttgtgacctgtctgggcatctgcctctgccagccccgcccatgtggagaaccttctctccatctgacaaaatcactcttgcctctgctccagcccctccccttccaagaagtcctccttcagatgtccccatacctctcccaaaagacctctccttccaggtcctaggcccaaagtgctggattctcattccccagctatcctgggatttgtgcagcagcatggtggcaccttctccatctcccccgcagactggaacctgcctggggtagtctaaggaaatgaccatgttcttgtgcatctccaccatccatcttaatgcctggaactcctattgaagcttcagtccccacagtgtgtggccgttgtctccttgaagtggaagagcagggaccagaggatgcagaagaggaaggcgacaagtggacagcagaccgtgaccagggccaccatggtgaagcggagccgtaccagggtcccatcccgatccagtggtagtgggacctggtacatcttgtcagacctctcagctgcgttccatctaccatgccattctggggccgtccctctgattggcccgagctccctcagcccgagtcgcggcgctccaaggaagggggcggagtctctatgttgcgtcaccacccttcccgacaccccgccggtgcttcccaatctagccattcacaagcccacttcgagaggccctgtgtgacgtcacgacacgctcccgccaaccgcggcggcgaggggcgggactccacggccctctcaccgctcctaccctgtgcctccccgaactccttctgcccctcctcttccctctcgccccttcccccttcagttcggtttcaaaagacgcgtgcccaatgaataacagggtcgacccagagtggcggccgcgtccaccaattcgcggacggcgagggcggagcgtccgcaacgagcctctgacgccgggcggcgtgtgacgcagtcgggccctctgcgcgctgcgcccgaagcggcggtcggtggcaggggtggtagcggcggcggcgacggtttcgtgggggccgcgcgctgctctgtgagcggcgggtggcagcaggggactcctgacacttccccttccccaccgaaccgcgctttctgaaacaaagactcattttgaagatgtttaacaaatcatttggaacaccctttgggggtggcacaggtggctttggcacaacttcaacatttggacagaatactggctttggcactactagtggaggggcatttggaacatctgcatttggttctagcaacaatactggaggcctctttggaaattcacagactaaaccaggaggattgtttggaaccagttcatttagccagccagctacctccacaagcactggctttgggtttggtacgtcaacaggaacagcaaataccttgtttggaactgcaagcacagggaccagtctcttctcatcccaaaacaatgcctttgcacaaaataaaccaactggctttggcaattttggaaccagtactagcagtggaggactctttggaaccacaaataccacctctaatccttttggcagcacatctggctccctctttgggccaagtagttttacagctgctcctactgggactactattaaatttaaccctccaactggtacagatactatggtcaaagctggagttagcactaacataagtaccaagcaccagtgtattactgctatgaaagaatatgaaagcaagtcactagaggaacttcgtttagaggattatcaggctaacaggaagggcccacagaaccaggtgggagcaggtaccacaactggcttgtttgggtcttctccagccacttccagcgcaacaggactcttcagctcctccaccactaattcaggctttgcatatggtcagaacaaaactgcctttggaactagtacaactggatttggaacaaatccaggtggtctctttggccaacagaatcagcagactaccagcctcttcagcaaaccatttggccaggctacaaccacccagaacactggcttttcctttggtaataccagcaccataggacagccaagcaccaacaccatgggattatttggagtaacccaagcctcacagcctggaggtctttttgggacagctacaaacaccagcactgggacagcatttggaacaggaacaggtctctttgggcagaccaatactggatttggtgctgttggttcgaccctgtttggcaataacaagcttactacatttggaagcagcacaaccagtgcaccttcatttggtacaaccagtggcgggctctttggtaacaaaccaaccctgactttaggaaccaatacaaacacttctaattttggttttggcacaaataccagtgggaatagtatttttggaagtaaaccagcacctgggactcttggaactgggcttggtgcaggatttggaacagctcttggtgctggacaggcatctttgtttgggaacaaccaacctaagattggagggcctcttggtacaggagcctttggggcccctggatttaatactacgacagccactttgggctttggagccccccaggccccagtagctttgacagatccaaatgcttctgctgcccagcaggctgttctccagcagcacatcaatagtctaacatactcaccttttggagactctcctctcttccggaatccgatgtcagaccctaagaagaaggaagagagattgaaaccaacaaatccagcagcccagaaggctcttactacacctactcattataaactgacaccccgccctgccactagagtccggccaaaggctttacaaacaacaggcacagccaagtcacatctctttgatgggctggatgacgatgaaccatccctagccaatggagcattcatgcccaagaagagcattaagaagttggttttgaagaaccttaataatagcaatctcttttctcctgttaatcgtgattcagaaaatctagcttcaccatctgaatatccagaaaatggagagagatttagtttcctaagcaaacctgttgatgagaatcaccagcaggatggagatgaagattcccttgtttcacatttttatactaaccctattgccaaacctattcctcaaaccccagaaagtgctggaaataaacacagcaacagcaacagtgtggatgataccattgttgcattaaacatgcgtgctgctttgcgaaatgggctggaaggaagcagtgaagaaacgtcttttcatgatgagtcacttcaggatgaccgagaagaaatagaaaataattcttaccatatgcacccagcaggtattattctcactaaggttggttactatactattccatctatggatgaccttgctaaaattaccaatgaaaaaggagagtgcattgtctctgatttcactattggtcggaaaggttatggttcaatctattttgaaggagatgtgaatttgacaaatctaaatttggatgatattgtgcatatccggaggaaagaagtagttgtctacttagatgataaccaaaaaccacctgtgggtgaagggctaaataggaaggctgaagttacattggatggagtttggccaacagataaaacatctcgttgtttaataaagagcccagatcgccttgctgatatcaactatgaaggaagattggaagcagtttcaaggaaacagggagctcaattcaaagaataccggcctgaaactggttcttgggtgtttaaggtctcccatttttctaagtatggccttcaggattctgatgaagaggaggaggagcatccgtctaaaactagtacaaagaagttgaagactgctcctttgcctcctgcaagccagactacgcccttgcagatggctcttaatggcaaacctgcacctccacctcagagccagagcccagaggtggagcagttagggagggttgtggaactggacagtgacatggtagatatcacccaggagccagttttggataccatgttagaagagagcatgcctgaggatcaggaacctgtgtctgcctcaacacatattgcatcttcactgggaattaatccacatgtcttacagatcatgaaagcatcattgcttactgatgaagaagatgtagatatggcactggatcaacgcttcagtcgcctgccttccaaagcagatacttctcaagaaatctgttctcccagactccccatttcagcatcccactcgtcgaaaactcgttcactagttggtgggttactacaatcaaaatttacaagtggagcttttctttcaccaagtgtctctgtgcaagaatgtcgtactcccagagcagcatctttaatgaatatcccatccacatcctcttgcctaactgagtccccattcaaagttcacttagaaaaactcagtttgagacaaagaaagccagatgaagacatgaaattatatcagacacctctggagctcaaattaaaacacagcactgtccatgtggatgaactgtgtcctctcattgtccccaatctgggagttgctgtcattcatgactatgcagattgggttaaagaagcatcaggagacttaccagaagcacaaattgtgaagcactggagcctgacatggacactatgtgaagccctatggggccacctgaaggagcttgacagccagctaaatgaaccccgtgaatacattcaaattctggagcgaagaagagctttctcccgctggctatcctgtactgccacacctcagattgaagaggaagtctccttaacccaaaaaaacagccctgtggaggctgtattcagctacctcacaggcaaaaggatcagtgaggcctgctctctggcccagcagtcaggggatcatcgtcttgctcttcttttatctcagtttgtgggtagccagtcagtccgggagctgctcaccatgcagttggtggactggcatcagctccaagcagactccttcatccaggatgagagactgcgcatctttgctctgttggctggaaaaccggtgtggcagctctcagaaaagaagcaaataaacgtgtgctcccagttggattggaaacgctccctggctatccatctttggtatttgcttccaccaacagcctccatttctagggcgctcagcatgtatgaagaagcatttcagaatacctctgacagtgacagatatgcctgctccccacttccttcgtatctggagggttctggctgtgtgatagcggaggagcaaaactcacagacaccacttcgagatgtctgctttcaccttctaaaactctacagtgacagacattatgatctcaaccagctgctggagcctcgaagcataacagcagatcctttggactaccgcctaagctggcacttgtgggaagtgctgagggctcttaactacacccatctctcagcgcagtgtgaaggtgtgctacaggccagttacgctggccagcttgaaagtgaggggctctgggagtgggccatctttgtcctcctgcacattgacaactcaggcatacgtgagaaggctgttcgagagctgcttacccggcactgccagctgttggagacccctgaatcttgggctaaagagactttccttacccagaagctccgtgtacctgccaaatggatccacgaggccaaagctgtgcgagcacacatggaatctgacaagcacttagaggccctttgcttatttaaggctgagcactggaaccgctgccacaagctcatcatccgacacttagcttctgatgccatcattaatgagaactatgactacctgaaggggttcttggaagacctggcacctccagagcgcagcagcctaattcaggattgggaaacatctgggcttgtttacctggactatattagagtcattgaaatgctccgccatatacagcaggtggattgctcaggtaatgacctggagcagttacacatcaaagtgacttcactgtgcagtcggatagagcagattcagtgttacagtgctaaagatcgcctggctcagtcagacatggccaaacgtgtagccaacctgctgcgcgtggtgctgagtctgcatcatcctcctgatagaacctccgactcaacaccagaccctcagcgagtccctttgcgcctcttggctccccacattggccggcttcccatgcctgaggactatgccatggacgaactgcgcagccttacccagtcctatctgcgagaactggctgttgggagcctgtgagccccaggcactttgcatcacagtcacatgcccattcacaccacacagaggttccctgccttgtttggattggcactgtttgccattctctgggttggctgtggcatctaccctccctccctgctgccagaagcagcatcctccacttgttcagggcttttcttaatactgaacgtagcataagggcttctggaacccagaagaggagacagtttaccatcctcaagatcattcagtgtttttcctttaaaaaaatggtcaataaagctcctttggcagaatcccccaaagaaccagggtattctttttccatccctagccattctggatcttgtgaccctccatgccaaccagcttccctactcctaccctggcccttttatactaggactccttaggaggagtgagacaggtgataatggatccttaacagatgaactatccacagaaggaagagggatccgtctcttaagtaattggttagttaacactgaattttggaggcaaaggagggttggcctgagttaggaaacaaaatgggatctttctgacacacttagggcagaagtgaatgcctgtcacggagggattgatcttcagggctgtttttgttcctgcctttagagttccatgaacaccatacctttgctactactatgtgcaggaacccttggtcacatgtgacatgtctgtgggaagctcccagagtttggtttggtccctggttttcagtcttgctgagactctgtctggatttgcctgcagagtttggataaaaaatggcaggttgggtaaccctccctgttcatcccatgttagctccaaagcatttcccaccctccatctaccccttccagaagcaaaaacaaaccatgactgaggcaggcatggagttgggcgttaggggcaggcagagggcctttgctacactgctgacagctatagggagccccaggtaatggcatgagatagctggtgttagggctatctcaggcaatatggccacacctgggtctttatgcatgaagataatgtaaaggtttttattaaaaaatatatatatgtataaataaatgatctagatattttcctctttttctgaagctactttcttaaaaaataaataaaatgtttatagcattcctg

SEQ ID NO: 737059 - DNA, 9691 bp, Homo sapiens
tgttggcccaaaaaaaaaatttattttcctttcaaataaaatgtacaaccaaaatttagggtttggagcagtagggaagacaggagataccagggagcccattttacagtagagatctgcatctgacccctctatcccatacctttgcaaaggaggggaggggtctacaagccagaactttcagaagagaagaaaatacatgctgtgctggtgctgtttctggagcaggtcatcctttaggtatagaacaccacctccacccgatgacatcagaaccactgactggtagagtccttggaaatcatacagtccacccatcccccgccagacacatggacacaccgaggctcagatggggaagggtacataccctagggcacacaccaaatcaaaaaggtgaagtcaggactagaacacctgagcaactttagcaggggactgtggccacaggcctggatgtgcacagtagatcatgaaatacattagtcctatgaatgacccccgtgcagagaaatggctgtggttgtcagggagcagccactgctcaggggctcctgacctcagtgaaaggtgactgtgtaaaggccagaaactggatggtggtcatgaacctcaggacgtttttttttttagcaccaaatggtggagctctctgccagctcagcttcttggggcctctcaggtaaaggtgatgtttgaggaccccacgcccatatgaggggtggagaggagaagccagcagcactggggtgagccttggcctacacccttccttcttacccttcccccatcttcagtaaggccaagagaggatgtggggtggggaaggccagaatggtatcgtgtttcttgtttctgggcagtgggctgcgtcctcccaagcaggactgaagggttcagaatcgcttttcctcaggctgagaggttatgagcagctccttgttcccgaagtcccaccaggccgtcatgtggaacgccatgttggttaagacaacagtgtactccaggatggcaaagatggtgtacactccagcctcacaatacatgttgtgccgaaagtagacagccagcgccgagaagaaggagatgaagttgatgatgaagagccgctgtttccagctgtaggacttgcgatcctagggaatgggctgtctgatcactctgcagcttgctgggtatgagagcgtgggctcccctctcagccctaactcctaagggctgggccttatctcccttggctcccactagcggtcatggaagggagcacaggcaggggcagcaagaatgacgactatgtgttcacgtccctgcctctgggggagtgatgggccgaggagcagtggtattcctgccgcttccacttcagggggatggagtatgaaagttacatggagtcacccaccaaccccacctccaaatactgtgggggaaaagaaacccatgtacatgggtggggcgctggaattatgacagaccagtcctctgacactgttcctaactcactgccgcctagatgcgactcctcattctatccccatttgcagcctccatctcttctattctccagtctcccacactacccaaacacagtgctatagtcctagattctgaccaaccaccctcagtttgttcccaagccccagccccaaccccagcacccctctgccagggttcccattagaactcagttcccacctcaccattacccgaatcctgaggacagatgtccttgattttcttctgggctgccttggagcccccgctagggatagaccgtacctctcctgacttactgtgtgcttcttggtcaaccgccagagaatgcaggtgaggagcatgtgcccgagggatgaggcaatgaacacaatgaaagcattttcgtggatggctggagggaaagaggattgggagccacattgcagggagtgcccacaccacgaagtaggaaggtccgaatgtggtaggggcaggcccgtcccctcagggaacacttccccactcctccctcatccaggcacccactgaagtcctcggaggaggagacataagtgagcactagcaacgcgaggttctccacgacattgaggccgaagttgaggcggcagagcgggcgatagcaggaacacggggaggtgcagctgaggtagtggttccagtaggcgaaggccaccaagaagcgaggcgccgagtgcaggccgatgcagaaacgccacacgtagcgctggggcacctccccgccgatggctgagctcaccgagggcaggtaattgggcacctagagagttgtgacctgtctgggcatctgcctctgccagccccgcccatgtggagaaccttctctccatctgacaaaatcactcttgcctctgctccagcccctccccttccaagaagtcctccttcagatgtccccatacctctcccaaaagacctctccttccaggtcctaggcccaaagtgctggattctcattccccagctatcctgggatttgtgcagcagcatggtggcaccttctccatctcccccgcagactggaacctgcctggggtagtctaaggaaatgaccatgttcttgtgcatctccaccatccatcttaatgcctggaactcctattgaagcttcagtccccacagtgtgtggccgttgtctccttgaagtggaagagcagggaccagaggatgcagaagaggaaggcgacaagtggacagcagaccgtgaccagggccaccatggtgaagcggagccgtaccagggtcccatcccgatccagtggtagtgggacctggtacatcttgtcagacctctcagctgcgttccatctaccatgccattctggggccgtccctctgattggcccgagctccctcagcccgagtcgcggcgctccaaggaagggggcggagtctctatgttgcgtcaccacccttcccgacaccccgccggtgcttcccaatctagccattcacaagcccacttcgagaggccctgtgtgacgtcacgacacgctcccgccaaccgcggcggcgaggggcgggactccacggccctctcaccgctcctaccctgtgcctccccgaactccttctgcccctcctcttccctctcgccccttcccccttcagttcggtttcaaaagacgcgtgcccaatgaataacagggtcgacccagagtggcggccgcgtccaccaattcgcggacggcgagggcggagcgtccgcaacgagcctctgacgccgggcggcgtgtgacgcagtcgggccctctgcgcgctgcgcccgaagcggcggtcggtggcaggggtggtagcggcggcggcgacggtttcgtgggggccgcgcgctgctctgtgagcggcgggtggcagcaggggactcctgacacttccccttccccaccgaaccgcgctttctgaaacaaagactcattttgaagatgtttaacaaatcatttggaacaccctttgggggtggcacaggtggctttggcacaacttcaacatttggacagaatactggctttggcactactagtggaggggcatttggaacatctgcatttggttctagcaacaatactggaggcctctttggaaattcacagactaaaccaggaggattgtttggaaccagttcatttagccagccagctacctccacaagcactggctttgggtttggtacgtcaacaggaacagcaaataccttgtttggaactgcaagcacagggaccagtctcttctcatcccaaaacaatgcctttgcacaaaataaaccaactggctttggcaattttggaaccagtactagcagtggaggactctttggaaccacaaataccacctctaatccttttggcagcacatctggctccctctttgggccaagtagttttacagctgctcctactgggactactattaaatttaaccctccaactggtacagatactatggtcaaagctggagttagcactaacataagtaccaagcaccagtgtattactgctatgaaagaatatgaaagcaagtcactagaggaacttcgtttagaggattatcaggctaacaggaagggcccacagaaccaggtgggagcaggtaccacaactggcttgtttgggtcttctccagccacttccagcgcaacaggactcttcagctcctccaccactaattcaggctttgcatatggtcagaacaaaactgcctttggaactagtacaactggatttggaacaaatccaggtggtctctttggccaacagaatcagcagactaccagcctcttcagcaaaccatttggccaggctacaaccacccagaacactggcttttcctttggtaataccagcaccataggacagccaagcaccaacaccatgggattatttggagtaacccaagcctcacagcctggaggtctttttgggacagctacaaacaccagcactgggacagcatttggaacaggaacaggtctctttgggcagaccaatactggatttggtgctgttggttcgaccctgtttggcaataacaagcttactacatttggaagcagcacaaccagtgcaccttcatttggtacaaccagtggcgggctctttggtaacaaaccaaccctgactttaggaaccaatacaaacacttctaattttggttttggcacaaataccagtgggaatagtatttttggaagtaaaccagcacctgggactcttggaactgggcttggtgcaggatttggaacagctcttggtgctggacaggcatctttgtttgggaacaaccaacctaagattggagggcctcttggtacaggagcctttggggcccctggatttaatactacgacagccactttgggctttggagccccccaggccccagtagctttgacagatccaaatgcttctgctgcccagcaggctgttctccagcagcacatcaatagtctaacatactcaccttttggagactctcctctcttccggaatccgatgtcagaccctaagaagaaggaagagagattgaaaccaacaaatccagcagcccagaaggctcttactacacctactcattataaactgacaccccgccctgccactagagtccggccaaaggctttacaaacaacaggcacagccaagtcacatctctttgatgggctggatgacgatgaaccatccctagccaatggagcattcatgcccaagaagagcattaagaagttggttttgaagaaccttaataatagcaatctcttttctcctgttaatcgtgattcagaaaatctagcttcaccatctgaatatccagaaaatggagagagatttagtttcctaagcaaacctgttgatgagaatcaccagcaggatggagatgaagattcccttgtttcacatttttatactaaccctattgccaaacctattcctcaaaccccagaaagtgctggaaataaacacagcaacagcaacagtgtggatgataccattgttgcattaaacatgcgtgctgctttgcgaaatgggctggaaggaagcagtgaagaaacgtcttttcatgatgagtcacttcaggatgaccgagaagaaatagaaaataattcttaccatatgcacccagcaggtattattctcactaaggttggttactatactattccatctatggatgaccttgctaaaattaccaatgaaaaaggagagtgcattgtctctgatttcactattggtcggaaaggttatggttcaatctattttgaaggagatgtgaatttgacaaatctaaatttggatgatattgtgcatatccggaggaaagaagtagttgtctacttagatgataaccaaaaaccacctgtgggtgaagggctaaataggaaggctgaagttacattggatggagtttggccaacagataaaacatctcgttgtttaataaagagcccagatcgccttgctgatatcaactatgaaggaagattggaagcagtttcaaggaaacagggagctcaattcaaagaataccggcctgaaactggttcttgggtgtttaaggtctcccatttttctaagtatggccttcaggattctgatgaagaggaggaggagcatccgtctaaaactagtacaaagaagttgaagactgctcctttgcctcctgcaagccagactacgcccttgcagatggctcttaatggcaaacctgcacctccacctcagagccagagcccagaggtggagcagttagggagggttgtggaactggacagtgacatggtagatatcacccaggagccagttttggataccatgttagaagagagcatgcctgaggatcaggaacctgtgtctgcctcaacacatattgcatcttcactgggaattaatccacatgtcttacagatcatgaaagcatcattgcttactgatgaagaagatgtagatatggcactggatcaacgcttcagtcgcctgccttccaaagcagatacttctcaagaaatctgttctcccagactccccatttcagcatcccactcgtcgaaaactcgttcactagttggtgggttactacaatcaaaatttacaagtggagcttttctttcaccaagtgtctctgtgcaagaatgtcgtactcccagagcagcatctttaatgaatatcccatccacatcctcttgcctaactgagtccccattcaaagttcacttagaaaaactcagtttgagacaaagaaagccagatgaagacatgaaattatatcagacacctctggagctcaaattaaaacacagcactgtccatgtggatgaactgtgtcctctcattgtccccaatctgggagttgctgtcattcatgactatgcagattgggttaaagaagcatcaggagacttaccagaagcacaaattgtgaagcactggagcctgacatggacactatgtgaagccctatggggccacctgaaggagcttgacagccagctaaatgaaccccgtgaatacattcaaattctggagcgaagaagagctttctcccgctggctatcctgtactgccacacctcagattgaagaggaagtctccttaacccaaaaaaacagccctgtggaggctgtattcagctacctcacaggcaaaaggatcagtgaggcctgctctctggcccagcagtcaggggatcatcgtcttgctcttcttttatctcagtttgtgggtagccagtcagtccgggagctgctcaccatgcagttggtggactggcatcagctccaagcagactccttcatccaggatgagagactgcgcatctttgctctgttggctggaaaaccggtgtggcagctctcagaaaagaagcaaataaacgtgtgctcccagttggattggaaacgctccctggctatccatctttggtatttgcttccaccaacagcctccatttctagggcgctcagcatgtatgaagaagcatttcagaatacctctgacagtgacagatatgcctgctccccacttccttcgtatctggagggttctggctgtgtgatagcggaggagcaaaactcacagacaccacttcgagatgtctgctttcaccttctaaaactctacagtgacagacattatgatctcaaccagctgctggagcctcgaagcataacagcagatcctttggactaccgcctaagctggcacttgtgggaagtgctgagggctcttaactacacccatctctcagcgcagtgtgaaggtgtgctacaggccagttacgctggccagcttgaaagtgaggggctctgggagtgggccatctttgtcctcctgcacattgacaactcaggcatacgtgagaaggctgttcgagagctgcttacccggcactgccagctgttggagacccctgaatcttgggctaaagagactttccttacccagaagctccgtgtacctgccaaatggatccacgaggccaaagctgtgcgagcacacatggaatctgacaagcacttagaggccctttgcttatttaaggctgagcactggaaccgctgccacaagctcatcatccgacacttagcttctgatgccatcattaatgagaactatgactacctgaaggggttcttggaagacctggcacctccagagcgcagcagcctaattcaggattgggaaacatctgggcttgtttacctggactatattagagtcattgaaatgctccgccatatacagcaggtggattgctcaggtaatgacctggagcagttacacatcaaagtgacttcactgtgcagtcggatagagcagattcagtgttacagtgctaaagatcgcctggctcagtcagacatggccaaacgtgtagccaacctgctgcgcgtggtgctgagtctgcatcatcctcctgatagaacctccgactcaacaccagaccctcagcgagtccctttgcgcctcttggctccccacattggccggcttcccatgcctgaggactatgccatggacgaactgcgcagccttacccagtcctatctgcgagaactggctgttgggagcctgtgagccccaggcactttgcatcacagtcacatgcccattcacaccacacagaggttccctgccttgtttggattggcactgtttgccattctctgggttggctgtggcatctaccctccctccctgctgccagaagcagcatcctccacttgttcagggcttttcttaatactgaacgtagcataagggcttctggaacccagaagaggagacagtttaccatcctcaagatcattcagtgtttttcctttaaaaaaatggtcaataaagctcctttggcagaatcccccaaagaaccagggtattctttttccatccctagccattctggatcttgtgaccctccatgccaaccagcttccctactcctaccctggcccttttatactaggactccttaggaggagtgagacaggtgataatggatccgtctcttaagtaattggttagttaacactgaattttggaggcaaaggagggttggcctgagttaggaaacaaaatgggatctttctgacacacttagggcagaagtgaatgcctgtcacggagggattgatcttcagggctgtttttgttcctgcctttagagttccatgaacaccatacctttgctactactatgtgcaggaacccttggtcacatgtgacatgtctgtgggaagctcccagagtttggtttggtccctggttttcagtcttgctgagactctgtctggatttgcctgcagagtttggataaaaaatggcaggttgggtaaccctccctgttcatcccatgttagctccaaagcatttcccaccctccatctaccccttccagaagcaaaaacaaaccatgactgaggcaggcatggagttgggcgttaggggcaggcagagggcctttgctacactgctgacagctatagggagccccaggtaatggcatgagatagctggtgttagggctatctcaggcaatatggccacacctgggtctttatgcatgaagataatgtaaaggtttttattaaaaaatatatatatgtataaataaatgatctagatattttcctctttttctgaagctactttcttaaaaaataaataaaatgtttatagcattcctg

SEQ ID NO: 737060 - DNA, 8879 bp, Homo sapiens
tgttggcccaaaaaaaaaatttattttcctttcaaataaaatgtacaaccaaaatttagggtttggagcagtagggaagacaggagataccagggagcccattttacagtagagatctgcatctgacccctctatcccatacctttgcaaaggaggggaggggtctacaagccagaactttcagaagagaagaaaatacatgctgtgctggtgctgtttctggagcaggtcatcctttaggtatagaacaccacctccacccgatgacatcagaaccactgactggtagagtccttggaaatcatacagtccacccatcccccgccagacacatggacacaccgaggctcagatggggaagggtacataccctagggcacacaccaaatcaaaaaggtgaagtcaggactagaacacctgagcaactttagcaggggactgtggccacaggcctggatgtgcacagtagatcatgaaatacattagtcctatgaatgacccccgtgcagagaaatggctgtggttgtcagggagcagccactgctcaggggctcctgacctcagtgaaaggtgactgtgtaaaggccagaaactggatggtggtcatgaacctcaggacgtttttttttttagcaccaaatggtggagctctctgccagctcagcttcttggggcctctcaggtaaaggtgatgtttgaggaccccacgcccatatgaggggtggagaggagaagccagcagcactggggtgagccttggcctacacccttccttcttacccttcccccatcttcagtaaggccaagagaggatgtggggtggggaaggccagaatggtatcgtgtttcttgtttctgggcagtgggctgcgtcctcccaagcaggactgaagggttcagaatcgcttttcctcaggctgagaggttatgagcagctccttgttcccgaagtcccaccaggccgtcatgtggaacgccatgttggttaagacaacagtgtactccaggatggcaaagatggtgtacactccagcctcacaatacatgttgtgccgaaagtagacagccagcgccgagaagaaggagatgaagttgatgatgaagagccgctgtttccagctgtaggacttgcgatcctagggaatgggctgtctgatcactctgcagcttgctgggtatgagagcgtgggctcccctctcagccctaactcctaagggctgggccttatctcccttggctcccactagcggtcatggaagggagcacaggcaggggcagcaagaatgacgactatgtgttcacgtccctgcctctgggggagtgatgggccgaggagcagtggtattcctgccgcttccacttcagggggatggagtatgaaagttacatggagtcacccaccaaccccacctccaaatactgtgggggaaaagaaacccatgtacatgggtggggcgctggaattatgacagaccagtcctctgacactgttcctaactcactgccgcctagatgcgactcctcattctatccccatttgcagcctccatctcttctattctccagtctcccacactacccaaacacagtgctatagtcctagattctgaccaaccaccctcagtttgttcccaagccccagccccaaccccagcacccctctgccagggttcccattagaactcagttcccacctcaccattacccgaatcctgaggacagatgtccttgattttcttctgggctgccttggagcccccgctagggatagaccgtacctctcctgacttactgtgtgcttcttggtcaaccgccagagaatgcaggtgaggagcatgtgcccgagggatgaggcaatgaacacaatgaaagcattttcgtggatggctggagggaaagaggattgggagccacattgcagggagtgcccacaccacgaagtaggaaggtccgaatgtggtaggggcaggcccgtcccctcagggaacacttccccactcctccctcatccaggcacccactgaagtcctcggaggaggagacataagtgagcactagcaacgcgaggttctccacgacattgaggccgaagttgaggcggcagagcgggcgatagcaggaacacggggaggtgcagctgaggtagtggttccagtaggcgaaggccaccaagaagcgaggcgccgagtgcaggccgatgcagaaacgccacacgtagcgctggggcacctccccgccgatggctgagctcaccgagggcaggtaattgggcacctagagagttgtgacctgtctgggcatctgcctctgccagccccgcccatgtggagaaccttctctccatctgacaaaatcactcttgcctctgctccagcccctccccttccaagaagtcctccttcagatgtccccatacctctcccaaaagacctctccttccaggtcctaggcccaaagtgctggattctcattccccagctatcctgggatttgtgcagcagcatggtggcaccttctccatctcccccgcagactggaacctgcctggggtagtctaaggaaatgaccatgttcttgtgcatctccaccatccatcttaatgcctggaactcctattgaagcttcagtccccacagtgtgtggccgttgtctccttgaagtggaagagcagggaccagaggatgcagaagaggaaggcgacaagtggacagcagaccgtgaccagggccaccatggtgaagcggagccgtaccagggtcccatcccgatccagtggtagtgggacctggtacatcttgtcagacctctcagctgcgttccatctaccatgccattctggggccgtccctctgattggcccgagctccctcagcccgagtcgcggcgctccaaggaagggggcggagtctctatgttgcgtcaccacccttcccgacaccccgccggtgcttcccaatctagccattcacaagcccacttcgagaggccctgtgtgacgtcacgacacgctcccgccaaccgcggcggcgaggggcgggactccacggccctctcaccgctcctaccctgtgcctccccgaactccttctgcccctcctcttccctctcgccccttcccccttcagttcggtttcaaaagacgcgtgcccaatgaataacagggtcgacccagagtggcggccgcgtccaccaattcgcggacggcgagggcggagcgtccgcaacgagcctctgacgccgggcggcgtgtgacgcagtcgggccctctgcgcgctgcgcccgaagcggcggtcggtggcaggggtggtagcggcggcggcgacggtttcgtgggggccgcgcgctgctctgtgagcggcgggtggcagcaggggactcctgacacttccccttccccaccgaaccgcgctttctgaaacaaagactcattttgaagatgtttaacaaatcatttggaacaccctttgggggtggcacaggtggctttggcacaacttcaacatttggacagaatactggctttggcactactagtggaggggcatttggaacatctgcatttggttctagcaacaatactggaggcctctttggaaattcacagactaaaccaggaggattgtttggaaccagttcatttagccagccagctacctccacaagcactggctttgggtttggtacgtcaacaggaacagcaaataccttgtttggaactgcaagcacagggaccagtctcttctcatcccaaaacaatgcctttgcacaaaataaaccaactggctttggcaattttggaaccagtactagcagtggaggactctttggaaccacaaataccacctctaatccttttggcagcacatctggctccctctttgggccaagtagttttacagctgctcctactgggactactattaaatttaaccctccaactggtacagatactatggtcaaagctggagttagcactaacataagtaccaagcaccagtgtattactgctatgaaagaatatgaaagcaagtcactagaggaacttcgtttagaggattatcaggctaacaggaagggcccacagaaccaggtgggagcaggtaccacaactggcttgtttgggtcttctccagccacttccagcgcaacaggactcttcagctcctccaccactaattcaggctttgcatatggtcagaacaaaactgcctttggaactagtacaactggatttggaacaaatccaggtggtctctttggccaacagaatcagcagactaccagcctcttcagcaaaccatttggccaggctacaaccacccagaacactggcttttcctttggtaataccagcaccataggacagccaagcaccaacaccatgggattatttggagtaacccaagcctcacagcctggaggtctttttgggacagctacaaacaccagcactgggacagcatttggaacaggaacaggtctctttgggcagaccaatactggatttggtgctgttggttcgaccctgtttggcaataacaagcttactacatttggaagcagcacaaccagtgcaccttcatttggtacaaccagtggcgggctctttggtaacaaaccaaccctgactttaggaaccaatacaaacacttctaattttggttttggcacaaataccagtgggaatagtatttttggaagtaaaccagcacctgggactcttggaactgggcttggtgcaggatttggaacagctcttggtgctggacaggcatctttgtttgggaacaaccaacctaagattggagggcctcttggtacaggagcctttggggcccctggatttaatactacgacagccactttgggctttggagccccccaggccccagtagctttgacagatccaaatgcttctgctgcccagcaggctgttctccagcagcacatcaatagtctaacatactcaccttttggagactctcctctcttccggaatccgatgtcagaccctaagaagaaggaagagagattgaaaccaacaaatccagcagcccagaaggctcttactacacctactcattataaactgacaccccgccctgccactagagtccggccaaaggctttacaaacaacaggcacagccaagtcacatctctttgatgggctggatgacgatgaaccatccctagccaatggagcattcatgcccaagaagagcattaagaagttggttttgaagaaccttaataatagcaatctcttttctcctgttaatcgtgattcagaaaatctagcttcaccatctgaatatccagaaaatggagagagatttagtttcctaagcaaacctgttgatgagaatcaccagcaggatggagatgaagattcccttgtttcacatttttatactaaccctattgccaaacctattcctcaaaccccagaaagtgctggaaataaacacagcaacagcaacagtgtggatgataccattgttgcattaaacatgcgtgctgctttgcgaaatgggctggaaggaagcagtgaagaaacgtcttttcatgatgagtcacttcaggatgaccgagaagaaatagaaaataattcttaccatatgcacccagcaggtattattctcactaaggttggttactatactattccatctatggatgaccttgctaaaattaccaatgaaaaaggagagtgcattgtctctgatttcactattggtcggaaaggttatggttcaatctattttgaaggagatgtgaatttgacaaatctaaatttggatgatattgtgcatatccggaggaaagaagtagttgtctacttagatgataaccaaaaaccacctgtgggtgaagggctaaataggaaggctgaagttacattggatggagtttggccaacagataaaacatctcgttgtttaataaagagcccagatcgccttgctgatatcaactatgaaggaagattggaagcagtttcaaggaaacagggagctcaattcaaagaataccggcctgaaactggttcttgggtgtttaaggtctcccatttttctaagtatggccttcaggattctgatgaagaggaggaggagcatccgtctaaaactagtacaaagaagttgaagactgctcctttgcctcctgcaagccagactacgcccttgcagatggctcttaatggcaaacctgcacctccacctcagagccagagcccagaggtggagcagttagggagggttgtggaactggacagtgacatggtagatatcacccaggagccagttttggataccatgttagaagagagcatgcctgaggatcaggaacctgtgtctgcctcaacacatattgcatcttcactgggaattaatccacatgtcttacagatcatgaaagcatcattgcttactgatgaagaagatgtagatatggcactggatcaacgcttcagtcgcctgccttccaaagcagatacttctcaagaaatctgttctcccagactccccatttcagcatcccactcgtcgaaaactcgttcactagttggtgggttactacaatcaaaatttacaagtggagcttttctttcaccaagtgtctctgtgcaagaatgtcgtactcccagagcagcatctttaatgaatatcccatccacatcctcttgcctaactgagtccccattcaaagttcacttagaaaaactcagtttgagacaaagaaagccagatgaagacatgaaattatatcagacacctctggagctcaaattaaaacacagcactgtccatgtggatgaactgtgtcctctcattgtccccaatctgggagttgctgtcattcatgactatgcagattgggttaaagaagcatcaggagacttaccagaagcacaaattgtgaagcactggagcctgacatggacactatgtgaagccctatggggccacctgaaggagcttgacagccagctaaatgaaccccgtgaatacattcaaattctggagcgaagaagagctttctcccgctggctatcctgtactgccacacctcagattgaagaggaagtctccttaacccaaaaaaacagccctgtggaggctgtattcagctacctcacaggcaaaaggatcagtgaggcctgctctctggcccagcagtcaggggatcatcgtcttgctcttcttttatctcagtttgtgggtagccagtcagtccgggagctgctcaccatgcagttggtggactggcatcagctccaagcagactccttcatccaggatgagagactgcgcatctttgctctgttggctggaaaaccggtgtggcagctctcagaaaagaagcaaataaacgtgtgctcccagttggattggaaacgctccctggctatccatctttggtatttgcttccaccaacagcctccatttctagggcgctcagcatgtatgaagaagcatttcagaatacctctgacagtgacagatatgcctgctccccacttccttcgtatctggagggttctggctgtgtgatagcggaggagcaaaactcacagacaccacttcgagatgtctgctttcaccttctaaaactctacagtgacagacattatgatctcaaccagctgctggagcctcgaagcataacagcagatcctttggactaccgcctaagctggcacttgtgggaagtgctgagggctcttaactacacccatctctcagcgcagtgtgaaggtgtgctacaggccagttacgctggccagcttgaaagtgaggggctctgggagtgggccatctttgtcctcctgcacattgacaactcaggcatacgtgagaaggctgttcgagagctgcttacccggcactgccagctgttggagacccctgaatcttgggctaaagagactttccttacccagaagctccgtgtacctgccaaatggatccacgaggccaaagctgtgcgagcacacatggaatctgacaagcacttagaggccctttgcttatttaaggctgagcactggaaccgctgccacaagctcatcatccgacacttagcttctgatgccatcattaatgagaactatgactacctgaaggggttcttggaagacctggcacctccagagcgcagcagcctaattcaggattgggaaacatctgggcttgtttacctggactatattagagtcattgaaatgctccgccatatacagcaggtggattgctcaggtaatgacctggagcagttacacatcaaagtgacttcactgtgcagtcggatagagcagattcagtgttacagtgctaaagatcgcctggctcagtcagacatggccaaacgtgtagccaacctgctgcgcgtggtgctgagtctgcatcatcctcctgatagaacctccgactcaacaccagaccctcagcgagtccctttgcgcctcttggctccccacattggccggcttcccatgcctgaggactatgccatggacgaactgcgcagccttacccagtcctatctgcgagaactggctgttgggagcctgtgagccccaggcactttgcatcacagtcacatgcccattcacaccacacagaggttccctgccttgtttggattggcactgtttgccattctctgggttggctgtggcatctaccctccctccctgctgccagaagcagcatcctccacttgttcagggcttttcttaatactgaacgtagcataagggcttctggaacccagaagaggagacagtttaccatcctcaagatcattcagtgtttttcctttaaaaaaatggtcaataaagctcctttgaaaaaaaaatatataatacaaa

SEQ ID NO: 737061 - DNA, 8902 bp, Homo sapiens
tgttggcccaaaaaaaaaatttattttcctttcaaataaaatgtacaaccaaaatttagggtttggagcagtagggaagacaggagataccagggagcccattttacagtagagatctgcatctgacccctctatcccatacctttgcaaaggaggggaggggtctacaagccagaactttcagaagagaagaaaatacatgctgtgctggtgctgtttctggagcaggtcatcctttaggtatagaacaccacctccacccgatgacatcagaaccactgactggtagagtccttggaaatcatacagtccacccatcccccgccagacacatggacacaccgaggctcagatggggaagggtacataccctagggcacacaccaaatcaaaaaggtgaagtcaggactagaacacctgagcaactttagcaggggactgtggccacaggcctggatgtgcacagtagatcatgaaatacattagtcctatgaatgacccccgtgcagagaaatggctgtggttgtcagggagcagccactgctcaggggctcctgacctcagtgaaaggtgactgtgtaaaggccagaaactggatggtggtcatgaacctcaggacgtttttttttttagcaccaaatggtggagctctctgccagctcagcttcttggggcctctcaggtaaaggtgatgtttgaggaccccacgcccatatgaggggtggagaggagaagccagcagcactggggtgagccttggcctacacccttccttcttacccttcccccatcttcagtaaggccaagagaggatgtggggtggggaaggccagaatggtatcgtgtttcttgtttctgggcagtgggctgcgtcctcccaagcaggactgaagggttcagaatcgcttttcctcaggctgagaggttatgagcagctccttgttcccgaagtcccaccaggccgtcatgtggaacgccatgttggttaagacaacagtgtactccaggatggcaaagatggtgtacactccagcctcacaatacatgttgtgccgaaagtagacagccagcgccgagaagaaggagatgaagttgatgatgaagagccgctgtttccagctgtaggacttgcgatcctagggaatgggctgtctgatcactctgcagcttgctgggtatgagagcgtgggctcccctctcagccctaactcctaagggctgggccttatctcccttggctcccactagcggtcatggaagggagcacaggcaggggcagcaagaatgacgactatgtgttcacgtccctgcctctgggggagtgatgggccgaggagcagtggtattcctgccgcttccacttcagggggatggagtatgaaagttacatggagtcacccaccaaccccacctccaaatactgtgggggaaaagaaacccatgtacatgggtggggcgctggaattatgacagaccagtcctctgacactgttcctaactcactgccgcctagatgcgactcctcattctatccccatttgcagcctccatctcttctattctccagtctcccacactacccaaacacagtgctatagtcctagattctgaccaaccaccctcagtttgttcccaagccccagccccaaccccagcacccctctgccagggttcccattagaactcagttcccacctcaccattacccgaatcctgaggacagatgtccttgattttcttctgggctgccttggagcccccgctagggatagaccgtacctctcctgacttactgtgtgcttcttggtcaaccgccagagaatgcaggtgaggagcatgtgcccgagggatgaggcaatgaacacaatgaaagcattttcgtggatggctggagggaaagaggattgggagccacattgcagggagtgcccacaccacgaagtaggaaggtccgaatgtggtaggggcaggcccgtcccctcagggaacacttccccactcctccctcatccaggcacccactgaagtcctcggaggaggagacataagtgagcactagcaacgcgaggttctccacgacattgaggccgaagttgaggcggcagagcgggcgatagcaggaacacggggaggtgcagctgaggtagtggttccagtaggcgaaggccaccaagaagcgaggcgccgagtgcaggccgatgcagaaacgccacacgtagcgctggggcacctccccgccgatggctgagctcaccgagggcaggtaattgggcacctagagagttgtgacctgtctgggcatctgcctctgccagccccgcccatgtggagaaccttctctccatctgacaaaatcactcttgcctctgctccagcccctccccttccaagaagtcctccttcagatgtccccatacctctcccaaaagacctctccttccaggtcctaggcccaaagtgctggattctcattccccagctatcctgggatttgtgcagcagcatggtggcaccttctccatctcccccgcagactggaacctgcctggggtagtctaaggaaatgaccatgttcttgtgcatctccaccatccatcttaatgcctggaactcctattgaagcttcagtccccacagtgtgtggccgttgtctccttgaagtggaagagcagggaccagaggatgcagaagaggaaggcgacaagtggacagcagaccgtgaccagggccaccatggtgaagcggagccgtaccagggtcccatcccgatccagtggtagtgggacctggtacatcttgtcagacctctcagctgcgttccatctaccatgccattctggggccgtccctctgattggcccgagctccctcagcccgagtcgcggcgctccaaggaagggggcggagtctctatgttgcgtcaccacccttcccgacaccccgccggtgcttcccaatctagccattcacaagcccacttcgagaggccctgtgtgacgtcacgacacgctcccgccaaccgcggcggcgaggggcgggactccacggccctctcaccgctcctaccctgtgcctccccgaactccttctgcccctcctcttccctctcgccccttcccccttcagttcggtttcaaaagacgcgtgcccaatgaataacagggtcgacccagagtggcggccgcgtccaccaattcgcggacggcgagggcggagcgtccgcaacgagcctctgacgccgggcggcgtgtgacgcagtcgggccctctgcgcgctgcgcccgaagcggcggtcggtggcaggggtggtagcggcggcggcgacggtttcgtgggggccgcgcgctgctctgtgagcggcgggtggcagcaggggactcctgacacttccccttccccaccgaaccgcgctttctgaaacaaagactcattttgaagatgtttaacaaatcatttggaacaccctttgggggtggcacaggtggctttggcacaacttcaacatttggacagaatactggctttggcactactagtggaggggcatttggaacatctgcatttggttctagcaacaatactggaggcctctttggaaattcacagactaaaccaggaggattgtttggaaccagttcatttagccagccagctacctccacaagcactggctttgggtttggtacgtcaacaggaacagcaaataccttgtttggaactgcaagcacagggaccagtctcttctcatcccaaaacaatgcctttgcacaaaataaaccaactggctttggcaattttggaaccagtactagcagtggaggactctttggaaccacaaataccacctctaatccttttggcagcacatctggctccctctttgggccaagtagttttacagctgctcctactgggactactattaaatttaaccctccaactggtacagatactatggtcaaagctggagttagcactaacataagtaccaagcaccagtgtattactgctatgaaagaatatgaaagcaagtcactagaggaacttcgtttagaggattatcaggctaacaggaagggcccacagaaccaggtgggagcaggtaccacaactggcttgtttgggtcttctccagccacttccagcgcaacaggactcttcagctcctccaccactaattcaggctttgcatatggtcagaacaaaactgcctttggaactagtacaactggatttggaacaaatccaggtggtctctttggccaacagaatcagcagactaccagcctcttcagcaaaccatttggccaggctacaaccacccagaacactggcttttcctttggtaataccagcaccataggacagccaagcaccaacaccatgggattatttggagtaacccaagcctcacagcctggaggtctttttgggacagctacaaacaccagcactgggacagcatttggaacaggaacaggtctctttgggcagaccaatactggatttggtgctgttggttcgaccctgtttggcaataacaagcttactacatttggaagcagcacaaccagtgcaccttcatttggtacaaccagtggcgggctctttggtaacaaaccaaccctgactttaggaaccaatacaaacacttctaattttggttttggcacaaataccagtgggaatagtatttttggaagtaaaccagcacctgggactcttggaactgggcttggtgcaggatttggaacagctcttggtgctggacaggcatctttgtttgggaacaaccaacctaagattggagggcctcttggtacaggagcctttggggcccctggatttaatactacgacagccactttgggctttggagccccccaggccccagtagctttgacagatccaaatgcttctgctgcccagcaggctgttctccagcagcacatcaatagtctaacatactcaccttttggagactctcctctcttccggaatccgatgtcagaccctaagaagaaggaagagagattgaaaccaacaaatccagcagcccagaaggctcttactacacctactcattataaactgacaccccgccctgccactagagtccggccaaaggctttacaaacaacaggcacagccaagtcacatctctttgatgggctggatgacgatgaaccatccctagccaatggagcattcatgcccaagaagagcattaagaagttggttttgaagaaccttaataatagcaatctcttttctcctgttaatcgtgattcagaaaatctagcttcaccatctgaatatccagaaaatggagagagatttagtttcctaagcaaacctgttgatgagaatcaccagcaggatggagatgaagattcccttgtttcacatttttatactaaccctattgccaaacctattcctcaaaccccagaaagtgctggaaataaacacagcaacagcaacagtgtggatgataccattgttgcattaaacatgcgtgctgctttgcgaaatgggctggaaggaagcagtgaagaaacgtcttttcatgatgagtcacttcaggatgaccgagaagaaatagaaaataattcttaccatatgcacccagcaggtattattctcactaaggttggttactatactattccatctatggatgaccttgctaaaattaccaatgaaaaaggagagtgcattgtctctgatttcactattggtcggaaaggttatggttcaatctattttgaaggagatgtgaatttgacaaatctaaatttggatgatattgtgcatatccggaggaaagaagtagttgtctacttagatgataaccaaaaaccacctgtgggtgaagggctaaataggaaggctgaagttacattggatggagtttggccaacagataaaacatctcgttgtttaataaagagcccagatcgccttgctgatatcaactatgaaggaagattggaagcagtttcaaggaaacagggagctcaattcaaagaataccggcctgaaactggttcttgggtgtttaaggtctcccatttttctaagtatggccttcaggattctgatgaagaggaggaggagcatccgtctaaaactagtacaaagaagttgaagactgctcctttgcctcctgcaagccagactacgcccttgcagatggctcttaatggcaaacctgcacctccacctcagagccagagcccagaggtggagcagttagggagggttgtggaactggacagtgacatggtagatatcacccaggagccagttttggataccatgttagaagagagcatgcctgaggatcaggaacctgtgtctgcctcaacacatattgcatcttcactgggaattaatccacatgtcttacagatcatgaaagcatcattgcttactgatgaagaagatgtagatatggcactggatcaacgcttcagtcgcctgccttccaaagcagatacttctcaagaaatctgttctcccagactccccatttcagcatcccactcgtcgaaaactcgttcactagttggtgggttactacaatcaaaatttacaagtggagcttttctttcaccaagtgtctctgtgcaagaatgtcgtactcccagagcagcatctttaatgaatatcccatccacatcctcttgcctaactgagtccccattcaaagttcacttagaaaaactcagtttgagacaaagaaagccagatgaagacatgaaattatatcagacacctctggagctcaaattaaaacacagcactgtccatgtggatgaactgtgtcctctcattgtccccaatctgggagttgctgtcattcatgactatgcagattgggttaaagaagcatcaggagacttaccagaagcacaaattgtgaagcactggagcctgacatggacactatgtgaagccctatggggccacctgaaggagcttgacagccagctaaatgaaccccgtgaatacattcaaattctggagcgaagaagagctttctcccgctggctatcctgtactgccacacctcagattgaagaggaagtctccttaacccaaaaaaacagccctgtggaggctgtattcagctacctcacaggcaaaaggatcagtgaggcctgctctctggcccagcagtcaggggatcatcgtcttgctcttcttttatctcagtttgtgggtagccagtcagtccgggagctgctcaccatgcagttggtggactggcatcagctccaagcagactccttcatccaggatgagagactgcgcatctttgctctgttggctggaaaaccggtgtggcagctctcagaaaagaagcaaataaacgtgtgctcccagttggattggaaacgctccctggctatccatctttggtatttgcttccaccaacagcctccatttctagggcgctcagcatgtatgaagaagcatttcagaatacctctgacagtgacagatatgcctgctccccacttccttcgtatctggagggttctggctgtgtgatagcggaggagcaaaactcacagacaccacttcgagatgtctgctttcaccttctaaaactctacagtgacagacattatgatctcaaccagctgctggagcctcgaagcataacagcagatcctttggactaccgcctaagctggcacttgtgggaagtgctgagggctcttaactacacccatctctcagcgcagtgtgaaggtgtgctacaggccagttacgctggccagcttgaaagtgaggggctctgggagtgggccatctttgtcctcctgcacattgacaactcaggcatacgtgagaaggctgttcgagagctgcttacccggcactgccagctgttggagacccctgaatcttgggctaaagagactttccttacccagaagctccgtgtacctgccaaatggatccacgaggccaaagctgtgcgagcacacatggaatctgacaagcacttagaggccctttgcttatttaaggctgagcactggaaccgctgccacaagctcatcatccgacacttagcttctgatgccatcattaatgagaactatgactacctgaaggggttcttggaagacctggcacctccagagcgcagcagcctaattcaggattgggaaacatctgggcttgtttacctggactatattagagtcattgaaatgctccgccatatacagcaggtggattgctcaggtaatgacctggagcagttacacatcaaagtgacttcactgtgcagtcggatagagcagattcagtgttacagtgctaaagatcgcctggctcagtcagacatggccaaacgtgtagccaacctgctgcgcgtggtgctgagtctgcatcatcctcctgatagaacctccgactcaacaccagaccctcagcgagtccctttgcgcctcttggctccccacattggccggcttcccatgcctgaggactatgccatggacgaactgcgcagccttacccagtcctatctgcgagaactggctgttgggagcctgtgagccccaggcactttgcatcacagtcacatgcccattcacaccacacagaggttccctgccttgtttggattggcactgtttgccattctctgggttggctgtggcatctaccctccctccctgctgccagaagcagcatcctccacttgttcagggcttttcttaatactgaacgtagcataagggcttctggaacccagaagaggagacagtttaccatcctcaagatcattcagtgtttttcctttaaaaaaatggtcaataaagctcctttgccgatgcgacaaggtttatatttctccctattactacgaccaaca

SEQ ID NO: 737062 - DNA, 1529 bp, Homo sapiens
  misc_feature (982)..(982): n is a, c, g, or t
gtgctaggcagtgaacacagggtatgaacttgaaaatctgattgcaccctcaatatctggaatatacactgatctatgacctgaaattgtatggactgcagcaatccaaggggacactaagcagggtttgagtaatgctacaatggatttataggtcattttggagaaggtgttccacatcattagggagtctgggtttcccagatgtgcctgttttatcctttttattttaaataacatcactgtctttcctaactaaaaattcttcatcttcaggaaataagattgagatacggactgaaaatataaaattagcaataatgtttattattagatacttcctcaattaaatttctccctgaaagtcttagggcaaaagcccctgtctcttacttcatatatcaagtttggaggggaaagacataattgcatagcagtattccatgaatataacttaatggggaactggcttcagagttcagcaatattgggaagtcttgtcaaatattaagtcattcatatgttcaaaaatattaatatgtattgagcatctaccatcaaatatttaatatgataatgccatactggatattatatacgagttacaataattcttcctaaagtcagggaaagcttcacagataaggttgagctgaaggtttggcaggcagggaagcaaggagaagttagcagagagaaaagcacaagcaacaccatggaggaacaaatgtgggcaattcaggtaactcgagtaatttagtgttactatgcatatggcctatggaggccaggagtgtaaatgtattatggctggggcggggggctagggaatgtgttatgactaaattgtatcccttcagaattcatattttgaagcactgatctccagtgtgtctgtgttcagaggcaggtcccatagggaggcaattaaggttacatgagatcataaaggtgaggccctaatcctataggtctgctgtcnttacaagaagaggaagagccaccggagctggctcattctgcacgtgtacagagaagaggccatgtgaggacacgcagaggctcgaatatgctctcaaccctatcagttgcctgctttaattcatcccatggaattgttttgtcttttcgacccctcggctatgttatttgtattgtgatataggggatattcggagtcctctgagacgggacaaggacactggacggtctattgtgccatgcttatatattttctgtatacaatgctttctgtataaaaccagtaatacctgagaaacaacagtaacttgacaaaattactattgatcacttaactttatgtatcacgtaagttaaactttatttatttacatgtgtctccctcattagatgctaagttccttgatattttatacatttgtgaattcctggtaattcacatgaagcttgatgcattgtaagtattctgacctggtgaaataaatatacgaatgggcaaaaaaatatatactaaaatgatcaaataaaggttgtgttcagaaacctct

SEQ ID NO: 737063 - DNA, 341 bp, Homo sapiens
gctcggtaccccttttggggtctttgctctagtctttaaggaaaattaattttactttttttttgttctggccgaaatttttatgagatatctctcacttgtcttccactttgaaccggttaaagctcatagctgtcagctctgaatgaggaggggagaagcccctgggtctttctttgaaaggaatccgctgcttgagggctgcctccctcatggtgtgcgtgtcgtttctcttcctgacgcatcttgtgatatcagaggtaactatgcaaagcatccaggcggttctgaatgtgaagcactacacccagcaaagaccccaaaaggggaaccgagctcga

SEQ ID NO: 737064 - DNA, 1043 bp, Homo sapiens
tagatgacaaatagtttttatttacttttgctctaagtagttcttctaactttgaataaaatgtctcttacatcatgaactaaatgaaatttgacatgccaaggctattccaggaggctgaaagtttggaggcagtaattctctactggggctgtctgccttaggacaaaattcactttattttgctttaggcccagttctaaggtttcccactagaaacaaattgctttttataccacagttcttatacaattatacatttggtagaatttataaggtgacaattgccaagaaatacagcctgaacacaggtgcagagtagagagagactgaaattcttcttggacccagcacttgagcagggataatttatgagtagttctgtttgccacactaaagcaacaccacccccagaatttcacaactcttgtttctcctcagttggcaaatgttgtttttggtttgctagttctgttttataaagatgtaaaagacttgcagtctttcatttaaaagacatccaactgagagagcgcgagtggaaatcatcgtgaatataattacaatgtgggcagtaataagcatttatactgcaagtttaatcatttacagctgacacatttaagagcccatttagttaccttgaacaaaagcaacagtgtggcatagtggttctcaatcctggctgactttagaatcacctggggagctttaaaaaggaaaaaaagagttcatgggcacagctcctggagactttgatttattctgtctgaggcagggctcaggcctctgtgtttaaacgccccagatgattctaatttgtagtcagacttgagaatgaccggtaaagcagaaggagcatgcgtttagagtgaaacgttggctcttctcttagggatcggcagagacttcactctcacaggctggcacggtgactgctctctctggttccaaaagcaaggtcagcctcatgaggcacctgcaacctcggcttttcctggggacaggattaagaatttttccactcattcgtttatttgacg

SEQ ID NO: 737065 - DNA, 3806 bp, Homo sapiens
tctgataatcccactgtaacagtttcaagtaactattatttagcaccaaagtagggctcaggcttggcttggaggtattttcggccccaggagttaaagcactctcagaaagagaaaataattcttcatttacagattcttttatccattctgtagtctgatcaagagcacttggagtttcttccaaaatttcctggaacttggttctctcatattccaccaactggcgttgaaggtgcggtctgagactcataattgtaaaattggccatgtccatttgcatgaggtccaggacatggaatatttgtctcagcacctccacgatgttgccagtagcctttaactctctgatatcattatctcgcacgggagcacacagctttcccatcgtactgatgacatagttggccaggccttggatgtcaacagcactgtgctcaggcctgctgcctaatgaggtctgtgtccaaaacttcacagatttggttgcgaagccggttgccaccgggagtgagaaaagagagaagaatctctctgatttcttcaaacagtttgatggcatgttcaaactcaggagggtcagcatttagttctgaatccaagacgtcccagaaggcctggtgaacaatgtgcttcactcgaccagccaaactcttttctgggagagcctcttgtttcaattgaaagttctcatttacagcaatctcatgagcaagagtcaagtttgataagttccttgctgtagccatcacttcatcaaatgttacaacccttggagggcttgttgaagcaggagagctggatttgctggaggagtcacttgtaaagctctgcctggagcattcatagtcactgagcgaagccatgctttcggaaaaccgggaagaatcagaatcgcttggctggtcctctcccacacactgcttctcgccattgaagggcattttgcgtcacttaagtgtgggtaaaaaggtagcacctgtgcttccccctctggggccctcaacctctcacaaaatggcattgaagctgcttccacacatgactgggtatcttcggccctgggcctcttcaaatcaggcaacttccactggctgtcagggtgatgcatgaaatccctagagaagagaggaaaaggaccacggcagggagcctcctcaagtgggaaccactgagattaactcattatccgttggcagagagggcttctcactctattgcccaggctgatgtgcagtagccattcactggtgagatcatcacgcgctacagcatcaaactcctggcctcaagtgatccccctgcctcagcctccgaagtagctgggattacaggtgcagtctttgcaagccacatttggaacttttgagtccatcttgagaagctcccaacataaacaagacctcacagagaaagctgtgaagcaaggggagagtgaggtcagccggatcagcgaagtgctgcagaaactccagaatgagattctcaaagacctctcggatgggatccatgtggtgaaggacgcccgggagcgggacttcacgtccctggagaacacggtggaggagcggctgacggagctcaccaaatccatcaacgacaacatcgccatcttcacagaagtccagaagaggagccagaaggagatcaatgacatgaaggcaaaggttgcctccctggaagaatctgaggggaacaagcaggatttgaaagccttaaaggaagctgtgaaggagatacagacctcagccaagtccagagagtgggacatggaggccctgagaagtacccttcagactatggagtctgacatctacaccgaggtccgcgagctggtgagcctcaagcaggagcagcaggctttcaaggaggcggccgacacggagcggctcgccctgcaggccctcacggagaagcttctcaggtctgaggagtccgtctcccgcctcccggaggagatccggagactggaggaagagctccgccagctgaagtccgattcccacgggccgaaggaggacggaggcttcagacactcggaagcctttgaggcactccagcaaaagagtcagggactggactccaggctccagcacgtggaggatggggtgctctccatgcaggtggcttctgcgcgccagaccgagagcctggagtccctcctgtccaagagccaggagcacgagcagcgcctggccgccctgcaggggcgcctggaaggcctcgggtcctcagaggcagaccaggatggcctggccagcacggtgaggagcctgggcgagacccagctggtgctctacggtgacgtggaggagctgaagaggagtgtgggcgagctccccagcaccgtggaatcactccagaaggtgcaggagcaggtgcacacgctgctcagtcaggaccaagcccaggccgcccgtctgcctcctcaggacttcctggacagactttcttctctagacaacctgaaagcctcagtcagccaagtggaggcggacttgaaaatgctcaggactgctgtggacagtttggttgcatactcggtcaaaatagaaaccaacgagaacaatctggaatcagccaagggtttactagatgacctgaggaatgatctggataggttgtttgtgaaagtggagaagattcacgaaaaggtctaaatgaattgcgtgtgcagggcgcggatttaaagtccaatttctcatgaccaaaaaatgtgtggttttttcccatgtgtcccctaccccccaatttcttgtcccctcttaaagagcagttgtcaccacctgaacaccaaggcattgtattttcatgcccagttaacttatttacaatatttaagttctctgcttctgcatttggttggtttcctgaagcgcagcccctgtgaataacaggtggcttttcatggatgtctctagtcagagaaaaatgataaaggcttaaattgaggattaacagaagcagattaacctcagaaatcctgtctggctggcagatttcaagtaaaaaaaaaaaaaaggtgggttggggggacccttttctttctagttgtctttaaggaaaattaattttactttttttttgttctggccgaaatttttatgagatatctctcacttgtcttccactttgaaccggttaaagctcatagctgtcagctctgaatgaggaggggagaagcccctgggtctttctttgaaaggaatccgctgcttgagggctgcctccctcatggtgtgcgtgtcgtttctcttcctgacgcatcttgtgatatcagaggtaactatgcaaagcatccaggcggttctgaatgtgaagcactacacccagcagagtcccggtgccctctgtccccactgccggcccatgttctctctccggaggtcaccaaggaatgcacaggtttcgactaccagaaaggggagtccttgggttctttcaaaaaattcgtgaggagagctgtctacagtggaatagggggtctccctggggaatgcaggccaagtccttttattttaacatgatgtccatgaagaggtttgccgtctgggcagccctgtcggcaaggagcgtgcatactgcgtttgtgtaattgtttgctgtatctcccttccctctgagctgtattgttctttaatggctgtcttgcccttccaaaaaaaattgaaaaaaaaaaaaaaaaaaaaacccgaaaagtaaaaaaaaaaaaaaaaagttttgtttagtttactgtgaaatgaactgtatggcttatttacagtatttttaattcttaataaacacttgagctttgttatgacttt

SEQ ID NO: 737066 - DNA, 3722 bp, Homo sapiens
tctgataatcccactgtaacagtttcaagtaactattatttagcaccaaagtagggctcaggcttggcttggaggtattttcggccccaggagttaaagcactctcagaaagagaaaataattcttcatttacagattcttttatccattctgtagtctgatcaagagcacttggagtttcttccaaaatttcctggaacttggttctctcatattccaccaactggcgttgaaggtgcggtctgagactcataattgtaaaattggccatgtccatttgcatgaggtccaggacatggaatatttgtctcagcacctccacgatgttgccagtagcctttaactctctgatatcattatctcgcacgggagcacacagctttcccatcgtactgatgacatagttggccaggccttggatgtcaacagcactgtgctcaggcctgctgcctaatgaggtctgtgtccaaaacttcacagatttggttgcgaagccggttgccaccgggagtgagaaaagagagaagaatctctctgatttcttcaaacagtttgatggcatgttcaaactcaggagggtcagcatttagttctgaatccaagacgtcccagaaggcctggtgaacaatgtgcttcactcgaccagccaaactcttttctgggagagcctcttgtttcaattgaaagttctcatttacagcaatctcatgagcaagagtcaagtttgataagttccttgctgtagccatcacttcatcaaatgttacaacccttggagggcttgttgaagcaggagagctggatttgctggaggagtcacttgtaaagctctgcctggagcattcatagtcactgagcgaagccatgctttcggaaaaccgggaagaatcagaatcgcttggctggtcctctcccacacactgcttctcgccattgaagggcattttgcgtcacttaagtgtgggtaaaaaggtagcacctgtgcttccccctctggggccctcaacctctcacaaaatggcattgaagctgcttccacacatgactgggtatcttcggccctgggcctcttcaaatcaggcaacttccactggctgtcagggtgatgcatgaaatccctagagaagagaggaaaaggaccacggcagggagcctcctcaagtgggaaccactgagattaactcattatccgttggcagagagggcttctcactctattgcccaggctgatgtgcagtagccattcactggtgagatcatcacgcgctacagcatcaaactcctggcctcaagtgatccccctgcctcagcctccgaagtagctgggattacaggtgcagtctttgcaagccacatttggaacttttgagtccatcttgagaagctcccaacataaacaagacctcacagagaaagctgtgaagcaaggggagagtgaggtcagccggatcagcgaagtgctgcagaaactccagaatgagattctcaaagacctctcggatgggatccatgtggtgaaggacgcccgggagcgggacttcacgtccctggagaacacggtggaggagcggctgacggagctcaccaaatccatcaacgacaacatcgccatcttcacagaagtccagaagaggagccagaaggagatcaatgacatgaaggcaaaggttgcctccctggaagaatctgaggggaacaagcaggatttgaaagccttaaaggaagctgtgaaggagatacagacctcagccaagtccagagagtgggacatggaggccctgagaagtacccttcagactatggagtctgacatctacaccgaggtccgcgagctggtgagcctcaagcaggagcagcaggctttcaaggaggcggccgacacggagcggctcgccctgcaggccctcacggagaagcttctcaggtctgaggagtccgtctcccgcctcccggaggagatccggagactggaggaagagctccgccagctgaagtccgattcccacgggccgaaggaggacggaggcttcagacactcggaagcctttgaggcactccagcaaaagatggagtccctcctgtccaagagccaggagcacgagcagcgcctggccgccctgcaggggcgcctggaaggcctcgggtcctcagaggcagaccaggatggcctggccagcacggtgaggagcctgggcgagacccagctggtgctctacggtgacgtggaggagctgaagaggagtgtgggcgagctccccagcaccgtggaatcactccagaaggtgcaggagcaggtgcacacgctgctcagtcaggaccaagcccaggccgcccgtctgcctcctcaggacttcctggacagactttcttctctagacaacctgaaagcctcagtcagccaagtggaggcggacttgaaaatgctcaggactgctgtggacagtttggttgcatactcggtcaaaatagaaaccaacgagaacaatctggaatcagccaagggtttactagatgacctgaggaatgatctggataggttgtttgtgaaagtggagaagattcacgaaaaggtctaaatgaattgcgtgtgcagggcgcggatttaaagtccaatttctcatgaccaaaaaatgtgtggttttttcccatgtgtcccctaccccccaatttcttgtcccctcttaaagagcagttgtcaccacctgaacaccaaggcattgtattttcatgcccagttaacttatttacaatatttaagttctctgcttctgcatttggttggtttcctgaagcgcagcccctgtgaataacaggtggcttttcatggatgtctctagtcagagaaaaatgataaaggcttaaattgaggattaacagaagcagattaacctcagaaatcctgtctggctggcagatttcaagtaaaaaaaaaaaaaaggtgggttggggggacccttttctttctagttgtctttaaggaaaattaattttactttttttttgttctggccgaaatttttatgagatatctctcacttgtcttccactttgaaccggttaaagctcatagctgtcagctctgaatgaggaggggagaagcccctgggtctttctttgaaaggaatccgctgcttgagggctgcctccctcatggtgtgcgtgtcgtttctcttcctgacgcatcttgtgatatcagaggtaactatgcaaagcatccaggcggttctgaatgtgaagcactacacccagcagagtcccggtgccctctgtccccactgccggcccatgttctctctccggaggtcaccaaggaatgcacaggtttcgactaccagaaaggggagtccttgggttctttcaaaaaattcgtgaggagagctgtctacagtggaatagggggtctccctggggaatgcaggccaagtccttttattttaacatgatgtccatgaagaggtttgccgtctgggcagccctgtcggcaaggagcgtgcatactgcgtttgtgtaattgtttgctgtatctcccttccctctgagctgtattgttctttaatggctgtcttgcccttccaaaaaaaattgaaaaaaaaaaaaaaaaaaaaacccgaaaagtaaaaaaaaaaaaaaaaagttttgtttagtttactgtgaaatgaactgtatggcttatttacagtatttttaattcttaataaacacttgagctttgttatgacttt

SEQ ID NO: 737067 - DNA, 3750 bp, Homo sapiens
tctgataatcccactgtaacagtttcaagtaactattatttagcaccaaagtagggctcaggcttggcttggaggtattttcggccccaggagttaaagcactctcagaaagagaaaataattcttcatttacagattcttttatccattctgtagtctgatcaagagcacttggagtttcttccaaaatttcctggaacttggttctctcatattccaccaactggcgttgaaggtgcggtctgagactcataattgtaaaattggccatgtccatttgcatgaggtccaggacatggaatatttgtctcagcacctccacgatgttgccagtagcctttaactctctgatatcattatctcgcacgggagcacacagctttcccatcgtactgatgacatagttggccaggccttggatgtcaacagcactgtgctcaggcctgctgcctaatgaggtctgtgtccaaaacttcacagatttggttgcgaagccggttgccaccgggagtgagaaaagagagaagaatctctctgatttcttcaaacagtttgatggcatgttcaaactcaggagggtcagcatttagttctgaatccaagacgtcccagaaggcctggtgaacaatgtgcttcactcgaccagccaaactcttttctgggagagcctcttgtttcaattgaaagttctcatttacagcaatctcatgagcaagagtcaagtttgataagttccttgctgtagccatcacttcatcaaatgttacaacccttggagggcttgttgaagcaggagagctggatttgctggaggagtcacttgtaaagctctgcctggagcattcatagtcactgagcgaagccatgctttcggaaaaccgggaagaatcagaatcgcttggctggtcctctcccacacactgcttctcgccattgaagggcattttgcgtcacttaagtgtgggtaaaaaggtagcacctgtgcttccccctctggggccctcaacctctcacaaaatggcattgaagctgcttccacacatgactgggtatcttcggccctgggcctcttcaaatcaggcaacttccactggctgtcagggtgatgcatgaaatccctagagaagagaggaaaaggaccacggcagggagcctcctcaagtgggaaccactgagattaactcattatccgttggcagagagggcttctcactctattgcccaggctgatgtgcagtagccattcactggtgagatcatcacgcgctacagcatcaaactcctggcctcaagtgatccccctgcctcagcctccgaagtagctgggattacaggtgcagtctttgcaagccacatttggaacttttgagtccatcttgagaagctcccaacataaacaagacctcacagagaaagctgtgaagcaaggggagagtgaggtcagccggatcagcgaagtgctgcagaaactccagaatgagattctcaaagacctctcggatgggatccatgtggtgaaggacgcccgggagcgggacttcacgtccctggagaacacggtggaggagcggctgacggagctcaccaaatccatcaacgacaacatcgccatcttcacagaagtccagaagaggagccagaaggagatcaatgacatgaaggcaaaggttgcctccctggaagaatctgaggggaacaagcaggatttgaaagccttaaaggaagctgtgaaggagatacagacctcagccaagtccagagagtgggacatggaggccctgagaagtacccttcagactatggagtctgacatctacaccgaggtccgcgagctggtgagcctcaagcaggagcagcaggctttcaaggaggcggccgacacggagcggctcgccctgcaggccctcacggagaagcttctcaggtctgaggagtccgtctcccgcctcccggaggagatccggagactggaggaagagctccgccagctgaagtccgattcccacgggccgaaggaggacggaggcttcagacactcggaagcctttgaggcactccagcaaaagagtggcttctgcgcgccagaccgagagcctggagtccctcctgtccaagagccaggagcacgagcagcgcctggccgccctgcaggggcgcctggaaggcctcgggtcctcagaggcagaccaggatggcctggccagcacggtgaggagcctgggcgagacccagctggtgctctacggtgacgtggaggagctgaagaggagtgtgggcgagctccccagcaccgtggaatcactccagaaggtgcaggagcaggtgcacacgctgctcagtcaggaccaagcccaggccgcccgtctgcctcctcaggacttcctggacagactttcttctctagacaacctgaaagcctcagtcagccaagtggaggcggacttgaaaatgctcaggactgctgtggacagtttggttgcatactcggtcaaaatagaaaccaacgagaacaatctggaatcagccaagggtttactagatgacctgaggaatgatctggataggttgtttgtgaaagtggagaagattcacgaaaaggtctaaatgaattgcgtgtgcagggcgcggatttaaagtccaatttctcatgaccaaaaaatgtgtggttttttcccatgtgtcccctaccccccaatttcttgtcccctcttaaagagcagttgtcaccacctgaacaccaaggcattgtattttcatgcccagttaacttatttacaatatttaagttctctgcttctgcatttggttggtttcctgaagcgcagcccctgtgaataacaggtggcttttcatggatgtctctagtcagagaaaaatgataaaggcttaaattgaggattaacagaagcagattaacctcagaaatcctgtctggctggcagatttcaagtaaaaaaaaaaaaaaggtgggttggggggacccttttctttctagttgtctttaaggaaaattaattttactttttttttgttctggccgaaatttttatgagatatctctcacttgtcttccactttgaaccggttaaagctcatagctgtcagctctgaatgaggaggggagaagcccctgggtctttctttgaaaggaatccgctgcttgagggctgcctccctcatggtgtgcgtgtcgtttctcttcctgacgcatcttgtgatatcagaggtaactatgcaaagcatccaggcggttctgaatgtgaagcactacacccagcagagtcccggtgccctctgtccccactgccggcccatgttctctctccggaggtcaccaaggaatgcacaggtttcgactaccagaaaggggagtccttgggttctttcaaaaaattcgtgaggagagctgtctacagtggaatagggggtctccctggggaatgcaggccaagtccttttattttaacatgatgtccatgaagaggtttgccgtctgggcagccctgtcggcaaggagcgtgcatactgcgtttgtgtaattgtttgctgtatctcccttccctctgagctgtattgttctttaatggctgtcttgcccttccaaaaaaaattgaaaaaaaaaaaaaaaaaaaaacccgaaaagtaaaaaaaaaaaaaaaaagttttgtttagtttactgtgaaatgaactgtatggcttatttacagtatttttaattcttaataaacacttgagctttgttatgacttt

SEQ ID NO: 737068 - DNA, 1268 bp, Homo sapiens
tctgataatcccactgtaacagtttcaagtaactattatttagcaccaaagtagggctcaggcttggcttggaggtattttcggccccaggagttaaagcactctcagaaagagaaaataattcttcatttacagattcttttatccattctgtagtctgatcaagagcacttggagtttcttccaaaatttcctggaacttggttctctcatattccaccaactggcgttgaaggtgcggtctgagactcataattgtaaaattggccatgtccatttgcatgaggtccaggacatggaatatttgtctcagcacctccacgatgttgccagtagcctttaactctctgatatcattatctcgcacgggagcacacagctttcccatcgtactgatgacatagttggccaggccttggatgtcaacagcactgtgctcaggcctgctgcctaatgaggtctgtgtccaaaacttcacagatttggttgcgaagccggttgccaccgggagtgagaaaagagagaagaatctctctgatttcttcaaacagtttgatggcatgttcaaactcaggagggtcagcatttagttctgaatccaagacgtcccagaaggcctggtgaacaatgtgcttcactcgaccagccaaactcttttctgggagagcctcttgtttcaattgaaagttctcatttacagcaatctcatgagcaagagtcaagtttgataagttccttgctgtagccatcacttcatcaaatgttacaacccttggagggcttgttgaagcaggagagctggatttgctggaggagtcacttgtaaagctctgcctggagcattcatagtcactgagcgaagccatgctttcggaaaaccgggaagaatcagaatcgcttggctggtcctctcccacacactgcttctcgccattgaagggcattttgcgtcacttaagtgtgggtaaaaaggtagcacctgtgcttccccctctggggccctcaacctctcacaaaatggcattgaagctgcttccacacatgactgggtatcttcggccctgggcctcttcaaatcaggcaacttccactggctgtcagggtgatgcatgaaatcccgggtccagcacgtagacaagaggagaacggcgacggagtgaccccgggtcagggctctctgggcgtcccctcaccgagcacagcacagtcacctcgaaaactcaccagcccaacaaacccccccagccccagtgtcccccccaacgcgg

SEQ ID NO: 737069 - DNA, 1955 bp, Homo sapiens
tagatgacaaatagtttttatttacttttgctctaagtagttcttctaactttgaataaaatgtctcttacatcatgaactaaatgaaatttgacatgccaaggctattccaggaggctgaaagtttggaggcagtaattctctactggggctgtctgccttaggacaaaattcactttattttgctttaggcccagttctaaggtttcccactagaaacaaattgctttttataccacagttcttatacaattatacatttggtagaatttataaggtgacaattgccaagaaatacagcctgaacacaggtgcagagtagagagagactgaaattcttcttggacccagcacttgagcagggataatttatgagtagttctgtttgccacactaaagcaacaccacccccagaatttcacaactcttgtttctcctcagttggcaaatgttgtttttggtttgctagttctgttttataaagatgtaaaagacttgcagtctttcatttaaaagacatccaactgagagagcgcgagtggaaatcatcgtgaatataattacaatgtgggcagtaataagcatttatactgcaagtttaatcatttacagctgacacatttaagagcccatttagttaccttgaacaaaagcaacagtgtggcatagtggttctcaatcctggctgactttagaatcacctggggagctttaaaaaggaaaaaaagagttcatgggcacagctcctggagactttgatttattctgtctgaggcagggctcaggcctctgtgtttaaacgccccagatgattctaatttgtagtcagacttgagaatgaccggtaaagcagaaggagcatgcgtttagagtgaaacgttggctcttctcttagggatcggcagagacttcactctcacaggctggcacggtgactgctctctctggttccaaaagcaaggtcagcctcatgaggcacctgcaacctcggcttttcttggagtttcttccaaaatttcctggaacttggttctctcatattccaccaactggcgttgaaggtgcggtctgagactcataattgtaaaattggccatgtccatttgcatgaggtccaggacatggaatatttgtctcagcacctccacgatgttgccagtagcctttaactctctgatatcattatctcgcacgggagcacacagctttcccatcgtactgatgacatagttggccaggccttggatgtcaacagcactgtgctcaggcctgctgcctaatgaggtctgtgtccaaaacttcacagatttggttgcgaagccggttgccaccgggagtgagaaaagagagaagaatctctctgatttcttcaaacagtttgatggcatgttcaaactcaggagggtcagcatttagttctgaatccaagacgtcccagaaggcctggtgaacaatgtgcttcactcgaccagccaaactcttttctgggagagcctcttgtttcaattgaaagttctcatttacagcaatctcatgagcaagagtcaagtttgataagttccttgctgtagccatcacttcatcaaatgttacaacccttggagggcttgttgaagcaggagagctggatttgctggaggagtcacttgtaaagctctgcctggagcattcatagtcactgagcgaagccatgctttcggaaaaccgggaagaatcagaatcgcttggctggtcctctcccacacactgcttctcgccattgaagggcattttgcgtcacttaagtgtgggtaaaaaggtagcaccgggtccagcacgtagacaagaggagaacggcgacggagtgaccccgggtcagggctctctgggcgtcccctcaccgagcacagcacagtcacctcgaaaactcaccagcccaacaaacccccccagccccagtgtcccccccaacgcgg

SEQ ID NO: 737070 - DNA, 2149 bp, Homo sapiens
tagatgacaaatagtttttatttacttttgctctaagtagttcttctaactttgaataaaatgtctcttacatcatgaactaaatgaaatttgacatgccaaggctattccaggaggctgaaagtttggaggcagtaattctctactggggctgtctgccttaggacaaaattcactttattttgctttaggcccagttctaaggtttcccactagaaacaaattgctttttataccacagttcttatacaattatacatttggtagaatttataaggtgacaattgccaagaaatacagcctgaacacaggtgcagagtagagagagactgaaattcttcttggacccagcacttgagcagggataatttatgagtagttctgtttgccacactaaagcaacaccacccccagaatttcacaactcttgtttctcctcagttggcaaatgttgtttttggtttgctagttctgttttataaagatgtaaaagacttgcagtctttcatttaaaagacatccaactgagagagcgcgagtggaaatcatcgtgaatataattacaatgtgggcagtaataagcatttatactgcaagtttaatcatttacagctgacacatttaagagcccatttagttaccttgaacaaaagcaacagtgtggcatagtggttctcaatcctggctgactttagaatcacctggggagctttaaaaaggaaaaaaagagttcatgggcacagctcctggagactttgatttattctgtctgaggcagggctcaggcctctgtgtttaaacgccccagatgattctaatttgtagtcagacttgagaatgaccggtaaagcagaaggagcatgcgtttagagtgaaacgttggctcttctcttagggatcggcagagacttcactctcacaggctggcacggtgactgctctctctggttccaaaagcaaggtcagcctcatgaggcacctgcaacctcggcttttcttggagtttcttccaaaatttcctggaacttggttctctcatattccaccaactggcgttgaaggtgcggtctgagactcataattgtaaaattggccatgtccatttgcatgaggtccaggacatggaatatttgtctcagcacctccacgatgttgccagtagcctttaactctctgatatcattatctcgcacgggagcacacagctttcccatcgtactgatgacatagttggccaggccttggatgtcaacagcactgtgctcaggcctgctgcctaatgaggtctgtgtccaaaacttcacagatttggttgcgaagccggttgccaccgggagtgagaaaagagagaagaatctctctgatttcttcaaacagtttgatggcatgttcaaactcaggagggtcagcatttagttctgaatccaagacgtcccagaaggcctggtgaacaatgtgcttcactcgaccagccaaactcttttctgggagagcctcttgtttcaattgaaagttctcatttacagcaatctcatgagcaagagtcaagtttgataagttccttgctgtagccatcacttcatcaaatgttacaacccttggagggcttgttgaagcaggagagctggatttgctggaggagtcacttgtaaagctctgcctggagcattcatagtcactgagcgaagccatgctttcggaaaaccgggaagaatcagaatcgcttggctggtcctctcccacacactgcttctcgccattgaagggcattttgcgtcacttaagtgtgggtaaaaaggtagcacctgtgcttccccctctggggccctcaacctctcacaaaatggcattgaagctgcttccacacatgactgggtatcttcggccctgggcctcttcaaatcaggcaacttccactggctgtcagggtgatgcatgaaatccctagagaagagaggaaaaggaccacggcagggagcctcctcaagtgggaaccactgagattaactcattatccgttggcaggtaagaagagcaaagtccctgactgggctggtgaccatgggtgctgagacacccactggggacaaggacaacttgtccagtttcttcacagttaaggtagcaggacaaccatctaagatttccc

SEQ ID NO: 737071 - DNA, 4632 bp, Homo sapiens
tagatgacaaatagtttttatttacttttgctctaagtagttcttctaactttgaataaaatgtctcttacatcatgaactaaatgaaatttgacatgccaaggctattccaggaggctgaaagtttggaggcagtaattctctactggggctgtctgccttaggacaaaattcactttattttgctttaggcccagttctaaggtttcccactagaaacaaattgctttttataccacagttcttatacaattatacatttggtagaatttataaggtgacaattgccaagaaatacagcctgaacacaggtgcagagtagagagagactgaaattcttcttggacccagcacttgagcagggataatttatgagtagttctgtttgccacactaaagcaacaccacccccagaatttcacaactcttgtttctcctcagttggcaaatgttgtttttggtttgctagttctgttttataaagatgtaaaagacttgcagtctttcatttaaaagacatccaactgagagagcgcgagtggaaatcatcgtgaatataattacaatgtgggcagtaataagcatttatactgcaagtttaatcatttacagctgacacatttaagagcccatttagttaccttgaacaaaagcaacagtgtggcatagtggttctcaatcctggctgactttagaatcacctggggagctttaaaaaggaaaaaaagagttcatgggcacagctcctggagactttgatttattctgtctgaggcagggctcaggcctctgtgtttaaacgccccagatgattctaatttgtagtcagacttgagaatgaccggtaaagcagaaggagcatgcgtttagagtgaaacgttggctcttctcttagggatcggcagagacttcactctcacaggctggcacggtgactgctctctctggttccaaaagcaaggtcagcctcatgaggcacctgcaacctcggcttttcttggagtttcttccaaaatttcctggaacttggttctctcatattccaccaactggcgttgaaggtgcggtctgagactcataattgtaaaattggccatgtccatttgcatgaggtccaggacatggaatatttgtctcagcacctccacgatgttgccagtagcctttaactctctgatatcattatctcgcacgggagcacacagctttcccatcgtactgatgacatagttggccaggccttggatgtcaacagcactgtgctcaggcctgctgcctaatgaggtctgtgtccaaaacttcacagatttggttgcgaagccggttgccaccgggagtgagaaaagagagaagaatctctctgatttcttcaaacagtttgatggcatgttcaaactcaggagggtcagcatttagttctgaatccaagacgtcccagaaggcctggtgaacaatgtgcttcactcgaccagccaaactcttttctgggagagcctcttgtttcaattgaaagttctcatttacagcaatctcatgagcaagagtcaagtttgataagttccttgctgtagccatcacttcatcaaatgttacaacccttggagggcttgttgaagcaggagagctggatttgctggaggagtcacttgtaaagctctgcctggagcattcatagtcactgagcgaagccatgctttcggaaaaccgggaagaatcagaatcgcttggctggtcctctcccacacactgcttctcgccattgaagggcattttgcgtcacttaagtgtgggtaaaaaggtagcacctgtgcttccccctctggggccctcaacctctcacaaaatggcattgaagctgcttccacacatgactgggtatcttcggccctgggcctcttcaaatcaggcaacttccactggctgtcagggtgatgcatgaaatccctagagaagagaggaaaaggaccacggcagggagcctcctcaagtgggaaccactgagattaactcattatccgttggcagagagggcttctcactctattgcccaggctgatgtgcagtagccattcactggtgagatcatcacgcgctacagcatcaaactcctggcctcaagtgatccccctgcctcagcctccgaagtagctgggattacaggtgcagtctttgcaagccacatttggaacttttgagtccatcttgagaagctcccaacataaacaagacctcacagagaaagctgtgaagcaaggggagagtgaggtcagccggatcagcgaagtgctgcagaaactccagaatgagattctcaaagacctctcggatgggatccatgtggtgaaggacgcccgggagcgggacttcacgtccctggagaacacggtggaggagcggctgacggagctcaccaaatccatcaacgacaacatcgccatcttcacagaagtccagaagaggagccagaaggagatcaatgacatgaaggcaaaggttgcctccctggaagaatctgaggggaacaagcaggatttgaaagccttaaaggaagctgtgaaggagatacagacctcagccaagtccagagagtgggacatggaggccctgagaagtacccttcagactatggagtctgacatctacaccgaggtccgcgagctggtgagcctcaagcaggagcagcaggctttcaaggaggcggccgacacggagcggctcgccctgcaggccctcacggagaagcttctcaggtctgaggagtccgtctcccgcctcccggaggagatccggagactggaggaagagctccgccagctgaagtccgattcccacgggccgaaggaggacggaggcttcagacactcggaagcctttgaggcactccagcaaaagagtcagggactggactccaggctccagcacgtggaggatggggtgctctccatgcaggtggcttctgcgcgccagaccgagagcctggagtccctcctgtccaagagccaggagcacgagcagcgcctggccgccctgcaggggcgcctggaaggcctcgggtcctcagaggcagaccaggatggcctggccagcacggtgaggagcctgggcgagacccagctggtgctctacggtgacgtggaggagctgaagaggagtgtgggcgagctccccagcaccgtggaatcactccagaaggtgcaggagcaggtgcacacgctgctcagtcaggaccaagcccaggccgcccgtctgcctcctcaggacttcctggacagactttcttctctagacaacctgaaagcctcagtcagccaagtggaggcggacttgaaaatgctcaggactgctgtggacagtttggttgcatactcggtcaaaatagaaaccaacgagaacaatctggaatcagccaagggtttactagatgacctgaggaatgatctggataggttgtttgtgaaagtggagaagattcacgaaaaggtctaaatgaattgcgtgtgcagggcgcggatttaaagtccaatttctcatgaccaaaaaatgtgtggttttttcccatgtgtcccctaccccccaatttcttgtcccctcttaaagagcagttgtcaccacctgaacaccaaggcattgtattttcatgcccagttaacttatttacaatatttaagttctctgcttctgcatttggttggtttcctgaagcgcagcccctgtgaataacaggtggcttttcatggatgtctctagtcagagaaaaatgataaaggcttaaattgaggattaacagaagcagattaacctcagaaatcctgtctggctggcagatttcaagtaaaaaaaaaaaaaaggtgggttggggggacccttttctttctagttgtctttaaggaaaattaattttactttttttttgttctggccgaaatttttatgagatatctctcacttgtcttccactttgaaccggttaaagctcatagctgtcagctctgaatgaggaggggagaagcccctgggtctttctttgaaaggaatccgctgcttgagggctgcctccctcatggtgtgcgtgtcgtttctcttcctgacgcatcttgtgatatcagaggtaactatgcaaagcatccaggcggttctgaatgtgaagcactacacccagcagagtcccggtgccctctgtccccactgccggcccatgttctctctccggaggtcaccaaggaatgcacaggtttcgactaccagaaaggggagtccttgggttctttcaaaaaattcgtgaggagagctgtctacagtggaatagggggtctccctggggaatgcaggccaagtccttttattttaacatgatgtccatgaagaggtttgccgtctgggcagccctgtcggcaaggagcgtgcatactgcgtttgtgtaattgtttgctgtatctcccttccctctgagctgtattgttctttaatggctgtcttgcccttccaaaaaaaattgaaaaaaaaaaaaaaaaaaaaacccgaaaagtaaaaaaaaaaaaaaaaagttttgtttagtttactgtgaaatgaactgtatggcttatttacagtatttttaattcttaataaacacttgagctttgttatgacttt

SEQ ID NO: 737072 - DNA, 4528 bp, Homo sapiens
tagatgacaaatagtttttatttacttttgctctaagtagttcttctaactttgaataaaatgtctcttacatcatgaactaaatgaaatttgacatgccaaggctattccaggaggctgaaagtttggaggcagtaattctctactggggctgtctgccttaggacaaaattcactttattttgctttaggcccagttctaaggtttcccactagaaacaaattgctttttataccacagttcttatacaattatacatttggtagaatttataaggtgacaattgccaagaaatacagcctgaacacaggtgcagagtagagagagactgaaattcttcttggacccagcacttgagcagggataatttatgagtagttctgtttgccacactaaagcaacaccacccccagaatttcacaactcttgtttctcctcagttggcaaatgttgtttttggtttgctagttctgttttataaagatgtaaaagacttgcagtctttcatttaaaagacatccaactgagagagcgcgagtggaaatcatcgtgaatataattacaatgtgggcagtaataagcatttatactgcaagtttaatcatttacagctgacacatttaagagcccatttagttaccttgaacaaaagcaacagtgtggcatagtggttctcaatcctggctgactttagaatcacctggggagctttaaaaaggaaaaaaagagttcatgggcacagctcctggagactttgatttattctgtctgaggcagggctcaggcctctgtgtttaaacgccccagatgattctaatttgtagtcagacttgagaatgaccggtaaagcagaaggagcatgcgtttagagtgaaacgttggctcttctcttagggatcggcagagacttcactctcacaggctggcacggtgactgctctctctggttccaaaagcaaggtcagcctcatgaggcacctgcaacctcggcttttcttggagtttcttccaaaatttcctggaacttggttctctcatattccaccaactggcgttgaaggtgcggtctgagactcataattgtaaaattggccatgtccatttgcatgaggtccaggacatggaatatttgtctcagcacctccacgatgttgccagtagcctttaactctctgatatcattatctcgcacgggagcacacagctttcccatcgtactgatgacatagttggccaggccttggatgtcaacagcactgtgctcaggcctgctgcctaatgaggtctgtgtccaaaacttcacagatttggttgcgaagccggttgccaccgggagtgagaaaagagagaagaatctctctgatttcttcaaacagtttgatggcatgttcaaactcaggagggtcagcatttagttctgaatccaagacgtcccagaaggcctggtgaacaatgtgcttcactcgaccagccaaactcttttctgggagagcctcttgtttcaattgaaagttctcatttacagcaatctcatgagcaagagtcaagtttgataagttccttgctgtagccatcacttcatcaaatgttacaacccttggagggcttgttgaagcaggagagctggatttgctggaggagtcacttgtaaagctctgcctggagcattcatagtcactgagcgaagccatgctttcggaaaaccgggaagaatcagaatcgcttggctggtcctctcccacacactgcttctcgccattgaagggcattttgcgtcacttaagtgtgggtaaaaaggtagcacctgtgcttccccctctggggccctcaacctctcacaaaatggcattgaagctgcttccacacatgactgggtatcttcggccctgggcctcttcaaatcaggcaacttccactggctgtcagggtgatgcatgaaatccctagagaagagaggaaaaggaccacggcagggagcctcctcaagtgggaaccactgagattaactcattatccgttggcagagagggcttctcactctattgcccaggctgatgtgcagtagccattcactggtgagatcatcacgcgctacagcatcaaactcctggcctcaagtgatccccctgcctcagcctccgaagtagctgggattacaggtgcagtctttgcaagccacatttggaacttttgagtccatcttgagaagctcccaacataaacaagacctcacagagaaagctgtgaagcaaggggagagtgaggtcagccggatcagcgaagtgctgcagaaactccagaatgagattctcaaagacctctcggatgggatccatgtggtgaaggacgcccgggagcgggacttcacgtccctggagaacacggtggaggagcggctgacggagctcaccaaatccatcaacgacaacatcgccatcttcacagaagtccagaagaggagccagaaggagatcaatgacatgaaggcaaaggttgcctccctggaagaatctgaggggaacaagcaggatttgaaagccttaaaggaagctgtgaaggagatacagacctcagccaagtccagagagtgggacatggaggccctgagaagtacccttcagactatggagtctgacatctacaccgaggtccgcgagctggtgagcctcaagcaggagcagcaggctttcaaggaggcggccgacacggagcggctcgccctgcaggccctcacggagaagcttctcaggtctgaggagtccgtctcccgcctcccggaggagatccggagactggaggaagagctccgccagctgaagtccgattcccacgggccgaaggaggacggaggcttcagacactcggaagcctttgaggcactccagcaaaagagtcagggactggactccaggctccagcacgtggaggatggggtgctctccatgcaggtggcttctgcgcgccagaccgagagcctggagtccctcctgtccaagagccaggagcacgagcagcgcctggccgccctgcaggggcgcctggaaggcctcgggtcctcagaggcagaccaggatggcctggccagcacggtgaggagcctgggcgagacccagctggtgctctacggtgacgtggaggagctgaagaggagtgtgggcgagctccccagcaccgtggaatcactccagaaggtgcaggagcaggtgcacacgctgctcagtcaggaccaagcccaggccgcccgtctgcctcctcaggacttcctggacagactttcttctctagacaacctgaaagcctcagtcagccaagtggaggcggacttgaaaatgctcaggactgctgtggacagtttggttgcatactcggtcaaaatagaaaccaacgagaacaatctggaatcagccaagggtttactagatgacctgaggaatgatctggataggttgtttgtgaaagtggagaagattcacgaaaaggtctaaatgaattgcgtgtgcagggcgcggatttaaagtccaatttctcatgaccaaaaaatgtgtggttttttcccatgtgtcccctaccccccaatttcttgtcccctcttaaagagcagttgtcaccacctgaacaccaaggcattgtattttcatgcccagttaacttatttacaatatttaagttctctgcttctgcatttggttggtttcctgaagcgcagcccctgtgaataacaggtggcttttcatggatgtctctagtcagagaaaaatgataaaggcttaaattgaggattaacagaagcagattaacctcagaaatcctgtctggctggcagatttcaagtaaaaaaaaaaaaaaggtgggttggggggacccttttctttctagttgtctttaaggaaaattaattttactttttttttgttctggccgaaatttttatgagatatctctcacttgtcttccactttgaaccggttaaagctcatagctgtcagctctgaatgaggaggggagaagcccctgggtctttctttgaaaggaatccgctgcttgagggctgcctccctcatggtgtgcgtgtcgtttctcttcctgacgcatcttgtgatatcagaggtaactatgcaaagcatccaggcggttctgaatgtgaagcactacacccagcagagtcccggtgccctctgtccccactgccggcccatgttctctctccggaggtcaccaaggaatgcacaggtttcgactaccagaaaggggagtccttgggttctttcaaaaaattcgtgaggagagctgtctacagtggaatagggggtctccctggggaatgcaggccaagtccttttattttaacatgatgtccatgaagaggtttgccgtctgggcagccctgtcggcaaggagcgtgcatactgcgtttgtgtaattgtttgctgtatctcccttccctctgagctgtattgttctttaatggctgtcttgcccttctctttgaactgcgtttaattgaaagttgataaaaacatctagaaa

SEQ ID NO: 737073 - DNA, 4962 bp, Homo sapiens
tagatgacaaatagtttttatttacttttgctctaagtagttcttctaactttgaataaaatgtctcttacatcatgaactaaatgaaatttgacatgccaaggctattccaggaggctgaaagtttggaggcagtaattctctactggggctgtctgccttaggacaaaattcactttattttgctttaggcccagttctaaggtttcccactagaaacaaattgctttttataccacagttcttatacaattatacatttggtagaatttataaggtgacaattgccaagaaatacagcctgaacacaggtgcagagtagagagagactgaaattcttcttggacccagcacttgagcagggataatttatgagtagttctgtttgccacactaaagcaacaccacccccagaatttcacaactcttgtttctcctcagttggcaaatgttgtttttggtttgctagttctgttttataaagatgtaaaagacttgcagtctttcatttaaaagacatccaactgagagagcgcgagtggaaatcatcgtgaatataattacaatgtgggcagtaataagcatttatactgcaagtttaatcatttacagctgacacatttaagagcccatttagttaccttgaacaaaagcaacagtgtggcatagtggttctcaatcctggctgactttagaatcacctggggagctttaaaaaggaaaaaaagagttcatgggcacagctcctggagactttgatttattctgtctgaggcagggctcaggcctctgtgtttaaacgccccagatgattctaatttgtagtcagacttgagaatgaccggtaaagcagaaggagcatgcgtttagagtgaaacgttggctcttctcttagggatcggcagagacttcactctcacaggctggcacggtgactgctctctctggttccaaaagcaaggtcagcctcatgaggcacctgcaacctcggcttttcttggagtttcttccaaaatttcctggaacttggttctctcatattccaccaactggcgttgaaggtgcggtctgagactcataattgtaaaattggccatgtccatttgcatgaggtccaggacatggaatatttgtctcagcacctccacgatgttgccagtagcctttaactctctgatatcattatctcgcacgggagcacacagctttcccatcgtactgatgacatagttggccaggccttggatgtcaacagcactgtgctcaggcctgctgcctaatgaggtctgtgtccaaaacttcacagatttggttgcgaagccggttgccaccgggagtgagaaaagagagaagaatctctctgatttcttcaaacagtttgatggcatgttcaaactcaggagggtcagcatttagttctgaatccaagacgtcccagaaggcctggtgaacaatgtgcttcactcgaccagccaaactcttttctgggagagcctcttgtttcaattgaaagttctcatttacagcaatctcatgagcaagagtcaagtttgataagttccttgctgtagccatcacttcatcaaatgttacaacccttggagggcttgttgaagcaggagagctggatttgctggaggagtcacttgtaaagctctgcctggagcattcatagtcactgagcgaagccatgctttcggaaaaccgggaagaatcagaatcgcttggctggtcctctcccacacactgcttctcgccattgaagggcattttgcgtcacttaagtgtgggtaaaaaggtagcacctgtgcttccccctctggggccctcaacctctcacaaaatggcattgaagctgcttccacacatgactgggtatcttcggccctgggcctcttcaaatcaggcaacttccactggctgtcagggtgatgcatgaaatccctagagaagagaggaaaaggaccacggcagggagcctcctcaagtgggaaccactgagattaactcattatccgttggcagagagggcttctcactctattgcccaggctgatgtgcagtagccattcactggtgagatcatcacgcgctacagcatcaaactcctggcctcaagtgatccccctgcctcagcctccgaagtagctgggattacaggtgcagtctttgcaagccacatttggaacttttgagtccatcttgagaagctcccaacataaacaagacctcacagagaaagctgtgaagcaaggggagagtgaggtcagccggatcagcgaagtgctgcagaaactccagaatgagattctcaaagacctctcggatgggatccatgtggtgaaggacgcccgggagcgggacttcacgtccctggagaacacggtggaggagcggctgacggagctcaccaaatccatcaacgacaacatcgccatcttcacagaagtccagaagaggagccagaaggagatcaatgacatgaaggcaaaggttgcctccctggaagaatctgaggggaacaagcaggatttgaaagccttaaaggaagctgtgaaggagatacagacctcagccaagtccagagagtgggacatggaggccctgagaagtacccttcagactatggagtctgacatctacaccgaggtccgcgagctggtgagcctcaagcaggagcagcaggctttcaaggaggcggccgacacggagcggctcgccctgcaggccctcacggagaagcttctcaggtctgaggagtccgtctcccgcctcccggaggagatccggagactggaggaagagctccgccagctgaagtccgattcccacgggccgaaggaggacggaggcttcagacactcggaagcctttgaggcactccagcaaaagagtcagggactggactccaggctccagcacgtggaggatggggtgctctccatgcaggtggcttctgcgcgccagaccgagagcctggagtccctcctgtccaagagccaggagcacgagcagcgcctggccgccctgcaggggcgcctggaaggcctcgggtcctcagaggcagaccaggatggcctggccagcacggtgaggagcctgggcgagacccagctggtgctctacggtgacgtggaggagctgaagaggagtgtgggcgagctccccagcaccgtggaatcactccagaaggtgcaggagcaggtgcacacgctgctcagtcaggaccaagcccaggccgcccgtctgcctcctcaggacttcctggacagactttcttctctagacaacctgaaagcctcagtcagccaagtggaggcggacttgaaaatgctcaggactgctgtggacagtttggttgcatactcggtcaaaatagaaaccaacgagaacaatctggaatcagccaagggtttactagatgacctgaggaatgatctggataggttgtttgtgaaagtggagaagattcacgaaaaggtctaaatgaattgcgtgtgcagggcgcggatttaaagtccaatttctcatgaccaaaaaatgtgtggttttttcccatgtgtcccctaccccccaatttcttgtcccctcttaaagagcagttgtcaccacctgaacaccaaggcattgtattttcatgcccagttaacttatttacaatatttaagttctctgcttctgcatttggttggtttcctgaagcgcagcccctgtgaataacaggtggcttttcatggatgtctctagtcagagaaaaatgataaaggcttaaattgaggattaacagaagcagattaacctcagaaatcctgtctggctggcagatttcaagtaaaaaaaaaaaaaaggtgggttggggggacccttttctttctagttgtctttaaggaaaattaattttactttttttttgttctggccgaaatttttatgagatatctctcacttgtcttccactttgaaccggttaaagctcatagctgtcagctctgaatgaggaggggagaagcccctgggtctttctttgaaaggaatccgctgcttgagggctgcctccctcatggtgtgcgtgtcgtttctcttcctgacgcatcttgtgatatcagaggtaactatgcaaagcatccaggcggttctgaatgtgaagcactacacccagcagagtcccggtgccctctgtccccactgccggcccatgttctctctccggaggtcaccaaggaatgcacaggtttcgactaccagaaaggggagtccttgggttctttcaaaaaattcgtgaggagagctgtctacagtggaatagggggtctccctggggaatgcaggccaagtccttttattttaacatgatgtccatgaagaggtttgccgtctgggcagccctgtcggcaaggagcgtgcatactgcgtttgtgtaattgtttgctgtatctcccttccctctgagctgtattgttctttaatggctgtcttgcccttcctcgtgccgaattcggcacgaggagagaactagtctcgagtttttttttttttttccttttaaatgaagaaaagctttgcttaagggttgcatacttttattggagtaaatctgaatgatcctactcctttggagtaaaactagtgcttaccagtttccaattgtatttagcttttggttggaatttgaaaaaaaaagaaacaaagaaaaagaaaacctaaataaaataggtgaaagttccctgactattcaggtgaatacacaaaaaatattaattatatattattattaattaattttatttatatattatattattctattctattatctatactttttatttttttttatttttctcttttctcttatactctttaaatataaaatatatcttctggtggggcctctcttccacatttccctttttggggcggtttcaaattatatgtgcccctttttaacaaactttgtctggg

SEQ ID NO: 737074 - DNA, 4509 bp, Homo sapiens
  misc_feature (4495)..(4495): n is a, c, g, or t
tagatgacaaatagtttttatttacttttgctctaagtagttcttctaactttgaataaaatgtctcttacatcatgaactaaatgaaatttgacatgccaaggctattccaggaggctgaaagtttggaggcagtaattctctactggggctgtctgccttaggacaaaattcactttattttgctttaggcccagttctaaggtttcccactagaaacaaattgctttttataccacagttcttatacaattatacatttggtagaatttataaggtgacaattgccaagaaatacagcctgaacacaggtgcagagtagagagagactgaaattcttcttggacccagcacttgagcagggataatttatgagtagttctgtttgccacactaaagcaacaccacccccagaatttcacaactcttgtttctcctcagttggcaaatgttgtttttggtttgctagttctgttttataaagatgtaaaagacttgcagtctttcatttaaaagacatccaactgagagagcgcgagtggaaatcatcgtgaatataattacaatgtgggcagtaataagcatttatactgcaagtttaatcatttacagctgacacatttaagagcccatttagttaccttgaacaaaagcaacagtgtggcatagtggttctcaatcctggctgactttagaatcacctggggagctttaaaaaggaaaaaaagagttcatgggcacagctcctggagactttgatttattctgtctgaggcagggctcaggcctctgtgtttaaacgccccagatgattctaatttgtagtcagacttgagaatgaccggtaaagcagaaggagcatgcgtttagagtgaaacgttggctcttctcttagggatcggcagagacttcactctcacaggctggcacggtgactgctctctctggttccaaaagcaaggtcagcctcatgaggcacctgcaacctcggcttttcttggagtttcttccaaaatttcctggaacttggttctctcatattccaccaactggcgttgaaggtgcggtctgagactcataattgtaaaattggccatgtccatttgcatgaggtccaggacatggaatatttgtctcagcacctccacgatgttgccagtagcctttaactctctgatatcattatctcgcacgggagcacacagctttcccatcgtactgatgacatagttggccaggccttggatgtcaacagcactgtgctcaggcctgctgcctaatgaggtctgtgtccaaaacttcacagatttggttgcgaagccggttgccaccgggagtgagaaaagagagaagaatctctctgatttcttcaaacagtttgatggcatgttcaaactcaggagggtcagcatttagttctgaatccaagacgtcccagaaggcctggtgaacaatgtgcttcactcgaccagccaaactcttttctgggagagcctcttgtttcaattgaaagttctcatttacagcaatctcatgagcaagagtcaagtttgataagttccttgctgtagccatcacttcatcaaatgttacaacccttggagggcttgttgaagcaggagagctggatttgctggaggagtcacttgtaaagctctgcctggagcattcatagtcactgagcgaagccatgctttcggaaaaccgggaagaatcagaatcgcttggctggtcctctcccacacactgcttctcgccattgaagggcattttgcgtcacttaagtgtgggtaaaaaggtagcacctgtgcttccccctctggggccctcaacctctcacaaaatggcattgaagctgcttccacacatgactgggtatcttcggccctgggcctcttcaaatcaggcaacttccactggctgtcagggtgatgcatgaaatccctagagaagagaggaaaaggaccacggcagggagcctcctcaagtgggaaccactgagattaactcattatccgttggcagagagggcttctcactctattgcccaggctgatgtgcagtagccattcactggtgagatcatcacgcgctacagcatcaaactcctggcctcaagtgatccccctgcctcagcctccgaagtagctgggattacaggtgcagtctttgcaagccacatttggaacttttgagtccatcttgagaagctcccaacataaacaagacctcacagagaaagctgtgaagcaaggggagagtgaggtcagccggatcagcgaagtgctgcagaaactccagaatgagattctcaaagacctctcggatgggatccatgtggtgaaggacgcccgggagcgggacttcacgtccctggagaacacggtggaggagcggctgacggagctcaccaaatccatcaacgacaacatcgccatcttcacagaagtccagaagaggagccagaaggagatcaatgacatgaaggcaaaggttgcctccctggaagaatctgaggggaacaagcaggatttgaaagccttaaaggaagctgtgaaggagatacagacctcagccaagtccagagagtgggacatggaggccctgagaagtacccttcagactatggagtctgacatctacaccgaggtccgcgagctggtgagcctcaagcaggagcagcaggctttcaaggaggcggccgacacggagcggctcgccctgcaggccctcacggagaagcttctcaggtctgaggagtccgtctcccgcctcccggaggagatccggagactggaggaagagctccgccagctgaagtccgattcccacgggccgaaggaggacggaggcttcagacactcggaagcctttgaggcactccagcaaaagagtcagggactggactccaggctccagcacgtggaggatggggtgctctccatgcaggtggcttctgcgcgccagaccgagagcctggagtccctcctgtccaagagccaggagcacgagcagcgcctggccgccctgcaggggcgcctggaaggcctcgggtcctcagaggcagaccaggatggcctggccagcacggtgaggagcctgggcgagacccagctggtgctctacggtgacgtggaggagctgaagaggagtgtgggcgagctccccagcaccgtggaatcactccagaaggtgcaggagcaggtgcacacgctgctcagtcaggaccaagcccaggccgcccgtctgcctcctcaggacttcctggacagactttcttctctagacaacctgaaagcctcagtcagccaagtggaggcggacttgaaaatgctcaggactgctgtggacagtttggttgcatactcggtcaaaatagaaaccaacgagaacaatctggaatcagccaagggtttactagatgacctgaggaatgatctggataggttgtttgtgaaagtggagaagattcacgaaaaggtctaaatgaattgcgtgtgcagggcgcggatttaaagtccaatttctcatgaccaaaaaatgtgtggttttttcccatgtgtcccctaccccccaatttcttgtcccctcttaaagagcagttgtcaccacctgaacaccaaggcattgtattttcatgcccagttaacttatttacaatatttaagttctctgcttctgcatttggttggtttcctgaagcgcagcccctgtgaataacaggtggcttttcatggatgtctctagtcagagaaaaatgataaaggcttaaattgaggattaacagaagcagattaacctcagaaatcctgtctggctggcagatttcaagtaaaaaaaaaaaaaaggtgggttggggggacccttttctttctagttgtctttaaggaaaattaattttactttttttttgttctggccgaaatttttatgagatatctctcacttgtcttccactttgaaccggttaaagctcatagctgtcagctctgaatgaggaggggagaagcccctgggtctttctttgaaaggaatccgctgcttgagggctgcctccctcatggtgtgcgtgtcgtttctcttcctgacgcatcttgtgatatcagaggtaactatgcaaagcatccaggcggttctgaatgtgaagcactacacccagcagagtcccggtgccctctgtccccactgccggcccatgttctctctccggaggtcaccaaggaatgcacaggtttcgactaccagaaaggggagtccttgggttctttcaaaaaattcgtgaggagagctgtctacagtggaatagggggtctccctggggaatgcaggccaagtccttttattttaacatgatgtccatgaagaggtttgccgtctgggcagccctgtcggcaaggagcgtgcatactgcgtttgtgtaattgtttgctgtatctcccttccctctgagctgtattgttctttaatggctgtcttgcccttcgggctagtcggnaggatcctctagag

SEQ ID NO: 737075 - DNA, 4587 bp, Homo sapiens
tagatgacaaatagtttttatttacttttgctctaagtagttcttctaactttgaataaaatgtctcttacatcatgaactaaatgaaatttgacatgccaaggctattccaggaggctgaaagtttggaggcagtaattctctactggggctgtctgccttaggacaaaattcactttattttgctttaggcccagttctaaggtttcccactagaaacaaattgctttttataccacagttcttatacaattatacatttggtagaatttataaggtgacaattgccaagaaatacagcctgaacacaggtgcagagtagagagagactgaaattcttcttggacccagcacttgagcagggataatttatgagtagttctgtttgccacactaaagcaacaccacccccagaatttcacaactcttgtttctcctcagttggcaaatgttgtttttggtttgctagttctgttttataaagatgtaaaagacttgcagtctttcatttaaaagacatccaactgagagagcgcgagtggaaatcatcgtgaatataattacaatgtgggcagtaataagcatttatactgcaagtttaatcatttacagctgacacatttaagagcccatttagttaccttgaacaaaagcaacagtgtggcatagtggttctcaatcctggctgactttagaatcacctggggagctttaaaaaggaaaaaaagagttcatgggcacagctcctggagactttgatttattctgtctgaggcagggctcaggcctctgtgtttaaacgccccagatgattctaatttgtagtcagacttgagaatgaccggtaaagcagaaggagcatgcgtttagagtgaaacgttggctcttctcttagggatcggcagagacttcactctcacaggctggcacggtgactgctctctctggttccaaaagcaaggtcagcctcatgaggcacctgcaacctcggcttttcttggagtttcttccaaaatttcctggaacttggttctctcatattccaccaactggcgttgaaggtgcggtctgagactcataattgtaaaattggccatgtccatttgcatgaggtccaggacatggaatatttgtctcagcacctccacgatgttgccagtagcctttaactctctgatatcattatctcgcacgggagcacacagctttcccatcgtactgatgacatagttggccaggccttggatgtcaacagcactgtgctcaggcctgctgcctaatgaggtctgtgtccaaaacttcacagatttggttgcgaagccggttgccaccgggagtgagaaaagagagaagaatctctctgatttcttcaaacagtttgatggcatgttcaaactcaggagggtcagcatttagttctgaatccaagacgtcccagaaggcctggtgaacaatgtgcttcactcgaccagccaaactcttttctgggagagcctcttgtttcaattgaaagttctcatttacagcaatctcatgagcaagagtcaagtttgataagttccttgctgtagccatcacttcatcaaatgttacaacccttggagggcttgttgaagcaggagagctggatttgctggaggagtcacttgtaaagctctgcctggagcattcatagtcactgagcgaagccatgctttcggaaaaccgggaagaatcagaatcgcttggctggtcctctcccacacactgcttctcgccattgaagggcattttgcgtcacttaagtgtgggtaaaaaggtagcacctgtgcttccccctctggggccctcaacctctcacaaaatggcattgaagctgcttccacacatgactgggtatcttcggccctgggcctcttcaaatcaggcaacttccactggctgtcagggtgatgcatgaaatccctagagaagagaggaaaaggaccacggcagggagcctcctcaagtgggaaccactgagattaactcattatccgttggcagagagggcttctcactctattgcccaggctgatgtgcagtagccattcactggtgagatcatcacgcgctacagcatcaaactcctggcctcaagtgatccccctgcctcagcctccgaagtagctgggattacaggtgcagtctttgcaagccacatttggaacttttgagtccatcttgagaagctcccaacataaacaagacctcacagagaaagctgtgaagcaaggggagagtgaggtcagccggatcagcgaagtgctgcagaaactccagaatgagattctcaaagacctctcggatgggatccatgtggtgaaggacgcccgggagcgggacttcacgtccctggagaacacggtggaggagcggctgacggagctcaccaaatccatcaacgacaacatcgccatcttcacagaagtccagaagaggagccagaaggagatcaatgacatgaaggcaaaggttgcctccctggaagaatctgaggggaacaagcaggatttgaaagccttaaaggaagctgtgaaggagatacagacctcagccaagtccagagagtgggacatggaggccctgagaagtacccttcagactatggagtctgacatctacaccgaggtccgcgagctggtgagcctcaagcaggagcagcaggctttcaaggaggcggccgacacggagcggctcgccctgcaggccctcacggagaagcttctcaggtctgaggagtccgtctcccgcctcccggaggagatccggagactggaggaagagctccgccagctgaagtccgattcccacgggccgaaggaggacggaggcttcagacactcggaagcctttgaggcactccagcaaaagagtcagggactggactccaggctccagcacgtggaggatggggtgctctccatgcaggtggcttctgcgcgccagaccgagagcctggagtccctcctgtccaagagccaggagcacgagcagcgcctggccgccctgcaggggcgcctggaaggcctcgggtcctcagaggcagaccaggatggcctggccagcacggtgaggagcctgggcgagacccagctggtgctctacggtgacgtggaggagctgaagaggagtgtgggcgagctccccagcaccgtggaatcactccagaaggtgcaggagcaggtgcacacgctgctcagtcaggaccaagcccaggccgcccgtctgcctcctcaggacttcctggacagactttcttctctagacaacctgaaagcctcagtcagccaagtggaggcggacttgaaaatgctcaggactgctgtggacagtttggttgcatactcggtcaaaatagaaaccaacgagaacaatctggaatcagccaagggtttactagatgacctgaggaatgatctggataggttgtttgtgaaagtggagaagattcacgaaaaggtctaaatgaattgcgtgtgcagggcgcggatttaaagtccaatttctcatgaccaaaaaatgtgtggttttttcccatgtgtcccctaccccccaatttcttgtcccctcttaaagagcagttgtcaccacctgaacaccaaggcattgtattttcatgcccagttaacttatttacaatatttaagttctctgcttctgcatttggttggtttcctgaagcgcagcccctgtgaataacaggtggcttttcatggatgtctctagtcagagaaaaatgataaaggcttaaattgaggattaacagaagcagattaacctcagaaatcctgtctggctggcagatttcaagtaaaaaaaaaaaaaaggtgggttggggggacccttttctttctagttgtctttaaggaaaattaattttactttttttttgttctggccgaaatttttatgagatatctctcacttgtcttccactttgaaccggttaaagctcatagctgtcagctctgaatgaggaggggagaagcccctgggtctttctttgaaaggaatccgctgcttgagggctgcctccctcatggtgtgcgtgtcgtttctcttcctgacgcatcttgtgatatcagaggtaactatgcaaagcatccaggcggttctgaatgtgaagcactacacccagcagagtcccggtgccctctgtccccactgccggcccatgttctctctccggaggtcaccaaggaatgcacaggtttcgactaccagaaaggggagtccttgggttctttcaaaaaattcgtgaggagagctgtctacagtggaatagggggtctccctggggaatgcaggccaagtccttttattttaacatgatgtccatgaagaggtttgccgtctgggcagccctgtcggcaaggagcgtgcatactgcgtttgtgtaattgtttgctgtatctcccttccctctgagctgaatgttgtgctggagaattacccacttctttgtaatagtattcgaggaaagtgccacacgctagaggaggtctggtcttgttggattgaactgcttcactactcttggatcttgaactacctggttacgctctt

SEQ ID NO: 737076 - DNA, 4498 bp, Homo sapiens
tagatgacaaatagtttttatttacttttgctctaagtagttcttctaactttgaataaaatgtctcttacatcatgaactaaatgaaatttgacatgccaaggctattccaggaggctgaaagtttggaggcagtaattctctactggggctgtctgccttaggacaaaattcactttattttgctttaggcccagttctaaggtttcccactagaaacaaattgctttttataccacagttcttatacaattatacatttggtagaatttataaggtgacaattgccaagaaatacagcctgaacacaggtgcagagtagagagagactgaaattcttcttggacccagcacttgagcagggataatttatgagtagttctgtttgccacactaaagcaacaccacccccagaatttcacaactcttgtttctcctcagttggcaaatgttgtttttggtttgctagttctgttttataaagatgtaaaagacttgcagtctttcatttaaaagacatccaactgagagagcgcgagtggaaatcatcgtgaatataattacaatgtgggcagtaataagcatttatactgcaagtttaatcatttacagctgacacatttaagagcccatttagttaccttgaacaaaagcaacagtgtggcatagtggttctcaatcctggctgactttagaatcacctggggagctttaaaaaggaaaaaaagagttcatgggcacagctcctggagactttgatttattctgtctgaggcagggctcaggcctctgtgtttaaacgccccagatgattctaatttgtagtcagacttgagaatgaccggtaaagcagaaggagcatgcgtttagagtgaaacgttggctcttctcttagggatcggcagagacttcactctcacaggctggcacggtgactgctctctctggttccaaaagcaaggtcagcctcatgaggcacctgcaacctcggcttttcttggagtttcttccaaaatttcctggaacttggttctctcatattccaccaactggcgttgaaggtgcggtctgagactcataattgtaaaattggccatgtccatttgcatgaggtccaggacatggaatatttgtctcagcacctccacgatgttgccagtagcctttaactctctgatatcattatctcgcacgggagcacacagctttcccatcgtactgatgacatagttggccaggccttggatgtcaacagcactgtgctcaggcctgctgcctaatgaggtctgtgtccaaaacttcacagatttggttgcgaagccggttgccaccgggagtgagaaaagagagaagaatctctctgatttcttcaaacagtttgatggcatgttcaaactcaggagggtcagcatttagttctgaatccaagacgtcccagaaggcctggtgaacaatgtgcttcactcgaccagccaaactcttttctgggagagcctcttgtttcaattgaaagttctcatttacagcaatctcatgagcaagagtcaagtttgataagttccttgctgtagccatcacttcatcaaatgttacaacccttggagggcttgttgaagcaggagagctggatttgctggaggagtcacttgtaaagctctgcctggagcattcatagtcactgagcgaagccatgctttcggaaaaccgggaagaatcagaatcgcttggctggtcctctcccacacactgcttctcgccattgaagggcattttgcgtcacttaagtgtgggtaaaaaggtagcacctgtgcttccccctctggggccctcaacctctcacaaaatggcattgaagctgcttccacacatgactgggtatcttcggccctgggcctcttcaaatcaggcaacttccactggctgtcagggtgatgcatgaaatccctagagaagagaggaaaaggaccacggcagggagcctcctcaagtgggaaccactgagattaactcattatccgttggcagagagggcttctcactctattgcccaggctgatgtgcagtagccattcactggtgagatcatcacgcgctacagcatcaaactcctggcctcaagtgatccccctgcctcagcctccgaagtagctgggattacaggtgcagtctttgcaagccacatttggaacttttgagtccatcttgagaagctcccaacataaacaagacctcacagagaaagctgtgaagcaaggggagagtgaggtcagccggatcagcgaagtgctgcagaaactccagaatgagattctcaaagacctctcggatgggatccatgtggtgaaggacgcccgggagcgggacttcacgtccctggagaacacggtggaggagcggctgacggagctcaccaaatccatcaacgacaacatcgccatcttcacagaagtccagaagaggagccagaaggagatcaatgacatgaaggcaaaggttgcctccctggaagaatctgaggggaacaagcaggatttgaaagccttaaaggaagctgtgaaggagatacagacctcagccaagtccagagagtgggacatggaggccctgagaagtacccttcagactatggagtctgacatctacaccgaggtccgcgagctggtgagcctcaagcaggagcagcaggctttcaaggaggcggccgacacggagcggctcgccctgcaggccctcacggagaagcttctcaggtctgaggagtccgtctcccgcctcccggaggagatccggagactggaggaagagctccgccagctgaagtccgattcccacgggccgaaggaggacggaggcttcagacactcggaagcctttgaggcactccagcaaaagagtcagggactggactccaggctccagcacgtggaggatggggtgctctccatgcaggtggcttctgcgcgccagaccgagagcctggagtccctcctgtccaagagccaggagcacgagcagcgcctggccgccctgcaggggcgcctggaaggcctcgggtcctcagaggcagaccaggatggcctggccagcacggtgaggagcctgggcgagacccagctggtgctctacggtgacgtggaggagctgaagaggagtgtgggcgagctccccagcaccgtggaatcactccagaaggtgcaggagcaggtgcacacgctgctcagtcaggaccaagcccaggccgcccgtctgcctcctcaggacttcctggacagactttcttctctagacaacctgaaagcctcagtcagccaagtggaggcggacttgaaaatgctcaggactgctgtggacagtttggttgcatactcggtcaaaatagaaaccaacgagaacaatctggaatcagccaagggtttactagatgacctgaggaatgatctggataggttgtttgtgaaagtggagaagattcacgaaaaggtctaaatgaattgcgtgtgcagggcgcggatttaaagtccaatttctcatgaccaaaaaatgtgtggttttttcccatgtgtcccctaccccccaatttcttgtcccctcttaaagagcagttgtcaccacctgaacaccaaggcattgtattttcatgcccagttaacttatttacaatatttaagttctctgcttctgcatttggttggtttcctgaagcgcagcccctgtgaataacaggtggcttttcatggatgtctctagtcagagaaaaatgataaaggcttaaattgaggattaacagaagcagattaacctcagaaatcctgtctggctggcagatttcaagtaaaaaaaaaaaaaaggtgggttggggggacccttttctttctagttgtctttaaggaaaattaattttactttttttttgttctggccgaaatttttatgagatatctctcacttgtcttccactttgaaccggttaaagctcatagctgtcagctctgaatgaggaggggagaagcccctgggtctttctttgaaaggaatccgctgcttgagggctgcctccctcatggtgtgcgtgtcgtttctcttcctgacgcatcttgtgatatcagaggtaactatgcaaagcatccaggcggttctgaatgtgaagcactacacccagcagagtcccggtgccctctgtccccactgccggcccatgttctctctccggaggtcaccaaggaatgcacaggtttcgactaccagaaatccaggtggtcctggcgacgcaatcgagaggagaggcgatctccagaggaaacgggcggtatccatgggggcatgccgggactaagatcctagtatctgtcgagcactgaagtacaattgttgacgacaggccatagggtatgaggccctgttgggcctaggtgaggtgactaactgtcgtatgatgtaattgatctgaaaggagatcctcctgccctgtccggaattcctcggtatcgttatctacctc

SEQ ID NO: 737077 - DNA, 4582 bp, Homo sapiens
tagatgacaaatagtttttatttacttttgctctaagtagttcttctaactttgaataaaatgtctcttacatcatgaactaaatgaaatttgacatgccaaggctattccaggaggctgaaagtttggaggcagtaattctctactggggctgtctgccttaggacaaaattcactttattttgctttaggcccagttctaaggtttcccactagaaacaaattgctttttataccacagttcttatacaattatacatttggtagaatttataaggtgacaattgccaagaaatacagcctgaacacaggtgcagagtagagagagactgaaattcttcttggacccagcacttgagcagggataatttatgagtagttctgtttgccacactaaagcaacaccacccccagaatttcacaactcttgtttctcctcagttggcaaatgttgtttttggtttgctagttctgttttataaagatgtaaaagacttgcagtctttcatttaaaagacatccaactgagagagcgcgagtggaaatcatcgtgaatataattacaatgtgggcagtaataagcatttatactgcaagtttaatcatttacagctgacacatttaagagcccatttagttaccttgaacaaaagcaacagtgtggcatagtggttctcaatcctggctgactttagaatcacctggggagctttaaaaaggaaaaaaagagttcatgggcacagctcctggagactttgatttattctgtctgaggcagggctcaggcctctgtgtttaaacgccccagatgattctaatttgtagtcagacttgagaatgaccggtaaagcagaaggagcatgcgtttagagtgaaacgttggctcttctcttagggatcggcagagacttcactctcacaggctggcacggtgactgctctctctggttccaaaagcaaggtcagcctcatgaggcacctgcaacctcggcttttcttggagtttcttccaaaatttcctggaacttggttctctcatattccaccaactggcgttgaaggtgcggtctgagactcataattgtaaaattggccatgtccatttgcatgaggtccaggacatggaatatttgtctcagcacctccacgatgttgccagtagcctttaactctctgatatcattatctcgcacgggagcacacagctttcccatcgtactgatgacatagttggccaggccttggatgtcaacagcactgtgctcaggcctgctgcctaatgaggtctgtgtccaaaacttcacagatttggttgcgaagccggttgccaccgggagtgagaaaagagagaagaatctctctgatttcttcaaacagtttgatggcatgttcaaactcaggagggtcagcatttagttctgaatccaagacgtcccagaaggcctggtgaacaatgtgcttcactcgaccagccaaactcttttctgggagagcctcttgtttcaattgaaagttctcatttacagcaatctcatgagcaagagtcaagtttgataagttccttgctgtagccatcacttcatcaaatgttacaacccttggagggcttgttgaagcaggagagctggatttgctggaggagtcacttgtaaagctctgcctggagcattcatagtcactgagcgaagccatgctttcggaaaaccgggaagaatcagaatcgcttggctggtcctctcccacacactgcttctcgccattgaagggcattttgcgtcacttaagtgtgggtaaaaaggtagcacctgtgcttccccctctggggccctcaacctctcacaaaatggcattgaagctgcttccacacatgactgggtatcttcggccctgggcctcttcaaatcaggcaacttccactggctgtcagggtgatgcatgaaatccctagagaagagaggaaaaggaccacggcagggagcctcctcaagtgggaaccactgagattaactcattatccgttggcagagagggcttctcactctattgcccaggctgatgtgcagtagccattcactggtgagatcatcacgcgctacagcatcaaactcctggcctcaagtgatccccctgcctcagcctccgaagtagctgggattacaggtgcagtctttgcaagccacatttggaacttttgagtccatcttgagaagctcccaacataaacaagacctcacagagaaagctgtgaagcaaggggagagtgaggtcagccggatcagcgaagtgctgcagaaactccagaatgagattctcaaagacctctcggatgggatccatgtggtgaaggacgcccgggagcgggacttcacgtccctggagaacacggtggaggagcggctgacggagctcaccaaatccatcaacgacaacatcgccatcttcacagaagtccagaagaggagccagaaggagatcaatgacatgaaggcaaaggttgcctccctggaagaatctgaggggaacaagcaggatttgaaagccttaaaggaagctgtgaaggagatacagacctcagccaagtccagagagtgggacatggaggccctgagaagtacccttcagactatggagtctgacatctacaccgaggtccgcgagctggtgagcctcaagcaggagcagcaggctttcaaggaggcggccgacacggagcggctcgccctgcaggccctcacggagaagcttctcaggtctgaggagtccgtctcccgcctcccggaggagatccggagactggaggaagagctccgccagctgaagtccgattcccacgggccgaaggaggacggaggcttcagacactcggaagcctttgaggcactccagcaaaagagtcagggactggactccaggctccagcacgtggaggatggggtgctctccatgcaggtggcttctgcgcgccagaccgagagcctggagtccctcctgtccaagagccaggagcacgagcagcgcctggccgccctgcaggggcgcctggaaggcctcgggtcctcagaggcagaccaggatggcctggccagcacggtgaggagcctgggcgagacccagctggtgctctacggtgacgtggaggagctgaagaggagtgtgggcgagctccccagcaccgtggaatcactccagaaggtgcaggagcaggtgcacacgctgctcagtcaggaccaagcccaggccgcccgtctgcctcctcaggacttcctggacagactttcttctctagacaacctgaaagcctcagtcagccaagtggaggcggacttgaaaatgctcaggactgctgtggacagtttggttgcatactcggtcaaaatagaaaccaacgagaacaatctggaatcagccaagggtttactagatgacctgaggaatgatctggataggttgtttgtgaaagtggagaagattcacgaaaaggtctaaatgaattgcgtgtgcagggcgcggatttaaagtccaatttctcatgaccaaaaaatgtgtgagcagttgtcaccacctgaacaccaaggcattgtattttcatgcccagttaacttatttacaatatttaagttctctgcttctgcatttggttggtttcctgaagcgcagcccctgtgaataacaggtggcttttcatggatgtctctagtcagagaaaaatgataaaggcttaaattgaggattaacagaagcagattaacctcagaaatcctgtctggctggcagatttcaagtaaaaaaaaaaaaaaggtgggttggggggacccttttctttctagttgtctttaaggaaaattaattttactttttttttgttctggccgaaatttttatgagatatctctcacttgtcttccactttgaaccggttaaagctcatagctgtcagctctgaatgaggaggggagaagcccctgggtctttctttgaaaggaatccgctgcttgagggctgcctccctcatggtgtgcgtgtcgtttctcttcctgacgcatcttgtgatatcagaggtaactatgcaaagcatccaggcggttctgaatgtgaagcactacacccagcagagtcccggtgccctctgtccccactgccggcccatgttctctctccggaggtcaccaaggaatgcacaggtttcgactaccagaaaggggagtccttgggttctttcaaaaaattcgtgaggagagctgtctacagtggaatagggggtctccctggggaatgcaggccaagtccttttattttaacatgatgtccatgaagaggtttgccgtctgggcagccctgtcggcaaggagcgtgcatactgcgtttgtgtaattgtttgctgtatctcccttccctctgagctgtattgttctttaatggctgtcttgcccttccaaaaaaaattgaaaaaaaaaaaaaaaaaaaaacccgaaaagtaaaaaaaaaaaaaaaaagttttgtttagtttactgtgaaatgaactgtatggcttatttacagtatttttaattcttaataaacacttgagctttgttatgacttt

SEQ ID NO: 737078 - DNA, 4323 bp, Homo sapiens
tagatgacaaatagtttttatttacttttgctctaagtagttcttctaactttgaataaaatgtctcttacatcatgaactaaatgaaatttgacatgccaaggctattccaggaggctgaaagtttggaggcagtaattctctactggggctgtctgccttaggacaaaattcactttattttgctttaggcccagttctaaggtttcccactagaaacaaattgctttttataccacagttcttatacaattatacatttggtagaatttataaggtgacaattgccaagaaatacagcctgaacacaggtgcagagtagagagagactgaaattcttcttggacccagcacttgagcagggataatttatgagtagttctgtttgccacactaaagcaacaccacccccagaatttcacaactcttgtttctcctcagttggcaaatgttgtttttggtttgctagttctgttttataaagatgtaaaagacttgcagtctttcatttaaaagacatccaactgagagagcgcgagtggaaatcatcgtgaatataattacaatgtgggcagtaataagcatttatactgcaagtttaatcatttacagctgacacatttaagagcccatttagttaccttgaacaaaagcaacagtgtggcatagtggttctcaatcctggctgactttagaatcacctggggagctttaaaaaggaaaaaaagagttcatgggcacagctcctggagactttgatttattctgtctgaggcagggctcaggcctctgtgtttaaacgccccagatgattctaatttgtagtcagacttgagaatgaccggtaaagcagaaggagcatgcgtttagagtgaaacgttggctcttctcttagggatcggcagagacttcactctcacaggctggcacggtgactgctctctctggttccaaaagcaaggtcagcctcatgaggcacctgcaacctcggcttttcttggagtttcttccaaaatttcctggaacttggttctctcatattccaccaactggcgttgaaggtgcggtctgagactcataattgtaaaattggccatgtccatttgcatgaggtccaggacatggaatatttgtctcagcacctccacgatgttgccagtagcctttaactctctgatatcattatctcgcacgggagcacacagctttcccatcgtactgatgacatagttggccaggccttggatgtcaacagcactgtgctcaggcctgctgcctaatgaggtctgtgtccaaaacttcacagatttggttgcgaagccggttgccaccgggagtgagaaaagagagaagaatctctctgatttcttcaaacagtttgatggcatgttcaaactcaggagggtcagcatttagttctgaatccaagacgtcccagaaggcctggtgaacaatgtgcttcactcgaccagccaaactcttttctgggagagcctcttgtttcaattgaaagttctcatttacagcaatctcatgagcaagagtcaagtttgataagttccttgctgtagccatcacttcatcaaatgttacaacccttggagggcttgttgaagcaggagagctggatttgctggaggagtcacttgtaaagctctgcctggagcattcatagtcactgagcgaagccatgctttcggaaaaccgggaagaatcagaatcgcttggctggtcctctcccacacactgcttctcgccattgaagggcattttgcgtcacttaagtgtgggtaaaaaggtagcacctgtgcttccccctctggggccctcaacctctcacaaaatggcattgaagctgcttccacacatgactgggtatcttcggccctgggcctcttcaaatcaggcaacttccactggctgtcagggtgatgcatgaaatccctagagaagagaggaaaaggaccacggcagggagcctcctcaagtgggaaccactgagattaactcattatccgttggcagagagggcttctcactctattgcccaggctgatgtgcagtagccattcactggtgagatcatcacgcgctacagcatcaaactcctggcctcaagtgatccccctgcctcagcctccgaagtagctgggattacaggtgcagtctttgcaagccacatttggaacttttgagtccatcttgagaagctcccaacataaacaagacctcacagagaaagctgtgaagcaaggggagagtgaggtcagccggatcagcgaagtgctgcagaaactccagaatgagattctcaaagacctctcggatgggatccatgtggtgaaggacgcccgggagcgggacttcacgtccctggagaacacggtggaggagcggctgacggagctcaccaaatccatcaacgacaacatcgccatcttcacagaagtccagaagaggagccagaaggagatcaatgacatgaaggcaaaggttgcctccctggaagaatctgaggggaacaagcaggatttgaaagccttaaaggaagctgtgaaggagatacagacctcagccaagtccagagagtgggacatggaggccctgagaagtacccttcagactatggagtctgacatctacaccgaggtccgcgagctggtgagcctcaagcaggagcagcaggctttcaaggaggcggccgacacggagcggctcgccctgcaggccctcacggagaagcttctcaggtctgaggagtccgtctcccgcctcccggaggagatccggagactggaggaagagctccgccagctgaagtccgattcccacgggccgaaggaggacggaggcttcagacactcggaagcctttgaggcactccagcaaaagagtcagggactggactccaggctccagcacgtggaggatggggtgctctccatgcaggacttcctggacagactttcttctctagacaacctgaaagcctcagtcagccaagtggaggcggacttgaaaatgctcaggactgctgtggacagtttggttgcatactcggtcaaaatagaaaccaacgagaacaatctggaatcagccaagggtttactagatgacctgaggaatgatctggataggttgtttgtgaaagtggagaagattcacgaaaaggtctaaatgaattgcgtgtgcagggcgcggatttaaagtccaatttctcatgaccaaaaaatgtgtggttttttcccatgtgtcccctaccccccaatttcttgtcccctcttaaagagcagttgtcaccacctgaacaccaaggcattgtattttcatgcccagttaacttatttacaatatttaagttctctgcttctgcatttggttggtttcctgaagcgcagcccctgtgaataacaggtggcttttcatggatgtctctagtcagagaaaaatgataaaggcttaaattgaggattaacagaagcagattaacctcagaaatcctgtctggctggcagatttcaagtaaaaaaaaaaaaaaggtgggttggggggacccttttctttctagttgtctttaaggaaaattaattttactttttttttgttctggccgaaatttttatgagatatctctcacttgtcttccactttgaaccggttaaagctcatagctgtcagctctgaatgaggaggggagaagcccctgggtctttctttgaaaggaatccgctgcttgagggctgcctccctcatggtgtgcgtgtcgtttctcttcctgacgcatcttgtgatatcagaggtaactatgcaaagcatccaggcggttctgaatgtgaagcactacacccagcagagtcccggtgccctctgtccccactgccggcccatgttctctctccggaggtcaccaaggaatgcacaggtttcgactaccagaaaggggagtccttgggttctttcaaaaaattcgtgaggagagctgtctacagtggaatagggggtctccctggggaatgcaggccaagtccttttattttaacatgatgtccatgaagaggtttgccgtctgggcagccctgtcggcaaggagcgtgcatactgcgtttgtgtaattgtttgctgtatctcccttccctctgagctgtattgttctttaatggctgtcttgcccttccaaaaaaaattgaaaaaaaaaaaaaaaaaaaaacccgaaaagtaaaaaaaaaaaaaaaaagttttgtttagtttactgtgaaatgaactgtatggcttatttacagtatttttaattcttaataaacacttgagctttgttatgacttt

SEQ ID NO: 737079 - DNA, 753 bp, Homo sapiens
  misc_feature (737)..(737): n is a, c, g, or t
  misc_feature (739)..(741): n is a, c, g, or t
agcatgacttacagaagcctttaattataatttaccatttctggccaggcacagtagctcatgcctgtaacaccatcactttgggaggctgaggcgggatgattacttgagcccgggagttcaagaccagcctgggaaacagggagacccctgtctcttaaaaaaagaaaatcaaaaaatgagccaggcatggtggctcacacctgtggttctagctactgaggaggctgaggaaggaggatgatgagcctgcgcagtttaaactgcgccacttcactccagcctgggtgataagattatgtctcaaaacaaaacaaaaaggccacatcacattgtacactttaaatataaacaatttttgcttgtcaattataactcaataaagctggggcaggtaggggacacggcagtacagtaaaaatccctcacctatctgcttgcacaaatgcaagcagatttccatctgggcagcttttttcaaacttttggcagttgcatcctcacaactgccttattacttaattacataatatttaaccccttatgcttaaaaaaaaaacccacgaaactacagacttcatcagtctttgcactaatgtcctcttgttgaggaagaatctccttcagggtgggacgatgcacttagcagtcacatctctgtggccacaaaggctgcttctcatttataccgggagaaacgttgccagcacagctgctgtgcaggctcctcgtgccgnannngccacccaggcc

SEQ ID NO: 737080 - DNA, 20439 bp, Homo sapiens
  misc_feature (6)..(6): n is a, c, g, or t
  misc_feature (12)..(12): n is a, c, g, or t
  misc_feature (17)..(17): n is a, c, g, or t
  misc_feature (20)..(20): n is a, c, g, or t
  misc_feature (23)..(23): n is a, c, g, or t
  misc_feature (26)..(26): n is a, c, g, or t
  misc_feature (68)..(68): n is a, c, g, or t
  misc_feature (221)..(221): n is a, c, g, or t
  misc_feature (352)..(352): n is a, c, g, or t
  misc_feature (1501)..(1501): n is a, c, g, or t
  misc_feature (1575)..(1575): n is a, c, g, or t
  misc_feature (2791)..(2792): n is a, c, g, or t
  misc_feature (3066)..(3066): n is a, c, g, or t
  misc_feature (3101)..(3101): n is a, c, g, or t
  misc_feature (3169)..(3169): n is a, c, g, or t
  misc_feature (3211)..(3211): n is a, c, g, or t
  misc_feature (3655)..(3655): n is a, c, g, or t
  misc_feature (4593)..(4593): n is a, c, g, or t
  misc_feature (5613)..(5613): n is a, c, g, or t
  misc_feature (13212)..(13212): n is a, c, g, or t
  misc_feature (13418)..(13418): n is a, c, g, or t
  misc_feature (13537)..(13537): n is a, c, g, or t
  misc_feature (13615)..(13615): n is a, c, g, or t
  misc_feature (13671)..(13671): n is a, c, g, or t
  misc_feature (14945)..(14945): n is a, c, g, or t
tgcctnccagcngcccncanccngcngctgcccagagcccccatagagagaggtccccgccgccaccntcatggatcagccacagttcagcggggcgccccgctttctcacccggcccaaggccttcgtggtgtcggtgggcaaggacgccaccctcagctgccagatcgtgggtaatcccacgccacaggtgagctgggagaaggaccagcagccggtgncggccggcgcgcgcttccgtctggcccaggacggcgacctctaccgcctcactatcctggacctggcgctgggcgacagtgggcaatacgtgtgccgcgcgcgcaatgccataggcgaggccttcgctgcngtgggcctgcaggtggacgcggaggccgcgtgcgccgagcaggcgccgcacttcctgctgcggcccacgtccatccgcgtgcgcgagggctcagaggccaccttccgctgccgcgtgggtggctccccgaggccggcagtgagctggtccaaggacgggcggcgcctgggtgagcccgacggcccccgcgtgcgcgtggaggagctcggcgaggcaagtgcgctgcgcattcgggcggcgcggccgcgcgacggcggcacttacgaggtccgcgccgagaacccgctgggcgctgccagcgccgccgcggcgctagtggtggactcggacgccgcggacacggccagccggcccgggacctccacggccgcgctcctggcgcacctgcagcggcggcgcgaggctatgcgcgccgagggcgcccccgcctcaccgcccagcaccggcacgcgcacctgcacggtgactgaaggcaagcacgcgcgcctcagctgctacgtgaccggcgagcccaagcccgagacggtgtggaagaaggacggccagctggtgaccgagggccggcgccacgtggtgtacgaggacgcgcaggagaacttcgtgctcaagatcctcttctgcaagcagtcggaccgcggcctctacacctgcacggcgtccaacctcgtgggccagacctacagctctgtgctggtcgtagtgcgcgagcccgcggttcccttcaaaaagcggctgcaagatctggaggtgcgggagaaggagtcggccacgttcctatgtgaggtgccccagccgtccactgaggccgcgtggttcaaggaggagacgcggttgtgggcgagcgccaagtacggcatcgaggaggagggcaccgagcgccgcctgaccgtgcgcaatgtctcggccgacgacgacgcggtgtacatctgcgagacgccagagggcagccgcacggtggcggagctcgcagtccaaggaaacctcctccgaaagctccctcggaagacggcggtgcgcgtgggcgacacggctatgttttgcgtggagctggcggtcccggtgggccccgtccactggctgcggaaccaggaggaagtggtggcggggggccgcgtggccatctccgcggagggcacgcgccacacactnaccatctcccagtgctgcctggaggatgtgggccaggtggcctttatggctggcgactgccagacgtccacccngttctgcgtgtcggcccccaggaagcctcccctgcaaccccctgtggatcctgtggtaaaggccaggatggagagttccgtgattctcagctggtccccaccaccccatggggaacgccctgtcactatcgacggctacctggtagagaagaagaagcttggcacctacacctggatcaggtgccacgaggctgaatgggtggctacacctgagctgaccgtggctgatgtggcggaggaggggaacttccagttccgagtgtccgctctcaacagctttggtcagagtccctacctcgagttcccggggactgtccacctggcccccaagctggccgtgaggacaccgctgaaggcggtgcaggcggtagagggtggcgaggtcactttctccgtggacctcacggtggcctcagcgggtgagtggttcctggatgggcaggccctgaaggccagcagtgtgtatgagatccactgtgatcgcacccggcacacgctcaccatccgggaggtgcccgccagcctgcacggggcgcagctgaagttcgtggccaacggcattgagagcagcatccggatggaggtccgggcggccccagggctgactgccaacaagccgccagccgcagctgcccgggaggtgctggctcggctgcacgaggaggcgcagctgctggctgagctgtcagatcaggctgcggctgtgacgtggctgaaggatggtcgcacactgtccccaggccccaagtatgaggtgcaggcatcggccgggcggcgggtgctccttgtgcgagatgtggcccgggacgatgcaggcctctacgagtgcgtcagccgcgggggccgcatcgcctaccagctctccgtgcaaggcctcgcgcgctttctgcacaaggacatggcgggcagctgtgtggatgccgtggctgggggcccggcgcagtttgagtgtgagacctccgaagcccacgtccacgtgcactggtacaaggatggcatggagctgggccactccggtgagcgcttcttgcaggaggatgtggggacgcggcaccggctggtggcagccacagtcaccaggcaggatgaaggcacctactcctgccgcgtgggcgaggactctgtggacttccggctccgcgtctctgagcccaaggtggtgtttgctaaggagcagctggcacgcaggaagctgcaggcagaggcaggagccagnnccacactgagctgcgaggtggcccaggcccagacggaggtgacgtggtacaaggatgggaagaagctgagctccagctcgaaagtgtgcatggaggccacaggctgcacgcgcaggctggttgtgcagcaggcaggccaggcggatgccggggagtatagctgcgaggctgggggccagcggctctccttccatctggatgtcaaagagcccaaggtggtgtttgccaaggaccaggtggcacacagtgaggtgcaggctgaggcaggggccantgccacgctgagctgcgaggtggcccaggcccagncggaggtgatgtggtacaaagatgggaagaagctgagctccagcttgaaagtgcatgtagaggccaanggctgcagacggaggctggtggtgcagcaggcaggcaagacngatgccggggactacagctgcgaggccaggggccagagggtctccttccgcctgcacatcacagagcccaagatgatgtttgcaaaggagcagtcagtgcataatgaggtgcaggctgaggcgggggccagtgccatgctgagctgtgaggtggcccaggcccagacggaggtgacgtggtacaaggatgggaagaagctgagctccagctcaaaagtgggcatggaggtcaaagggtgcacacggaggctggtgctgccacaggcgggcaaagcagatgctggggagtacagctgtgaggctgggggccagagagtctccttccacctgcacatcacagagcccaagggggtgtttgcgaaggagcagtcagtgcataatgaggtgcaggctgaggcggggaccactgccatgctgagctgtgaggtggcccagccccagacngaggtgacgtggtacaaggacgggaagaagctgagctccagctcaaaagtacgcatggaggtcaagggctgcacacgaaggctggtagtgcagcaggtgggcaaagcagatgctggggagtacagctgcgaggctgggggccagagagtctcctttcaactgcacatcacagagcccaaggcagtgtttgccaaggagcagttggtgcataatgaggtgcggactgaggcaggggccagtgccacactgagctgtgaggtggcccaggcccagacagaggtgacgtggtacaaggatgggaagaagctgagctccagttcgaaagtgcgcatagaggctgcgggctgcatgcggcagctggtggtgcagcaggcaggccaggcagatgctggggagtacacctgtgaggctgggggccagcggctctccttccacctggatgtttcagagcccaaggcggtgtttgcaaaggagcagctggcacacaggaaggtgcaggccgaggcgggggccattgccacgctgagctgcgaggtggcccaggcccagacagaggtgacgtggtacaaggacgggaagaagctgagctccagctcgaaagttcgaatggaggctgtgggctgcacacggaggctggtggtgcagcaggcatgccaggcggacaccggggagtatagctgcgaggccgggggccagcggctctccttcagcctggacgtggcagagcccaaggtggtgtttgccaaggagcagccagtgcacagggaggtgcaggcccaggcgggggccagcaccacactcagctgcgaggtggctcaggcccagacggaggtgatgtggtacaaggacgggaagaagctgagcttcagctcgaaagtgcgcatggaggctgtgggctgcacacggaggctggtggtgcagcaggcgggccaggcggncgccggggagtacagctgcgaggcggggagccagcggctctccttccacctgcacgtggcagagcccaaggcggtgtttgccaaggagcagccagcgagcagggaggtgcaggctgaggcggggaccagtgccacgctgagctgcgaggtggcccaggcccagacagaggtgacgtggtacaaggacgggaagaaactgagctccagctcgaaagtgcgaatggaggccgtgggctgcacacggaggctggtggtgcaggaggcaggccaggcggacgccggggagtacagctgcaaggccggggatcagcggctgtccttccacctgcacgtggcagagcccaaggtggtgtttgccaaggagcagccagcacacagggaggtgcaggctgaggcgggggccagtgccacgctgagctgcgaggtggcccaggcccagacagaggtgacgtggtacaaggatgggaagaagctgagttccagctcgaaagtgcgcgtggaggccgtgggctgcacacggaggctggtggtgcagcaggcgggccaggcggatgctggggagtacagctgtgaggcggggggccaacggctgtccttccgcctgcacgtggcagagctggagccccaaatttcagagagaccctgccgcagggagcctctggtggtcaaggagcatgaagacatcatcctgaccgccacactggccacaccctctgcggccacggtgacctggctcaaggatggtgtggagattcgccgcagcaagcggcatgagacagccagccagggggacacccacaccctgaccgtgcatggcgcccaggttctggacagcgccatctacagctgccgtgtgggcgcagaggggcaggacttcccagtgcaggtggaagaggtggccgccaagttctgccggctgctggagcctgtgtgcggcgagctgggtggcacggtgacactggcctgcgagctaagcccagcgtgtgcagaggtggtgtggcgctgcggcaacacgcagcntcgggtgggcaagcgcttccagatggtggccgaggggcccgtgcgctcactcactgtgttggggctgcgcgcagaggacgcaggggagtacgtgtgtgagagccgtgatgaccacaccagtgcgcagctcaccgtcagtgtgccccgagtggtgaagtttatgtctgggctgagcaccgtggtcgcagaggagggcggcgaggccaccttccagtgcgtggtgtcccccagtgatgtggcagtcgtgtggttccgggacggtgccctgcttcagcccagcgagaagtttgccatatcacagagtggcgccagccacagcctgaccatctcagacctggtgctggaggacgcgggccagatcaccgtggaggctgagggcgcctcatcctctgctgccctgagggtccgagaggcgcctgtgctgttcaaaaagaagctggagccgcagacggtggaggagcggagctcggtgaccctggaggtggagctgacgcggccgtggccggagctgaggtggacacggaacgcgacggccctggcgccgggaaagaacgtggagatccacgccgagggcgcccgccaccgcctggttctgcacaacgtaggttttgccgaccgtggcttctttggctgcgagacgccggatgacaagacacaggccaaactcaccgtggagatgcgccaggtacggctcgtacggggcctgcaggcagtggaggcacgggagcagggcacggctaccatggaggtgcagctgtcgcatgcggacgtggatggcagctggactcgtgacggtctgcggttccagcaggggcccacgtgccacctggctgtgcggggccccatgcacaccctcacactctcggggctgcggccagaggatagtggccttatggtcttcaaggccgaaggagtgcacacgtcggcgcggctcgtggtcaccgagcttcccgtgagcttcagccgcccgctgcaggacgtggtgaccactgagaaggagaaggttaccctggagtgcgagctgtcgcgtcctaatgtggatgtgcgctggctgaaggacggtgtggagctgcgggcaggcaagacgatggccatcgcagcccagggcgcctgcaggagcctcaccatttaccggtgcgagttcgcggatcagggagtgtatgtgtgtgatgcccatgatgcccagagctctgcctccgtgaaggtacaaggaaggacatacactctcatctaccggagagtcctggcggaagatgcaggagagatccaatttgtagccgaaaatgcagaatcgcgagcccagctccgagtgaaggagctgccagtgaccctcgtgcgcccgctgcgggacaagattgccatggagaagcaccgcggtgtgctggagtgtcaggtgtcccgggccagcgcccaggtgcggtggttcaagggcagtcaggagctgcagcccgggcccaagtacgagctggtcagtgatggcctctaccgcaagctgatcatcagtgatgtccacgcagaggacgaggacacctacacctgtgacgccggtgatgtcaagaccagtgcacagttcttcgtggaagagcaatccatcaccattgtgcggggtctgcaggacgtgacagtgatggagcccgctcctgcctggtttgagtgtgagacctccatcccctcagtgcggccacctaagtggctcctggggaagacggtgttgcaggctggggggaacgtgggcctggagcaggagggcacggtgcaccggctgatgctgcggcggacctgctccaccatgaccgggcccgtgcacttcaccgttggcaagtcgcgctcctctgcccgcctggtggtctcagacatccccgtagtcctcacacggccgttggagcccaagacagggcgtgagctgcagtcagtggtcctgtcctgcgacttccggccagcccccaaggctgtgcagtggtacaaggatgacacgcccctgtctccctctgagaagtttaagatgagcctggagggtcagatggctgagctgcgcatcctccggctcatgcctgctgatgctggtgtctaccggtgccaggcgggcagtgcccacagcagcactgaggtcactgtggaagcgcgggaggtgacagtgacagggccgctacaggatgcagaggccacggaggagggctgggccagcttctcctgtgagctgtcccacgaggatgaggaggtcgagtggtcgctcaacgggatgcccctgtacaacgacagcttccatgagatctcacacaagggccggcgccacacgctggtactgaagagcatccagcgggctgatgcgggcatagtacgcgcctcctccctgaaggtgtcgacctctgcccgcctggaggtccgagtgaagccggtggtgttcctgaaggcgctggatgacctgtccgcagaggagcgcggcaccctggccctgcagtgtgaagtctctgaccccgaggcccatgtggtgtggcgcaaagatggcgtgcagctgggccccagtgacaagtatgacttcctgcacacggcgggcacgcgggggctcgtggtgcatgacgtgagccctgaagacgccggcctgtacacctgccacgtgggctccgaggagacccgggcccgggtccgcgtgcacgatctgcacgtgggcatcaccaagaggctgaagacaatggaggtgctggaaggggaaagctgcagctttgagtgcgtcctgtcccacgagagtgccagcgacccggccatgtggacagtcggtgggaagacagtgggcagctccagccgcttccaggccacacgtcagggccgaaaatacatcctggtggtccgggaggctgcaccaagtgatgccggggaggtggtcttctctgtgcggggcctcacctccaaggcctcactcattgtcagagagaggccggccgccatcatcaagcccctggaagaccagtgggtggcgccaggggaggacgtggagctgcgctgtgagctgtcacgggcgggaacgcccgtgcactggctgaaggacaggaaggccatccgcaagagccagaagtatgatgtggtctgcgagggcacgatggccatgctggtcatccgcggggcctcgctcaaggacgcgggcgagtacacgtgtgaggtggaggcttccaagagcacagccagcctccatgtggaagaaaaagcaaactgcttcacagaggagctgaccaatctgcaggtggaggagaaaggcacagctgtgttcacgtgcaagacggagcaccccgcggccacagtgacctggcgcaagggcctcttggagctacgggcctcagggaagcaccagcccagccaggagggcctgaccctgcggctcaccatcagtgccctggagaaggcagacagcgacacctatacctgcgacattggccaggcccagtcccgggcccagctcctagtgcaaggccggagagtgcacatcatcgaggacctggaggatgtggatgtgcaggagggctcctcggccaccttccgttgccggatctccccggccaactacgagcctgtgcactggttcctggacaagacacccctgcatgccaacgagctcaatgagatcgatgcccagcccgggggctaccacgtgctgaccctgcggcagctggcgctcaaggactcgggcaccatctactttgaggcgggtgaccagcgggcctcggccgccctgcgggtcactgagaagccaagcgtcttctcccgggagctcacagatgccaccatcacagagggtgaggacttgaccctggtgtgcgagaccagcacctgcgacattcctgtgtgctggaccaaggatgggaagaccctgcgggggtctgcccggtgccagctgagccatgagggccaccgggcccagctgctcatcactggggccaccctgcaggacagtggacgctacaagtgtgaggctgggggcgcctgcagcagctccattgtcagggtgcatgcgcggccagtgcggttccaggaggccctgaaggacctggaggtgctggagggtggtgctgccacactgcgctgtgtgctgtcatctgtggctgcgcccgtgaagtggtgctatggaaacaacgtcctgaggccaggtgacaaatacagcctacgccaggagggtgccatgctggagctggtggtccggaacctccggccgcaggacagcgggcggtactcatgctccttcggggaccagactacttctgccaccctcacagtgactgccctgcctgcccagttcatcgggaaactgagaaacaaggaggccacagaaggggccacggccacgctgcggtgtgagctgagcaaggcagcccctgtggagtggagaaaggggtccgagaccctcagagatggggacagatactgtctgaggcaggacggggccatgtgtgagctgcagatccgtggcctggccatggtggatgccgcggagtactcgtgtgtgtgtggagaggagaggacctcagcctcactcaccatcaggcccatgcctgcccacttcataggaagactgagacaccaagagagcatagaaggggccacagccacgctgcggtgtgagctgagcaaggcggcccccgtggagtggaggaaggggcgtgagagcctcagagatggggacagacatagcctgaggcaggacggggctgtgtgcgagctgcagatctgtggcctggctgtggcagatgctggggagtactcctgtgtgtgtggggaggagaggacctctgccactctcaccgtgaaggccctgccagccaagttcacagagggtctgaggaatgaagaggccgtggaaggggccacagccatgttgtggtgtgaactgagcaaggtggcccctgtggagtggaggaaggggcccgagaacctcagagatggggacagatacatcctgaggcaggaggggaccaggtgtgagctgcagatctgtggcctggccatggcggacgccggggagtacttgtgtgtgtgcgggcaggagaggacctcagccacgctcaccatcagggctctgcctgccaggttcatagaagatgtgaaaaaccaggaggccagagaaggggccacggctgtgctgcagtgtgagctgaacagtgcagcccctgtggagtggagaaaggggtctgagacccttagagatggggacagatacagcctgaggcaggacgggactaaatgtgagctgcagattcgtggcctggccatggcagacactggggagtactcgtgcgtgtgcgggcaggagaggacctcggctatgctcaccgtcagggctctacccatcaagttcacagagggtctgaggaacgaagaggccacagaaggggcaacagccgtgctgcggtgtgagctgagcaagatggcccccgtggagtggtggaaggggcatgagaccctcagagatggagacagacacagcctgaggcaggacggggccaggtgtgagctgcagatccgcggcctcgtggcagaggacgctggggagtacctgtgcatgtgcgggaaggagaggacctcagccatgctcaccgtcagggccatgccttccaagttcatagagggtctgaggaatgaagaggccacagaaggggacacggccacgctgtggtgtgagctgagcaaggcggcaccggtggagtggaggaaggggcatgagaccctcagagatggggacagacacagcctgaggcaggacgggtccaggtgtgagctgcagatccgtggcctggctgtggtggatgccggggagtactcgtgtgtgtgcgggcaggagaggacctcagccacactcactgtcagggccctgcctgccagattcatagaagatgtgaaaaaccaggaggccagagaaggggccacggccgtgctgcaatgtgagctgagcaaggcggcccccgtggagtggaggaaggggtctgagaccctcagaggtggggacagatacagcctgaggcaggatgggaccagatgtgagctgcagattcatggcctgtctgtggcagacactggggagtactcgtgtgtgtgcgggcaggagaggacctcggccacactcaccgtcagggccccacagccagtgttccgggagccgctgcagagtctgcaggcggaggagggctccacggccaccctgcagtgtgagctgtctgagcccactgctacagtggtctggagcaagggtggcctgcagctgcaggccaatgggcgccgggagccacggcttcagggctgcaccgcggagctggtgttacaggacctacaacgtgaagacactggcgaatacacttgcacctgtggctcccaggccaccagtgccaccctcactgtcacagctgcgcctgtgcggttcctccgagagctgcagcaccaggaggtggatgagggaggcaccgcacacttatgctgcgagctgagccgggcgggtgcgagcgtggagtggcgcaagggctccctacagctcttcccttgtgccaagtaccagatggtgcaggatggtgcagctgcagagctgctggtacgcggagtggagcaggaggatgcgggtgactacacgtgtgacacgggccacacgcagagcatggccagcctctctgtccgtgtccccaggcccaagttcaagacccggcttcagagtctggagcaggagacaggtgacatagcccggctgtgctgtcagctgagtgatgcagagtcgggggccgtggtgcaatggctcaaggagggcgtggagctgcatgcgggccccaagtacgagatgcggagccagggggccacgcgggagctgctgatccaccaactggaggccaaggacacgggcgagtatgcctgtgtgacaggcggccagaaaaccgctgcctccctcagggtcacagagcctgaggtgaccattgtacgggggctggttgatgcggaggtgacggccgatgaggatgttgagttcagctgtgaggtgtccagggctggagccacaggcgtgcagtggtgcctacagggcctgccactgcaaagcaatgaggtgacagaggtggctgtgcgggatggccgcatccacaccctgcggctgaagggcgtgacgcccgaggacgctggcactgtctccttccatttgggaaaccatgcttcctctgcccagctcaccgtcagagctcctgaggtgaccatcctggagcccctgcaggacgtgcagctcagtgagggccaggatgccagcttccagtgccggctatccagagcttcaggccaggaggcccgctgggctttaggaggggtgcccctgcaggccaacgagatgaatgacatcactgtggagcagggcacactccacctgctcaccctgcacaaggtgacccttgaggatgctggaactgtcagtttccacgtgggcacgtgtagctctgaggcccagctgaaagtcacagccaagaacacggtggtgcgggggctggagaatgtggaggcgctggagggcggcgaggcgctgttcgagtgccagctgtcccagcccgaggtggccgcccacacctggctgctggacgacgaacccgtgcncacctcggagaacgccgaggtggtcttcttcgagaacggcctgcgccacctgctgctgctcaaaaacttgcggccacaagacagctgccgggtgaccttcctggctggggatatggtgacgtccgcattcctcacggtccgaggctggcgcctggagatcctggagcctctgaaaaacgcggcggtccgggccggcgcacaggcangcttcacctgcacgctcagcgaggcggtgcccgtgggagaggcgtcctggtacatcaatggcgcggcagtgcagccggatgacagcgactggactgtcaccgccgacggcagtcaccangccctactgctgcgcagcgcccagccccaccacgccggggaggtcaccttcgcttgccgcgacgccgtggcctctgcncggctcaccgtgctgggcctccctgatcccccagaggatgctgaggtggtggctcncagcagccacactgtgacactgtcttgggcagctcccatgagtgatggaggcggtggtctctgtggctaccgcgtggaggtgaaggagggggccacaggccagtggcggctgtgccacgagctggtgcctggacccgagtgtgtggtggatggcctggcccccggggagacctaccgcttccgtgtggcagctgtgggccctgtgggtgctggggaaccggttcacctgccccagacagtgcggcttgcagagccaccgaagcctgtgcctccccagccctcagcccctgagagccggcaggtggcagctggtgaagatgtctctctggagcttgaggtggtggctgaggctggtgaggtcatctggcacaagggaatggagcgcatccagcccggtgggcggttcgaggtggtctcccagggtcggcaacagatgctggtgatcaagggcttcacggcagaagaccagggcgagtaccactgtggcctggctcagggctccatctgccctgcggctgccaccttccaggtggcactgagcccagcctctgtggatgaggcccctcagcccagcttgccccccgaggcagcccaggagggtgacctgcacctactgtgggaggccctggctcggaaacgtcgcatgagccgtgagcccacgctggactccattagcgagctgccagaggaggacggccgctcgcagcgcctgccacaggaggcagaggaggtggcacctgatctctctgaaggctactccacggccgatgagctggcccgcactggagatgctgacctctcacacaccagctctgatgatgagtcccgggcaggcaccccttccctggtcacctacctcaagaaggctgggaggccaggcacctcaccactggccagcaaggttggggccccagcagccccctctgtgaagccacagcagcagcaggagccactggctgctgtgcgcccaccactgggagacctgagcaccaaagacctgggtgatccctcaatggacaaggcagctgtgaagatccaggctgcctttaagggctacaaggtccggaaggagatgaagcagcaggaagggcccatgttctcccacacatttggggacaccgaggcacaggtgggggatgccctgcggctggagtgtgtcgtggccagcaaggcagatgtgcgagcccgctggctgaaggatggtgtggagctgaccgatgggcggcaccatcacatcgaccagcttggggatggcacctgctctctgctgatcnctggcctggaccgtgctgatgctggctgctacacctgtcaggtgagcaacaagtttggccaggtgacccacagtgcctgtgtggtggtcagtgggtcagagagtgaagccgagagctcctctgggggtgagctggacgatgccttccgccgggctgcccgtcggctgcaccggctcttccgcaccaaaagtccggctgaagtttcagatgaggagctcttcctgagtgcagacgagggccctgcagagccagaggagcccgcggactggcagacataccgcgaagatgagcatttcatctgcatccgttttgaggcgctcactgaggcccgccaggcggtaactcgcttccaggagatgtttgccacactgggcattggggtggagatcaagctggtggaacaggggcctcggagggtagagatgtgcatcagcaaagagactcctgcccctgtggtgcctccagagccattgcccagcctactgacttctgacgctgccccagtgttcctgactgagttgcagaaccaagaagtgcaggatgggtatcctgtgagctttgactgcgtggtgacaggtcagcccatgcccagtgtgcgctggttcaaggatgggaagttgttggaggaggatgatcactacatgattaatgaagaccaacagggtggccatcagctcatcatcacagccgtggtgccagcagacatgggcgtctaccgctgcctggccgagaacagcatgggtgtctcctccaccaaggctgagctccgtgtggacttgacaagcacagactatgacactgcagcagatgccacggagtcctcatcctacttcagtgcccaaggctacctgtccagccgggagcaggagggaacagagtccaccactgatgagggccagctgccccaggtggtggaggagctgagagacctccaggtggcccctggcacacgcctggccaagttccagctcaaggtgaaaggctaccctgctcccagattatactggttcaaagatggccagcccctgaccgcatctgcccacatccgcatgactgacaagaagatcctgcacaccctggagatcatctccgtcacccgggaggactctggccagtatgcagcctatatcagcaatgccatgggtgctgcctactcgtctgcccggctgctggttcgaggccctgatgagccagaagagaagcctgcatcagatgtgcatgagcagctggtgccgccccgaatgctggagaggttcacccccaagaaagtgaagaaaggctccagcatcaccttctctgtgaaggtagaaggacgcccggtgcccaccgtgcactggctcagggaggaggctgagagaggcgtgctgtggattggccctgacacaccgggctacaccgtggccagctctgcgcagcagcacagcctggtcctgctggacgtgggccggcagcaccagggcacctacacatgcattgccagcaacgctgccggccaggccctctgctccgccagcctgcacgtctcgggcctgcctaaggtggaggagcaggagaaagtgaaggaagcgctgatttccactttcctgcaggggaccacacaagccatctcagcacaggggttggaaactgcgagttttgctgaccttggtgggcagaggaaagaagagcctctggctgccaaggaggccctcggccacctgtccctcgctgaggtgggcacagaggagttcctgcagaaactgacctcccagatcactgagatggtatcggccaagatcacgcaggccaagctgcaggtgcccggaggtgacagtgatgaggactccaagacaccatctgcatccccccgccatggccgatcacggccatcctccagcatccaggagtcttcctcagagtcagaggacggcgatgcccgaggcgagatctttgacatctacgtggtcaccgctgactacctgcccctaggggctgagcaggatgccatcacgctgcgggaaggccagtatgtggaggtcctggatgcagcccacccactgcgctggcttgtccgcaccaagcccaccaagtccagcccctcacggcagggctgggtgtcaccagcctacctggacaggaggctcaagctgtcacctgagtggggggccgctgaggcccctgagttccctggggaggctgtgtctgaagacgaatacaaggcaaggctgagctctgtgatccaggagctgctgagttctgagcaggccttcgtggaggagctgcagttcctgcagagccaccacctgcagcacctggagcgctgcccccacgtgcccatagctgtggccggccagaaggcagtcatcttccgcaatgtgcgggacatcggccgcttccacagcagcttcctgcaggagttgcagcagtgcgacacggacgacgacgtggccatgtgcttcatcaagaaccaggcggcctttgagcagtacctggagttcctggtggggcgtgtgcaggctgagtcggtggtcgtcagcacggccatccaggagttctacaagaaatacgcggaggaggccctgttggcaggggacccctctcagcccccgccaccacctctgcagcactacctggagcagccagtggagcgggtgcagcgctaccaggccttgctgaaggagctgatccgcaacaaggcgcggaacagacagaactgcgcgctgctggagcaggcctatgccgtggtgtctgccctgccacagcgcgctgagaacaagctgcacgtgtccctcatggagaactacccaggcaccctgcaggccctgggcgagcccatccgccagggccacttcatcgtgtgggagggtgcaccgggggcccgcatgccctggaagggccacaaccgtcacgtgttcctcttccgcaaccacctggtaatctgcaagccccggcgagactcccgcaccgataccgtcagctacgtgttccggaacatgatgaagctgagcagcatcgacctgaacgaccaggtggagggggatgaccgcgccttcgaggtgtggcaggagcgggaggactcggtgcgcaagtacctgctgcaggcacggacagccattatcaagagctcgtgggtgaaggagatctgtggcatccagcagcgtctggccctgcctgtgtggcggcccccggactttgaagaggagctggccgactgcacagccgagctgggtgagacagtcaagctggcctgccgcgtgacgggcacacccaagcctgtcatcagctggtacaaagatgggaaagcagtgcaggtggacccccaccacatcctcattgaagaccctgatggctcgtgtgcactcatcctggacagcctgaccggtgtggactctggccagtacatgtgcttcgcggccagcgccgctggcaactgcagtaccctgggcaagatcctggtgcaagtcccaccacggttcgtgaacaaggtccgggcctcaccctttgtggagggagaggacgcccagttcacctgcaccatcgaaggcgccccgtacccgcagatcaggtggtacaaggacggggccctgctgaccactggcaacaagttccagacactgagtgagcctcgcagcggcctgctagtgctggtgatccgggcggccagcaaggaggacctggggctctacgagtgtgagctggtgaaccggctgggctccgcgcgggctagtgcggagctgcgcattcagagccccatgctgcaggcccaggagcagtgtcacagggagcagctcgtggctgcagtggaagtcactgagcaagagactaaagtccccaagaaaaccgtcatcatagaagagaccatcaccactgtggtgaagagcccacgtggccaacgacggtcccccagcaagtccccctcccgctcaccttcccgctgctctgccagcccgctgaggccaggcctactggcccccgacctgctgtacctgccaggtgctggccagccccgcaggccggaggcagaaccaggccagaagcccgtggtgcccacactgtatgtgacggaggccgaggcccactctccagctctgcccggactctcggggccccagcccaagtgggtggaggtggaggagaccattgaagtccgggtgaagaagatgggcccgcagggtgtgtctcccaccacagaggtgcccaggagctcatcggggcatctcttcacactgcccggtgcgacccccggaggggaccccaattccaacaactccaacaacaagctgctggcccaggaggcctgggcccagggcacagccatggtcggcgtcagagagccccttgtcttccgcgtggatgccagaggcagtgtggactgggctgcttctggcatgggcagcctggaggaggagggcaccatggaggaggcgggagaggaagagggggaagacggagacgcctttgtgacggaggagtcccaggacacacacagccttggggatcgtgaccccaagatcctcacgcacaacggccgcatgctgacactggctgacctggaagattacgtgcctggggaaggggagaccttccactgtggtggccctgggcctggcgcccctgatgaccctccctgcgaggtctcggtgatccagagagagatcggggagcccacggtggggcagcctgtgctgctcagcgtggggcatgcactgggtccccgaggccctctcggcctctttaggcctgagccccgtggggcgtcaccaccgggaccccaggtccgtagccttgagggcacctccttcctcttgcgggaggccccggctcggcctgtgggcagtgctccctggacgcagtctttctgcacccgcatccggcgttctgcggacagtggccagagcagcttcaccacagagctttccacccagaccgtcaacttcgggacagtgggggagacggtcacccttcacatctgcccagacagggatggggatgaggcggcacagccctgatgctgctgccatggtggcttggggcagcggggagaaaggagtgtccttgaggcctaggacgctgcccggcctcagcagcagccctgggagcctcctgagggccctccctgtccctggccacgggcccttcttacctcactcaacttcagccaggaggactgggtggtgcttgcaatgttggaatgaccggctcaaagacctcagctctgggctgtttcctgtcagcctggcaggagcctcaggactgtggacgaaggatgtggccttgggcatttgtcctgttcccacatgggcctggtccctccctcctggccccagccacagctgccaggcctgacatggccttgcctctcctgcagtcttggtgactgagacccttgggtggcgcttcccagctctgcaggccctcctggccttttctgcagggtggacacagggtctgtgtgtgggcagcagcccctgtctctcagcaagaataaagcagcttcctgtgcaaaaaactgatt

SEQ ID NO: 737081 - DNA, 403 bp, Homo sapiens; identical to SEQ ID NO: 381798

SEQ ID NO: 737082 - DNA, 2882 bp, Homo sapiens
ttctttgattgtttaaccttacaaaaatttagactagtaacttatttcacactgaaaagtgagttccaggaaggttagaggccacagagtataaaaggtaaaaccataaagcctctagatgctaacatagattgctaaaaacttcagggaacggaaagatttcttaaaactaaacagtggaacaatggtatatttaactacattaaaactaaaactttaatttgtcaagacatcatttgagagcgaaaaggccggtcaaggacatgggtaagatgtttacaaatacacagttatcatttgctagcatttaaaatatataaagagttcctaaaaataaggaaggaaaagacagaaaaggctactgaaaattggacagaagcctgaagagcgacaccccagaagagctgacgtaatggccagaagtggtggaaagggctccaccttgcatgtcaccaggcaatgcatgacaaagcccaggccttccccgcagaggccaacgctgaccctcctgacagtggcaggactggaagcctcagtactctggggccctgcagtgaggacacgccctgcccagtcccatggggagaccctagcatatccttgaagggagctgtgtaagcattaggaacccagtccctgcactggaggagctcgtgcacggagggtttgtcacaactgccccgcctggaatagcccatggcactgcacagtggatggagaaactgtgattcttgtgctgggaggtggtggggcttctcccagctacatggccagtgccaagcttgggaaggttctgtttctcctactttctcgtctaggccctcctaccctagggtggtcttcctgacctgggcagtatctttgacctcgtgtgtccctccttgtccatccccagagcccaaggtggtgtttgccaaggagcagccagcacacagggaggtgcaggctgaggcgggggccagtgccacgctgagctgcgaggtggcccaggcccagacagaggtgacgtggtacaaggatgggaagaagctgagttccagctcgaaagtgcgcgtggaggccgtgggctgcacacggaggctggtggtgcagcaggcgggccaggcagaggccggggagtacagctgcgaggcagggggtcagcagctctccttccgcctgcaggtggcaggtcagtgctttggggatgctgagtgagccctgtttgtagctgctgctgtgactggagtagaaccactgctgacccagtgggctttccattagactccatccctcaacttctcccatcctctcacctcctatttttatgcctgtggtggagctgggctgcttagtggggaagggagtgaacggaagggtcagggccctccttgtccatgttgggtggtgtttctgtgcagacatgctgggtcacattttcccagtaccttctccaaactaccgatgtcccgaggtgtccaggactctggtcctatctaatgcatgagatggcggtaagccagacgtccctccctcggggatactcctgcagtccctgcacggcctcatctggccccatgtgagggctctccctgtggaaagagattttaattcgttgagtcagggtgtagggaaattccagccacacagtcttatttggaattatatcaacactgaacactgggttcccaaagttttcagtgttctgggacacacttctgtccttccctgtggatgtagaagccctgtcagagccctgactaaaacccagatccacagcgttagtgtgtgcaaaacgagtaaagagcagcacattggcaggtgcgcacacgtgacgttggaattccatttcggaagccaatctcactttccttttgcattctgttagaatgttctgtgtctgaattccccttggaatttggatagatttaaaagtgataggaataagtagctggtgtttctagcctccgcctccaggcgggtgaggaggtgacacctgagaattcctccctctcacccctgaccctgccggaaagcgaaactgagatgcgggcattgggccctgggaagcgtggggaaggggaaaggagaaagccaggtgggtttttaggtcccttccagtgccacactgtggggtgttgaggggccgcgcgaggcaggcccttccatgaggcctggactggaggccttctctaggcgccggcgctggcctgggccgcctgccgccacgcaggggccgcacgcctgggccccagggcccctttgccggcgggaggccggggggaccgactgctcttggcgcccggggtcaggggaggccgggaaacctcggctcccgggcgacaggcacccaggcccttctcagccccccggccgcggccgcgccgggcctcgcttcagccgggcgattcttcccctcatttgttgcattgtttgcattaatatgaatatcttgttctgtttgttttgtctcctgagagccaataaagctgtgttttttctttacaccaaaaaaaaaaaaaaaaaaaaaaaggaataagtagcttatggcacagtgacacactggtagaattaagttatggtggtagcagtcgctgactggggaagccatatttacatcatcctgtttccttgatgagtcctgtgcctgccccctctccagctgattcataggaagtctgagaatgacctttactttcctattgtttgttaggagagtttaacttcaaactccaaccctgagccctgagtgccaccacataacagttggtgttatatatatctaaaatggtttacaaatgtgtagataccaaaaatactcactgcaagtaaatttgaaaagtgttaacaaattatataatttctagaaaccaaaaacagacttaagaaatagataacctata

SEQ ID NO: 737083 - DNA, 638 bp, Homo sapiens
ttcccccctctgcagttcctgccagtgctactagtggggatcacgtctaggatttcgaggcacaagggcctggcgtcttgttcagagcaggggagctggaggtgggagcggggcttaaggaagcttcctggtttcctcgcttaaagtcgcacccgggagggtgcgcagctgcggcccgcgtgtggccagggccgcgctgtttggattgggatcccggggcgcggtgccggcagctctgcctgggcccggctcagggcaggcgccggggctgtgcgggccctctgtaccttggcttgtccgtggaggagggcgagggccgccgtgacctcccctctcctgcgaccccagaggcgcctgtgctgttcaaaaagaagctggagccgcagacggtggaggagcggagctcggtgaccctggaggtggagctgacgcggccgtggccggagctgaggtggacacggaacgcgacggccctggcgccgggaaagaacgtggagatccacgccgagggcgcccgccaccgcctggttctgcacaacgtaggttttgccgaccgtggcttctttggctgcgagacgccggatgacaagacacaggccaaactcaccgtggagagtgagccgcgggcgggaagggcg

SEQ ID NO: 737084 - DNA, 1859 bp, Homo sapiens; identical to SEQ ID NO: 381801

SEQ ID NO: 737085 - DNA, 1836 bp, Homo sapiens
atgtgggtggctcttggggtggctcatcgcgtggctcattatgcatgtgtaagagttctttgtgcactctcactgctggcttgctggtacaataacctgagctctcacgctgccctggcaatcctgggcgctgtgcccatcttttctcgggccctctcctccctcccccagagaagagaccatcaccactgtggtgaagagcccacgtggccaacgacggtcccccagcaagtccccctcccgctcaccttcccgctgctctgccagcccgctgaggccaggcctactggcccccgacctgctgtacctgccaggtgctggccagccccgcaggccggaggcagaaccaggccagaagcccgtggtgcccacactgtatgtgacggaggccgaggcccactctccagctctgcccggactctcggggccccagcccaagtgggtggaggtggaggagaccattgaagtccgggtgaagaagatgggcccgcagggtgtgtctcccaccacagaggtgcccaggagctcatcggggcatctcttcacactgcccggtgcgacccccggaggggaccccaattccaacaactccaacaacaagctgctggcccaggaggcctgggcccagggcacagccatggtcggcgtcagagagccccttgtcttccgcgtggatgccagaggcagtgtggactgggctgcttctggcatgggcagcctggaggaggagggcaccatggaggaggcgggagaggaagagggggaagacggagacgcctttgtgacggaggagtcccaggacacacacagccttggggatcgtgaccccaagatcctcacgcacaacggccgcatgctgacactggctgacctggaagattacgtgcctggggaaggggagaccttccactgtggtggccctgggcctggcgcccctgatgaccctccctgcgaggtctcggtgatccagagagagatcggggagcccacggtggggcagcctgtgctgctcagcgtggggcatgcactgggtccccgaggccctctcggcctctttaggcctgagccccgtggggcgtcaccaccgggaccccaggtccgtagccttgagggcacctccttcctcttgcgggaggccccggctcggcctgtgggcagtgctccctggacgcagtctttctgcacccgcatccggcgttctgcggacagtggccagagcagcttcaccacagagctttccacccagaccgtcaacttcgggacagtgggggagacggtcacccttcacatctgcccagacagggatggggatgaggcggcacagccctgatgctgctgccatggtggcttggggcagcggggagaaaggagtgtccttgaggcctaggacgctgcccggcctcagcagcagccctgggagcctcctgagggccctccctgtccctggccacgggcccttcttacctcactcaacttcagccaggaggactgggtggtgcttgcaatgttggaatgaccggctcaaagacctcagctctgggctgtttcctgtcagcctggcaggagcctcaggactgtggacgaaggatgtggccttgggcatttgtcctgttcccacatgggcctggtccctccctcctggccccagccacagctgccaggcctgacatggccttgcctctcctgcagtcttggtgactgagacccttgggtggcgcttcccagctctgcaggccctcctggccttttctgcagggtggacacagggtctgtgtgtgggcagcagcccctgtctctcagcaagaataaagcagcttcctgtgcaaaaaactgatt

SEQ ID NO: 737086 - DNA, 1168 bp, Homo sapiens
gagagagagagagagagaactagttctgggctgcttctggcatgggcagcctggaggaggagggcaccatggaggaggcgggagaggaagagggggaagacggagacgcctttgtgacggaggagtcccaggacacacacagccttggggatcgtgaccccaagatcctcacgcacaacggccgcatgctgacactggctgacctggaagattacgtgcctggggaaggggagaccttccactgtggtggccctgggcctggcgcccctgatgaccctccctgcgaggtctcggtgatccagagagagatcggggagcccacggtggggcagcctgtgctgctcagcgtggggcatgcactgggtccccgaggccctctcggcctctttaggcctgagccccgtggggcgtcaccaccgggaccccaggtccgtagccttgagggcacctccttcctcttgcgggaggccccggctcggcctgtgggcagtgctccctggacgcagtctttctgcacccgcatccggcgttctgcggacagtggccagagcagcttcaccacagagctttccacccagaccgtcaacttcgggacagtgggggagacggtcacccttcacatctgcccagacagggatggggatgaggcggcacagccctgatgctgctgccatggtggcttggggcagcggggagaaaggagtgtccttgaggcctaggacgctgcccggcctcagcagcagccctgggagcctcctgagggccctccctgtccctggccacgggcccttcttacctcactcaacttcagccaggaggactgggtggtgcttgcaatgttggaatgaccggctcaaagacctcagctctgggctgtttcctgtcagcctggcaggagcctcaggactgtggacgaaggatgtggccttgggcatttgtcctgttcccacatgggcctggtccctccctcctggccccagccacagctgccaggcctgacatggccttgcctctcctgcagtcttggtgactgagacccttgggtggcgcttcccagctctgcaggccctcctggccttttctgcagggtggacacagggtctgtgtgtgggcagcagcccctgtctctcagcaagaataaagcagcttcctgtgcaaaaaactgatt

SEQ ID NO: 737087 - DNA, 12811 bp, Homo sapiens
  misc_feature (1121)..(1121): n is a, c, g, or t
  misc_feature (1195)..(1195): n is a, c, g, or t
  misc_feature (2411)..(2412): n is a, c, g, or t
  misc_feature (2686)..(2686): n is a, c, g, or t
  misc_feature (2721)..(2721): n is a, c, g, or t
  misc_feature (2789)..(2789): n is a, c, g, or t
  misc_feature (2831)..(2831): n is a, c, g, or t
  misc_feature (3275)..(3275): n is a, c, g, or t
  misc_feature (4213)..(4213): n is a, c, g, or t
  misc_feature (5233)..(5233): n is a, c, g, or t
  misc_feature (12729)..(12729): n is a, c, g, or t
  misc_feature (12740)..(12740): n is a, c, g, or t
  misc_feature (12747)..(12747): n is a, c, g, or t
  misc_feature (12749)..(12749): n is a, c, g, or t
  misc_feature (12755)..(12755): n is a, c, g, or t
  misc_feature (12763)..(12763): n is a, c, g, or t
  misc_feature (12765)..(12765): n is a, c, g, or t
  misc_feature (12770)..(12770): n is a, c, g, or t
  misc_feature (12776)..(12776): n is a, c, g, or t
  misc_feature (12781)..(12781): n is a, c, g, or t
  misc_feature (12792)..(12793): n is a, c, g, or t
  misc_feature (12795)..(12796): n is a, c, g, or t
  misc_feature (12798)..(12798): n is a, c, g, or t
  misc_feature (12802)..(12802): n is a, c, g, or t
  misc_feature (12809)..(12809): n is a, c, g, or t
tcacattgtacactttaaatatgtacaatttttatttgttatgcatcaataaagctgggattggggatgcgatggtataaaaactaactctcctctctacttgtgcaagtgcaagattctcatctggacagttgtcttcagacttttttgtgtcctcctcaagaatgtttagcctcttacagttaaaaaaaaaaaaaaaagctaaattcgagactatgtttgggtttcaccagttcttactcatgttgatttcacggaggtagagaactgaatgatggttaccagaggctggggagggaagcgggaagggagatgaagaggggctggttaatgggtagagacacacagtcagagaaaatgaatcagttctagtgtttagtagcatggtagagtgactgtaggtaacaataattcatcatatatagttgacccttgaacaacataggtttgcaccactgagtccacttatacgcagattttctggaaccaaatgggaagggaaccagcagtgttctcaggatgtcaaacctgtgtgtatagggagggccggcttgtcctatgcttgggttccacagggctgaccgtagaacttgagtatgcacagattttggtatatgcgggggtccaggaaccagcttcccatgtatgcttcaaaatagcagtcttctctcctggcagagcccgcggttcccttcaaaaagcggctgcaagatctggaggtgcgggagaaggagtcggccacgttcctatgtgaggtgccccagccgtccactgaggccgcgtggttcaaggaggagacgcggttgtgggcgagcgccaagtacggcatcgaggaggagggcaccgagcgccgcctgaccgtgcgcaatgtctcggccgacgacgacgcggtgtacatctgcgagacgccagagggcagccgcacggtggcggagctcgcagtccaaggaaacctcctccgaaagctccctcggaagacggcggtgcgcgtgggcgacacggctatgttttgcgtggagctggcggtcccggtgggccccgtccactggctgcggaaccaggaggaagtggtggcggggggccgcgtggccatctccgcggagggcacgcgccacacactnaccatctcccagtgctgcctggaggatgtgggccaggtggcctttatggctggcgactgccagacgtccacccngttctgcgtgtcggcccccaggaagcctcccctgcaaccccctgtggatcctgtggtaaaggccaggatggagagttccgtgattctcagctggtccccaccaccccatggggaacgccctgtcactatcgacggctacctggtagagaagaagaagcttggcacctacacctggatcaggtgccacgaggctgaatgggtggctacacctgagctgaccgtggctgatgtggcggaggaggggaacttccagttccgagtgtccgctctcaacagctttggtcagagtccctacctcgagttcccggggactgtccacctggcccccaagctggccgtgaggacaccgctgaaggcggtgcaggcggtagagggtggcgaggtcactttctccgtggacctcacggtggcctcagcgggtgagtggttcctggatgggcaggccctgaaggccagcagtgtgtatgagatccactgtgatcgcacccggcacacgctcaccatccgggaggtgcccgccagcctgcacggggcgcagctgaagttcgtggccaacggcattgagagcagcatccggatggaggtccgggcggccccagggctgactgccaacaagccgccagccgcagctgcccgggaggtgctggctcggctgcacgaggaggcgcagctgctggctgagctgtcagatcaggctgcggctgtgacgtggctgaaggatggtcgcacactgtccccaggccccaagtatgaggtgcaggcatcggccgggcggcgggtgctccttgtgcgagatgtggcccgggacgatgcaggcctctacgagtgcgtcagccgcgggggccgcatcgcctaccagctctccgtgcaaggcctcgcgcgctttctgcacaaggacatggcgggcagctgtgtggatgccgtggctgggggcccggcgcagtttgagtgtgagacctccgaagcccacgtccacgtgcactggtacaaggatggcatggagctgggccactccggtgagcgcttcttgcaggaggatgtggggacgcggcaccggctggtggcagccacagtcaccaggcaggatgaaggcacctactcctgccgcgtgggcgaggactctgtggacttccggctccgcgtctctgagcccaaggtggtgtttgctaaggagcagctggcacgcaggaagctgcaggcagaggcaggagccagnnccacactgagctgcgaggtggcccaggcccagacggaggtgacgtggtacaaggatgggaagaagctgagctccagctcgaaagtgtgcatggaggccacaggctgcacgcgcaggctggttgtgcagcaggcaggccaggcggatgccggggagtatagctgcgaggctgggggccagcggctctccttccatctggatgtcaaagagcccaaggtggtgtttgccaaggaccaggtggcacacagtgaggtgcaggctgaggcaggggccantgccacgctgagctgcgaggtggcccaggcccagncggaggtgatgtggtacaaagatgggaagaagctgagctccagcttgaaagtgcatgtagaggccaanggctgcagacggaggctggtggtgcagcaggcaggcaagacngatgccggggactacagctgcgaggccaggggccagagggtctccttccgcctgcacatcacagagcccaagatgatgtttgcaaaggagcagtcagtgcataatgaggtgcaggctgaggcgggggccagtgccatgctgagctgtgaggtggcccaggcccagacggaggtgacgtggtacaaggatgggaagaagctgagctccagctcaaaagtgggcatggaggtcaaagggtgcacacggaggctggtgctgccacaggcgggcaaagcagatgctggggagtacagctgtgaggctgggggccagagagtctccttccacctgcacatcacagagcccaagggggtgtttgcgaaggagcagtcagtgcataatgaggtgcaggctgaggcggggaccactgccatgctgagctgtgaggtggcccagccccagacngaggtgacgtggtacaaggacgggaagaagctgagctccagctcaaaagtacgcatggaggtcaagggctgcacacgaaggctggtagtgcagcaggtgggcaaagcagatgctggggagtacagctgcgaggctgggggccagagagtctcctttcaactgcacatcacagagcccaaggcagtgtttgccaaggagcagttggtgcataatgaggtgcggactgaggcaggggccagtgccacactgagctgtgaggtggcccaggcccagacagaggtgacgtggtacaaggatgggaagaagctgagctccagttcgaaagtgcgcatagaggctgcgggctgcatgcggcagctggtggtgcagcaggcaggccaggcagatgctggggagtacacctgtgaggctgggggccagcggctctccttccacctggatgtttcagagcccaaggcggtgtttgcaaaggagcagctggcacacaggaaggtgcaggccgaggcgggggccattgccacgctgagctgcgaggtggcccaggcccagacagaggtgacgtggtacaaggacgggaagaagctgagctccagctcgaaagttcgaatggaggctgtgggctgcacacggaggctggtggtgcagcaggcatgccaggcggacaccggggagtatagctgcgaggccgggggccagcggctctccttcagcctggacgtggcagagcccaaggtggtgtttgccaaggagcagccagtgcacagggaggtgcaggcccaggcgggggccagcaccacactcagctgcgaggtggctcaggcccagacggaggtgatgtggtacaaggacgggaagaagctgagcttcagctcgaaagtgcgcatggaggctgtgggctgcacacggaggctggtggtgcagcaggcgggccaggcggncgccggggagtacagctgcgaggcggggagccagcggctctccttccacctgcacgtggcagagcccaaggcggtgtttgccaaggagcagccagcgagcagggaggtgcaggctgaggcggggaccagtgccacgctgagctgcgaggtggcccaggcccagacagaggtgacgtggtacaaggacgggaagaaactgagctccagctcgaaagtgcgaatggaggccgtgggctgcacacggaggctggtggtgcaggaggcaggccaggcggacgccggggagtacagctgcaaggccggggatcagcggctgtccttccacctgcacgtggcagagcccaaggtggtgtttgccaaggagcagccagcacacagggaggtgcaggctgaggcgggggccagtgccacgctgagctgcgaggtggcccaggcccagacagaggtgacgtggtacaaggatgggaagaagctgagttccagctcgaaagtgcgcgtggaggccgtgggctgcacacggaggctggtggtgcagcaggcgggccaggcggatgctggggagtacagctgtgaggcggggggccaacggctgtccttccgcctgcacgtggcagagctggagccccaaatttcagagagaccctgccgcagggagcctctggtggtcaaggagcatgaagacatcatcctgaccgccacactggccacaccctctgcggccacggtgacctggctcaaggatggtgtggagattcgccgcagcaagcggcatgagacagccagccagggggacacccacaccctgaccgtgcatggcgcccaggttctggacagcgccatctacagctgccgtgtgggcgcagaggggcaggacttcccagtgcaggtggaagaggtggccgccaagttctgccggctgctggagcctgtgtgcggcgagctgggtggcacggtgacactggcctgcgagctaagcccagcgtgtgcagaggtggtgtggcgctgcggcaacacgcagcntcgggtgggcaagcgcttccagatggtggccgaggggcccgtgcgctcactcactgtgttggggctgcgcgcagaggacgcaggggagtacgtgtgtgagagccgtgatgaccacaccagtgcgcagctcaccgtcagtgtgccccgagtggtgaagtttatgtctgggctgagcaccgtggtcgcagaggagggcggcgaggccaccttccagtgcgtggtgtcccccagtgatgtggcagtcgtgtggttccgggacggtgccctgcttcagcccagcgagaagtttgccatatcacagagtggcgccagccacagcctgaccatctcagacctggtgctggaggacgcgggccagatcaccgtggaggctgagggcgcctcatcctctgctgccctgagggtccgagaggcgcctgtgctgttcaaaaagaagctggagccgcagacggtggaggagcggagctcggtgaccctggaggtggagctgacgcggccgtggccggagctgaggtggacacggaacgcgacggccctggcgccgggaaagaacgtggagatccacgccgagggcgcccgccaccgcctggttctgcacaacgtaggttttgccgaccgtggcttctttggctgcgagacgccggatgacaagacacaggccaaactcaccgtggagatgcgccaggtacggctcgtacggggcctgcaggcagtggaggcacgggagcagggcacggctaccatggaggtgcagctgtcgcatgcggacgtggatggcagctggactcgtgacggtctgcggttccagcaggggcccacgtgccacctggctgtgcggggccccatgcacaccctcacactctcggggctgcggccagaggatagtggccttatggtcttcaaggccgaaggagtgcacacgtcggcgcggctcgtggtcaccgagcttcccgtgagcttcagccgcccgctgcaggacgtggtgaccactgagaaggagaaggttaccctggagtgcgagctgtcgcgtcctaatgtggatgtgcgctggctgaaggacggtgtggagctgcgggcaggcaagacgatggccatcgcagcccagggcgcctgcaggagcctcaccatttaccggtgcgagttcgcggatcagggagtgtatgtgtgtgatgcccatgatgcccagagctctgcctccgtgaaggtacaaggccgcaacatccagatcgtgaggcccctggaggatgtggaagtgatggagaaggacggtgccaccttctcctgtgaggtctcccacgacgaagtgcctggccagtggttctgggagggcagtaaactgcggcccactgacaacgtgcgcatccgccaggaaggaaggacatacactctcatctaccggagagtcctggcggaagatgcaggagagatccaatttgtagccgaaaatgcagaatcgcgagcccagctccgagtgaaggagctgccagtgaccctcgtgcgcccgctgcgggacaagattgccatggagaagcaccgcggtgtgctggagtgtcaggtgtcccgggccagcgcccaggtgcggtggttcaagggcagtcaggagctgcagcccgggcccaagtacgagctggtcagtgatggcctctaccgcaagctgatcatcagtgatgtccacgcagaggacgaggacacctacacctgtgacgccggtgatgtcaagaccagtgcacagttcttcgtggaagagcaatccatcaccattgtgcggggtctgcaggacgtgacagtgatggagcccgctcctgcctggtttgagtgtgagacctccatcccctcagtgcggccacctaagtggctcctggggaagacggtgttgcaggctggggggaacgtgggcctggagcaggagggcacggtgcaccggctgatgctgcggcggacctgctccaccatgaccgggcccgtgcacttcaccgttggcaagtcgcgctcctctgcccgcctggtggtctcagacatccccgtagtcctcacacggccgttggagcccaagacagggcgtgagctgcagtcagtggtcctgtcctgcgacttccggccagcccccaaggctgtgcagtggtacaaggatgacacgcccctgtctccctctgagaagtttaagatgagcctggagggtcagatggctgagctgcgcatcctccggctcatgcctgctgatgctggtgtctaccggtgccaggcgggcagtgcccacagcagcactgaggtcactgtggaagcgcgggaggtgacagtgacagggccgctacaggatgcagaggccacggaggagggctgggccagcttctcctgtgagctgtcccacgaggatgaggaggtcgagtggtcgctcaacgggatgcccctgtacaacgacagcttccatgagatctcacacaagggccggcgccacacgctggtactgaagagcatccagcgggctgatgcgggcatagtacgcgcctcctccctgaaggtgtcgacctctgcccgcctggaggtccgagtgaagccggtggtgttcctgaaggcgctggatgacctgtccgcagaggagcgcggcaccctggccctgcagtgtgaagtctctgaccccgaggcccatgtggtgtggcgcaaagatggcgtgcagctgggccccagtgacaagtatgacttcctgcacacggcgggcacgcgggggctcgtggtgcatgacgtgagccctgaagacgccggcctgtacacctgccacgtgggctccgaggagacccgggcccgggtccgcgtgcacgatctgcacgtgggcatcaccaagaggctgaagacaatggaggtgctggaaggggaaagctgcagctttgagtgcgtcctgtcccacgagagtgccagcgacccggccatgtggacagtcggtgggaagacagtgggcagctccagccgcttccaggccacacgtcagggccgaaaatacatcctggtggtccgggaggctgcaccaagtgatgccggggaggtggtcttctctgtgcggggcctcacctccaaggcctcactcattgtcagagagaggccggccgccatcatcaagcccctggaagaccagtgggtggcgccaggggaggacgtggagctgcgctgtgagctgtcacgggcgggaacgcccgtgcactggctgaaggacaggaaggccatccgcaagagccagaagtatgatgtggtctgcgagggcacgatggccatgctggtcatccgcggggcctcgctcaaggacgcgggcgagtacacgtgtgaggtggaggcttccaagagcacagccagcctccatgtggaagaaaaagcaaactgcttcacagaggagctgaccaatctgcaggtggaggagaaaggcacagctgtgttcacgtgcaagacggagcaccccgcggccacagtgacctggcgcaagggcctcttggagctacgggcctcagggaagcaccagcccagccaggagggcctgaccctgcggctcaccatcagtgccctggagaaggcagacagcgacacctatacctgcgacattggccaggcccagtcccgggcccagctcctagtgcaaggccggagagtgcacatcatcgaggacctggaggatgtggatgtgcaggagggctcctcggccaccttccgttgccggatctccccggccaactacgagcctgtgcactggttcctggacaagacacccctgcatgccaacgagctcaatgagatcgatgcccagcccgggggctaccacgtgctgaccctgcggcagctggcgctcaaggactcgggcaccatctactttgaggcgggtgaccagcgggcctcggccgccctgcgggtcactgagaagccaagcgtcttctcccgggagctcacagatgccaccatcacagagggtgaggacttgaccctggtgtgcgagaccagcacctgcgacattcctgtgtgctggaccaaggatgggaagaccctgcgggggtctgcccggtgccagctgagccatgagggccaccgggcccagctgctcatcactggggccaccctgcaggacagtggacgctacaagtgtgaggctgggggcgcctgcagcagctccattgtcagggtgcatgcgcggccagtgcggttccaggaggccctgaaggacctggaggtgctggagggtggtgctgccacactgcgctgtgtgctgtcatctgtggctgcgcccgtgaagtggtgctatggaaacaacgtcctgaggccaggtgacaaatacagcctacgccaggagggtgccatgctggagctggtggtccggaacctccggccgcaggacagcgggcggtactcatgctccttcggggaccagactacttctgccaccctcacagtgactgccctgcctgcccagttcatcgggaaactgagaaacaaggaggccacagaaggggccacggccacgctgcggtgtgagctgagcaaggcagcccctgtggagtggagaaaggggtccgagaccctcagagatggggacagatactgtctgaggcaggacggggccatgtgtgagctgcagatccgtggcctggccatggtggatgccgcggagtactcgtgtgtgtgtggagaggagaggacctcagcctcactcaccatcaggcccatgcctgcccacttcataggaagactgagacaccaagagagcatagaaggggccacagccacgctgcggtgtgagctgagcaaggcggcccccgtggagtggaggaaggggcgtgagagcctcagagatggggacagacatagcctgaggcaggacggggctgtgtgcgagctgcagatctgtggcctggctgtggcagatgctggggagtactcctgtgtgtgtggggaggagaggacctctgccactctcaccgtgaaggccctgccagccaagttcacagagggtctgaggaatgaagaggccgtggaaggggccacagccatgttgtggtgtgaactgagcaaggtggcccctgtggagtggaggaaggggcccgagaacctcagagatggggacagatacatcctgaggcaggaggggaccaggtgtgagctgcagatctgtggcctggccatggcggacgccggggagtacttgtgtgtgtgcgggcaggagaggacctcagccacgctcaccatcagggctctgcctgccaggttcatagaagatgtgaaaaaccaggaggccagagaaggggccacggctgtgctgcagtgtgagctgaacagtgcagcccctgtggagtggagaaaggggtctgagacccttagagatggggacagatacagcctgaggcaggacgggactaaatgtgagctgcagattcgtggcctggccatggcagacactggggagtactcgtgcgtgtgcgggcaggagaggacctcggctatgctcaccgtcagggctctacccatcaagttcacagagggtctgaggaacgaagaggccacagaaggggcaacagccgtgctgcggtgtgagctgagcaagatggcccccgtggagtggtggaaggggcatgagaccctcagagatggagacagacacagcctgaggcaggacggggccaggtgtgagctgcagatccgcggcctcgtggcagaggacgctggggagtacctgtgcatgtgcgggaaggagaggacctcagccatgctcaccgtcagggccatgccttccaagttcatagagggtctgaggaatgaagaggccacagaaggggacacggccacgctgtggtgtgagctgagcaaggcggcaccggtggagtggaggaaggggcatgagaccctcagagatggggacagacacagcctgaggcaggacgggtccaggtgtgagctgcagatccgtggcctggctgtggtggatgccggggagtactcgtgtgtgtgcgggcaggagaggacctcagccacactcactgtcagggccctgcctgccagattcatagaagatgtgaaaaaccaggaggccagagaaggggccacggccgtgctgcaatgtgagctgagcaaggcggcccccgtggagtggaggaaggggtctgagaccctcagaggtggggacagatacagcctgaggcaggatgggaccagatgtgagctgcagattcatggcctgtctgtggcagacactggggagtactcgtgtgtgtgcgggcaggagaggacctcggccacactcaccgtcagggccctgcctgcacgattcactcaagatctgaagaccaaggaggcctcagaaggggccacagctacactgcagtgtgagctgagcaaggtggcccctgtggaatggaagaagggtcctgagaccctcagagatgggggcagatacagcctgaagcaggatgggacgaggtgtgagctgcagatccatgacctgtctgtggcggatgctggggaatactcatgcatgtgtggacaagagaggacctcggccacgctcactgtcagggccctgcctgccaggttcacagagggtctgaggaatgaagaggccatggaaggggccacagccacactgcaatgtgagctgagcaaggcagcccctgtggagtggaggaaaggccttgaggctctcagagatggggacaaatacagcctgagacaagacggggctgtgtgtgagctgcagattcatggcctggctatggcagataacggggtgtactcatgtgtgtgtgggcaggagaggacctcagctacactcactgtcagggccctgcctgccagattcatagaggatatgagaaaccagaaggccacagaaggggctacagtcacattgcaatgtaagctgagaaaggcggcccccgtggagtggagaaaggggcccaacaccctcaaagatggggacaggtacagcctgaagcaggatgggaccagttgtgagctgcagattcgtggcctggtcatagcagatgctggagaatactcgtgcatatgtgagcaggagaggacctcggccacgctcactgtcagggccctgccggccagattcatagaagatgtgagaaatcacgaggccacagaaggggccacagctgtgctgcagtgtgagctgagcaaggcggcccccgtggagtggcggaaggggtctgagaccctcagagatggggacagatatagcctgaggcaggacgggacgaggtgtgagctgcagattcgtggcctggctgtggaggacactggagagtatttgtgtgtgtgcgggcaggagagaacctcagctacactcactgtcagggccctgccagccagattcatagacaacatgacaaaccaggaagccagagaaggggccacggccacactgcactgtgaactgagcaaggtggcccctgtggagtggaggaagggacctgaaaccctccgagatggggacagacacagcctgaggcaggagaatngcttgaacccnggaggcngnggttgnagtgagcnangatcntgccantgcantccagcctggnnannanagcnagctctntc

SEQ ID NO: 737088 - DNA, 3941 bp, Homo sapiens
  misc_feature (1026)..(1026): n is a, c, g, or t
  misc_feature (1759)..(1759): n is a, c, g, or t
  misc_feature (3108)..(3108): n is a, c, g, or t
  misc_feature (3182)..(3182): n is a, c, g, or t
agcatgacttacagaagcctttaattataatttaccatttctggccaggcacagtagctcatgcctgtaacaccatcactttgggaggctgaggcgggatgattacttgagcccgggagttcaagaccagcctgggaaacagggagacccctgtctcttaaaaaaagaaaatcaaaaaatgagccaggcatggtggctcacacctgtggttctagctactgaggaggctgaggaaggaggatgatgagcctgcgcagtttaaactgcgccacttcactccagcctgggtgataagattatgtctcaaaacaaaacaaaaaggccacatcacattgtacactttaaatataaacaatttttgcttgtcaattataactcaataaagctggggcaggtaggggacacggcagtacagtaaaaatccctcacctatctgcttgcacaaatgcaagcagatttccatctgggcagcttttttcaaacttttggcagttgcatcctcacaactgccttattacttaattacataatatttaaccccttatgcttaaaaaaaaaacccacgaaactacagacttcatcagtctttgcactaatgtcctcttgttgaggaagaatctccttcagggtgggacgatgcacttagcagtcacatctctgtggccacaaaggctgcttctcatttataccgggagaaacgttgccagcacagctgctgtgcaggcttaagcaaattgttttcaccctgtgagcctcaggcctctcttctataagatgagaaaacacccttgtttgggaatatctaataagatactgacatgaaaaggccttatgaacgcaaaagcgtgacacacctgtgtgttctctcggtgctgctgggatgtgcgtttgctgaatgtgtgtcatctacaagctggtcaaggatggaaaatgccttccctcctaacattcagaagggaatgaaaaccctctttcctcctggaatacagaggaggaaagaacttcatctttacacccaagccaagncaccagagattcttgacatgttcagatacgacttggggatcataaaatgttcaggaaaccctgcaggactgacttacagttttttttgcctatagtttgtgggcacccggggcccagccaccccatcgcctgggcagcaggtgcaggtctgaggcctccgggcccaccatcccccaggccttgggagatggctgtgagaacacccccttcagttaaactgcacccaggatgccagcccacccagctgtgaaagcccctgggaggagggctcatggcgggacatccctgtggaagctggcaactcaagggacacagtgacatttgctttcctcaggaaattgtgtctgctcctcctccacctgtacccctttgaacagacagcagctccatgaaagttctctttgcagtggattccagccaggaataggcaaggtccatggccagccactgcatcctgtggcctcccgtggtgtgaaggacaccctgggcacagtgcctccggaagctctgtagtgtgaatatcccactgtcttcaacaaatacgttgcagggaaataaggaacaacaggggtcctgtgaaggaggcagaaaatccagcctgaaggctggcagtggtgtttggagatgcagcggagcaggcagcagtgaagagggtcaggagggcaggccactcctggaggctgtgggggcattgcttctcccaggtccaggaggccctgcaaggggctggccngcacagccatcttctctgcaccctccacggccctgtccgggagggggtggggcacgtattcgagcacacacaatgcacacacacttctgcatggctggggcagctcagggccaagctcctggtgggggagtgggctctccttccagcctttcctttctccctggtgctgtggactgaatgtgtgtcccggagattcacacgttgaaatgctcacccccaaggtgacaggattagaacgtgagcttttggaagtgatcagtcatgagataaggctgcagaatggcataaccgttactccagagacccctcaccctccttctgattgaggacacatgagagatgttggccattgcccggaagagcctgaggtacgctgtgaggacacatagaggcctggcactggatcagggatggggcgaagcagctcactgcagctttgacctcctgggctcaagccatcctcctgcttcagtctcttgagtagctgggacagcaggcacctgcacggtgactgaaggcaagcacgcgcgcctcagctgctacgtgaccggcgagcccaagcccgagacggtgtggaagaaggacggccagctggtgaccgagggccggcgccacgtggtgtacgaggacgcgcaggagaacttcgtgctcaagatcctcttctgcaagcagtcggaccgcggcctctacacctgcacggcgtccaacctcgtgggccagacctacagctctgtgctggtcgtagtgcgcggtgagctcctgggtgcggggcgcgcgggcccaggctcctccgcaacccgtgcacctgggtcctttcgcccttgcggtctgccgtttcccacccgcgtctgtccggtcgtggaatccagggttgcaggtgtccgttccagtcttctctcctggcagagcccgcggttcccttcaaaaagcggctgcaagatctggaggtgcgggagaaggagtcggccacgttcctatgtgaggtgccccagccgtccactgaggccgcgtggttcaaggaggagacgcggttgtgggcgagcgccaagtacggcatcgaggaggagggcaccgagcgccgcctgaccgtgcgcaatgtctcggccgacgacgacgcggtgtacatctgcgagacgccagagggcagccgcacggtggcggagctcgcagtccaaggaaacctcctccgaaagctccctcggaagacggcggtgcgcgtgggcgacacggctatgttttgcgtggagctggcggtcccggtgggccccgtccactggctgcggaaccaggaggaagtggtggcggggggccgcgtggccatctccgcggagggcacgcgccacacactnaccatctcccagtgctgcctggaggatgtgggccaggtggcctttatggctggcgactgccagacgtccacccngttctgcgtgtcggcccccaggaagcctcccctgcaaccccctgtggatcctgtggtaaaggccaggatggagagttccgtgattctcagctggtccccaccaccccatggggaacgccctgtcactatcgacggctacctggtagagaagaagaagcttggcacctacacctggatcaggtgccacgaggctgaatgggtggctacacctgagctgaccgtggctgatgtggcggaggaggggaacttccagttccgagtgtccgctctcaacagctttggtcagagtccctacctcgagttcccggggactgtccacctgggtaagtgggacctccctgttacaacctacggggctgctcacctgccccggaatcccccaggtccagcttcaggggaggccagagtggcctcatggggaccttctgtggggaggggggctgccaaggccttgccctggtgcagtgtccgtggtggaaggataggtgaccccactacagggcccctgggagcctgcctgtctccagcagacccaggggacggggctccagggctgccccactctggtggggcttgtaggatgctggaggggtctcagggcagctgtaccttgtccttgttccttcatgagcctgactcatgctatggtcgctctgtgtgttggctgggcttcctggaggaggaacatttaggtctaggctctgtaggaagagaaggggaaggcagagacctcctcagcactccccactcctcctcggc

SEQ ID NO: 737089 - DNA, 13600 bp, Homo sapiens
  misc_feature (1026)..(1026): n is a, c, g, or t
  misc_feature (1759)..(1759): n is a, c, g, or t
  misc_feature (3108)..(3108): n is a, c, g, or t
  misc_feature (3182)..(3182): n is a, c, g, or t
  misc_feature (4398)..(4399): n is a, c, g, or t
  misc_feature (4673)..(4673): n is a, c, g, or t
  misc_feature (4708)..(4708): n is a, c, g, or t
  misc_feature (4776)..(4776): n is a, c, g, or t
  misc_feature (4818)..(4818): n is a, c, g, or t
  misc_feature (5262)..(5262): n is a, c, g, or t
  misc_feature (6200)..(6200): n is a, c, g, or t
  misc_feature (7220)..(7220): n is a, c, g, or t
agcatgacttacagaagcctttaattataatttaccatttctggccaggcacagtagctcatgcctgtaacaccatcactttgggaggctgaggcgggatgattacttgagcccgggagttcaagaccagcctgggaaacagggagacccctgtctcttaaaaaaagaaaatcaaaaaatgagccaggcatggtggctcacacctgtggttctagctactgaggaggctgaggaaggaggatgatgagcctgcgcagtttaaactgcgccacttcactccagcctgggtgataagattatgtctcaaaacaaaacaaaaaggccacatcacattgtacactttaaatataaacaatttttgcttgtcaattataactcaataaagctggggcaggtaggggacacggcagtacagtaaaaatccctcacctatctgcttgcacaaatgcaagcagatttccatctgggcagcttttttcaaacttttggcagttgcatcctcacaactgccttattacttaattacataatatttaaccccttatgcttaaaaaaaaaacccacgaaactacagacttcatcagtctttgcactaatgtcctcttgttgaggaagaatctccttcagggtgggacgatgcacttagcagtcacatctctgtggccacaaaggctgcttctcatttataccgggagaaacgttgccagcacagctgctgtgcaggcttaagcaaattgttttcaccctgtgagcctcaggcctctcttctataagatgagaaaacacccttgtttgggaatatctaataagatactgacatgaaaaggccttatgaacgcaaaagcgtgacacacctgtgtgttctctcggtgctgctgggatgtgcgtttgctgaatgtgtgtcatctacaagctggtcaaggatggaaaatgccttccctcctaacattcagaagggaatgaaaaccctctttcctcctggaatacagaggaggaaagaacttcatctttacacccaagccaagncaccagagattcttgacatgttcagatacgacttggggatcataaaatgttcaggaaaccctgcaggactgacttacagttttttttgcctatagtttgtgggcacccggggcccagccaccccatcgcctgggcagcaggtgcaggtctgaggcctccgggcccaccatcccccaggccttgggagatggctgtgagaacacccccttcagttaaactgcacccaggatgccagcccacccagctgtgaaagcccctgggaggagggctcatggcgggacatccctgtggaagctggcaactcaagggacacagtgacatttgctttcctcaggaaattgtgtctgctcctcctccacctgtacccctttgaacagacagcagctccatgaaagttctctttgcagtggattccagccaggaataggcaaggtccatggccagccactgcatcctgtggcctcccgtggtgtgaaggacaccctgggcacagtgcctccggaagctctgtagtgtgaatatcccactgtcttcaacaaatacgttgcagggaaataaggaacaacaggggtcctgtgaaggaggcagaaaatccagcctgaaggctggcagtggtgtttggagatgcagcggagcaggcagcagtgaagagggtcaggagggcaggccactcctggaggctgtgggggcattgcttctcccaggtccaggaggccctgcaaggggctggccngcacagccatcttctctgcaccctccacggccctgtccgggagggggtggggcacgtattcgagcacacacaatgcacacacacttctgcatggctggggcagctcagggccaagctcctggtgggggagtgggctctccttccagcctttcctttctccctggtgctgtggactgaatgtgtgtcccggagattcacacgttgaaatgctcacccccaaggtgacaggattagaacgtgagcttttggaagtgatcagtcatgagataaggctgcagaatggcataaccgttactccagagacccctcaccctccttctgattgaggacacatgagagatgttggccattgcccggaagagcctgaggtacgctgtgaggacacatagaggcctggcactggatcagggatggggcgaagcagctcactgcagctttgacctcctgggctcaagccatcctcctgcttcagtctcttgagtagctgggacagcaggcacctgcacggtgactgaaggcaagcacgcgcgcctcagctgctacgtgaccggcgagcccaagcccgagacggtgtggaagaaggacggccagctggtgaccgagggccggcgccacgtggtgtacgaggacgcgcaggagaacttcgtgctcaagatcctcttctgcaagcagtcggaccgcggcctctacacctgcacggcgtccaacctcgtgggccagacctacagctctgtgctggtcgtagtgcgcggtgagctcctgggtgcggggcgcgcgggcccaggctcctccgcaacccgtgcacctgggtcctttcgcccttgcggtctgccgtttcccacccgcgtctgtccggtcgtggaatccagggttgcaggtgtccgttccagtcttctctcctggcagagcccgcggttcccttcaaaaagcggctgcaagatctggaggtgcgggagaaggagtcggccacgttcctatgtgaggtgccccagccgtccactgaggccgcgtggttcaaggaggagacgcggttgtgggcgagcgccaagtacggcatcgaggaggagggcaccgagcgccgcctgaccgtgcgcaatgtctcggccgacgacgacgcggtgtacatctgcgagacgccagagggcagccgcacggtggcggagctcgcagtccaaggaaacctcctccgaaagctccctcggaagacggcggtgcgcgtgggcgacacggctatgttttgcgtggagctggcggtcccggtgggccccgtccactggctgcggaaccaggaggaagtggtggcggggggccgcgtggccatctccgcggagggcacgcgccacacactnaccatctcccagtgctgcctggaggatgtgggccaggtggcctttatggctggcgactgccagacgtccacccngttctgcgtgtcggcccccaggaagcctcccctgcaaccccctgtggatcctgtggtaaaggccaggatggagagttccgtgattctcagctggtccccaccaccccatggggaacgccctgtcactatcgacggctacctggtagagaagaagaagcttggcacctacacctggatcaggtgccacgaggctgaatgggtggctacacctgagctgaccgtggctgatgtggcggaggaggggaacttccagttccgagtgtccgctctcaacagctttggtcagagtccctacctcgagttcccggggactgtccacctggcccccaagctggccgtgaggacaccgctgaaggcggtgcaggcggtagagggtggcgaggtcactttctccgtggacctcacggtggcctcagcgggtgagtggttcctggatgggcaggccctgaaggccagcagtgtgtatgagatccactgtgatcgcacccggcacacgctcaccatccgggaggtgcccgccagcctgcacggggcgcagctgaagttcgtggccaacggcattgagagcagcatccggatggaggtccgggcggccccagggctgactgccaacaagccgccagccgcagctgcccgggaggtgctggctcggctgcacgaggaggcgcagctgctggctgagctgtcagatcaggctgcggctgtgacgtggctgaaggatggtcgcacactgtccccaggccccaagtatgaggtgcaggcatcggccgggcggcgggtgctccttgtgcgagatgtggcccgggacgatgcaggcctctacgagtgcgtcagccgcgggggccgcatcgcctaccagctctccgtgcaaggcctcgcgcgctttctgcacaaggacatggcgggcagctgtgtggatgccgtggctgggggcccggcgcagtttgagtgtgagacctccgaagcccacgtccacgtgcactggtacaaggatggcatggagctgggccactccggtgagcgcttcttgcaggaggatgtggggacgcggcaccggctggtggcagccacagtcaccaggcaggatgaaggcacctactcctgccgcgtgggcgaggactctgtggacttccggctccgcgtctctgagcccaaggtggtgtttgctaaggagcagctggcacgcaggaagctgcaggcagaggcaggagccagnnccacactgagctgcgaggtggcccaggcccagacggaggtgacgtggtacaaggatgggaagaagctgagctccagctcgaaagtgtgcatggaggccacaggctgcacgcgcaggctggttgtgcagcaggcaggccaggcggatgccggggagtatagctgcgaggctgggggccagcggctctccttccatctggatgtcaaagagcccaaggtggtgtttgccaaggaccaggtggcacacagtgaggtgcaggctgaggcaggggccantgccacgctgagctgcgaggtggcccaggcccagncggaggtgatgtggtacaaagatgggaagaagctgagctccagcttgaaagtgcatgtagaggccaanggctgcagacggaggctggtggtgcagcaggcaggcaagacngatgccggggactacagctgcgaggccaggggccagagggtctccttccgcctgcacatcacagagcccaagatgatgtttgcaaaggagcagtcagtgcataatgaggtgcaggctgaggcgggggccagtgccatgctgagctgtgaggtggcccaggcccagacggaggtgacgtggtacaaggatgggaagaagctgagctccagctcaaaagtgggcatggaggtcaaagggtgcacacggaggctggtgctgccacaggcgggcaaagcagatgctggggagtacagctgtgaggctgggggccagagagtctccttccacctgcacatcacagagcccaagggggtgtttgcgaaggagcagtcagtgcataatgaggtgcaggctgaggcggggaccactgccatgctgagctgtgaggtggcccagccccagacngaggtgacgtggtacaaggacgggaagaagctgagctccagctcaaaagtacgcatggaggtcaagggctgcacacgaaggctggtagtgcagcaggtgggcaaagcagatgctggggagtacagctgcgaggctgggggccagagagtctcctttcaactgcacatcacagagcccaaggcagtgtttgccaaggagcagttggtgcataatgaggtgcggactgaggcaggggccagtgccacactgagctgtgaggtggcccaggcccagacagaggtgacgtggtacaaggatgggaagaagctgagctccagttcgaaagtgcgcatagaggctgcgggctgcatgcggcagctggtggtgcagcaggcaggccaggcagatgctggggagtacacctgtgaggctgggggccagcggctctccttccacctggatgtttcagagcccaaggcggtgtttgcaaaggagcagctggcacacaggaaggtgcaggccgaggcgggggccattgccacgctgagctgcgaggtggcccaggcccagacagaggtgacgtggtacaaggacgggaagaagctgagctccagctcgaaagttcgaatggaggctgtgggctgcacacggaggctggtggtgcagcaggcatgccaggcggacaccggggagtatagctgcgaggccgggggccagcggctctccttcagcctggacgtggcagagcccaaggtggtgtttgccaaggagcagccagtgcacagggaggtgcaggcccaggcgggggccagcaccacactcagctgcgaggtggctcaggcccagacggaggtgatgtggtacaaggacgggaagaagctgagcttcagctcgaaagtgcgcatggaggctgtgggctgcacacggaggctggtggtgcagcaggcgggccaggcggncgccggggagtacagctgcgaggcggggagccagcggctctccttccacctgcacgtggcagagcccaaggcggtgtttgccaaggagcagccagcgagcagggaggtgcaggctgaggcggggaccagtgccacgctgagctgcgaggtggcccaggcccagacagaggtgacgtggtacaaggacgggaagaaactgagctccagctcgaaagtgcgaatggaggccgtgggctgcacacggaggctggtggtgcaggaggcaggccaggcggacgccggggagtacagctgcaaggccggggatcagcggctgtccttccacctgcacgtggcagagcccaaggtggtgtttgccaaggagcagccagcacacagggaggtgcaggctgaggcgggggccagtgccacgctgagctgcgaggtggcccaggcccagacagaggtgacgtggtacaaggatgggaagaagctgagttccagctcgaaagtgcgcgtggaggccgtgggctgcacacggaggctggtggtgcagcaggcgggccaggcggatgctggggagtacagctgtgaggcggggggccaacggctgtccttccgcctgcacgtggcagagctggagccccaaatttcagagagaccctgccgcagggagcctctggtggtcaaggagcatgaagacatcatcctgaccgccacactggccacaccctctgcggccacggtgacctggctcaaggatggtgtggagattcgccgcagcaagcggcatgagacagccagccagggggacacccacaccctgaccgtgcatggcgcccaggttctggacagcgccatctacagctgccgtgtgggcgcagaggggcaggacttcccagtgcaggtggaagaggtggccgccaagttctgccggctgctggagcctgtgtgcggcgagctgggtggcacggtgacactggcctgcgagctaagcccagcgtgtgcagaggtggtgtggcgctgcggcaacacgcagcntcgggtgggcaagcgcttccagatggtggccgaggggcccgtgcgctcactcactgtgttggggctgcgcgcagaggacgcaggggagtacgtgtgtgagagccgtgatgaccacaccagtgcgcagctcaccgtcagtgtgccccgagtggtgaagtttatgtctgggctgagcaccgtggtcgcagaggagggcggcgaggccaccttccagtgcgtggtgtcccccagtgatgtggcagtcgtgtggttccgggacggtgccctgcttcagcccagcgagaagtttgccatatcacagagtggcgccagccacagcctgaccatctcagacctggtgctggaggacgcgggccagatcaccgtggaggctgagggcgcctcatcctctgctgccctgagggtccgagaggcgcctgtgctgttcaaaaagaagctggagccgcagacggtggaggagcggagctcggtgaccctggaggtggagctgacgcggccgtggccggagctgaggtggacacggaacgcgacggccctggcgccgggaaagaacgtggagatccacgccgagggcgcccgccaccgcctggttctgcacaacgtaggttttgccgaccgtggcttctttggctgcgagacgccggatgacaagacacaggccaaactcaccgtggagatgcgccaggtacggctcgtacggggcctgcaggcagtggaggcacgggagcagggcacggctaccatggaggtgcagctgtcgcatgcggacgtggatggcagctggactcgtgacggtctgcggttccagcaggggcccacgtgccacctggctgtgcggggccccatgcacaccctcacactctcggggctgcggccagaggatagtggccttatggtcttcaaggccgaaggagtgcacacgtcggcgcggctcgtggtcaccgagcttcccgtgagcttcagccgcccgctgcaggacgtggtgaccactgagaaggagaaggttaccctggagtgcgagctgtcgcgtcctaatgtggatgtgcgctggctgaaggacggtgtggagctgcgggcaggcaagacgatggccatcgcagcccagggcgcctgcaggagcctcaccatttaccggtgcgagttcgcggatcagggagtgtatgtgtgtgatgcccatgatgcccagagctctgcctccgtgaaggtacaaggccgcaacatccagatcgtgaggcccctggaggatgtggaagtgatggagaaggacggtgccaccttctcctgtgaggtctcccacgacgaagtgcctggccagtggttctgggagggcagtaaactgcggcccactgacaacgtgcgcatccgccaggaaggaaggacatacactctcatctaccggagagtcctggcggaagatgcaggagagatccaatttgtagccgaaaatgcagaatcgcgagcccagctccgagtgaaggagctgccagtgaccctcgtgcgcccgctgcgggacaagattgccatggagaagcaccgcggtgtgctggagtgtcaggtgtcccgggccagcgcccaggtgcggtggttcaagggcagtcaggagctgcagcccgggcccaagtacgagctggtcagtgatggcctctaccgcaagctgatcatcagtgatgtccacgcagaggacgaggacacctacacctgtgacgccggtgatgtcaagaccagtgcacagttcttcgtggaagagcaatccatcaccattgtgcggggtctgcaggacgtgacagtgatggagcccgctcctgcctggtttgagtgtgagacctccatcccctcagtgcggccacctaagtggctcctggggaagacggtgttgcaggctggggggaacgtgggcctggagcaggagggcacggtgcaccggctgatgctgcggcggacctgctccaccatgaccgggcccgtgcacttcaccgttggcaagtcgcgctcctctgcccgcctggtggtctcagacatccccgtagtcctcacacggccgttggagcccaagacagggcgtgagctgcagtcagtggtcctgtcctgcgacttccggccagcccccaaggctgtgcagtggtacaaggatgacacgcccctgtctccctctgagaagtttaagatgagcctggagggtcagatggctgagctgcgcatcctccggctcatgcctgctgatgctggtgtctaccggtgccaggcgggcagtgcccacagcagcactgaggtcactgtggaagcgcgggaggtgacagtgacagggccgctacaggatgcagaggccacggaggagggctgggccagcttctcctgtgagctgtcccacgaggatgaggaggtcgagtggtcgctcaacgggatgcccctgtacaacgacagcttccatgagatctcacacaagggccggcgccacacgctggtactgaagagcatccagcgggctgatgcgggcatagtacgcgcctcctccctgaaggtgtcgacctctgcccgcctggaggtccgagtgaagccggtggtgttcctgaaggcgctggatgacctgtccgcagaggagcgcggcaccctggccctgcagtgtgaagtctctgaccccgaggcccatgtggtgtggcgcaaagatggcgtgcagctgggccccagtgacaagtatgacttcctgcacacggcgggcacgcgggggctcgtggtgcatgacgtgagccctgaagacgccggcctgtacacctgccacgtgggctccgaggagacccgggcccgggtccgcgtgcacgatctgcacgtgggcatcaccaagaggctgaagacaatggaggtgctggaaggggaaagctgcagctttgagtgcgtcctgtcccacgagagtgccagcgacccggccatgtggacagtcggtgggaagacagtgggcagctccagccgcttccaggccacacgtcagggccgaaaatacatcctggtggtccgggaggctgcaccaagtgatgccggggaggtggtcttctctgtgcggggcctcacctccaaggcctcactcattgtcagagagaggccggccgccatcatcaagcccctggaagaccagtgggtggcgccaggggaggacgtggagctgcgctgtgagctgtcacgggcgggaacgcccgtgcactggctgaaggacaggaaggccatccgcaagagccagaagtatgatgtggtctgcgagggcacgatggccatgctggtcatccgcggggcctcgctcaaggacgcgggcgagtacacgtgtgaggtggaggcttccaagagcacagccagcctccatgtggaagaaaaagcaaactgcttcacagaggagctgaccaatctgcaggtggaggagaaaggcacagctgtgttcacgtgcaagacggagcaccccgcggccacagtgacctggcgcaagggcctcttggagctacgggcctcagggaagcaccagcccagccaggagggcctgaccctgcggctcaccatcagtgccctggagaaggcagacagcgacacctatacctgcgacattggccaggcccagtcccgggcccagctcctagtgcaaggccggagagtgcacatcatcgaggacctggaggatgtggatgtgcaggagggctcctcggccaccttccgttgccggatctccccggccaactacgagcctgtgcactggttcctggacaagacacccctgcatgccaacgagctcaatgagatcgatgcccagcccgggggctaccacgtgctgaccctgcggcagctggcgctcaaggactcgggcaccatctactttgaggcgggtgaccagcgggcctcggccgccctgcgggtcactgagaagccaagcgtcttctcccgggagctcacagatgccaccatcacagagggtgaggacttgaccctggtgtgcgagaccagcacctgcgacattcctgtgtgctggaccaaggatgggaagaccctgcgggggtctgcccggtgccagctgagccatgagggccaccgggcccagctgctcatcactggggccaccctgcaggacagtggacgctacaagtgtgaggctgggggcgcctgcagcagctccattgtcagggtgcatgcgcggccagtgcggttccaggaggccctgaaggacctggaggtgctggagggtggtgctgccacactgcgctgtgtgctgtcatctgtggctgcgcccgtgaagtggtgctatggaaacaacgtcctgaggccaggtgacaaatacagcctacgccaggagggtgccatgctggagctggtggtccggaacctccggccgcaggacagcgggcggtactcatgctccttcggggaccagactacttctgccaccctcacagtgactgccctgcctgcccagttcatcgggaaactgagaaacaaggaggccacagaaggggccacggccacgctgcggtgtgagctgagcaaggcagcccctgtggagtggagaaaggggtccgagaccctcagagatggggacagatactgtctgaggcaggacggggccatgtgtgagctgcagatccgtggcctggccatggtggatgccgcggagtactcgtgtgtgtgtggagaggagaggacctcagcctcactcaccatcaggcccatgcctgcccacttcataggaagactgagacaccaagagagcatagaaggggccacagccacgctgcggtgtgagctgagcaaggcggcccccgtggagtggaggaaggggcgtgagagcctcagagatggggacagacatagcctgaggcaggacggggctgtgtgcgagctgcagatctgtggcctggctgtggcagatgctggggagtactcctgtgtgtgtggggaggagaggacctctgccactctcaccgtgaaggccctgccagccaagttcacagagggtctgaggaatgaagaggccgtggaaggggccacagccatgttgtggtgtgaactgagcaaggtggcccctgtggagtggaggaaggggcccgagaacctcagagatggggacagatacatcctgaggcaggaggggaccaggtgtgagctgcagatctgtggcctggccatggcggacgccggggagtacttgtgtgtgtgcgggcaggagaggacctcagccacgctcaccatcagggctctgcctgccaggttcatagaagatgtgaaaaaccaggaggccagagaaggggccacggctgtgctgcagtgtgagctgaacagtgcagcccctgtggagtggagaaaggggtctgagacccttagagatggggacagatacagcctgaggcaggacgggactaaatgtgagctgcagattcgtggcctggccatggcagacactggggagtactcgtgcgtgtgcgggcaggagaggacctcggctatgctcaccgtcagggctctacccatcaagttcacagagggtctgaggaacgaagaggccacagaaggggcaacagccgtgctgcggtgtgagctgagcaagatggcccccgtggagtggtggaaggggcatgagaccctcagagatggagacagacacagcctgaggcaggacggggccaggtgtgagctgcagatccgcggcctcgtggcagaggacgctggggagtacctgtgcatgtgcgggaaggagaggacctcagccatgctcaccgtcagggccatgccttccaagttcatagagggtctgaggaatgaagaggccacagaaggggacacggccacgctgtggtgtgagctgagcaaggcggcaccggtggagtggaggaaggggcatgagaccctcagagatggggacagacacagcctgaggcaggacgggtccaggtgtgagctgcagatccgtggcctggctgtggtggatgccggggagtactcgtgtgtgtgcgggcaggagaggacctcagccacactcactgtcagggccctgcctgccagattcatagaagatgtgaaaaaccaggaggccagagaaggggccacggccgtgctgcaatgtgagctgagcaaggcggcccccgtggagtggaggaaggggtctgagaccctcagaggtggggacagatacagcctgaggcaggatgggaccagatgtgagctgcagattcatggcctgtctgtggcagacactggggagtactcgtgtgtgtgcgggcaggagaggacctcggccacactcaccgtcaggggtaaagaccacatgtggccacctgagtgattcctgtctcctcccacctaacccacatgatctgtgctctcccagttcctcttgatgtcattgccatctcatt

SEQ ID NO: 737090 - DNA, 13897 bp, Homo sapiens
  misc_feature (1026)..(1026): n is a, c, g, or t
  misc_feature (1759)..(1759): n is a, c, g, or t
  misc_feature (3108)..(3108): n is a, c, g, or t
  misc_feature (3182)..(3182): n is a, c, g, or t
  misc_feature (4398)..(4399): n is a, c, g, or t
  misc_feature (4673)..(4673): n is a, c, g, or t
  misc_feature (4708)..(4708): n is a, c, g, or t
  misc_feature (4776)..(4776): n is a, c, g, or t
  misc_feature (4818)..(4818): n is a, c, g, or t
  misc_feature (5262)..(5262): n is a, c, g, or t
  misc_feature (6200)..(6200): n is a, c, g, or t
  misc_feature (7220)..(7220): n is a, c, g, or t
agcatgacttacagaagcctttaattataatttaccatttctggccaggcacagtagctcatgcctgtaacaccatcactttgggaggctgaggcgggatgattacttgagcccgggagttcaagaccagcctgggaaacagggagacccctgtctcttaaaaaaagaaaatcaaaaaatgagccaggcatggtggctcacacctgtggttctagctactgaggaggctgaggaaggaggatgatgagcctgcgcagtttaaactgcgccacttcactccagcctgggtgataagattatgtctcaaaacaaaacaaaaaggccacatcacattgtacactttaaatataaacaatttttgcttgtcaattataactcaataaagctggggcaggtaggggacacggcagtacagtaaaaatccctcacctatctgcttgcacaaatgcaagcagatttccatctgggcagcttttttcaaacttttggcagttgcatcctcacaactgccttattacttaattacataatatttaaccccttatgcttaaaaaaaaaacccacgaaactacagacttcatcagtctttgcactaatgtcctcttgttgaggaagaatctccttcagggtgggacgatgcacttagcagtcacatctctgtggccacaaaggctgcttctcatttataccgggagaaacgttgccagcacagctgctgtgcaggcttaagcaaattgttttcaccctgtgagcctcaggcctctcttctataagatgagaaaacacccttgtttgggaatatctaataagatactgacatgaaaaggccttatgaacgcaaaagcgtgacacacctgtgtgttctctcggtgctgctgggatgtgcgtttgctgaatgtgtgtcatctacaagctggtcaaggatggaaaatgccttccctcctaacattcagaagggaatgaaaaccctctttcctcctggaatacagaggaggaaagaacttcatctttacacccaagccaagncaccagagattcttgacatgttcagatacgacttggggatcataaaatgttcaggaaaccctgcaggactgacttacagttttttttgcctatagtttgtgggcacccggggcccagccaccccatcgcctgggcagcaggtgcaggtctgaggcctccgggcccaccatcccccaggccttgggagatggctgtgagaacacccccttcagttaaactgcacccaggatgccagcccacccagctgtgaaagcccctgggaggagggctcatggcgggacatccctgtggaagctggcaactcaagggacacagtgacatttgctttcctcaggaaattgtgtctgctcctcctccacctgtacccctttgaacagacagcagctccatgaaagttctctttgcagtggattccagccaggaataggcaaggtccatggccagccactgcatcctgtggcctcccgtggtgtgaaggacaccctgggcacagtgcctccggaagctctgtagtgtgaatatcccactgtcttcaacaaatacgttgcagggaaataaggaacaacaggggtcctgtgaaggaggcagaaaatccagcctgaaggctggcagtggtgtttggagatgcagcggagcaggcagcagtgaagagggtcaggagggcaggccactcctggaggctgtgggggcattgcttctcccaggtccaggaggccctgcaaggggctggccngcacagccatcttctctgcaccctccacggccctgtccgggagggggtggggcacgtattcgagcacacacaatgcacacacacttctgcatggctggggcagctcagggccaagctcctggtgggggagtgggctctccttccagcctttcctttctccctggtgctgtggactgaatgtgtgtcccggagattcacacgttgaaatgctcacccccaaggtgacaggattagaacgtgagcttttggaagtgatcagtcatgagataaggctgcagaatggcataaccgttactccagagacccctcaccctccttctgattgaggacacatgagagatgttggccattgcccggaagagcctgaggtacgctgtgaggacacatagaggcctggcactggatcagggatggggcgaagcagctcactgcagctttgacctcctgggctcaagccatcctcctgcttcagtctcttgagtagctgggacagcaggcacctgcacggtgactgaaggcaagcacgcgcgcctcagctgctacgtgaccggcgagcccaagcccgagacggtgtggaagaaggacggccagctggtgaccgagggccggcgccacgtggtgtacgaggacgcgcaggagaacttcgtgctcaagatcctcttctgcaagcagtcggaccgcggcctctacacctgcacggcgtccaacctcgtgggccagacctacagctctgtgctggtcgtagtgcgcggtgagctcctgggtgcggggcgcgcgggcccaggctcctccgcaacccgtgcacctgggtcctttcgcccttgcggtctgccgtttcccacccgcgtctgtccggtcgtggaatccagggttgcaggtgtccgttccagtcttctctcctggcagagcccgcggttcccttcaaaaagcggctgcaagatctggaggtgcgggagaaggagtcggccacgttcctatgtgaggtgccccagccgtccactgaggccgcgtggttcaaggaggagacgcggttgtgggcgagcgccaagtacggcatcgaggaggagggcaccgagcgccgcctgaccgtgcgcaatgtctcggccgacgacgacgcggtgtacatctgcgagacgccagagggcagccgcacggtggcggagctcgcagtccaaggaaacctcctccgaaagctccctcggaagacggcggtgcgcgtgggcgacacggctatgttttgcgtggagctggcggtcccggtgggccccgtccactggctgcggaaccaggaggaagtggtggcggggggccgcgtggccatctccgcggagggcacgcgccacacactnaccatctcccagtgctgcctggaggatgtgggccaggtggcctttatggctggcgactgccagacgtccacccngttctgcgtgtcggcccccaggaagcctcccctgcaaccccctgtggatcctgtggtaaaggccaggatggagagttccgtgattctcagctggtccccaccaccccatggggaacgccctgtcactatcgacggctacctggtagagaagaagaagcttggcacctacacctggatcaggtgccacgaggctgaatgggtggctacacctgagctgaccgtggctgatgtggcggaggaggggaacttccagttccgagtgtccgctctcaacagctttggtcagagtccctacctcgagttcccggggactgtccacctggcccccaagctggccgtgaggacaccgctgaaggcggtgcaggcggtagagggtggcgaggtcactttctccgtggacctcacggtggcctcagcgggtgagtggttcctggatgggcaggccctgaaggccagcagtgtgtatgagatccactgtgatcgcacccggcacacgctcaccatccgggaggtgcccgccagcctgcacggggcgcagctgaagttcgtggccaacggcattgagagcagcatccggatggaggtccgggcggccccagggctgactgccaacaagccgccagccgcagctgcccgggaggtgctggctcggctgcacgaggaggcgcagctgctggctgagctgtcagatcaggctgcggctgtgacgtggctgaaggatggtcgcacactgtccccaggccccaagtatgaggtgcaggcatcggccgggcggcgggtgctccttgtgcgagatgtggcccgggacgatgcaggcctctacgagtgcgtcagccgcgggggccgcatcgcctaccagctctccgtgcaaggcctcgcgcgctttctgcacaaggacatggcgggcagctgtgtggatgccgtggctgggggcccggcgcagtttgagtgtgagacctccgaagcccacgtccacgtgcactggtacaaggatggcatggagctgggccactccggtgagcgcttcttgcaggaggatgtggggacgcggcaccggctggtggcagccacagtcaccaggcaggatgaaggcacctactcctgccgcgtgggcgaggactctgtggacttccggctccgcgtctctgagcccaaggtggtgtttgctaaggagcagctggcacgcaggaagctgcaggcagaggcaggagccagnnccacactgagctgcgaggtggcccaggcccagacggaggtgacgtggtacaaggatgggaagaagctgagctccagctcgaaagtgtgcatggaggccacaggctgcacgcgcaggctggttgtgcagcaggcaggccaggcggatgccggggagtatagctgcgaggctgggggccagcggctctccttccatctggatgtcaaagagcccaaggtggtgtttgccaaggaccaggtggcacacagtgaggtgcaggctgaggcaggggccantgccacgctgagctgcgaggtggcccaggcccagncggaggtgatgtggtacaaagatgggaagaagctgagctccagcttgaaagtgcatgtagaggccaanggctgcagacggaggctggtggtgcagcaggcaggcaagacngatgccggggactacagctgcgaggccaggggccagagggtctccttccgcctgcacatcacagagcccaagatgatgtttgcaaaggagcagtcagtgcataatgaggtgcaggctgaggcgggggccagtgccatgctgagctgtgaggtggcccaggcccagacggaggtgacgtggtacaaggatgggaagaagctgagctccagctcaaaagtgggcatggaggtcaaagggtgcacacggaggctggtgctgccacaggcgggcaaagcagatgctggggagtacagctgtgaggctgggggccagagagtctccttccacctgcacatcacagagcccaagggggtgtttgcgaaggagcagtcagtgcataatgaggtgcaggctgaggcggggaccactgccatgctgagctgtgaggtggcccagccccagacngaggtgacgtggtacaaggacgggaagaagctgagctccagctcaaaagtacgcatggaggtcaagggctgcacacgaaggctggtagtgcagcaggtgggcaaagcagatgctggggagtacagctgcgaggctgggggccagagagtctcctttcaactgcacatcacagagcccaaggcagtgtttgccaaggagcagttggtgcataatgaggtgcggactgaggcaggggccagtgccacactgagctgtgaggtggcccaggcccagacagaggtgacgtggtacaaggatgggaagaagctgagctccagttcgaaagtgcgcatagaggctgcgggctgcatgcggcagctggtggtgcagcaggcaggccaggcagatgctggggagtacacctgtgaggctgggggccagcggctctccttccacctggatgtttcagagcccaaggcggtgtttgcaaaggagcagctggcacacaggaaggtgcaggccgaggcgggggccattgccacgctgagctgcgaggtggcccaggcccagacagaggtgacgtggtacaaggacgggaagaagctgagctccagctcgaaagttcgaatggaggctgtgggctgcacacggaggctggtggtgcagcaggcatgccaggcggacaccggggagtatagctgcgaggccgggggccagcggctctccttcagcctggacgtggcagagcccaaggtggtgtttgccaaggagcagccagtgcacagggaggtgcaggcccaggcgggggccagcaccacactcagctgcgaggtggctcaggcccagacggaggtgatgtggtacaaggacgggaagaagctgagcttcagctcgaaagtgcgcatggaggctgtgggctgcacacggaggctggtggtgcagcaggcgggccaggcggncgccggggagtacagctgcgaggcggggagccagcggctctccttccacctgcacgtggcagagcccaaggcggtgtttgccaaggagcagccagcgagcagggaggtgcaggctgaggcggggaccagtgccacgctgagctgcgaggtggcccaggcccagacagaggtgacgtggtacaaggacgggaagaaactgagctccagctcgaaagtgcgaatggaggccgtgggctgcacacggaggctggtggtgcaggaggcaggccaggcggacgccggggagtacagctgcaaggccggggatcagcggctgtccttccacctgcacgtggcagagcccaaggtggtgtttgccaaggagcagccagcacacagggaggtgcaggctgaggcgggggccagtgccacgctgagctgcgaggtggcccaggcccagacagaggtgacgtggtacaaggatgggaagaagctgagttccagctcgaaagtgcgcgtggaggccgtgggctgcacacggaggctggtggtgcagcaggcgggccaggcggatgctggggagtacagctgtgaggcggggggccaacggctgtccttccgcctgcacgtggcagagctggagccccaaatttcagagagaccctgccgcagggagcctctggtggtcaaggagcatgaagacatcatcctgaccgccacactggccacaccctctgcggccacggtgacctggctcaaggatggtgtggagattcgccgcagcaagcggcatgagacagccagccagggggacacccacaccctgaccgtgcatggcgcccaggttctggacagcgccatctacagctgccgtgtgggcgcagaggggcaggacttcccagtgcaggtggaagaggtggccgccaagttctgccggctgctggagcctgtgtgcggcgagctgggtggcacggtgacactggcctgcgagctaagcccagcgtgtgcagaggtggtgtggcgctgcggcaacacgcagcntcgggtgggcaagcgcttccagatggtggccgaggggcccgtgcgctcactcactgtgttggggctgcgcgcagaggacgcaggggagtacgtgtgtgagagccgtgatgaccacaccagtgcgcagctcaccgtcagtgtgccccgagtggtgaagtttatgtctgggctgagcaccgtggtcgcagaggagggcggcgaggccaccttccagtgcgtggtgtcccccagtgatgtggcagtcgtgtggttccgggacggtgccctgcttcagcccagcgagaagtttgccatatcacagagtggcgccagccacagcctgaccatctcagacctggtgctggaggacgcgggccagatcaccgtggaggctgagggcgcctcatcctctgctgccctgagggtccgagaggcgcctgtgctgttcaaaaagaagctggagccgcagacggtggaggagcggagctcggtgaccctggaggtggagctgacgcggccgtggccggagctgaggtggacacggaacgcgacggccctggcgccgggaaagaacgtggagatccacgccgagggcgcccgccaccgcctggttctgcacaacgtaggttttgccgaccgtggcttctttggctgcgagacgccggatgacaagacacaggccaaactcaccgtggagatgcgccaggtacggctcgtacggggcctgcaggcagtggaggcacgggagcagggcacggctaccatggaggtgcagctgtcgcatgcggacgtggatggcagctggactcgtgacggtctgcggttccagcaggggcccacgtgccacctggctgtgcggggccccatgcacaccctcacactctcggggctgcggccagaggatagtggccttatggtcttcaaggccgaaggagtgcacacgtcggcgcggctcgtggtcaccgagcttcccgtgagcttcagccgcccgctgcaggacgtggtgaccactgagaaggagaaggttaccctggagtgcgagctgtcgcgtcctaatgtggatgtgcgctggctgaaggacggtgtggagctgcgggcaggcaagacgatggccatcgcagcccagggcgcctgcaggagcctcaccatttaccggtgcgagttcgcggatcagggagtgtatgtgtgtgatgcccatgatgcccagagctctgcctccgtgaaggtacaaggccgcaacatccagatcgtgaggcccctggaggatgtggaagtgatggagaaggacggtgccaccttctcctgtgaggtctcccacgacgaagtgcctggccagtggttctgggagggcagtaaactgcggcccactgacaacgtgcgcatccgccaggaaggaaggacatacactctcatctaccggagagtcctggcggaagatgcaggagagatccaatttgtagccgaaaatgcagaatcgcgagcccagctccgagtgaaggagctgccagtgaccctcgtgcgcccgctgcgggacaagattgccatggagaagcaccgcggtgtgctggagtgtcaggtgtcccgggccagcgcccaggtgcggtggttcaagggcagtcaggagctgcagcccgggcccaagtacgagctggtcagtgatggcctctaccgcaagctgatcatcagtgatgtccacgcagaggacgaggacacctacacctgtgacgccggtgatgtcaagaccagtgcacagttcttcgtggaagagcaatccatcaccattgtgcggggtctgcaggacgtgacagtgatggagcccgctcctgcctggtttgagtgtgagacctccatcccctcagtgcggccacctaagtggctcctggggaagacggtgttgcaggctggggggaacgtgggcctggagcaggagggcacggtgcaccggctgatgctgcggcggacctgctccaccatgaccgggcccgtgcacttcaccgttggcaagtcgcgctcctctgcccgcctggtggtctcagacatccccgtagtcctcacacggccgttggagcccaagacagggcgtgagctgcagtcagtggtcctgtcctgcgacttccggccagcccccaaggctgtgcagtggtacaaggatgacacgcccctgtctccctctgagaagtttaagatgagcctggagggtcagatggctgagctgcgcatcctccggctcatgcctgctgatgctggtgtctaccggtgccaggcgggcagtgcccacagcagcactgaggtcactgtggaagcgcgggaggtgacagtgacagggccgctacaggatgcagaggccacggaggagggctgggccagcttctcctgtgagctgtcccacgaggatgaggaggtcgagtggtcgctcaacgggatgcccctgtacaacgacagcttccatgagatctcacacaagggccggcgccacacgctggtactgaagagcatccagcgggctgatgcgggcatagtacgcgcctcctccctgaaggtgtcgacctctgcccgcctggaggtccgagtgaagccggtggtgttcctgaaggcgctggatgacctgtccgcagaggagcgcggcaccctggccctgcagtgtgaagtctctgaccccgaggcccatgtggtgtggcgcaaagatggcgtgcagctgggccccagtgacaagtatgacttcctgcacacggcgggcacgcgggggctcgtggtgcatgacgtgagccctgaagacgccggcctgtacacctgccacgtgggctccgaggagacccgggcccgggtccgcgtgcacgatctgcacgtgggcatcaccaagaggctgaagacaatggaggtgctggaaggggaaagctgcagctttgagtgcgtcctgtcccacgagagtgccagcgacccggccatgtggacagtcggtgggaagacagtgggcagctccagccgcttccaggccacacgtcagggccgaaaatacatcctggtggtccgggaggctgcaccaagtgatgccggggaggtggtcttctctgtgcggggcctcacctccaaggcctcactcattgtcagagagaggccggccgccatcatcaagcccctggaagaccagtgggtggcgccaggggaggacgtggagctgcgctgtgagctgtcacgggcgggaacgcccgtgcactggctgaaggacaggaaggccatccgcaagagccagaagtatgatgtggtctgcgagggcacgatggccatgctggtcatccgcggggcctcgctcaaggacgcgggcgagtacacgtgtgaggtggaggcttccaagagcacagccagcctccatgtggaagaaaaagcaaactgcttcacagaggagctgaccaatctgcaggtggaggagaaaggcacagctgtgttcacgtgcaagacggagcaccccgcggccacagtgacctggcgcaagggcctcttggagctacgggcctcagggaagcaccagcccagccaggagggcctgaccctgcggctcaccatcagtgccctggagaaggcagacagcgacacctatacctgcgacattggccaggcccagtcccgggcccagctcctagtgcaaggccggagagtgcacatcatcgaggacctggaggatgtggatgtgcaggagggctcctcggccaccttccgttgccggatctccccggccaactacgagcctgtgcactggttcctggacaagacacccctgcatgccaacgagctcaatgagatcgatgcccagcccgggggctaccacgtgctgaccctgcggcagctggcgctcaaggactcgggcaccatctactttgaggcgggtgaccagcgggcctcggccgccctgcgggtcactgagaagccaagcgtcttctcccgggagctcacagatgccaccatcacagagggtgaggacttgaccctggtgtgcgagaccagcacctgcgacattcctgtgtgctggaccaaggatgggaagaccctgcgggggtctgcccggtgccagctgagccatgagggccaccgggcccagctgctcatcactggggccaccctgcaggacagtggacgctacaagtgtgaggctgggggcgcctgcagcagctccattgtcagggtgcatgcgcggccagtgcggttccaggaggccctgaaggacctggaggtgctggagggtggtgctgccacactgcgctgtgtgctgtcatctgtggctgcgcccgtgaagtggtgctatggaaacaacgtcctgaggccaggtgacaaatacagcctacgccaggagggtgccatgctggagctggtggtccggaacctccggccgcaggacagcgggcggtactcatgctccttcggggaccagactacttctgccaccctcacagtgactgccctgcctgcccagttcatcgggaaactgagaaacaaggaggccacagaaggggccacggccacgctgcggtgtgagctgagcaaggcagcccctgtggagtggagaaaggggtccgagaccctcagagatggggacagatactgtctgaggcaggacggggccatgtgtgagctgcagatccgtggcctggccatggtggatgccgcggagtactcgtgtgtgtgtggagaggagaggacctcagcctcactcaccatcaggcccatgcctgcccacttcataggaagactgagacaccaagagagcatagaaggggccacagccacgctgcggtgtgagctgagcaaggcggcccccgtggagtggaggaaggggcgtgagagcctcagagatggggacagacatagcctgaggcaggacggggctgtgtgcgagctgcagatctgtggcctggctgtggcagatgctggggagtactcctgtgtgtgtggggaggagaggacctctgccactctcaccgtgaaggccctgccagccaagttcacagagggtctgaggaatgaagaggccgtggaaggggccacagccatgttgtggtgtgaactgagcaaggtggcccctgtggagtggaggaaggggcccgagaacctcagagatggggacagatacatcctgaggcaggaggggaccaggtgtgagctgcagatctgtggcctggccatggcggacgccggggagtacttgtgtgtgtgcgggcaggagaggacctcagccacgctcaccatcagggctctgcctgccaggttcatagaagatgtgaaaaaccaggaggccagagaaggggccacggctgtgctgcagtgtgagctgaacagtgcagcccctgtggagtggagaaaggggtctgagacccttagagatggggacagatacagcctgaggcaggacgggactaaatgtgagctgcagattcgtggcctggccatggcagacactggggagtactcgtgcgtgtgcgggcaggagaggacctcggctatgctcaccgtcagggctctacccatcaagttcacagagggtctgaggaacgaagaggccacagaaggggcaacagccgtgctgcggtgtgagctgagcaagatggcccccgtggagtggtggaaggggcatgagaccctcagagatggagacagacacagcctgaggcaggacggggccaggtgtgagctgcagatccgcggcctcgtggcagaggacgctggggagtacctgtgcatgtgcgggaaggagaggacctcagccatgctcaccgtcagggccatgccttccaagttcatagagggtctgaggaatgaagaggccacagaaggggacacggccacgctgtggtgtgagctgagcaaggcggcaccggtggagtggaggaaggggcatgagaccctcagagatggggacagacacagcctgaggcaggacgggtccaggtgtgagctgcagatccgtggcctggctgtggtggatgccggggagtactcgtgtgtgtgcgggcaggagaggacctcagccacactcactgtcagggccctgcctgccagattcatagaagatgtgaaaaaccaggaggccagagaaggggccacggccgtgctgcaatgtgagctgagcaaggcggcccccgtggagtggaggaaggggtctgagaccctcagaggtggggacagatacagcctgaggcaggatgggaccagatgtgagctgcagattcatggcctgtctgtggcagacactggggagtactcgtgtgtgtgcgggcaggagaggacctcggccacactcaccgtcagggccctgcctgcacgattcactcaagatctgaagaccaaggaggcctcagaaggggccacagctacactgcagtgtgagctgagcaaggtggcccctgtggaatggaagaagggtcctgagaccctcagagatgggggcagatacagcctgaagcaggatgggacgaggtgtgagctgcagatccatgacctgtctgtggcggatgctggggaatactcatgcatgtgtggacaagagaggacctcggccacgctcactgtcaggggtaaagtccatctgtccagatctgcgttctggtgtccagttgttcacttcttgccatcaatctctgctcattgcatggtctcccccagactgccacactcttcacgtcatgccacactatcccttccagcttcct

SEQ ID NO: 737091 - DNA, 14674 bp, Homo sapiens
  misc_feature (1026)..(1026): n is a, c, g, or t
  misc_feature (1759)..(1759): n is a, c, g, or t
  misc_feature (3108)..(3108): n is a, c, g, or t
  misc_feature (3182)..(3182): n is a, c, g, or t
  misc_feature (4398)..(4399): n is a, c, g, or t
  misc_feature (4673)..(4673): n is a, c, g, or t
  misc_feature (4708)..(4708): n is a, c, g, or t
  misc_feature (4776)..(4776): n is a, c, g, or t
  misc_feature (4818)..(4818): n is a, c, g, or t
  misc_feature (5262)..(5262): n is a, c, g, or t
  misc_feature (6200)..(6200): n is a, c, g, or t
  misc_feature (7220)..(7220): n is a, c, g, or t
agcatgacttacagaagcctttaattataatttaccatttctggccaggcacagtagctcatgcctgtaacaccatcactttgggaggctgaggcgggatgattacttgagcccgggagttcaagaccagcctgggaaacagggagacccctgtctcttaaaaaaagaaaatcaaaaaatgagccaggcatggtggctcacacctgtggttctagctactgaggaggctgaggaaggaggatgatgagcctgcgcagtttaaactgcgccacttcactccagcctgggtgataagattatgtctcaaaacaaaacaaaaaggccacatcacattgtacactttaaatataaacaatttttgcttgtcaattataactcaataaagctggggcaggtaggggacacggcagtacagtaaaaatccctcacctatctgcttgcacaaatgcaagcagatttccatctgggcagcttttttcaaacttttggcagttgcatcctcacaactgccttattacttaattacataatatttaaccccttatgcttaaaaaaaaaacccacgaaactacagacttcatcagtctttgcactaatgtcctcttgttgaggaagaatctccttcagggtgggacgatgcacttagcagtcacatctctgtggccacaaaggctgcttctcatttataccgggagaaacgttgccagcacagctgctgtgcaggcttaagcaaattgttttcaccctgtgagcctcaggcctctcttctataagatgagaaaacacccttgtttgggaatatctaataagatactgacatgaaaaggccttatgaacgcaaaagcgtgacacacctgtgtgttctctcggtgctgctgggatgtgcgtttgctgaatgtgtgtcatctacaagctggtcaaggatggaaaatgccttccctcctaacattcagaagggaatgaaaaccctctttcctcctggaatacagaggaggaaagaacttcatctttacacccaagccaagncaccagagattcttgacatgttcagatacgacttggggatcataaaatgttcaggaaaccctgcaggactgacttacagttttttttgcctatagtttgtgggcacccggggcccagccaccccatcgcctgggcagcaggtgcaggtctgaggcctccgggcccaccatcccccaggccttgggagatggctgtgagaacacccccttcagttaaactgcacccaggatgccagcccacccagctgtgaaagcccctgggaggagggctcatggcgggacatccctgtggaagctggcaactcaagggacacagtgacatttgctttcctcaggaaattgtgtctgctcctcctccacctgtacccctttgaacagacagcagctccatgaaagttctctttgcagtggattccagccaggaataggcaaggtccatggccagccactgcatcctgtggcctcccgtggtgtgaaggacaccctgggcacagtgcctccggaagctctgtagtgtgaatatcccactgtcttcaacaaatacgttgcagggaaataaggaacaacaggggtcctgtgaaggaggcagaaaatccagcctgaaggctggcagtggtgtttggagatgcagcggagcaggcagcagtgaagagggtcaggagggcaggccactcctggaggctgtgggggcattgcttctcccaggtccaggaggccctgcaaggggctggccngcacagccatcttctctgcaccctccacggccctgtccgggagggggtggggcacgtattcgagcacacacaatgcacacacacttctgcatggctggggcagctcagggccaagctcctggtgggggagtgggctctccttccagcctttcctttctccctggtgctgtggactgaatgtgtgtcccggagattcacacgttgaaatgctcacccccaaggtgacaggattagaacgtgagcttttggaagtgatcagtcatgagataaggctgcagaatggcataaccgttactccagagacccctcaccctccttctgattgaggacacatgagagatgttggccattgcccggaagagcctgaggtacgctgtgaggacacatagaggcctggcactggatcagggatggggcgaagcagctcactgcagctttgacctcctgggctcaagccatcctcctgcttcagtctcttgagtagctgggacagcaggcacctgcacggtgactgaaggcaagcacgcgcgcctcagctgctacgtgaccggcgagcccaagcccgagacggtgtggaagaaggacggccagctggtgaccgagggccggcgccacgtggtgtacgaggacgcgcaggagaacttcgtgctcaagatcctcttctgcaagcagtcggaccgcggcctctacacctgcacggcgtccaacctcgtgggccagacctacagctctgtgctggtcgtagtgcgcggtgagctcctgggtgcggggcgcgcgggcccaggctcctccgcaacccgtgcacctgggtcctttcgcccttgcggtctgccgtttcccacccgcgtctgtccggtcgtggaatccagggttgcaggtgtccgttccagtcttctctcctggcagagcccgcggttcccttcaaaaagcggctgcaagatctggaggtgcgggagaaggagtcggccacgttcctatgtgaggtgccccagccgtccactgaggccgcgtggttcaaggaggagacgcggttgtgggcgagcgccaagtacggcatcgaggaggagggcaccgagcgccgcctgaccgtgcgcaatgtctcggccgacgacgacgcggtgtacatctgcgagacgccagagggcagccgcacggtggcggagctcgcagtccaaggaaacctcctccgaaagctccctcggaagacggcggtgcgcgtgggcgacacggctatgttttgcgtggagctggcggtcccggtgggccccgtccactggctgcggaaccaggaggaagtggtggcggggggccgcgtggccatctccgcggagggcacgcgccacacactnaccatctcccagtgctgcctggaggatgtgggccaggtggcctttatggctggcgactgccagacgtccacccngttctgcgtgtcggcccccaggaagcctcccctgcaaccccctgtggatcctgtggtaaaggccaggatggagagttccgtgattctcagctggtccccaccaccccatggggaacgccctgtcactatcgacggctacctggtagagaagaagaagcttggcacctacacctggatcaggtgccacgaggctgaatgggtggctacacctgagctgaccgtggctgatgtggcggaggaggggaacttccagttccgagtgtccgctctcaacagctttggtcagagtccctacctcgagttcccggggactgtccacctggcccccaagctggccgtgaggacaccgctgaaggcggtgcaggcggtagagggtggcgaggtcactttctccgtggacctcacggtggcctcagcgggtgagtggttcctggatgggcaggccctgaaggccagcagtgtgtatgagatccactgtgatcgcacccggcacacgctcaccatccgggaggtgcccgccagcctgcacggggcgcagctgaagttcgtggccaacggcattgagagcagcatccggatggaggtccgggcggccccagggctgactgccaacaagccgccagccgcagctgcccgggaggtgctggctcggctgcacgaggaggcgcagctgctggctgagctgtcagatcaggctgcggctgtgacgtggctgaaggatggtcgcacactgtccccaggccccaagtatgaggtgcaggcatcggccgggcggcgggtgctccttgtgcgagatgtggcccgggacgatgcaggcctctacgagtgcgtcagccgcgggggccgcatcgcctaccagctctccgtgcaaggcctcgcgcgctttctgcacaaggacatggcgggcagctgtgtggatgccgtggctgggggcccggcgcagtttgagtgtgagacctccgaagcccacgtccacgtgcactggtacaaggatggcatggagctgggccactccggtgagcgcttcttgcaggaggatgtggggacgcggcaccggctggtggcagccacagtcaccaggcaggatgaaggcacctactcctgccgcgtgggcgaggactctgtggacttccggctccgcgtctctgagcccaaggtggtgtttgctaaggagcagctggcacgcaggaagctgcaggcagaggcaggagccagnnccacactgagctgcgaggtggcccaggcccagacggaggtgacgtggtacaaggatgggaagaagctgagctccagctcgaaagtgtgcatggaggccacaggctgcacgcgcaggctggttgtgcagcaggcaggccaggcggatgccggggagtatagctgcgaggctgggggccagcggctctccttccatctggatgtcaaagagcccaaggtggtgtttgccaaggaccaggtggcacacagtgaggtgcaggctgaggcaggggccantgccacgctgagctgcgaggtggcccaggcccagncggaggtgatgtggtacaaagatgggaagaagctgagctccagcttgaaagtgcatgtagaggccaanggctgcagacggaggctggtggtgcagcaggcaggcaagacngatgccggggactacagctgcgaggccaggggccagagggtctccttccgcctgcacatcacagagcccaagatgatgtttgcaaaggagcagtcagtgcataatgaggtgcaggctgaggcgggggccagtgccatgctgagctgtgaggtggcccaggcccagacggaggtgacgtggtacaaggatgggaagaagctgagctccagctcaaaagtgggcatggaggtcaaagggtgcacacggaggctggtgctgccacaggcgggcaaagcagatgctggggagtacagctgtgaggctgggggccagagagtctccttccacctgcacatcacagagcccaagggggtgtttgcgaaggagcagtcagtgcataatgaggtgcaggctgaggcggggaccactgccatgctgagctgtgaggtggcccagccccagacngaggtgacgtggtacaaggacgggaagaagctgagctccagctcaaaagtacgcatggaggtcaagggctgcacacgaaggctggtagtgcagcaggtgggcaaagcagatgctggggagtacagctgcgaggctgggggccagagagtctcctttcaactgcacatcacagagcccaaggcagtgtttgccaaggagcagttggtgcataatgaggtgcggactgaggcaggggccagtgccacactgagctgtgaggtggcccaggcccagacagaggtgacgtggtacaaggatgggaagaagctgagctccagttcgaaagtgcgcatagaggctgcgggctgcatgcggcagctggtggtgcagcaggcaggccaggcagatgctggggagtacacctgtgaggctgggggccagcggctctccttccacctggatgtttcagagcccaaggcggtgtttgcaaaggagcagctggcacacaggaaggtgcaggccgaggcgggggccattgccacgctgagctgcgaggtggcccaggcccagacagaggtgacgtggtacaaggacgggaagaagctgagctccagctcgaaagttcgaatggaggctgtgggctgcacacggaggctggtggtgcagcaggcatgccaggcggacaccggggagtatagctgcgaggccgggggccagcggctctccttcagcctggacgtggcagagcccaaggtggtgtttgccaaggagcagccagtgcacagggaggtgcaggcccaggcgggggccagcaccacactcagctgcgaggtggctcaggcccagacggaggtgatgtggtacaaggacgggaagaagctgagcttcagctcgaaagtgcgcatggaggctgtgggctgcacacggaggctggtggtgcagcaggcgggccaggcggncgccggggagtacagctgcgaggcggggagccagcggctctccttccacctgcacgtggcagagcccaaggcggtgtttgccaaggagcagccagcgagcagggaggtgcaggctgaggcggggaccagtgccacgctgagctgcgaggtggcccaggcccagacagaggtgacgtggtacaaggacgggaagaaactgagctccagctcgaaagtgcgaatggaggccgtgggctgcacacggaggctggtggtgcaggaggcaggccaggcggacgccggggagtacagctgcaaggccggggatcagcggctgtccttccacctgcacgtggcagagcccaaggtggtgtttgccaaggagcagccagcacacagggaggtgcaggctgaggcgggggccagtgccacgctgagctgcgaggtggcccaggcccagacagaggtgacgtggtacaaggatgggaagaagctgagttccagctcgaaagtgcgcgtggaggccgtgggctgcacacggaggctggtggtgcagcaggcgggccaggcggatgctggggagtacagctgtgaggcggggggccaacggctgtccttccgcctgcacgtggcagagctggagccccaaatttcagagagaccctgccgcagggagcctctggtggtcaaggagcatgaagacatcatcctgaccgccacactggccacaccctctgcggccacggtgacctggctcaaggatggtgtggagattcgccgcagcaagcggcatgagacagccagccagggggacacccacaccctgaccgtgcatggcgcccaggttctggacagcgccatctacagctgccgtgtgggcgcagaggggcaggacttcccagtgcaggtggaagaggtggccgccaagttctgccggctgctggagcctgtgtgcggcgagctgggtggcacggtgacactggcctgcgagctaagcccagcgtgtgcagaggtggtgtggcgctgcggcaacacgcagcntcgggtgggcaagcgcttccagatggtggccgaggggcccgtgcgctcactcactgtgttggggctgcgcgcagaggacgcaggggagtacgtgtgtgagagccgtgatgaccacaccagtgcgcagctcaccgtcagtgtgccccgagtggtgaagtttatgtctgggctgagcaccgtggtcgcagaggagggcggcgaggccaccttccagtgcgtggtgtcccccagtgatgtggcagtcgtgtggttccgggacggtgccctgcttcagcccagcgagaagtttgccatatcacagagtggcgccagccacagcctgaccatctcagacctggtgctggaggacgcgggccagatcaccgtggaggctgagggcgcctcatcctctgctgccctgagggtccgagaggcgcctgtgctgttcaaaaagaagctggagccgcagacggtggaggagcggagctcggtgaccctggaggtggagctgacgcggccgtggccggagctgaggtggacacggaacgcgacggccctggcgccgggaaagaacgtggagatccacgccgagggcgcccgccaccgcctggttctgcacaacgtaggttttgccgaccgtggcttctttggctgcgagacgccggatgacaagacacaggccaaactcaccgtggagatgcgccaggtacggctcgtacggggcctgcaggcagtggaggcacgggagcagggcacggctaccatggaggtgcagctgtcgcatgcggacgtggatggcagctggactcgtgacggtctgcggttccagcaggggcccacgtgccacctggctgtgcggggccccatgcacaccctcacactctcggggctgcggccagaggatagtggccttatggtcttcaaggccgaaggagtgcacacgtcggcgcggctcgtggtcaccgagcttcccgtgagcttcagccgcccgctgcaggacgtggtgaccactgagaaggagaaggttaccctggagtgcgagctgtcgcgtcctaatgtggatgtgcgctggctgaaggacggtgtggagctgcgggcaggcaagacgatggccatcgcagcccagggcgcctgcaggagcctcaccatttaccggtgcgagttcgcggatcagggagtgtatgtgtgtgatgcccatgatgcccagagctctgcctccgtgaaggtacaaggccgcaacatccagatcgtgaggcccctggaggatgtggaagtgatggagaaggacggtgccaccttctcctgtgaggtctcccacgacgaagtgcctggccagtggttctgggagggcagtaaactgcggcccactgacaacgtgcgcatccgccaggaaggaaggacatacactctcatctaccggagagtcctggcggaagatgcaggagagatccaatttgtagccgaaaatgcagaatcgcgagcccagctccgagtgaaggagctgccagtgaccctcgtgcgcccgctgcgggacaagattgccatggagaagcaccgcggtgtgctggagtgtcaggtgtcccgggccagcgcccaggtgcggtggttcaagggcagtcaggagctgcagcccgggcccaagtacgagctggtcagtgatggcctctaccgcaagctgatcatcagtgatgtccacgcagaggacgaggacacctacacctgtgacgccggtgatgtcaagaccagtgcacagttcttcgtggaagagcaatccatcaccattgtgcggggtctgcaggacgtgacagtgatggagcccgctcctgcctggtttgagtgtgagacctccatcccctcagtgcggccacctaagtggctcctggggaagacggtgttgcaggctggggggaacgtgggcctggagcaggagggcacggtgcaccggctgatgctgcggcggacctgctccaccatgaccgggcccgtgcacttcaccgttggcaagtcgcgctcctctgcccgcctggtggtctcagacatccccgtagtcctcacacggccgttggagcccaagacagggcgtgagctgcagtcagtggtcctgtcctgcgacttccggccagcccccaaggctgtgcagtggtacaaggatgacacgcccctgtctccctctgagaagtttaagatgagcctggagggtcagatggctgagctgcgcatcctccggctcatgcctgctgatgctggtgtctaccggtgccaggcgggcagtgcccacagcagcactgaggtcactgtggaagcgcgggaggtgacagtgacagggccgctacaggatgcagaggccacggaggagggctgggccagcttctcctgtgagctgtcccacgaggatgaggaggtcgagtggtcgctcaacgggatgcccctgtacaacgacagcttccatgagatctcacacaagggccggcgccacacgctggtactgaagagcatccagcgggctgatgcgggcatagtacgcgcctcctccctgaaggtgtcgacctctgcccgcctggaggtccgagtgaagccggtggtgttcctgaaggcgctggatgacctgtccgcagaggagcgcggcaccctggccctgcagtgtgaagtctctgaccccgaggcccatgtggtgtggcgcaaagatggcgtgcagctgggccccagtgacaagtatgacttcctgcacacggcgggcacgcgggggctcgtggtgcatgacgtgagccctgaagacgccggcctgtacacctgccacgtgggctccgaggagacccgggcccgggtccgcgtgcacgatctgcacgtgggcatcaccaagaggctgaagacaatggaggtgctggaaggggaaagctgcagctttgagtgcgtcctgtcccacgagagtgccagcgacccggccatgtggacagtcggtgggaagacagtgggcagctccagccgcttccaggccacacgtcagggccgaaaatacatcctggtggtccgggaggctgcaccaagtgatgccggggaggtggtcttctctgtgcggggcctcacctccaaggcctcactcattgtcagagagaggccggccgccatcatcaagcccctggaagaccagtgggtggcgccaggggaggacgtggagctgcgctgtgagctgtcacgggcgggaacgcccgtgcactggctgaaggacaggaaggccatccgcaagagccagaagtatgatgtggtctgcgagggcacgatggccatgctggtcatccgcggggcctcgctcaaggacgcgggcgagtacacgtgtgaggtggaggcttccaagagcacagccagcctccatgtggaagaaaaagcaaactgcttcacagaggagctgaccaatctgcaggtggaggagaaaggcacagctgtgttcacgtgcaagacggagcaccccgcggccacagtgacctggcgcaagggcctcttggagctacgggcctcagggaagcaccagcccagccaggagggcctgaccctgcggctcaccatcagtgccctggagaaggcagacagcgacacctatacctgcgacattggccaggcccagtcccgggcccagctcctagtgcaaggccggagagtgcacatcatcgaggacctggaggatgtggatgtgcaggagggctcctcggccaccttccgttgccggatctccccggccaactacgagcctgtgcactggttcctggacaagacacccctgcatgccaacgagctcaatgagatcgatgcccagcccgggggctaccacgtgctgaccctgcggcagctggcgctcaaggactcgggcaccatctactttgaggcgggtgaccagcgggcctcggccgccctgcgggtcactgagaagccaagcgtcttctcccgggagctcacagatgccaccatcacagagggtgaggacttgaccctggtgtgcgagaccagcacctgcgacattcctgtgtgctggaccaaggatgggaagaccctgcgggggtctgcccggtgccagctgagccatgagggccaccgggcccagctgctcatcactggggccaccctgcaggacagtggacgctacaagtgtgaggctgggggcgcctgcagcagctccattgtcagggtgcatgcgcggccagtgcggttccaggaggccctgaaggacctggaggtgctggagggtggtgctgccacactgcgctgtgtgctgtcatctgtggctgcgcccgtgaagtggtgctatggaaacaacgtcctgaggccaggtgacaaatacagcctacgccaggagggtgccatgctggagctggtggtccggaacctccggccgcaggacagcgggcggtactcatgctccttcggggaccagactacttctgccaccctcacagtgactgccctgcctgcccagttcatcgggaaactgagaaacaaggaggccacagaaggggccacggccacgctgcggtgtgagctgagcaaggcagcccctgtggagtggagaaaggggtccgagaccctcagagatggggacagatactgtctgaggcaggacggggccatgtgtgagctgcagatccgtggcctggccatggtggatgccgcggagtactcgtgtgtgtgtggagaggagaggacctcagcctcactcaccatcaggcccatgcctgcccacttcataggaagactgagacaccaagagagcatagaaggggccacagccacgctgcggtgtgagctgagcaaggcggcccccgtggagtggaggaaggggcgtgagagcctcagagatggggacagacatagcctgaggcaggacggggctgtgtgcgagctgcagatctgtggcctggctgtggcagatgctggggagtactcctgtgtgtgtggggaggagaggacctctgccactctcaccgtgaaggccctgccagccaagttcacagagggtctgaggaatgaagaggccgtggaaggggccacagccatgttgtggtgtgaactgagcaaggtggcccctgtggagtggaggaaggggcccgagaacctcagagatggggacagatacatcctgaggcaggaggggaccaggtgtgagctgcagatctgtggcctggccatggcggacgccggggagtacttgtgtgtgtgcgggcaggagaggacctcagccacgctcaccatcagggctctgcctgccaggttcatagaagatgtgaaaaaccaggaggccagagaaggggccacggctgtgctgcagtgtgagctgaacagtgcagcccctgtggagtggagaaaggggtctgagacccttagagatggggacagatacagcctgaggcaggacgggactaaatgtgagctgcagattcgtggcctggccatggcagacactggggagtactcgtgcgtgtgcgggcaggagaggacctcggctatgctcaccgtcagggctctacccatcaagttcacagagggtctgaggaacgaagaggccacagaaggggcaacagccgtgctgcggtgtgagctgagcaagatggcccccgtggagtggtggaaggggcatgagaccctcagagatggagacagacacagcctgaggcaggacggggccaggtgtgagctgcagatccgcggcctcgtggcagaggacgctggggagtacctgtgcatgtgcgggaaggagaggacctcagccatgctcaccgtcagggccatgccttccaagttcatagagggtctgaggaatgaagaggccacagaaggggacacggccacgctgtggtgtgagctgagcaaggcggcaccggtggagtggaggaaggggcatgagaccctcagagatggggacagacacagcctgaggcaggacgggtccaggtgtgagctgcagatccgtggcctggctgtggtggatgccggggagtactcgtgtgtgtgcgggcaggagaggacctcagccacactcactgtcagggccctgcctgccagattcatagaagatgtgaaaaaccaggaggccagagaaggggccacggccgtgctgcaatgtgagctgagcaaggcggcccccgtggagtggaggaaggggtctgagaccctcagaggtggggacagatacagcctgaggcaggatgggaccagatgtgagctgcagattcatggcctgtctgtggcagacactggggagtactcgtgtgtgtgcgggcaggagaggacctcggccacactcaccgtcagggccctgcctgcacgattcactcaagatctgaagaccaaggaggcctcagaaggggccacagctacactgcagtgtgagctgagcaaggtggcccctgtggaatggaagaagggtcctgagaccctcagagatgggggcagatacagcctgaagcaggatgggacgaggtgtgagctgcagatccatgacctgtctgtggcggatgctggggaatactcatgcatgtgtggacaagagaggacctcggccacgctcactgtcagggccctgcctgccaggttcacagagggtctgaggaatgaagaggccatggaaggggccacagccacactgcaatgtgagctgagcaaggcagcccctgtggagtggaggaaaggccttgaggctctcagagatggggacaaatacagcctgagacaagacggggctgtgtgtgagctgcagattcatggcctggctatggcagataacggggtgtactcatgtgtgtgtgggcaggagaggacctcagctacactcactgtcagggccctgcctgccagattcatagaggatatgagaaaccagaaggccacagaaggggctacagtcacattgcaatgtaagctgagaaaggcggcccccgtggagtggagaaaggggcccaacaccctcaaagatggggacaggtacagcctgaagcaggatgggaccagttgtgagctgcagattcgtggcctggtcatagcagatgctggagaatactcgtgcatatgtgagcaggagaggacctcggccacgctcactgtcagggccctgccggccagattcatagaagatgtgagaaatcacgaggccacagaaggggccacagctgtgctgcagtgtgagctgagcaaggcggcccccgtggagtggcggaaggggtctgagaccctcagagatggggacagatatagcctgaggcaggacgggacgaggtgtgagctgcagattcgtggcctggctgtggaggacactggagagtatttgtgtgtgtgcgggcaggagagaacctcagctacactcactgtcaggggtaaagatcctgtgtggtcacatggacttgtggcttggaatctaagtgtctctgtgtcaccaccttctacttccaaatgtggcacccctgtgggaaccctgaggttgtgtgtcctctaac

SEQ ID NO: 737092 - DNA, 14809 bp, Homo sapiens
  misc_feature (1026)..(1026): n is a, c, g, or t
  misc_feature (1759)..(1759): n is a, c, g, or t
  misc_feature (3108)..(3108): n is a, c, g, or t
  misc_feature (3182)..(3182): n is a, c, g, or t
  misc_feature (4398)..(4399): n is a, c, g, or t
  misc_feature (4673)..(4673): n is a, c, g, or t
  misc_feature (4708)..(4708): n is a, c, g, or t
  misc_feature (4776)..(4776): n is a, c, g, or t
  misc_feature (4818)..(4818): n is a, c, g, or t
  misc_feature (5262)..(5262): n is a, c, g, or t
  misc_feature (6200)..(6200): n is a, c, g, or t
  misc_feature (7220)..(7220): n is a, c, g, or t
  misc_feature (14716)..(14716): n is a, c, g, or t
  misc_feature (14727)..(14727): n is a, c, g, or t
  misc_feature (14734)..(14734): n is a, c, g, or t
  misc_feature (14736)..(14736): n is a, c, g, or t
  misc_feature (14742)..(14742): n is a, c, g, or t
  misc_feature (14750)..(14750): n is a, c, g, or t
  misc_feature (14752)..(14752): n is a, c, g, or t
  misc_feature (14757)..(14757): n is a, c, g, or t
  misc_feature (14763)..(14763): n is a, c, g, or t
  misc_feature (14768)..(14768): n is a, c, g, or t
  misc_feature (14779)..(14780): n is a, c, g, or t
  misc_feature (14782)..(14783): n is a, c, g, or t
  misc_feature (14785)..(14785): n is a, c, g, or t
  misc_feature (14789)..(14789): n is a, c, g, or t
  misc_feature (14796)..(14796): n is a, c, g, or t
  misc_feature (14800)..(14801): n is a, c, g, or t
  misc_feature (14803)..(14803): n is a, c, g, or t
  misc_feature (14805)..(14808): n is a, c, g, or t
agcatgacttacagaagcctttaattataatttaccatttctggccaggcacagtagctcatgcctgtaacaccatcactttgggaggctgaggcgggatgattacttgagcccgggagttcaagaccagcctgggaaacagggagacccctgtctcttaaaaaaagaaaatcaaaaaatgagccaggcatggtggctcacacctgtggttctagctactgaggaggctgaggaaggaggatgatgagcctgcgcagtttaaactgcgccacttcactccagcctgggtgataagattatgtctcaaaacaaaacaaaaaggccacatcacattgtacactttaaatataaacaatttttgcttgtcaattataactcaataaagctggggcaggtaggggacacggcagtacagtaaaaatccctcacctatctgcttgcacaaatgcaagcagatttccatctgggcagcttttttcaaacttttggcagttgcatcctcacaactgccttattacttaattacataatatttaaccccttatgcttaaaaaaaaaacccacgaaactacagacttcatcagtctttgcactaatgtcctcttgttgaggaagaatctccttcagggtgggacgatgcacttagcagtcacatctctgtggccacaaaggctgcttctcatttataccgggagaaacgttgccagcacagctgctgtgcaggcttaagcaaattgttttcaccctgtgagcctcaggcctctcttctataagatgagaaaacacccttgtttgggaatatctaataagatactgacatgaaaaggccttatgaacgcaaaagcgtgacacacctgtgtgttctctcggtgctgctgggatgtgcgtttgctgaatgtgtgtcatctacaagctggtcaaggatggaaaatgccttccctcctaacattcagaagggaatgaaaaccctctttcctcctggaatacagaggaggaaagaacttcatctttacacccaagccaagncaccagagattcttgacatgttcagatacgacttggggatcataaaatgttcaggaaaccctgcaggactgacttacagttttttttgcctatagtttgtgggcacccggggcccagccaccccatcgcctgggcagcaggtgcaggtctgaggcctccgggcccaccatcccccaggccttgggagatggctgtgagaacacccccttcagttaaactgcacccaggatgccagcccacccagctgtgaaagcccctgggaggagggctcatggcgggacatccctgtggaagctggcaactcaagggacacagtgacatttgctttcctcaggaaattgtgtctgctcctcctccacctgtacccctttgaacagacagcagctccatgaaagttctctttgcagtggattccagccaggaataggcaaggtccatggccagccactgcatcctgtggcctcccgtggtgtgaaggacaccctgggcacagtgcctccggaagctctgtagtgtgaatatcccactgtcttcaacaaatacgttgcagggaaataaggaacaacaggggtcctgtgaaggaggcagaaaatccagcctgaaggctggcagtggtgtttggagatgcagcggagcaggcagcagtgaagagggtcaggagggcaggccactcctggaggctgtgggggcattgcttctcccaggtccaggaggccctgcaaggggctggccngcacagccatcttctctgcaccctccacggccctgtccgggagggggtggggcacgtattcgagcacacacaatgcacacacacttctgcatggctggggcagctcagggccaagctcctggtgggggagtgggctctccttccagcctttcctttctccctggtgctgtggactgaatgtgtgtcccggagattcacacgttgaaatgctcacccccaaggtgacaggattagaacgtgagcttttggaagtgatcagtcatgagataaggctgcagaatggcataaccgttactccagagacccctcaccctccttctgattgaggacacatgagagatgttggccattgcccggaagagcctgaggtacgctgtgaggacacatagaggcctggcactggatcagggatggggcgaagcagctcactgcagctttgacctcctgggctcaagccatcctcctgcttcagtctcttgagtagctgggacagcaggcacctgcacggtgactgaaggcaagcacgcgcgcctcagctgctacgtgaccggcgagcccaagcccgagacggtgtggaagaaggacggccagctggtgaccgagggccggcgccacgtggtgtacgaggacgcgcaggagaacttcgtgctcaagatcctcttctgcaagcagtcggaccgcggcctctacacctgcacggcgtccaacctcgtgggccagacctacagctctgtgctggtcgtagtgcgcggtgagctcctgggtgcggggcgcgcgggcccaggctcctccgcaacccgtgcacctgggtcctttcgcccttgcggtctgccgtttcccacccgcgtctgtccggtcgtggaatccagggttgcaggtgtccgttccagtcttctctcctggcagagcccgcggttcccttcaaaaagcggctgcaagatctggaggtgcgggagaaggagtcggccacgttcctatgtgaggtgccccagccgtccactgaggccgcgtggttcaaggaggagacgcggttgtgggcgagcgccaagtacggcatcgaggaggagggcaccgagcgccgcctgaccgtgcgcaatgtctcggccgacgacgacgcggtgtacatctgcgagacgccagagggcagccgcacggtggcggagctcgcagtccaaggaaacctcctccgaaagctccctcggaagacggcggtgcgcgtgggcgacacggctatgttttgcgtggagctggcggtcccggtgggccccgtccactggctgcggaaccaggaggaagtggtggcggggggccgcgtggccatctccgcggagggcacgcgccacacactnaccatctcccagtgctgcctggaggatgtgggccaggtggcctttatggctggcgactgccagacgtccacccngttctgcgtgtcggcccccaggaagcctcccctgcaaccccctgtggatcctgtggtaaaggccaggatggagagttccgtgattctcagctggtccccaccaccccatggggaacgccctgtcactatcgacggctacctggtagagaagaagaagcttggcacctacacctggatcaggtgccacgaggctgaatgggtggctacacctgagctgaccgtggctgatgtggcggaggaggggaacttccagttccgagtgtccgctctcaacagctttggtcagagtccctacctcgagttcccggggactgtccacctggcccccaagctggccgtgaggacaccgctgaaggcggtgcaggcggtagagggtggcgaggtcactttctccgtggacctcacggtggcctcagcgggtgagtggttcctggatgggcaggccctgaaggccagcagtgtgtatgagatccactgtgatcgcacccggcacacgctcaccatccgggaggtgcccgccagcctgcacggggcgcagctgaagttcgtggccaacggcattgagagcagcatccggatggaggtccgggcggccccagggctgactgccaacaagccgccagccgcagctgcccgggaggtgctggctcggctgcacgaggaggcgcagctgctggctgagctgtcagatcaggctgcggctgtgacgtggctgaaggatggtcgcacactgtccccaggccccaagtatgaggtgcaggcatcggccgggcggcgggtgctccttgtgcgagatgtggcccgggacgatgcaggcctctacgagtgcgtcagccgcgggggccgcatcgcctaccagctctccgtgcaaggcctcgcgcgctttctgcacaaggacatggcgggcagctgtgtggatgccgtggctgggggcccggcgcagtttgagtgtgagacctccgaagcccacgtccacgtgcactggtacaaggatggcatggagctgggccactccggtgagcgcttcttgcaggaggatgtggggacgcggcaccggctggtggcagccacagtcaccaggcaggatgaaggcacctactcctgccgcgtgggcgaggactctgtggacttccggctccgcgtctctgagcccaaggtggtgtttgctaaggagcagctggcacgcaggaagctgcaggcagaggcaggagccagnnccacactgagctgcgaggtggcccaggcccagacggaggtgacgtggtacaaggatgggaagaagctgagctccagctcgaaagtgtgcatggaggccacaggctgcacgcgcaggctggttgtgcagcaggcaggccaggcggatgccggggagtatagctgcgaggctgggggccagcggctctccttccatctggatgtcaaagagcccaaggtggtgtttgccaaggaccaggtggcacacagtgaggtgcaggctgaggcaggggccantgccacgctgagctgcgaggtggcccaggcccagncggaggtgatgtggtacaaagatgggaagaagctgagctccagcttgaaagtgcatgtagaggccaanggctgcagacggaggctggtggtgcagcaggcaggcaagacngatgccggggactacagctgcgaggccaggggccagagggtctccttccgcctgcacatcacagagcccaagatgatgtttgcaaaggagcagtcagtgcataatgaggtgcaggctgaggcgggggccagtgccatgctgagctgtgaggtggcccaggcccagacggaggtgacgtggtacaaggatgggaagaagctgagctccagctcaaaagtgggcatggaggtcaaagggtgcacacggaggctggtgctgccacaggcgggcaaagcagatgctggggagtacagctgtgaggctgggggccagagagtctccttccacctgcacatcacagagcccaagggggtgtttgcgaaggagcagtcagtgcataatgaggtgcaggctgaggcggggaccactgccatgctgagctgtgaggtggcccagccccagacngaggtgacgtggtacaaggacgggaagaagctgagctccagctcaaaagtacgcatggaggtcaagggctgcacacgaaggctggtagtgcagcaggtgggcaaagcagatgctggggagtacagctgcgaggctgggggccagagagtctcctttcaactgcacatcacagagcccaaggcagtgtttgccaaggagcagttggtgcataatgaggtgcggactgaggcaggggccagtgccacactgagctgtgaggtggcccaggcccagacagaggtgacgtggtacaaggatgggaagaagctgagctccagttcgaaagtgcgcatagaggctgcgggctgcatgcggcagctggtggtgcagcaggcaggccaggcagatgctggggagtacacctgtgaggctgggggccagcggctctccttccacctggatgtttcagagcccaaggcggtgtttgcaaaggagcagctggcacacaggaaggtgcaggccgaggcgggggccattgccacgctgagctgcgaggtggcccaggcccagacagaggtgacgtggtacaaggacgggaagaagctgagctccagctcgaaagttcgaatggaggctgtgggctgcacacggaggctggtggtgcagcaggcatgccaggcggacaccggggagtatagctgcgaggccgggggccagcggctctccttcagcctggacgtggcagagcccaaggtggtgtttgccaaggagcagccagtgcacagggaggtgcaggcccaggcgggggccagcaccacactcagctgcgaggtggctcaggcccagacggaggtgatgtggtacaaggacgggaagaagctgagcttcagctcgaaagtgcgcatggaggctgtgggctgcacacggaggctggtggtgcagcaggcgggccaggcggncgccggggagtacagctgcgaggcggggagccagcggctctccttccacctgcacgtggcagagcccaaggcggtgtttgccaaggagcagccagcgagcagggaggtgcaggctgaggcggggaccagtgccacgctgagctgcgaggtggcccaggcccagacagaggtgacgtggtacaaggacgggaagaaactgagctccagctcgaaagtgcgaatggaggccgtgggctgcacacggaggctggtggtgcaggaggcaggccaggcggacgccggggagtacagctgcaaggccggggatcagcggctgtccttccacctgcacgtggcagagcccaaggtggtgtttgccaaggagcagccagcacacagggaggtgcaggctgaggcgggggccagtgccacgctgagctgcgaggtggcccaggcccagacagaggtgacgtggtacaaggatgggaagaagctgagttccagctcgaaagtgcgcgtggaggccgtgggctgcacacggaggctggtggtgcagcaggcgggccaggcggatgctggggagtacagctgtgaggcggggggccaacggctgtccttccgcctgcacgtggcagagctggagccccaaatttcagagagaccctgccgcagggagcctctggtggtcaaggagcatgaagacatcatcctgaccgccacactggccacaccctctgcggccacggtgacctggctcaaggatggtgtggagattcgccgcagcaagcggcatgagacagccagccagggggacacccacaccctgaccgtgcatggcgcccaggttctggacagcgccatctacagctgccgtgtgggcgcagaggggcaggacttcccagtgcaggtggaagaggtggccgccaagttctgccggctgctggagcctgtgtgcggcgagctgggtggcacggtgacactggcctgcgagctaagcccagcgtgtgcagaggtggtgtggcgctgcggcaacacgcagcntcgggtgggcaagcgcttccagatggtggccgaggggcccgtgcgctcactcactgtgttggggctgcgcgcagaggacgcaggggagtacgtgtgtgagagccgtgatgaccacaccagtgcgcagctcaccgtcagtgtgccccgagtggtgaagtttatgtctgggctgagcaccgtggtcgcagaggagggcggcgaggccaccttccagtgcgtggtgtcccccagtgatgtggcagtcgtgtggttccgggacggtgccctgcttcagcccagcgagaagtttgccatatcacagagtggcgccagccacagcctgaccatctcagacctggtgctggaggacgcgggccagatcaccgtggaggctgagggcgcctcatcctctgctgccctgagggtccgagaggcgcctgtgctgttcaaaaagaagctggagccgcagacggtggaggagcggagctcggtgaccctggaggtggagctgacgcggccgtggccggagctgaggtggacacggaacgcgacggccctggcgccgggaaagaacgtggagatccacgccgagggcgcccgccaccgcctggttctgcacaacgtaggttttgccgaccgtggcttctttggctgcgagacgccggatgacaagacacaggccaaactcaccgtggagatgcgccaggtacggctcgtacggggcctgcaggcagtggaggcacgggagcagggcacggctaccatggaggtgcagctgtcgcatgcggacgtggatggcagctggactcgtgacggtctgcggttccagcaggggcccacgtgccacctggctgtgcggggccccatgcacaccctcacactctcggggctgcggccagaggatagtggccttatggtcttcaaggccgaaggagtgcacacgtcggcgcggctcgtggtcaccgagcttcccgtgagcttcagccgcccgctgcaggacgtggtgaccactgagaaggagaaggttaccctggagtgcgagctgtcgcgtcctaatgtggatgtgcgctggctgaaggacggtgtggagctgcgggcaggcaagacgatggccatcgcagcccagggcgcctgcaggagcctcaccatttaccggtgcgagttcgcggatcagggagtgtatgtgtgtgatgcccatgatgcccagagctctgcctccgtgaaggtacaaggccgcaacatccagatcgtgaggcccctggaggatgtggaagtgatggagaaggacggtgccaccttctcctgtgaggtctcccacgacgaagtgcctggccagtggttctgggagggcagtaaactgcggcccactgacaacgtgcgcatccgccaggaaggaaggacatacactctcatctaccggagagtcctggcggaagatgcaggagagatccaatttgtagccgaaaatgcagaatcgcgagcccagctccgagtgaaggagctgccagtgaccctcgtgcgcccgctgcgggacaagattgccatggagaagcaccgcggtgtgctggagtgtcaggtgtcccgggccagcgcccaggtgcggtggttcaagggcagtcaggagctgcagcccgggcccaagtacgagctggtcagtgatggcctctaccgcaagctgatcatcagtgatgtccacgcagaggacgaggacacctacacctgtgacgccggtgatgtcaagaccagtgcacagttcttcgtggaagagcaatccatcaccattgtgcggggtctgcaggacgtgacagtgatggagcccgctcctgcctggtttgagtgtgagacctccatcccctcagtgcggccacctaagtggctcctggggaagacggtgttgcaggctggggggaacgtgggcctggagcaggagggcacggtgcaccggctgatgctgcggcggacctgctccaccatgaccgggcccgtgcacttcaccgttggcaagtcgcgctcctctgcccgcctggtggtctcagacatccccgtagtcctcacacggccgttggagcccaagacagggcgtgagctgcagtcagtggtcctgtcctgcgacttccggccagcccccaaggctgtgcagtggtacaaggatgacacgcccctgtctccctctgagaagtttaagatgagcctggagggtcagatggctgagctgcgcatcctccggctcatgcctgctgatgctggtgtctaccggtgccaggcgggcagtgcccacagcagcactgaggtcactgtggaagcgcgggaggtgacagtgacagggccgctacaggatgcagaggccacggaggagggctgggccagcttctcctgtgagctgtcccacgaggatgaggaggtcgagtggtcgctcaacgggatgcccctgtacaacgacagcttccatgagatctcacacaagggccggcgccacacgctggtactgaagagcatccagcgggctgatgcgggcatagtacgcgcctcctccctgaaggtgtcgacctctgcccgcctggaggtccgagtgaagccggtggtgttcctgaaggcgctggatgacctgtccgcagaggagcgcggcaccctggccctgcagtgtgaagtctctgaccccgaggcccatgtggtgtggcgcaaagatggcgtgcagctgggccccagtgacaagtatgacttcctgcacacggcgggcacgcgggggctcgtggtgcatgacgtgagccctgaagacgccggcctgtacacctgccacgtgggctccgaggagacccgggcccgggtccgcgtgcacgatctgcacgtgggcatcaccaagaggctgaagacaatggaggtgctggaaggggaaagctgcagctttgagtgcgtcctgtcccacgagagtgccagcgacccggccatgtggacagtcggtgggaagacagtgggcagctccagccgcttccaggccacacgtcagggccgaaaatacatcctggtggtccgggaggctgcaccaagtgatgccggggaggtggtcttctctgtgcggggcctcacctccaaggcctcactcattgtcagagagaggccggccgccatcatcaagcccctggaagaccagtgggtggcgccaggggaggacgtggagctgcgctgtgagctgtcacgggcgggaacgcccgtgcactggctgaaggacaggaaggccatccgcaagagccagaagtatgatgtggtctgcgagggcacgatggccatgctggtcatccgcggggcctcgctcaaggacgcgggcgagtacacgtgtgaggtggaggcttccaagagcacagccagcctccatgtggaagaaaaagcaaactgcttcacagaggagctgaccaatctgcaggtggaggagaaaggcacagctgtgttcacgtgcaagacggagcaccccgcggccacagtgacctggcgcaagggcctcttggagctacgggcctcagggaagcaccagcccagccaggagggcctgaccctgcggctcaccatcagtgccctggagaaggcagacagcgacacctatacctgcgacattggccaggcccagtcccgggcccagctcctagtgcaaggccggagagtgcacatcatcgaggacctggaggatgtggatgtgcaggagggctcctcggccaccttccgttgccggatctccccggccaactacgagcctgtgcactggttcctggacaagacacccctgcatgccaacgagctcaatgagatcgatgcccagcccgggggctaccacgtgctgaccctgcggcagctggcgctcaaggactcgggcaccatctactttgaggcgggtgaccagcgggcctcggccgccctgcgggtcactgagaagccaagcgtcttctcccgggagctcacagatgccaccatcacagagggtgaggacttgaccctggtgtgcgagaccagcacctgcgacattcctgtgtgctggaccaaggatgggaagaccctgcgggggtctgcccggtgccagctgagccatgagggccaccgggcccagctgctcatcactggggccaccctgcaggacagtggacgctacaagtgtgaggctgggggcgcctgcagcagctccattgtcagggtgcatgcgcggccagtgcggttccaggaggccctgaaggacctggaggtgctggagggtggtgctgccacactgcgctgtgtgctgtcatctgtggctgcgcccgtgaagtggtgctatggaaacaacgtcctgaggccaggtgacaaatacagcctacgccaggagggtgccatgctggagctggtggtccggaacctccggccgcaggacagcgggcggtactcatgctccttcggggaccagactacttctgccaccctcacagtgactgccctgcctgcccagttcatcgggaaactgagaaacaaggaggccacagaaggggccacggccacgctgcggtgtgagctgagcaaggcagcccctgtggagtggagaaaggggtccgagaccctcagagatggggacagatactgtctgaggcaggacggggccatgtgtgagctgcagatccgtggcctggccatggtggatgccgcggagtactcgtgtgtgtgtggagaggagaggacctcagcctcactcaccatcaggcccatgcctgcccacttcataggaagactgagacaccaagagagcatagaaggggccacagccacgctgcggtgtgagctgagcaaggcggcccccgtggagtggaggaaggggcgtgagagcctcagagatggggacagacatagcctgaggcaggacggggctgtgtgcgagctgcagatctgtggcctggctgtggcagatgctggggagtactcctgtgtgtgtggggaggagaggacctctgccactctcaccgtgaaggccctgccagccaagttcacagagggtctgaggaatgaagaggccgtggaaggggccacagccatgttgtggtgtgaactgagcaaggtggcccctgtggagtggaggaaggggcccgagaacctcagagatggggacagatacatcctgaggcaggaggggaccaggtgtgagctgcagatctgtggcctggccatggcggacgccggggagtacttgtgtgtgtgcgggcaggagaggacctcagccacgctcaccatcagggctctgcctgccaggttcatagaagatgtgaaaaaccaggaggccagagaaggggccacggctgtgctgcagtgtgagctgaacagtgcagcccctgtggagtggagaaaggggtctgagacccttagagatggggacagatacagcctgaggcaggacgggactaaatgtgagctgcagattcgtggcctggccatggcagacactggggagtactcgtgcgtgtgcgggcaggagaggacctcggctatgctcaccgtcagggctctacccatcaagttcacagagggtctgaggaacgaagaggccacagaaggggcaacagccgtgctgcggtgtgagctgagcaagatggcccccgtggagtggtggaaggggcatgagaccctcagagatggagacagacacagcctgaggcaggacggggccaggtgtgagctgcagatccgcggcctcgtggcagaggacgctggggagtacctgtgcatgtgcgggaaggagaggacctcagccatgctcaccgtcagggccatgccttccaagttcatagagggtctgaggaatgaagaggccacagaaggggacacggccacgctgtggtgtgagctgagcaaggcggcaccggtggagtggaggaaggggcatgagaccctcagagatggggacagacacagcctgaggcaggacgggtccaggtgtgagctgcagatccgtggcctggctgtggtggatgccggggagtactcgtgtgtgtgcgggcaggagaggacctcagccacactcactgtcagggccctgcctgccagattcatagaagatgtgaaaaaccaggaggccagagaaggggccacggccgtgctgcaatgtgagctgagcaaggcggcccccgtggagtggaggaaggggtctgagaccctcagaggtggggacagatacagcctgaggcaggatgggaccagatgtgagctgcagattcatggcctgtctgtggcagacactggggagtactcgtgtgtgtgcgggcaggagaggacctcggccacactcaccgtcagggccctgcctgcacgattcactcaagatctgaagaccaaggaggcctcagaaggggccacagctacactgcagtgtgagctgagcaaggtggcccctgtggaatggaagaagggtcctgagaccctcagagatgggggcagatacagcctgaagcaggatgggacgaggtgtgagctgcagatccatgacctgtctgtggcggatgctggggaatactcatgcatgtgtggacaagagaggacctcggccacgctcactgtcagggccctgcctgccaggttcacagagggtctgaggaatgaagaggccatggaaggggccacagccacactgcaatgtgagctgagcaaggcagcccctgtggagtggaggaaaggccttgaggctctcagagatggggacaaatacagcctgagacaagacggggctgtgtgtgagctgcagattcatggcctggctatggcagataacggggtgtactcatgtgtgtgtgggcaggagaggacctcagctacactcactgtcagggccctgcctgccagattcatagaggatatgagaaaccagaaggccacagaaggggctacagtcacattgcaatgtaagctgagaaaggcggcccccgtggagtggagaaaggggcccaacaccctcaaagatggggacaggtacagcctgaagcaggatgggaccagttgtgagctgcagattcgtggcctggtcatagcagatgctggagaatactcgtgcatatgtgagcaggagaggacctcggccacgctcactgtcagggccctgccggccagattcatagaagatgtgagaaatcacgaggccacagaaggggccacagctgtgctgcagtgtgagctgagcaaggcggcccccgtggagtggcggaaggggtctgagaccctcagagatggggacagatatagcctgaggcaggacgggacgaggtgtgagctgcagattcgtggcctggctgtggaggacactggagagtatttgtgtgtgtgcgggcaggagagaacctcagctacactcactgtcagggccctgccagccagattcatagacaacatgacaaaccaggaagccagagaaggggccacggccacactgcactgtgaactgagcaaggtggcccctgtggagtggaggaagggacctgaaaccctccgagatggggacagacacagcctgaggcaggagaatngcttgaacccnggaggcngnggttgnagtgagcnangatcntgccantgcantccagcctggnnannanagcnagctctntccnntngnnnng

SEQ ID NO: 737093 - DNA, 1302 bp, Homo sapiens
ggtccgaatttcgggaatcgtcgacccacgcgtccgtaatctatctctaccttaccagtggataatagtctactgtccaattctgtttactctgaattaccatcagctgaagggaaaatgaaggtaactgttacacaaataacagtggcactgagcagcttaaaaaatatttttactcctcttctttttcgaggacttctgtcttttctgacctggtggattgctgcttgcctcttttctacaagcctttttgggcttttctatcaccagtatctgactgtggcatgaatctcagttaacaaaaaagcatatccaaatcaccctttaaattaaaatatctgtgcccttaaagggctgatgaaaaccagaagaaagcaaatacaatgggaaaaaaaaaacatatcagaatgtcttgtattaaatgtttcctctgtattctcagggtgaattaatgtagtaatatttaaaattacaaaatagattgttaactgttacactgtggcattggaattttaactctttgtatttactggtatgagagggctatctacaagggtaatatttctgattaccctggtttacagaaacctccagcagtctttgaaacatctcacatgactctagttattgattgcttttaatggttttatggtactgttgatagtcatagtggctgcctatagaacaatcttcaaactgagccatgctttaggggagggaaaggggctaaagtctcttctgttggtaatttattagttactcttgaaacagtaaaatccaacagaaaggaagagatagctactgtatattacagtaaagaaagctgcatagttattttaaatttaatggagatgaatatggttaaaatatataactactgctgcttgagaatagcaagagtattgttttaaaacatattccacccaacttgagagttcttttaaaatgattggccatatgaacatttgtaatcttgccattaggtttggacctgccatattttgttttattctgtgatcctaactagttccttttaataggctaaaatatttatcaatactgatcagactttaaagaaattactttgtaaacctgctgactacctgtatgtattgtatatatattatatattaaatatataatatattgagattataaaagatgaaaatattgaatccttataatattttaagttgcagaatgtatgttaaaaagtgacttgaatgagatgtatttgtatctagaaattttatttctttttggaatgagattaaaatacattttgaaagttcaaaaaaaaaa

SEQ ID NO: 737094 - DNA, 1545 bp, Homo sapiens
tagtgcagttaattaaaaatatatcagactttttgctttaatgtgtacctttactgatgaggccagatagtctctagtcaggttaattttttacagatctagaaggattattattttactttatttttaacataaaatgatgtactgtgccactaaacatattgttaatttcaaatataggaagatttttttttaataaaaagcttggtaattagttactcttcaaattgtatttgtgtctttgattttctaggtaatcattcctggggtatttatccagaatctatctctaccttaccagtggataatagtctactgtccaattctgtttactctgaattaccatcagctgaagggaaaatgaaggtaactgttacacaaataacagtggcactgagcagcttaaaaaatatttttactcctcttctttttcgaggacttctgtcttttctgacctggtggattgctgcttgcctcttttctacaagcctttttgggcttttctatcaccagtatctgactgtggcatgaatctcagttaacaaaaaagcatatccaaatcaccctttaaattaaaatatctgtgcccttaaagggctgatgaaaaccagaagaaagcaaatacaatgggaaaaaaaaaacatatcagaatgtcttgtattaaatgtttcctctgtattctcagggtgaattaatgtagtaatatttaaaattacaaaatagattgttaactgttacactgtggcattggaattttaactctttgtatttactggtatgagagggctatctacaagggtaatatttctgattaccctggtttacagaaacctccagcagtctttgaaacatctcacatgactctagttattgattgcttttaatggttttatggtactgttgatagtcatagtggctgcctatagaacaatcttcaaactgagccatgctttaggggagggaaaggggctaaagtctcttctgttggtaatttattagttactcttgaaacagtaaaatccaacagaaaggaagagatagctactgtatattacagtaaagaaagctgcatagttattttaaatttaatggagatgaatatggttaaaatatataactactgctgcttgagaatagcaagagtattgttttaaaacatattccacccaacttgagagttcttttaaaatgattggccatatgaacatttgtaatcttgccattaggtttggacctgccatattttgttttattctgtgatcctaactagttccttttaataggctaaaatatttatcaatactgatcagactttaaagaaattactttgtaaacctgctgactacctgtatgtattgtatatatattatatattaaatatataatatattgagattataaaagatgaaaatattgaatccttataatattttaagttgcagaatgtatgttaaaaagtgacttgaatgagatgtatttgtatctagaaattttatttctttttggaatgagattaaaatacattttgaaagttcaaaaaaaaaa

SEQ ID NO: 737095 - DNA, 2075 bp, Homo sapiens
tattattgttattttattttttgtagagacagggtctctctgtgtagcccaggcttgtcttgaactcctgggctcaagtaatcctcctgcatcacctcccaaagtattgggattacaggcgtgagtcaccacgcccaaccagcttcagtttttgattcacctccatagttaggggcatttattaagatttaaacaacttttttctgttttaccttttatatatttttatattttccatagtttgacttcaaatatgttcatgtagaatggggacttaatgtttttatttatgagggatttatgctcatatgtggctctgcctactattgttatttagttggatattttaggtagatgcccttacattgtgttttatctttgaaatataagtaaatatataccatttgaatcttagtcattattttctccaatatatatacatcatttaagaattatttttaaggaatctattttaatattctcacgttctaaaaacttgtcttcaaattgagcctttccaaagtcattttggggacatgtatcatgcagcacaacttactgacatttagcttccttcttgtgaaaggattatctcttaagtattttggtatggcaattatatgaaagtttaattcactcctaacatgtcagttgcattagacacttaagaatgttgttggttgcaggtggctcgagtcttttattatctttgtgtcattgcactgcagtatgtggcgcctctggtaatgctgcttcacacaactctgcttttgaaaacactaggtaatcattcctggggtatttatccagaatctatctctaccttaccagtggataatagtctactgtccaattctgtttactctgaattaccatcagctgaagggaaaatgaaggtaactgttacacaaataacagtggcactgagcagcttaaaaaatatttttactcctcttctttttcgaggacttctgtcttttctgacctggtggattgctgcttgcctcttttctacaagcctttttgggcttttctatcaccagtatctgactgtggcatgaatctcagttaacaaaaaagcatatccaaatcaccctttaaattaaaatatctgtgcccttaaagggctgatgaaaaccagaagaaagcaaatacaatgggaaaaaaaaaacatatcagaatgtcttgtattaaatgtttcctctgtattctcagggtgaattaatgtagtaatatttaaaattacaaaatagattgttaactgttacactgtggcattggaattttaactctttgtatttactggtatgagagggctatctacaagggtaatatttctgattaccctggtttacagaaacctccagcagtctttgaaacatctcacatgactctagttattgattgcttttaatggttttatggtactgttgatagtcatagtggctgcctatagaacaatcttcaaactgagccatgctttaggggagggaaaggggctaaagtctcttctgttggtaatttattagttactcttgaaacagtaaaatccaacagaaaggaagagatagctactgtatattacagtaaagaaagctgcatagttattttaaatttaatggagatgaatatggttaaaatatataactactgctgcttgagaatagcaagagtattgttttaaaacatattccacccaacttgagagttcttttaaaatgattggccatatgaacatttgtaatcttgccattaggtttggacctgccatattttgttttattctgtgatcctaactagttccttttaataggctaaaatatttatcaatactgatcagactttaaagaaattactttgtaaacctgctgactacctgtatgtattgtatatatattatatattaaatatataatatattgagattataaaagatgaaaatattgaatccttataatattttaagttgcagaatgtatgttaaaaagtgacttgaatgagatgtatttgtatctagaaattttatttctttttggaatgagattaaaatacattttgaaagttcaaaaaaaaaa

SEQ ID NO: 737096 - DNA, 998 bp, Homo sapiens
cagtggtcccaagtaaaagctcagcagattgaaagatcccatccaagtaggtatatgatcaggcaaagctgtaaccagtgatgctgggtgattgacttgattagtcccacaggcaatccctgcagttttctttctttccccaacttgtcttttcatgtcacagccagtttttatccatggaggagggtatatagagaaaaggatctcatgtattgctctacttttttcttctagatacctgttaacttcttacgctttcatgatacatttatctagttctgttattcaagttaaagtattatacagttaagtctatggcagagtcagattcttttatgtgtctaactgttgcgaagtatagacttcttatatcttatatggtgaccattaacatataacgagcatgctagcatattgttgtctttgagagcaccgtatcaactttttgatctgtagaatgacagaagccacattcgatactctgcgactctggttaataatcctgctgtgtgctttgcggttggccatgatgcgtagtcacctgcaagcttatttaaatttagcccaaaaatgtgtggatcagatgaagaaagaagcggggcgaataagcacggttgagctacagaaaatggtaagttttataccctagtcaaaatgaaaaatagcaaaaaccgcactgtaaaaaaaaaaaaaaattggtttcctttagtagatagtatttcaacccatcatattcttattataaataaacagaacaatcttaagttgacagatatcaaagagaccttgatctgattttggtgccaagtgaggtcttaattcctcttcctgccttaagtgcttggtgtcatacagtgggtggtacaaagctgttttatgcctaatattgctaaatgggacccttctaattgatttgaaagacattataacatattgtccagactttaagacttaaagagtaggaaatactacttttagtggctaaatttattcatttt

SEQ ID NO: 737097 - DNA, 428 bp, Homo sapiens
aacagttatctaatactaataccttaatattattatctaatactagtttatatttctacagttaggcaactgtattttagcagaagatgatggtgaggaaacaaacagtttattaataggcattaataactagacttgatctgttaaccttgtagaactgttagagtaatagaaagtttcagacagaattggttcaaactccagctctcctcctcactaaaatcttcatttgaggcagattatttaacttcactgagcctctgtttccccatctggaagatgaagataatagtatctaactcacaaggttatcattggaataaatgaaagaacacatgtaatgcaaccagctggaattaagtgcttaataaatgttcttttcactgctttgcctcatcagaattaaaatagaaatacttgactagtca

SEQ ID NO: 737098 - DNA, 1034 bp, Homo sapiens
ttccggcagagccggaagaccctctctttcgctgtttgagagtctctcggctcaaggaccgggaggtaagaggtttgggactgccccggcaactccagggtgtctggtccacgacctatcctaggcgccatgggtgtgataggtatacagctggttgttaccatggtgatggccagtgtcatgcagaagattatacctcactattctcttgctcgatggctactctgtaatggcagtttgaggtggtatcaacatcctacagaagaagaattaagaattcttgcagggaaacaacaaaaagggaaaaccaaaaaagataggaaatataatggtcacattgaaagtaagccattaaccattccaaaggatattgaccttcatctagaaacaaagtcagttacagaagtggatactttagcattgcattactttccagaataccagtggctggtggatttcacagtggctgctacagttgtgtatctagtaactgaagtctactacaattttatgaagcctacacaggaaatgaatatcagcttagtctggtgcctacttgttttgtcttttgcaatgtatccttcaaaacatcattaatattaatttattttgcagataacaccattagatctcatctctgatttgagaaagattttatgtcattagataacttttctttattgaaatcttttttatgtaattgaaaatatttttcaaagtaatagaggtaaataatttaaaaagctaaatataagaaaaatgccagtgccctgctttttcttatccaagtctaatgtcacagagacagccacattcacctcttttaggcatttcttttgggaattccttccttgtgtttaaatattttgtgataatgttactatttatatattattgcacctttctccctcttcccttttcttcccttctttcattctcccaaaatagttagagataacattttattaaatttatagtcacttttaccatgttgtgcctatgaaaatattatttacagccaggcattatagtgt

SEQ ID NO: 737099 - DNA, 2505 bp, Homo sapiens
ttccggcagagccggaagaccctctctttcgctgtttgagagtctctcggctcaaggaccgggaggtaagaggtttgggactgccccggcaactccagggtgtctggtccacgacctatcctaggcgccatgggtgtgataggtatacagctggttgttaccatggtgatggccagtgtcatgcagaagattatacctcactattctcttgctcgatggctactctgtaatggcagtttgaggtggtatcaacatcctacagaagaagaattaagaattcttgcagggaaacaacaaaaagggaaaaccaaaaaagataggaaatataatggtcacattgaaagtaagccattaaccattccaaaggatattgaccttcatctagaaacaaagtcagttacagaagtggatactttagcattgcattactttccagaataccagtggctggtggatttcacagtggctgctacagttgtgtatctagtaactgaagtctactacaattttatgaagcctacacaggaaatgaatatcagcttagtctggtgcctacttgttttgtcttttgcaatcaaagttctattttcattaactacacactattttaaagtagaagatggtggtgaaagatctgtttgtgtcacctttggattttttttctttgtcaaagcaatggcagtgttgattgtaacagaaaattatctggaatttggacttgaaacagggtttacaaatttttcagacagtgcgatgcagtttcttgaaaagcaaggtttagaatctcagagtcctgtttcaaaacttactttcaaatttttcctggctattttctgttcattcattggggcttttttgacatttcctggattacgactggctcaaatgcatctggatgccctgaatttggcaacagaaaaaattacacaaactttacttcatatcaacttcttggcacctttatttatggttctgctctgggtaaaaccaatcaccaaagactacattatgaacccaccactgggcaaagaaagtatcaatgacagaagccacattcgatactctgcgactctggttaataatcctgctgtgtgctttgcggttggccatgatgcgtagtcacctgcaagcttatttaaatttagcccaaaaatgtgtggatcagatgaagaaagaagcggggcgaataagcacggttgagctacagaaaatggtaatcattcctggggtatttatccagaatctatctctaccttaccagtggataatagtctactgtccaattctgtttactctgaattaccatcagctgaagggaaaatgaaggtaactgttacacaaataacagtggcactgagcagcttaaaaaatatttttactcctcttctttttcgaggacttctgtcttttctgacctggtggattgctgcttgcctcttttctacaagcctttttgggcttttctatcaccagtatctgactgtggcatgaatctcagttaacaaaaaagcatatccaaatcaccctttaaattaaaatatctgtgcccttaaagggctgatgaaaaccagaagaaagcaaatacaatgggaaaaaaaaaacatatcagaatgtcttgtattaaatgtttcctctgtattctcagggtgaattaatgtagtaatatttaaaattacaaaatagattgttaactgttacactgtggcattggaattttaactctttgtatttactggtatgagagggctatctacaagggtaatatttctgattaccctggtttacagaaacctccagcagtctttgaaacatctcacatgactctagttattgattgcttttaatggttttatggtactgttgatagtcatagtggctgcctatagaacaatcttcaaactgagccatgctttaggggagggaaaggggctaaagtctcttctgttggtaatttattagttactcttgaaacagtaaaatccaacagaaaggaagagatagctactgtatattacagtaaagaaagctgcatagttattttaaatttaatggagatgaatatggttaaaatatataactactgctgcttgagaatagcaagagtattgttttaaaacatattccacccaacttgagagttcttttaaaatgattggccatatgaacatttgtaatcttgccattaggtttggacctgccatattttgttttattctgtgatcctaactagttccttttaataggctaaaatatttatcaatactgatcagactttaaagaaattactttgtaaacctgctgactacctgtatgtattgtatatatattatatattaaatatataatatattgagattataaaagatgaaaatattgaatccttataatattttaagttgcagaatgtatgttaaaaagtgacttgaatgagatgtatttgtatctagaaattttatttctttttggaatgagattaaaatacattttgaaagttcaaaaaaaaaa

SEQ ID NO: 737100 - DNA, 2602 bp, Homo sapiens
ttccggcagagccggaagaccctctctttcgctgtttgagagtctctcggctcaaggaccgggaggtaagaggtttgggactgccccggcaactccagggtgtctggtccacgacctatcctaggcgccatgggtgtgataggtatacagctggttgttaccatggtgatggccagtgtcatgcagaagattatacctcactattctcttgctcgatggctactctgtaatggcagtttgaggtggtatcaacatcctacagaagaagaattaagaattcttgcagggaaacaacaaaaagggaaaaccaaaaaagataggaaatataatggtcacattgaaagtaagccattaaccattccaaaggatattgaccttcatctagaaacaaagtcagttacagaagtggatactttagcattgcattactttccagaataccagtggctggtggatttcacagtggctgctacagttgtgtatctagtaactgaagtctactacaattttatgaagcctacacaggaaatgaatatcagcttagtctggtgcctacttgttttgtcttttgcaatcaaagttctattttcattaactacacactattttaaagtagaagatggtggtgaaagatctgtttgtgtcacctttggattttttttctttgtcaaagcaatggcagtgttgattgtaacagaaaattatctggaatttggacttgaaacagggtttacaaatttttcagacagtgcgatgcagtttcttgaaaagcaaggtttagaatctcagagtcctgtttcaaaacttactttcaaatttttcctggctattttctgttcattcattggggcttttttgacatttcctggattacgactggctcaaatgcatctggatgccctgaatttggcaacagaaaaaattacacaaactttacttcatatcaacttcttggcacctttatttatggttctgctctgggtaaaaccaatcaccaaagactacattatgaacccaccactgggcaaagaaagtatcaatgacagaagccacattcgatactctgcgactctggttaataatcctgctgtgtgctttgcggttggccatgatgcgtagtcacctgcaagcttatttaaatttagcccaaaaatgtgtggatcagatgaagaaagaagcggggcgaataagcacggttgagctacagaaaatggtggctcgagtcttttattatctttgtgtcattgcactgcagtatgtggcgcctctggtaatgctgcttcacacaactctgcttttgaaaacactaggtaatcattcctggggtatttatccagaatctatctctaccttaccagtggataatagtctactgtccaattctgtttactctgaattaccatcagctgaagggaaaatgaaggtaactgttacacaaataacagtggcactgagcagcttaaaaaatatttttactcctcttctttttcgaggacttctgtcttttctgacctggtggattgctgcttgcctcttttctacaagcctttttgggcttttctatcaccagtatctgactgtggcatgaatctcagttaacaaaaaagcatatccaaatcaccctttaaattaaaatatctgtgcccttaaagggctgatgaaaaccagaagaaagcaaatacaatgggaaaaaaaaaacatatcagaatgtcttgtattaaatgtttcctctgtattctcagggtgaattaatgtagtaatatttaaaattacaaaatagattgttaactgttacactgtggcattggaattttaactctttgtatttactggtatgagagggctatctacaagggtaatatttctgattaccctggtttacagaaacctccagcagtctttgaaacatctcacatgactctagttattgattgcttttaatggttttatggtactgttgatagtcatagtggctgcctatagaacaatcttcaaactgagccatgctttaggggagggaaaggggctaaagtctcttctgttggtaatttattagttactcttgaaacagtaaaatccaacagaaaggaagagatagctactgtatattacagtaaagaaagctgcatagttattttaaatttaatggagatgaatatggttaaaatatataactactgctgcttgagaatagcaagagtattgttttaaaacatattccacccaacttgagagttcttttaaaatgattggccatatgaacatttgtaatcttgccattaggtttggacctgccatattttgttttattctgtgatcctaactagttccttttaataggctaaaatatttatcaatactgatcagactttaaagaaattactttgtaaacctgctgactacctgtatgtattgtatatatattatatattaaatatataatatattgagattataaaagatgaaaatattgaatccttataatattttaagttgcagaatgtatgttaaaaagtgacttgaatgagatgtatttgtatctagaaattttatttctttttggaatgagattaaaatacattttgaaagttcaaaaaaaaaa

SEQ ID NO: 737101 - DNA, 1203 bp, Homo sapiens
ttccggcagagccggaagaccctctctttcgctgtttgagagtctctcggctcaaggaccgggaggtaagaggtttgggactgccccggcaactccagggtgtctggtccacgacctatcctaggcgccatgggtgtgataggtatacagctggttgttaccatggtgatggccagtgtcatgcagaagattatacctcactattctcttgctcgatggctactctgtaatggcagtttgaggtggtatcaacatcctacagaagaagaattaagaattcttgcagggaaacaacaaaaagggaaaaccaaaaaagataggaaatataatggtcacattgaaagtaagccattaaccattccaaaggatattgaccttcatctagaaacaaagtcagttacagaagtggatactttagcattgcattactttccagaataccagtggctggtggatttcacagtggctgctacagttgtgtatctagtaactgaagtctactacaattttatgaagcctacacaggaaatgaatatcagcttagtctggtgcctacttgttttgtcttttgcaatcaaagttctattttcattaactacacactattttaaagtagaagatggtggtgaaagatctgtttgtgtcacctttggattttttttctttgtcaaagcaatggcagtgttgattgtaacagaaaattatctggaatttggacttgaaacagggtttacaaatttttcagacagtgcgatgcagtttcttgaaaagcaaggtttagaatctcagagtcctgtttcaaaacttactttcaaatttttcctggctattttctgttcattcattggggcttttttgacatttcctggattacgactggctcaaatgcatctggatgccctgaatttggcaacagaaaaaattacacaaactttacttcatatcaacttcttggcacctttatttatggttctgctctgggtaaaaccaatcaccaaagactacattatgaacccaccactgggcaaagaaagtatctttccccatctggaagatgaagataatagtatctaactcacaaggttatcattggaataaatgaaagaacacatgtaatgcaaccagctggaattaagtgcttaataaatgttcttttcactgctttgcctcatcagaattaaaatagaaatacttgactagtca

SEQ ID NO: 737102 - DNA, 2467 bp, Homo sapiens
ttccggcagagccggaagaccctctctttcgctgtttgagagtctctcggctcaaggaccgggaggtaagaggtttgggactgccccggcaactccagggtgtctggtccacgacctatcctaggcgccatgggtgtgataggtatacagctggttgttaccatggtgatggccagtgtcatgcagaagattatacctcactattctcttgctcgatggctactctgtaatggcagtttgaggtggtatcaacatcctacagaagaagaattaagaattcttgcagggaaacaacaaaaagggaaaaccaaaaaagataggaaatataatggtcacattgaaagtaagccattaaccattccaaaggatattgaccttcatctagaaacaaagtcagttacagaagtggatactttagcattgcattactttccagaataccagtggctggtggatttcacagtggctgctacagttgtgtatctagtaactgaagtctactacaattttatgaagcctacacaggaaatgaatatcagcttagtctggtgcctacttgttttgtcttttgcaattagaagatggtggtgaaagatctgtttgtgtcacctttggattttttttctttgtcaaagcaatggcagtgttgattgtaacagaaaattatctggaatttggacttgaaacagggtttacaaatttttcagacagtgcgatgcagtttcttgaaaagcaaggtttagaatctcagagtcctgtttcaaaacttactttcaaatttttcctggctattttctgttcattcattggggcttttttgacatttcctggattacgactggctcaaatgcatctggatgccctgaatttggcaacagaaaaaattacacaaactttacttcatatcaacttcttggcacctttatttatggttctgctctgggtaaaaccaatcaccaaagactacattatgaacccaccactgggcaaagaaagtatcaatgacagaagccacattcgatactctgcgactctggttaataatcctgctgtgtgctttgcggttggccatgatgcgtagtcacctgcaagcttatttaaatttagcccaaaaatgtgtggatcagatgaagaaagaagcggggcgaataagcacggttgagctacagaaaatggtaatcattcctggggtatttatccagaatctatctctaccttaccagtggataatagtctactgtccaattctgtttactctgaattaccatcagctgaagggaaaatgaaggtaactgttacacaaataacagtggcactgagcagcttaaaaaatatttttactcctcttctttttcgaggacttctgtcttttctgacctggtggattgctgcttgcctcttttctacaagcctttttgggcttttctatcaccagtatctgactgtggcatgaatctcagttaacaaaaaagcatatccaaatcaccctttaaattaaaatatctgtgcccttaaagggctgatgaaaaccagaagaaagcaaatacaatgggaaaaaaaaaacatatcagaatgtcttgtattaaatgtttcctctgtattctcagggtgaattaatgtagtaatatttaaaattacaaaatagattgttaactgttacactgtggcattggaattttaactctttgtatttactggtatgagagggctatctacaagggtaatatttctgattaccctggtttacagaaacctccagcagtctttgaaacatctcacatgactctagttattgattgcttttaatggttttatggtactgttgatagtcatagtggctgcctatagaacaatcttcaaactgagccatgctttaggggagggaaaggggctaaagtctcttctgttggtaatttattagttactcttgaaacagtaaaatccaacagaaaggaagagatagctactgtatattacagtaaagaaagctgcatagttattttaaatttaatggagatgaatatggttaaaatatataactactgctgcttgagaatagcaagagtattgttttaaaacatattccacccaacttgagagttcttttaaaatgattggccatatgaacatttgtaatcttgccattaggtttggacctgccatattttgttttattctgtgatcctaactagttccttttaataggctaaaatatttatcaatactgatcagactttaaagaaattactttgtaaacctgctgactacctgtatgtattgtatatatattatatattaaatatataatatattgagattataaaagatgaaaatattgaatccttataatattttaagttgcagaatgtatgttaaaaagtgacttgaatgagatgtatttgtatctagaaattttatttctttttggaatgagattaaaatacattttgaaagttcaaaaaaaaaa

SEQ ID NO: 737103 - DNA, 2401 bp, Homo sapiens
ttccggcagagccggaagaccctctctttcgctgtttgagagtctctcggctcaaggaccgggaggtaagaggtttgggactgccccggcaactccagggtgtctggtccacgacctatcctaggcgccatgtttgaggtggtatcaacatcctacagaagaagaattaagaattcttgcagggaaacaacaaaaagggaaaaccaaaaaagataggaaatataatggtcacattgaaagtaagccattaaccattccaaaggatattgaccttcatctagaaacaaagtcagttacagaagtggatactttagcattgcattactttccagaataccagtggctggtggatttcacagtggctgctacagttgtgtatctagtaactgaagtctactacaattttatgaagcctacacaggaaatgaatatcagcttagtctggtgcctacttgttttgtcttttgcaatcaaagttctattttcattaactacacactattttaaagtagaagatggtggtgaaagatctgtttgtgtcacctttggattttttttctttgtcaaagcaatggcagtgttgattgtaacagaaaattatctggaatttggacttgaaacagggtttacaaatttttcagacagtgcgatgcagtttcttgaaaagcaaggtttagaatctcagagtcctgtttcaaaacttactttcaaatttttcctggctattttctgttcattcattggggcttttttgacatttcctggattacgactggctcaaatgcatctggatgccctgaatttggcaacagaaaaaattacacaaactttacttcatatcaacttcttggcacctttatttatggttctgctctgggtaaaaccaatcaccaaagactacattatgaacccaccactgggcaaagaaagtatcaatgacagaagccacattcgatactctgcgactctggttaataatcctgctgtgtgctttgcggttggccatgatgcgtagtcacctgcaagcttatttaaatttagcccaaaaatgtgtggatcagatgaagaaagaagcggggcgaataagcacggttgagctacagaaaatggtaatcattcctggggtatttatccagaatctatctctaccttaccagtggataatagtctactgtccaattctgtttactctgaattaccatcagctgaagggaaaatgaaggtaactgttacacaaataacagtggcactgagcagcttaaaaaatatttttactcctcttctttttcgaggacttctgtcttttctgacctggtggattgctgcttgcctcttttctacaagcctttttgggcttttctatcaccagtatctgactgtggcatgaatctcagttaacaaaaaagcatatccaaatcaccctttaaattaaaatatctgtgcccttaaagggctgatgaaaaccagaagaaagcaaatacaatgggaaaaaaaaaacatatcagaatgtcttgtattaaatgtttcctctgtattctcagggtgaattaatgtagtaatatttaaaattacaaaatagattgttaactgttacactgtggcattggaattttaactctttgtatttactggtatgagagggctatctacaagggtaatatttctgattaccctggtttacagaaacctccagcagtctttgaaacatctcacatgactctagttattgattgcttttaatggttttatggtactgttgatagtcatagtggctgcctatagaacaatcttcaaactgagccatgctttaggggagggaaaggggctaaagtctcttctgttggtaatttattagttactcttgaaacagtaaaatccaacagaaaggaagagatagctactgtatattacagtaaagaaagctgcatagttattttaaatttaatggagatgaatatggttaaaatatataactactgctgcttgagaatagcaagagtattgttttaaaacatattccacccaacttgagagttcttttaaaatgattggccatatgaacatttgtaatcttgccattaggtttggacctgccatattttgttttattctgtgatcctaactagttccttttaataggctaaaatatttatcaatactgatcagactttaaagaaattactttgtaaacctgctgactacctgtatgtattgtatatatattatatattaaatatataatatattgagattataaaagatgaaaatattgaatccttataatattttaagttgcagaatgtatgttaaaaagtgacttgaatgagatgtatttgtatctagaaattttatttctttttggaatgagattaaaatacattttgaaagttcaaaaaaaaaa

SEQ ID NO: 737104 - DNA, 844 bp, Homo sapiens
tgtgacattatgtaattgtgtacttgagaataacgtgcaaaaatacaataatgtcacacatccctatatattttctttttatgtattttactttctttacaaagaaattaattcttttttttctttttaataaaaactgttactcattaactttgcttataatgctttttatagcccagcacagaatttaaagccataccaccaaaagtacctgtgtgtgttaatatgtttttcttgtagcatagattgactatttgcaatagtattagtatttaccatttttccaaattagcaactaccagacctcacgtgttgcagtgataacacaatgcattggattcagttttgtgaaaatggattctgtggccatccaagggatgtatcagggatgatcagctgatgagaggctccagaaggatttctagatcgcttcaagcctatactgatggccttagctttgttcagtcattgtaactgggattgttgtcattgctaccgtggtagtcaccttcatgtcatctataatagtactcctggagagccctggctgcctacaccagtggaaaagagtctccagttctgctctggcctactaactgttaccactgagagaacaacatgttcatttgacatgattgaagctggcatccgtatatgaagatccttgtcaagctttcttctgtggtctgattagtgtgataccggggcctcctcgataccttaagtgttgtcacaatgttactttcggatgtgtaagctacaaaataaaatcttgctagaaaaaaaaaaggggggtctaaaatccaggcaaatccaccccttttaagggcccaaaagggtaaac

SEQ ID NO: 737105 - DNA, 3069 bp, Homo sapiens; identical to SEQ ID NO: 96912

SEQ ID NO: 737106 - DNA, 3737 bp, Homo sapiens
gaaatttgcatatccactccagttctgtcaccaaagattttaatcttcagatcgcaatttcctctctcccagaaaaaagtactacaacaggctcaagggatatgctttggtggtcaagggattacactatggttttccttctgttcacaatggtatttacaggagaccttgtcatcagaggacgtactgaactatctttatgactttggatttgatcagaggtttaaaaaatagaaaaaaataaacaaccactacttgacactgtaaatgatctttaatagagtcatgacctggagactgatggagagaaagaaacttccatggaagagagtgagctaaatcatttagaaccaaacaaaggtcactggtgaaacatagggcagcatgtacacagtgcagatcagggttctgtatggccagagccaacagcagtgaccggtgggagagtcagacaactggccaatgaattcaagtgttgaaaaagccacagtctggattttgttgtgatttctggagtggttgaaacgcccatgcccatggcaaggaaaatgcttggaggctgatctgttgtgatagtgcctttcttgtcgtagtgagtactagattaataatttattcagttacgcttttctgtaccattgcctccagtcttctgaggaggtttgaagggacagtatccacttaggatgaagggacaggatattgctctggaatgctgtgatttgatgatatttgcactagattctaaactctcctttaaactggagcaactgactgagagaaaaaccaaggacagctcaaagttaaaagaaaccaaaagcagtattttctgacagataccatttctttttctccttctttttttcctggaagaaaacttcacactagttggctaccgagctcaactcttaccagttctttctctttattttttgtttccatatggaaccatctgtgtgaattagtcatcagttaggtatagttaacgtaaagagcccctgccattgaaactttgcacaccttctctgctttattgaaggcaagggccagtgggcagtgatagcaggggagggaccctccagaaccacccagccctccaggaggccaataagcatggatatcatgtcaggagctgagctgacatatatttactcagaggacattggggtctgtagctaatcctaaagaatgctccgcaacagaaggaaaccaatgcattgtagaaaacaaagggagatggtgcccgaagtctgcctgtttctcttctcttttctttcccatctcaccaccatgtcctctctaacagaattatatttcatctcatatattatatgttactagaaaagtcatttggttccttggtttctctctttatcagtgggctggaaattcctccaaattaaatataactaccagtagcagctcccctgtgtccagccagtttctcaaatgctgtccacctggtcttactgtccacctaacataacttggaggctttggctggctcaaccacctgttcactttattttgttttcatttccatttgaacttgaagtgaggctatggaaaggtggaaatcatgggcaaggtttggaggctgcaattctagggcatagcttgtcaggagtttatattatctaaaatatatctttctataccccttttcattttaatctgttgccctgattataatttctttatatttgtggttatttttataagaatagagtccatttgctatgtctatttgagtactttttttctattgtccccacatggatgcagtaccaacctgttaatgaaatatctttttattatattattaatatgtaattctactgtagaccaaaaatataaaaacaaatttgttcattttaaagatataaagaactagggagtaaaagattaaaagttgaaggaaaagacagaagagcagtggttaactatgttgagttagaaatctaagagtagccttacctgttttttaaccagtgcttgccaatcataccatagttggaattatgtaatcttggctccttcatacttatgttctataattcttgtttgtctatttgttttctttgatgtaattgaggttgcacatcatgctattcttggcaatgcctgattctattgtattgtacttttgttagtcatttcctttagaaagatggggggaaacgtttatttcttcttttaatttaaaatttgtttaatgcactggaaataaaattggacatatttcactgtttaaaaaatcagaaacaaaacaaagcaaaaccatgagggaaaaaaacagcaaataagcaacaggggaaaacagctatgaaaaaaatatatttgtactgaatacacatacaaactacatcccacatgaaagattaatatcatcaagtaagaaaaatacatagtttaaactacaatgctgaaaatataaaaggaacctggtagttcaatggggatggagaaaacagagcattcctctgagagcagagatcttgtcattattgcaattaatgcccaaacaggttaaatgtggaagaaagtatggaggaaataaccccagccttcctcataccactggatttccacatcaccttttaacttatgcttgagctcccttttgagaaaaaatatttaaaaacaaattggctatgtaacaaatttgtgtgtgtgtgtgtatatatatatgtatatgcttatatatatatatatgtatatgcttgagaaagtggtttttcaagatgtatgtgtacagtacacacatggacacgcttcagtcctctgacttcccatgtgctacctcatgtgtttctcttctcatgaggatttgcaatggatagttgtacaacctggggactgtcagtgactcattggtatcagcatatgctaaagaagctcttgaatccaatcttgaaacctgatctcccttcgtcaacattccccaataccaaactggcccgtttacccatacaaatgcacagtaaagggaagaacagcggtatttttcctagccaactgactctatcatttgtttaatgtttgctggtttttttctggttttgttttgttttagagcaggggtgggagtggctgtaacttcacaatcctaatacagtaaatgttttgcatcttccatgttttatgcaaaaacagacatttaaatcaataaataattgtgccctagactgaaggttaatgtttaggagaggaaaaaaattgttggaattttttctacatttttttgtgaagaatcttttttggaaaggaaggatacatatttttgttgtgtaatattttctatttttgaatgcattttattggtacaagactgtttttttggtgaagacattatttaaaaaaaaaaaaagaaaaaaactaatcgaaaagtttgcccttaaggatatgctgcagttttgaggttaaaaaaaaattactgattcaagatgcgtgttaaaagttgggattatattgttgttttttgtaattgttacaagaagaagtttgtacccactgctgtttattttgtttcagatgagtaagtaaagggattgttcttgttttattctttttttagagaaaaaaagctatttatgaaatgtcaaaaacactggactgtgagtttaagtgtggaagcattttaccaccctgtgtcttcaaccaattatgggaaaccccttttctcttccccctaccccctgccttagccttgccaaatgagaaaaatataacagctg

SEQ ID NO: 737107 - DNA, 482 bp, Homo sapiens
gggtgatagttgattctagagtatcccctgcagctctctgatgataaggatcccaagtcaatgggaatgaaattcaactggcgggcaagttcaataacctgttgtcgcgcttgaatattgttgctgcatatataaacctgccggctggcatccttaggtcctaactgaagtgcccaagctgagacaacattaaatcctttgacaatcaaagaatctgggaataatgaagccaaatattcagcattggattctgggtactggtttatcctcatgttattgctcacatcaatcaggattttacccacaagcagatgtctcaggtcccacagggaggtataatgttctctgtgtatagcaacaaatattatatttgtttttgtgagagcatcttcatgatgagtgacatctaccacatgaggaaaaaattcagaagcaaacttaggatttctacttcctatgaccacatgatagccgcatctaat

SEQ ID NO: 737108 - DNA, 630 bp, Homo sapiens
atctctctgaccttctcatcggtaagcagaggctgtaggcaacatggaccatagcgaagaaaaaacttagtaatccaagctgttttctacactgtaaccaggtttccaaccaaggtggaaatctcctatacttggtgccgtaataaagttgataagcagctgccagaagacctgcgaggtatactagggagagcaaagtaatggcaactataggtaaggttttattcacaatctctataggaattttgtaaaagtcactctgttggtttctagcatatggatgaatcacatctctgacaaaggaataaaggaaaaaaaatgtggccaagcttatagctaccaccactggccctctccagagagtaaagagtcgtaggggtaaattttcaatctctctggctgatgataaggatcccaagtcaatgggaatgaaattcaactggcgggcaagttcaataacctgttgtcgcgcttgaatattgttgctgcatatataaacctgtggaaaaaacaaaaagactcagcattaccattgttgtttataaaaatggtagcaatcgcatgctccacttacggaccatcacctgtgatgaccttgaggaataaatacttgttgaattttcgtctata

SEQ ID NO: 737109 - DNA, 466 bp, Homo sapiens; identical to SEQ ID NO: 414516

SEQ ID NO: 737110 - DNA, 3658 bp, Homo sapiens
gaggggcggagaggcagagagcccgaaaggaccagacgcccaggtcgcccgcatcccgctgccgcaggagagagacagcgcgccccggccctgctccccaggcttcgccgggcgccctcaactctgtccccagagactgagcacctgtcctccgcctcggcctctgctgagagccctctcctctggagcacacaccacccctgcagcccaagaagagtcccagccccacgccggctaccaccatggcggagaccaacaacgaatgtagcatcaaggtgctctgccgattccggcccctgaaccaggctgagattctgcggggagacaagttcatccccattttccaaggggacgacagcgtcgttattggggggaagccatatgtttttgaccgtgtattccccccaaacacgactcaagagcaagtttatcatgcatgtgccatgcagattgtcaaagatgtccttgctggctacaatggcaccatttttgcttatggacagacatcctcagggaaaacacataccatggagggaaagctgcacgaccctcagctgatgggaatcattcctcgaattgcccgagacatcttcaaccacatctactccatggatgagaaccttgagttccacatcaaggtttcttactttgaaatttacctggacaaaattcgtgaccttctggatgtgaccaagacaaatctgtccgtgcacgaggacaagaaccgggtgccatttgtcaagggttgtactgaacgctttgtgtccagcccggaggagattctggatgtgattgatgaagggaaatcaaatcgtcatgtggctgtcaccaacatgaatgaacacagctctcggagccacagcatcttcctcatcaacatcaagcaggagaacatggaaacggagcagaagctcagtgggaagctgtatctggtggacctggcagggagtgagaaggtcagcaagactggagcagagggagccgtgctggacgaggcaaagaatatcaacaagtcactgtcagctctgggcaatgtgatctccgcactggctgagggcactaaaagctatgttccatatcgtgacagcaaaatgacaaggattctccaggactctctcgggggaaactgccggacgactatgttcatctgttgctcaccatccagttataatgatgcagagaccaagtccaccctgatgtttgggcagcgggcaaagaccattaagaacactgcctcagtaaatttggagttgactgctgagcagtggaagaagaaatatgagaaggagaaggagaagacaaaggcccagaaggagacgattgcgaagctggaggctgagctgagccggtggcgcaatggagagaatgtgcctgagacagagcgcctggctggggaggaggcagccctgggagccgagctctgtgaggagacccctgtgaatgacaactcatccatcgtggtgcgcatcgcgcccgaggagcggcagaaatacgaggaggagatccgccgtctctataagcagcttgacgacaaggatgatgaaatcaaccaacaaagccaactcatagagaagctcaagcagcaaatgctggaccaggaagagctgctggtgtccacccgaggagacaacgagaaggtccagcgggagctgagccacctgcaatcagagaacgatgccgctaaggatgaggtgaaggaagtgctgcaggccctggaggagctggctgtgaactatgaccagaagtcccaggaggtggaggagaagagccagcagaaccagcttctggtggatgagctgtctcagaaggtggccaccatgctgtccctggagtctgagttgcagcggctacaggaggtcagtggacaccagcgaaaacgaattgctgaggtgctgaacgggctgatgaaggatctgagcgagttcagtgtcattgtgggcaacggggagattaagctgccagtggagatcagtggggccatcgaggaggagttcactgtggcccgactctacatcagcaaaatcaaatcagaagtcaagtctgtggtcaagcggtgccggcagctggagaacctccaggtggagtgtcaccgcaagatggaagtgaccgggcgggagctctcatcctgccagctcctcatctctcagcatgaggccaagatccgctcgcttacggaatacatgcagagcgtggagctaaagaagcggcacctggaagagtcctatgactccttgagcgatgagctggccaagctccaggcccaggaaactgtgcatgaagtggccctgaaggacaaggagcctgacactcaggatgcagatgaagtgaagaaggctctggagctgcagatggagagtcaccgggaggcccatcaccggcagctggcccggctccgggacgagatcaacgagaagcagaagaccattgatgagctcaaagacctaaatcagaagctccagttagagctagagaagcttcaggctgactacgagaagctgaagagcgaagaacacgagaagagcaccaagctgcaggagctgacatttctgtacgagcgacatgagcagtccaagcaggacctcaagggtctggaggagacagttgcccgggaactccagaccctccacaaccttcgcaagctgttcgttcaagacgtcacgactcgagtcaagaaaagtgcagaaatggagcccgaagacagtggggggattcactcccaaaagcagaagatttcctttcttgagaacaacctggaacagcttacaaaggttcacaaacagctggtacgtgacaatgcagatctgcgttgtgagcttcctaaattggaaaaacgacttagggctacggctgagagagttaaggccctggagggtgcactgaaggaggccaaggagggcgccatgaaggacaagcgccggtaccagcaggaggtggaccgcatcaaggaggccgttcgctacaagagctcgggcaaacggggccattctgcccagattgccaaacccgtccggcctggccactacccagcatcctcacccaccaacccctatggcacccggagccctgagtgcatcagttacaccaacagcctcttccagaactaccagaatctctacctgcaggccacacccagctccacctcagatatgtagtgagtgaccacacgtgtgggttggagtcccacccaaagctccctggaccctagaaggcatagggtgggggcagttattggttgtggcttaattattttcctaaaccctttctcaacttcatgcctatgattagaaggtaggtgtctgccctcccagcctgtggccatgtttgttttcctctgctctctggggatggggagggctgagcagctctatcgctgaggatgagtgtggattagtggtcctcagactagtggagggtgggtgtcagaggctgcctctttcctctgctccatccagctttgcaaactcctgtaccagcagtggagccacatcttctggcggccccttggcttcctaccagaaggccaacatggacaatggtgagtgaaaaagatgggtaatcccacctttggggtcctcagggcaagttgagaggcataaaagttagtgaccttagtgtacaaaaaacactgactgaacctttctggtgtgccaaggcttca

SEQ ID NO: 737111 - DNA, 5074 bp, Homo sapiens
gaggggcggagaggcagagagcccgaaaggaccagacgcccaggtcgcccgcatcccgctgccgcaggagagagacagcgcgccccggccctgctccccaggcttcgccgggcgccctcaactctgtccccagagactgagcacctgtcctccgcctcggcctctgctgagagccctctcctctggagcacacaccacccctgcagcccaagaagagtcccagccccacgccggctaccaccatggcggagaccaacaacgaatgtagcatcaaggtgctctgccgattccggcccctgaaccaggctgagattctgcggggagacaagttcatccccattttccaaggggacgacagcgtcgttattggggggaagccatatgtttttgaccgtgtattccccccaaacacgactcaagagcaagtttatcatgcatgtgccatgcagattgtcaaagatgtccttgctggctacaatggcaccatttttgcttatggacagacatcctcagggaaaacacataccatggagggaaagctgcacgaccctcagctgatgggaatcattcctcgaattgcccgagacatcttcaaccacatctactccatggatgagaaccttgagttccacatcaaggtttcttactttgaaatttacctggacaaaattcgtgaccttctggatgtgaccaagacaaatctgtccgtgcacgaggacaagaaccgggtgccatttgtcaagggttgtactgaacgctttgtgtccagcccggaggagattctggatgtgattgatgaagggaaatcaaatcgtcatgtggctgtcaccaacatgaatgaacacagctctcggagccacagcatcttcctcatcaacatcaagcaggagaacatggaaacggagcagaagctcagtgggaagctgtatctggtggacctggcagggagtgagaaggtcagcaagactggagcagagggagccgtgctggacgaggcaaagaatatcaacaagtcactgtcagctctgggcaatgtgatctccgcactggctgagggcactaaaagctatgttccatatcgtgacagcaaaatgacaaggattctccaggactctctcgggggaaactgccggacgactatgttcatctgttgctcaccatccagttataatgatgcagagaccaagtccaccctgatgtttgggcagcgggcaaagaccattaagaacactgcctcagtaaatttggagttgactgctgagcagtggaagaagaaatatgagaaggagaaggagaagacaaaggcccagaaggagacgattgcgaagctggaggctgagctgagccggtggcgcaatggagagaatgtgcctgagacagagcgcctggctggggaggaggcagccctgggagccgagctctgtgaggagacccctgtgaatgacaactcatccatcgtggtgcgcatcgcgcccgaggagcggcagaaatacgaggaggagatccgccgtctctataagcagcttgacgacaaggatgatgaaatcaaccaacaaagccaactcatagagaagctcaagcagcaaatgctggaccaggaagagctgctggtgtccacccgaggagacaacgagaaggtccagcgggagctgagccacctgcaatcagagaacgatgccgctaaggatgaggtgaaggaagtgctgcaggccctggaggagctggctgtgaactatgaccagaagtcccaggaggtggaggagaagagccagcagaaccagcttctggtggatgagctgtctcagaaggtggccaccatgctgtccctggagtctgagttgcagcggctacaggaggtcagtggacaccagcgaaaacgaattgctgaggtgctgaacgggctgatgaaggatctgagcgagttcagtgtcattgtgggcaacggggagattaagctgccagtggagatcagtggggccatcgaggaggagttcactgtggcccgactctacatcagcaaaatcaaatcagaagtcaagtctgtggtcaagcggtgccggcagctggagaacctccaggtggagtgtcaccgcaagatggaagtgaccgggcgggagctctcatcctgccagctcctcatctctcagcatgaggccaagatccgctcgcttacggaatacatgcagagcgtggagctaaagaagcggcacctggaagagtcctatgactccttgagcgatgagctggccaagctccaggcccaggaaactgtgcatgaagtggccctgaaggacaaggagcctgacactcaggatgcagatgaagtgaagaaggctctggagctgcagatggagagtcaccgggaggcccatcaccggcagctggcccggctccgggacgagatcaacgagaagcagaagaccattgatgagctcaaagacctaaatcagaagctccagttagagctagagaagcttcaggctgactacgagaagctgaagagcgaagaacacgagaagagcaccaagctgcaggagctgacatttctgtacgagcgacatgagcagtccaagcaggacctcaagggtctggaggagacagttgcccgggaactccagaccctccacaaccttcgcaagctgttcgttcaagacgtcacgactcgagtcaagaaaagtgcagaaatggagcccgaagacagtggggggattcactcccaaaagcagaagatttcctttcttgagaacaacctggaacagcttacaaaggttcacaaacagctggtacgtgacaatgcagatctgcgttgtgagcttcctaaattggaaaaacgacttagggctacggctgagagagttaaggccctggagggtgcactgaaggaggccaaggagggcgccatgaaggacaagcgccggtaccagcaggaggtggaccgcatcaaggaggccgttcgctacaagagctcgggcaaacggggccattctgcccagattgccaaacccgtccggcctggccactacccagcatcctcacccaccaacccctatggcacccggagccctgagtgcatcagttacaccaacagcctcttccagaactaccagaatctctacctgcaggccacacccagctccacctcagatatgtactttgcaaactcctgtaccagcagtggagccacatcttctggcggccccttggcttcctaccagaaggccaacatggacaatggaaatgccacagatatcaatgacaataggagtgacctgccgtgtggctatgaggctgaggaccaggccaagcttttccctctccaccaagagacagcagccagctaatctcccacacccacggctgcatacctgcactttcagtttctaagagggactgaggcctcttctcagcatgctgcaaacctgtggtctctgatactaactccctccccaacccctgttgttggactgtactatgtttgatgtcttctcttacttactctgtatctctttgtactctgtatctatatatcaaaagctgctgctatgtctctcttctgtcttattctcaagtatctactgatgtatttagcaatttcaaagcatagtctaccttccttatttggggcaatagggaggagggtgaatgtttcttctttctcatctactcgtctcacactgagtggtgttagtcactgagtagaggtcacagagatgacaaaaggaaaaatgggagctagagggttgtgacccttcatacacacacgcacgcacgcacacaaacatgcacacacgcatgcacacacacaaagccttaagcagaagaatgtcttagcatcatgagacagagaaatagactcttcctccctcctctttcacatatagcacaggggaaggtaaaatggaagggctgctaattgagacatataattttcttcatacacccctcaccttaatcaaaggattcaggtgttacttctgccctacaaagtctgccttttgcctccctcttcctgttttcccctggactgagaaatgggttgctcaagggaccatttccctttttcttcaagctccttttgatattccctgccccagagctcatgaccagaacccagagctgatttaaaatattttgaaaaatggaggaggcagactgctcccagcagcctgtcaatggctgctcatctgtccatggagatggttacaggcaggtgtagtcaaaatgattgattccttgggtttgggggtgaataggctgggaaatttctgagccttttttttttgtcacagtgccctcaagttgaagtgatgagctggatttctttcttgttccatactgggcggcatgctcctcccatctccaccccttggtttgggggcttccagctcattggcaaaatctctctagttgccttcctttcaagctggagcctgacttttccccaatgtacattttttttttctccacaaagagttccttctctaatgtccccatctggtattaagtgcactttaaagaaaggggcagggtggattttcaagaggtgggaagctctaaggcttgaccctgaggggtcttctcccagccattctcagcccatatgcagcaccctccatactgaagaggactgttgttttagtttcagacggtcctttccttccacatggtgctaaggtggttttctaggtaactgcagggatggaggtcactagccattccaaaccaggagagaaagtctggtgtcctgatatccagtcttttctaggaggaagaccaagattctccagcggcagggcagcctatcacccaacttctaagtcaggaaaggaagctgagtgggaatgccagctggtaagcgcaggctgcactggcccatgactccttcaaggaaaagaggccctgctccctttacctgctgagctccttttagcagttagggagaactgcagggggaaaaataccagtggagtgtggaataaatccaaagcagtgatttttaaatgtttttcaaaaacaaatcttacatagaaccccaatataaaaaataaagtaatgcagacctgggcagtttgca

SEQ ID NO: 737112 - DNA, 5003 bp, Homo sapiens
  misc_feature (5000)..(5000): n is a, c, g, or t
gaggggcggagaggcagagagcccgaaaggaccagacgcccaggtcgcccgcatcccgctgccgcaggagagagacagcgcgccccggccctgctccccaggcttcgccgggcgccctcaactctgtccccagagactgagcacctgtcctccgcctcggcctctgctgagagccctctcctctggagcacacaccacccctgcagcccaagaagagtcccagccccacgccggctaccaccatggcggagaccaacaacgaatgtagcatcaaggtgctctgccgattccggcccctgaaccaggctgagattctgcggggagacaagttcatccccattttccaaggggacgacagcgtcgttattggggggaagccatatgtttttgaccgtgtattccccccaaacacgactcaagagcaagtttatcatgcatgtgccatgcagattgtcaaagatgtccttgctggctacaatggcaccatttttgcttatggacagacatcctcagggaaaacacataccatggagggaaagctgcacgaccctcagctgatgggaatcattcctcgaattgcccgagacatcttcaaccacatctactccatggatgagaaccttgagttccacatcaaggtttcttactttgaaatttacctggacaaaattcgtgaccttctggatgtgaccaagacaaatctgtccgtgcacgaggacaagaaccgggtgccatttgtcaagggttgtactgaacgctttgtgtccagcccggaggagattctggatgtgattgatgaagggaaatcaaatcgtcatgtggctgtcaccaacatgaatgaacacagctctcggagccacagcatcttcctcatcaacatcaagcaggagaacatggaaacggagcagaagctcagtgggaagctgtatctggtggacctggcagggagtgagaaggtcagcaagactggagcagagggagccgtgctggacgaggcaaagaatatcaacaagtcactgtcagctctgggcaatgtgatctccgcactggctgagggcactaaaagctatgttccatatcgtgacagcaaaatgacaaggattctccaggactctctcgggggaaactgccggacgactatgttcatctgttgctcaccatccagttataatgatgcagagaccaagtccaccctgatgtttgggcagcgggcaaagaccattaagaacactgcctcagtaaatttggagttgactgctgagcagtggaagaagaaatatgagaaggagaaggagaagacaaaggcccagaaggagacgattgcgaagctggaggctgagctgagccggtggcgcaatggagagaatgtgcctgagacagagcgcctggctggggaggaggcagccctgggagccgagctctgtgaggagacccctgtgaatgacaactcatccatcgtggtgcgcatcgcgcccgaggagcggcagaaatacgaggaggagatccgccgtctctataagcagcttgacgacaaggatgatgaaatcaaccaacaaagccaactcatagagaagctcaagcagcaaatgctggaccaggaagagctgctggtgtccacccgaggagacaacgagaaggtccagcgggagctgagccacctgcaatcagagaacgatgccgctaaggatgaggtgaaggaagtgctgcaggccctggaggagctggctgtgaactatgaccagaagtcccaggaggtggaggagaagagccagcagaaccagcttctggtggatgagctgtctcagaaggtggccaccatgctgtccctggagtctgagttgcagcggctacaggaggtcagtggacaccagcgaaaacgaattgctgaggtgctgaacgggctgatgaaggatctgagcgagttcagtgtcattgtgggcaacggggagattaagctgccagtggagatcagtggggccatcgaggaggagttcactgtggcccgactctacatcagcaaaatcaaatcagaagtcaagtctgtggtcaagcggtgccggcagctggagaacctccaggtggagtgtcaccgcaagatggaagtgaccgggcgggagctctcatcctgccagctcctcatctctcagcatgaggccaagatccgctcgcttacggaatacatgcagagcgtggagctaaagaagcggcacctggaagagtcctatgactccttgagcgatgagctggccaagctccaggcccaggaaactgtgcatgaagtggccctgaaggacaaggagcctgacactcaggatgcagatgaagtgaagaaggctctggagctgcagatggagagtcaccgggaggcccatcaccggcagctggcccggctccgggacgagatcaacgagaagcagaagaccattgatgagctcaaagacctaaatcagaagctccagttagagctagagaagcttcaggctgactacgagaagctgaagagcgaagaacacgagaagagcaccaagctgcaggagctgacatttctgtacgagcgacatgagcagtccaagcaggacctcaagggtctggaggagacagttgcccgggaactccagaccctccacaaccttcgcaagctgttcgttcaagacgtcacgactcgagtcaagaaaagtgcagaaatggagcccgaagacagtggggggattcactcccaaaagcagaagatttcctttcttgagaacaacctggaacagcttacaaaggttcacaaacagctggtacgtgacaatgcagatctgcgttgtgagcttcctaaattggaaaaacgacttagggctacggctgagagagttaaggccctggagggtgcactgaaggaggccaaggagggcgccatgaaggacaagcgccggtaccagcaggaggtggaccgcatcaaggaggccgttcgctacaagagctcgggcaaacggggccattctgcccagattgccaaacccgtccggcctggccactacccagcatcctcacccaccaacccctatggcacccggagccctgagtgcatcagttacaccaacagcctcttccagaactaccagaatctctacctgcaggccacacccagctccacctcagatatgtactttgcaaactcctgtaccagcagtggagccacatcttctggcggccccttggcttcctaccagaaggccaacatggacaatggaaatgccacagatatcaatgacaataggagtgacctgccgtgtggctatgaggctgaggaccaggccaagcttttccctctccaccaagagacagcagccagctaatctcccacacccacggctgcatacctgcactttcagtttctaagagggactgaggcctcttctcagcatgctgcaaacctgtggtctctgatactaactccctccccaacccctgttgttggactgtactatgtttgatgtcttctcttacttactctgtatctctttgtactctgtatctatatatcaaaagctgctgctatgtctctcttctgtcttattctcaagtatctactgatgtatttagcaatttcaaagcatagtctaccttccttatttggggcaatagggaggagggtgaatgtttcttctttctcatctactcgtctcacactgagtggtgttagtcactgagtagaggtcacagagatgacaaaaggaaaaatgggagctagagggttgtgacccttcatacacacacgcacgcacgcacacaaacatgcacacacgcatgcacacacacaaagccttaagcagaagaatgtcttagcatcatgagacagagaaatagactcttcctccctcctctttcacatatagcacaggggaaggtaaaatggaagggctgctaattgagacatataattttcttcatacacccctcaccttaatcaaaggattcaggtgttacttctgccctacaaagtctgccttttgcctccctcttcctgttttcccctggactgagaaatgggttgctcaagggaccatttccctttttcttcaagctccttttgatattccctgccccagagctcatgaccagaacccagagctgatttaaaatattttgaaaaatggaggaggcagactgctcccagcagcctgtcaatggctgctcatctgtccatggagatggttacaggcaggtgtagtcaaaatgattgattccttgggtttgggggtgaataggctgggaaatttctgagccttttttttttgtcacagtgccctcaagttgaagtgatgagctggatttctttcttgttccatactgggcggcatgctcctcccatctccaccccttggtttgggggcttccagctcattggcaaaatctctctagttgccttcctttcaagctggagcctgacttttccccaatgtacattttttttttctccacaaagagttccttctctaatgtccccatctggtattaagtgcactttaaagaaaggggcagggtggattttcaagaggtgggaagctctaaggcttgaccctgaggggtcttctcccagccattctcagcccatatgcagcaccctccatactgaagaggactgttgttttagtttcagacggtcctttccttccacatggtgctaaggtggttttctaggtaactgcagggatggaggtcactagccattccaaaccaggagagaaagtctggtgtcctgatatccagtcttttctaggaggaagaccaagattctccagcggcagggcagcctatcacccaacttctaagtcaggaaaggaagctgagtgggaatgccagctggtaagcgcaggctgcactggccccttcctcagaacaatggttttcaaactactccacagaatcctcagggtctcttaggactgttcaagggctcatttgctgaggagcctttgaacagtcagtcctaagagacgctgagacttcttccncca

SEQ ID NO: 737113 - DNA, 4267 bp, Homo sapiens
gaggggcggagaggcagagagcccgaaaggaccagacgcccaggtcgcccgcatcccgctgccgcaggagagagacagcgcgccccggccctgctccccaggcttcgccgggcgccctcaactctgtccccagagactgagcacctgtcctccgcctcggcctctgctgagagccctctcctctggagcacacaccacccctgcagcccaagaagagtcccagccccacgccggctaccaccatggcggagaccaacaacgaatgtagcatcaaggtgctctgccgattccggcccctgaaccaggctgagattctgcggggagacaagttcatccccattttccaaggggacgacagcgtcgttattggggggaagccatatgtttttgaccgtgtattccccccaaacacgactcaagagcaagtttatcatgcatgtgccatgcagattgtcaaagatgtccttgctggctacaatggcaccatttttgcttatggacagacatcctcagggaaaacacataccatggagggaaagctgcacgaccctcagctgatgggaatcattcctcgaattgcccgagacatcttcaaccacatctactccatggatgagaaccttgagttccacatcaaggtttcttactttgaaatttacctggacaaaattcgtgaccttctggatgtgaccaagacaaatctgtccgtgcacgaggacaagaaccgggtgccatttgtcaagggttgtactgaacgctttgtgtccagcccggaggagattctggatgtgattgatgaagggaaatcaaatcgtcatgtggctgtcaccaacatgaatgaacacagctctcggagccacagcatcttcctcatcaacatcaagcaggagaacatggaaacggagcagaagctcagtgggaagctgtatctggtggacctggcagggagtgagaaggtcagcaagactggagcagagggagccgtgctggacgaggcaaagaatatcaacaagtcactgtcagctctgggcaatgtgatctccgcactggctgagggcactaaaagctatgttccatatcgtgacagcaaaatgacaaggattctccaggactctctcgggggaaactgccggacgactatgttcatctgttgctcaccatccagttataatgatgcagagaccaagtccaccctgatgtttgggcagcgggcaaagaccattaagaacactgcctcagtaaatttggagttgactgctgagcagtggaagaagaaatatgagaaggagaaggagaagacaaaggcccagaaggagacgattgcgaagctggaggctgagctgagccggtggcgcaatggagagaatgtgcctgagacagagcgcctggctggggaggaggcagccctgggagccgagctctgtgaggagacccctgtgaatgacaactcatccatcgtggtgcgcatcgcgcccgaggagcggcagaaatacgaggaggagatccgccgtctctataagcagcttgacgacaaggatgatgaaatcaaccaacaaagccaactcatagagaagctcaagcagcaaatgctggaccaggaagagctgctggtgtccacccgaggagacaacgagaaggtccagcgggagctgagccacctgcaatcagagaacgatgccgctaaggatgaggtgaaggaagtgctgcaggccctggaggagctggctgtgaactatgaccagaagtcccaggaggtggaggagaagagccagcagaaccagcttctggtggatgagctgtctcagaaggtggccaccatgctgtccctggagtctgagttgcagcggctacaggaggtcagtggacaccagcgaaaacgaattgctgaggtgctgaacgggctgatgaaggatctgagcgagttcagtgtcattgtgggcaacggggagattaagctgccagtggagatcagtggggccatcgaggaggagttcactgtggcccgactctacatcagcaaaatcaaatcagaagtcaagtctgtggtcaagcggtgccggcagctggagaacctccaggtggagtgtcaccgcaagatggaagtgaccgggcgggagctctcatcctgccagctcctcatctctcagcatgaggccaagatccgctcgcttacggaatacatgcagagcgtggagctaaagaagcggcacctggaagagtcctatgactccttgagcgatgagctggccaagctccaggcccaggaaactgtgcatgaagtggccctgaaggacaaggagcctgacactcaggatgcagatgaagtgaagaaggctctggagctgcagatggagagtcaccgggaggcccatcaccggcagctggcccggctccgggacgagatcaacgagaagcagaagaccattgatgagctcaaagacctaaatcagaagctccagttagagctagagaagcttcaggctgactacgagaagctgaagagcgaagaacacgagaagagcaccaagctgcaggagctgacatttctgtacgagcgacatgagcagtccaagcaggacctcaagggtctggaggagacagttgcccgggaactccagaccctccacaaccttcgcaagctgttcgttcaagacgtcacgactcgagtcaagaaaagtgcagaaatggagcccgaagacagtggggggattcactcccaaaagcagaagatttcctttcttgagaacaacctggaacagcttacaaaggttcacaaacagctggtacgtgacaatgcagatctgcgttgtgagcttcctaaattggaaaaacgacttagggctacggctgagagagttaaggccctggagggtgcactgaaggaggccaaggagggcgccatgaaggacaagcgccggtaccagcaggaggtggaccgcatcaaggaggccgttcgctacaagagctcgggcaaacggggccattctgcccagattgccaaacccgtccggcctggccactacccagcatcctcacccaccaacccctatggcacccggagccctgagtgcatcagttacaccaacagcctcttccagaactaccagaatctctacctgcaggccacacccagctccacctcagatatgtactttgcaaactcctgtaccagcagtggagccacatcttctggcggccccttggcttcctaccagaaggccaacatggacaatggaaatgccacagatatcaatgacaataggagtgacctgccgtgtggctatgaggctgaggaccaggccaagcttttccctctccaccaagagacagcagccagctaatctcccacacccacggctgcatacctgcactttcagtttctaagagggactgaggcctcttctcagcatgctgcaaacctgtggtctctgatactaactccctccccaacccctgttgttggactgtactatgtttgatgtcttctcttacttactctgtatctctttgtactctgtatctatatatcaaaagctgctgctatgtctctcttctgtcttattctcaagtatctactgatgtatttagcaatttcaaagcatagtctaccttccttatttggggcaatagggaggagggtgaatgtttcttctttctcatctactcgtctcacactgagtggtgttagtcactgagtagaggtcacagagatgacaaaaggaaaaatgggagctagagggttgtgacccttcatacacacacgcacgcacgcacacaaacatgcacacacgcatgcacacacacaaagccttaagcagaagaatgtcttagcatcatgagacagagaaatagactcttcctccctcctctttcacatatagcacaggggaaggtaaaatggaagggctgctaattgagacatataattttcttcatacacccctcaccttaatcaaaggattcaggtgttacttctgccctacaaagtctgccttttgcctccctcttcctgttttcccctggactgagaaatgggttgctcaagggaccatttccctttttcttcaagctccttttgatattccctgccccagagctcatgaccagaacccagagctgatttaaaatattttgaaaaatggaggaggcagactgctcccagcagcctgtcaatggctgctcatctgtccatggagatggttacaggcaggtgtagtcaaaatgattgattcctggtgacatggctgcaggtatcctctagaacagc

SEQ ID NO: 737114 - DNA, 3628 bp, Homo sapiens
  misc_feature (3625)..(3625): n is a, c, g, or t
gaggggcggagaggcagagagcccgaaaggaccagacgcccaggtcgcccgcatcccgctgccgcaggagagagacagcgcgccccggccctgctccccaggcttcgccgggcgccctcaactctgtccccagagactgagcacctgtcctccgcctcggcctctgctgagagccctctcctctggagcacacaccacccctgcagcccaagaagagtcccagccccacgccggctaccaccatggcggagaccaacaacgaatgtagcatcaaggtgctctgccgattccggcccctgaaccaggctgagattctgcggggagacaagttcatccccattttccaaggggacgacagcgtcgttattggggggaagccatatgtttttgaccgtgtattccccccaaacacgactcaagagcaagtttatcatgcatgtgccatgcagattgtcaaagatgtccttgctggctacaatggcaccatttttgcttatggacagacatcctcagggaaaacacataccatggagggaaagctgcacgaccctcagctgatgggaatcattcctcgaattgcccgagacatcttcaaccacatctactccatggatgagaaccttgagttccacatcaaggtttcttactttgaaatttacctggacaaaattcgtgaccttctggatgtgaccaagacaaatctgtccgtgcacgaggacaagaaccgggtgccatttgtcaagggttgtactgaacgctttgtgtccagcccggaggagattctggatgtgattgatgaagggaaatcaaatcgtcatgtggctgtcaccaacatgaatgaacacagctctcggagccacagcatcttcctcatcaacatcaagcaggagaacatggaaacggagcagaagctcagtgggaagctgtatctggtggacctggcagggagtgagaaggtcagcaagactggagcagagggagccgtgctggacgaggcaaagaatatcaacaagtcactgtcagctctgggcaatgtgatctccgcactggctgagggcactaaaagctatgttccatatcgtgacagcaaaatgacaaggattctccaggactctctcgggggaaactgccggacgactatgttcatctgttgctcaccatccagttataatgatgcagagaccaagtccaccctgatgtttgggcagcgggcaaagaccattaagaacactgcctcagtaaatttggagttgactgctgagcagtggaagaagaaatatgagaaggagaaggagaagacaaaggcccagaaggagacgattgcgaagctggaggctgagctgagccggtggcgcaatggagagaatgtgcctgagacagagcgcctggctggggaggaggcagccctgggagccgagctctgtgaggagacccctgtgaatgacaactcatccatcgtggtgcgcatcgcgcccgaggagcggcagaaatacgaggaggagatccgccgtctctataagcagcttgacgacaaggatgatgaaatcaaccaacaaagccaactcatagagaagctcaagcagcaaatgctggaccaggaagagctgctggtgtccacccgaggagacaacgagaaggtccagcgggagctgagccacctgcaatcagagaacgatgccgctaaggatgaggtgaaggaagtgctgcaggccctggaggagctggctgtgaactatgaccagaagtcccaggaggtggaggagaagagccagcagaaccagcttctggtggatgagctgtctcagaaggtggccaccatgctgtccctggagtctgagttgcagcggctacaggaggtcagtggacaccagcgaaaacgaattgctgaggtgctgaacgggctgatgaaggatctgagcgagttcagtgtcattgtgggcaacggggagattaagctgccagtggagatcagtggggccatcgaggaggagttcactgtggcccgactctacatcagcaaaatcaaatcagaagtcaagtctgtggtcaagcggtgccggcagctggagaacctccaggtggagtgtcaccgcaagatggaagtgaccgggcgggagctctcatcctgccagctcctcatctctcagcatgaggccaagatccgctcgcttacggaatacatgcagagcgtggagctaaagaagcggcacctggaagagtcctatgactccttgagcgatgagctggccaagctccaggcccaggaaactgtgcatgaagtggccctgaaggacaaggagcctgacactcaggatgcagatgaagtgaagaaggctctggagctgcagatggagagtcaccgggaggcccatcaccggcagctggcccggctccgggacgagatcaacgagaagcagaagaccattgatgagctcaaagacctaaatcagaagctccagttagagctagagaagcttcaggctgactacgagaagctgaagagcgaagaacacgagaagagcaccaagctgcaggagctgacatttctgtacgagcgacatgagcagtccaagcaggacctcaagggtctggaggagacagttgcccgggaactccagaccctccacaaccttcgcaagctgttcgttcaagacgtcacgactcgagtcaagaaaagtgcagaaatggagcccgaagacagtggggggattcactcccaaaagcagaagatttcctttcttgagaacaacctggaacagcttacaaaggttcacaaacagctggtacgtgacaatgcagatctgcgttgtgagcttcctaaattggaaaaacgacttagggctacggctgagagagttaaggccctggagggtgcactgaaggaggccaaggagggcgccatgaaggacaagcgccggtaccagcaggaggtggaccgcatcaaggaggccgttcgctacaagagctcgggcaaacggggccattctgcccagattgccaaacccgtccggcctggccactacccagcatcctcacccaccaacccctatggcacccggagccctgagtgcatcagttacaccaacagcctcttccagaactaccagaatctctacctgcaggccacacccagctccacctcagatatgtactttgcaaactcctgtaccagcagtggagccacatcttctggcggccccttggcttcctaccagaaggccaacatggacaatggaaatgccacagatatcaatgacaataggagtgacctgccgtgtggctatgaggctgaggaccaggccaagcttttccctctccaccaagagacagcagccagctaatctcccacacccacggctgcatacctgcactttcagctgctgagctccttttagcagttagggagaactgcagggggaaaaataccagtggagtgtggaataaatccaaagcagtgatttttaaatgtttttcaaaaacaaatcttacatagaacccccttcctcagaacaatggttttcaaactactccacagaatcctcagggtctcttaggactgttcaagggctcatttgctgaggagcctttgaacagtcagtcctaagagacgctgagacttcttccncca

SEQ ID NO: 737115 - DNA, 4264 bp, Homo sapiens
gtttctcccttgctcctgcagacatgaatgaacacagctctcggagccacagcatcttcctcatcaacatcaagcaggagaacatggaaacggagcagaagctcagtgggaagctgtatctggtggacctggcagggagtgagaaggtcagcaagactggagcagagggagccgtgctggacgaggcaaagaatatcaacaagtcactgtcagctctgggcaatgtgatctccgcactggctgagggcactaaaagctatgttccatatcgtgacagcaaaatgacaaggattctccaggactctctcgggggaaactgccggacgactatgttcatctgttgctcaccatccagttataatgatgcagagaccaagtccaccctgatgtttgggcagcgggcaaagaccattaagaacactgcctcagtaaatttggagttgactgctgagcagtggaagaagaaatatgagaaggagaaggagaagacaaaggcccagaaggagacgattgcgaagctggaggctgagctgagccggtggcgcaatggagagaatgtgcctgagacagagcgcctggctggggaggaggcagccctgggagccgagctctgtgaggagacccctgtgaatgacaactcatccatcgtggtgcgcatcgcgcccgaggagcggcagaaatacgaggaggagatccgccgtctctataagcagcttgacgacaaggatgatgaaatcaaccaacaaagccaactcatagagaagctcaagcagcaaatgctggaccaggaagagctgctggtgtccacccgaggagacaacgagaaggtccagcgggagctgagccacctgcaatcagagaacgatgccgctaaggatgaggtgaaggaagtgctgcaggccctggaggagctggctgtgaactatgaccagaagtcccaggaggtggaggagaagagccagcagaaccagcttctggtggatgagctgtctcagaaggtggccaccatgctgtccctggagtctgagttgcagcggctacaggaggtcagtggacaccagcgaaaacgaattgctgaggtgctgaacgggctgatgaaggatctgagcgagttcagtgtcattgtgggcaacggggagattaagctgccagtggagatcagtggggccatcgaggaggagttcactgtggcccgactctacatcagcaaaatcaaatcagaagtcaagtctgtggtcaagcggtgccggcagctggagaacctccaggtggagtgtcaccgcaagatggaagtgaccgggcgggagctctcatcctgccagctcctcatctctcagcatgaggccaagatccgctcgcttacggaatacatgcagagcgtggagctaaagaagcggcacctggaagagtcctatgactccttgagcgatgagctggccaagctccaggcccaggaaactgtgcatgaagtggccctgaaggacaaggagcctgacactcaggatgcagatgaagtgaagaaggctctggagctgcagatggagagtcaccgggaggcccatcaccggcagctggcccggctccgggacgagatcaacgagaagcagaagaccattgatgagctcaaagacctaaatcagaagctccagttagagctagagaagcttcaggctgactacgagaagctgaagagcgaagaacacgagaagagcaccaagctgcaggagctgacatttctgtacgagcgacatgagcagtccaagcaggacctcaagggtctggaggagacagttgcccgggaactccagaccctccacaaccttcgcaagctgttcgttcaagacgtcacgactcgagtcaagaaaagtgcagaaatggagcccgaagacagtggggggattcactcccaaaagcagaagatttcctttcttgagaacaacctggaacagcttacaaaggttcacaaacagctggtacgtgacaatgcagatctgcgttgtgagcttcctaaattggaaaaacgacttagggctacggctgagagagttaaggccctggagggtgcactgaaggaggccaaggagggcgccatgaaggacaagcgccggtaccagcaggaggtggaccgcatcaaggaggccgttcgctacaagagctcgggcaaacggggccattctgcccagattgccaaacccgtccggcctggccactacccagcatcctcacccaccaacccctatggcacccggagccctgagtgcatcagttacaccaacagcctcttccagaactaccagaatctctacctgcaggccacacccagctccacctcagatatgtactttgcaaactcctgtaccagcagtggagccacatcttctggcggccccttggcttcctaccagaaggccaacatggacaatggaaatgccacagatatcaatgacaataggagtgacctgccgtgtggctatgaggctgaggaccaggccaagcttttccctctccaccaagagacagcagccagctaatctcccacacccacggctgcatacctgcactttcagtttctaagagggactgaggcctcttctcagcatgctgcaaacctgtggtctctgatactaactccctccccaacccctgttgttggactgtactatgtttgatgtcttctcttacttactctgtatctctttgtactctgtatctatatatcaaaagctgctgctatgtctctcttctgtcttattctcaagtatctactgatgtatttagcaatttcaaagcatagtctaccttccttatttggggcaatagggaggagggtgaatgtttcttctttctcatctactcgtctcacactgagtggtgttagtcactgagtagaggtcacagagatgacaaaaggaaaaatgggagctagagggttgtgacccttcatacacacacgcacgcacgcacacaaacatgcacacacgcatgcacacacacaaagccttaagcagaagaatgtcttagcatcatgagacagagaaatagactcttcctccctcctctttcacatatagcacaggggaaggtaaaatggaagggctgctaattgagacatataattttcttcatacacccctcaccttaatcaaaggattcaggtgttacttctgccctacaaagtctgccttttgcctccctcttcctgttttcccctggactgagaaatgggttgctcaagggaccatttccctttttcttcaagctccttttgatattccctgccccagagctcatgaccagaacccagagctgatttaaaatattttgaaaaatggaggaggcagactgctcccagcagcctgtcaatggctgctcatctgtccatggagatggttacaggcaggtgtagtcaaaatgattgattccttgggtttgggggtgaataggctgggaaatttctgagccttttttttttgtcacagtgccctcaagttgaagtgatgagctggatttctttcttgttccatactgggcggcatgctcctcccatctccaccccttggtttgggggcttccagctcattggcaaaatctctctagttgccttcctttcaagctggagcctgacttttccccaatgtacattttttttttctccacaaagagttccttctctaatgtccccatctggtattaagtgcactttaaagaaaggggcagggtggattttcaagaggtgggaagctctaaggcttgaccctgaggggtcttctcccagccattctcagcccatatgcagcaccctccatactgaagaggactgttgttttagtttcagacggtcctttccttccacatggtgctaaggtggttttctaggtaactgcagggatggaggtcactagccattccaaaccaggagagaaagtctggtgtcctgatatccagtcttttctaggaggaagaccaagattctccagcggcagggcagcctatcacccaacttctaagtcaggaaaggaagctgagtgggaatgccagctggtaagcgcaggctgcactggcccatgactccttcaaggaaaagaggccctgctccctttacctgctgagctccttttagcagttagggagaactgcagggggaaaaataccagtggagtgtggaataaatccaaagcagtgatttttaaatgtttttcaaaaacaaatcttacatagaaccccaatataaaaaataaagtaatgcagacctgggcagtttgca

SEQ ID NO: 737116 - DNA, 1103 bp, Homo sapiens
ggtccggaattctccggatagcttttgcctccctcttcctgttttcccctggactgagaaatgggttgctcaagggaccatttccctttttcttcaagctccttttgatattccctgccccagagctcatgaccagaacccagagctgatttaaaatattttgaaaaatggaggaggcagactgctcccagcagcctgtcaatggctgctcatctgtccatggagatggttacaggcaggtgtagtcaaaatgattgattccttgggtttgggggtgaataggctgggaaatttctgagccttttttttttgtcacagtgccctcaagttgaagtgatgagctggatttctttcttgttccatactgggcggcatgctcctcccatctccaccccttggtttgggggcttccagctcattggcaaaatctctctagttgccttcctttcaagctggagcctgacttttccccaatgtacattttttttttctccacaaagagttccttctctaatgtccccatctggtattaagtgcactttaaagaaaggggcagggtggattttcaagaggtgggaagctctaaggcttgaccctgaggggtcttctcccagccattctcagcccatatgcagcaccctccatactgaagaggactgttgttttagtttcagacggtcctttccttccacatggtgctaaggtggttttctaggtaactgcagggatggaggtcactagccattccaaaccaggagagaaagtctggtgtcctgatatccagtcttttctaggaggaagaccaagattctccagcggcagggcagcctatcacccaacttctaagtcaggaaaggaagctgagtgggaatgccagctggtaagcgcaggctgcactggcccatgactccttcaaggaaaagaggccctgctccctttacctgctgagctccttttagcagttagggagaactgcagggggaaaaataccagtggagtgtggaataaatccaaagcagtgatttttaaatgtttttcaaaaacaaatcttacatagaaccccaatataaaaaataaagtaatgcagacctgggcagtttgca

SEQ ID NO: 737117 - DNA, 2279 bp, Homo sapiens
  misc_feature (16)..(16): n is a, c, g, or t
actcactataggaatntgccctcgagccaagaatcggcacgaggggctacggctgagagagttaaggccctggagggtgcactgaaggaggccaaggagggcgccatgaaggacaagcgccggtaccagcaggaggtggaccgcatcaaggaggccgttcgctacaagagctcgggcaaacggggccattctgcccagattgccaaacccgtccggcctggccactacccagcatcctcacccaccaacccctatggcacccggagccctgagtgcatcagttacaccaacagcctcttccagaactaccagaatctctacctgcaggccacacccagctccacctcagatatgtactttgcaaactcctgtaccagcagtggagccacatcttctggcggccccttggcttcctaccagaaggccaacatggacaatggaaatgccacagatatcaatgacaataggagtgacctgccgtgtggctatgaggctgaggaccaggccaagcttttccctctccaccaagagacagcagccagctaatctcccacacccacggctgcatacctgcactttcagtttctaagagggactgaggcctcttctcagcatgctgcaaacctgtggtctctgatactaactccctccccaacccctgttgttggactgtactatgtttgatgtcttctcttacttactctgtatctctttgtactctgtatctatatatcaaaagctgctgctatgtctctcttctgtcttattctcaagtatctactgatgtatttagcaatttcaaagcatagtctaccttccttatttggggcaatagggaggagggtgaatgtttcttctttctcatctactcgtctcacactgagtggtgttagtcactgagtagaggtcacagagatgacaaaaggaaaaatgggagctagagggttgtgacccttcatacacacacgcacgcacgcacacaaacatgcacacacgcatgcacacacacaaagccttaagcagaagaatgtcttagcatcatgagacagagaaatagactcttcctccctcctctttcacatatagcacaggggaaggtaaaatggaagggctgctaattgagacatataattttcttcatacacccctcaccttaatcaaaggattcaggtgttacttctgccctacaaagtctgccttttgcctccctcttcctgttttcccctggactgagaaatgggttgctcaagggaccatttccctttttcttcaagctccttttgatattccctgccccagagctcatgaccagaacccagagctgatttaaaatattttgaaaaatggaggaggcagactgctcccagcagcctgtcaatggctgctcatctgtccatggagatggttacaggcaggtgtagtcaaaatgattgattccttgggtttgggggtgaataggctgggaaatttctgagccttttttttttgtcacagtgccctcaagttgaagtgatgagctggatttctttcttgttccatactgggcggcatgctcctcccatctccaccccttggtttgggggcttccagctcattggcaaaatctctctagttgccttcctttcaagctggagcctgacttttccccaatgtacattttttttttctccacaaagagttccttctctaatgtccccatctggtattaagtgcactttaaagaaaggggcagggtggattttcaagaggtgggaagctctaaggcttgaccctgaggggtcttctcccagccattctcagcccatatgcagcaccctccatactgaagaggactgttgttttagtttcagacggtcctttccttccacatggtgctaaggtggttttctaggtaactgcagggatggaggtcactagccattccaaaccaggagagaaagtctggtgtcctgatatccagtcttttctaggaggaagaccaagattctccagcggcagggcagcctatcacccaacttctaagtcaggaaaggaagctgagtgggaatgccagctggtaagcgcaggctgcactggcccatgactccttcaaggaaaagaggccctgctccctttacctgctgagctccttttagcagttagggagaactgcagggggaaaaataccagtggagtgtggaataaatccaaagcagtgatttttaaatgtttttcaaaaacaaatcttacatagaaccccaatataaaaaataaagtaatgcagacctgggcagtttgca

SEQ ID NO: 737118 - DNA, 2175 bp, Homo sapiens
ggtagtcagctcggtaccgggcagtacggaggtggaccgcatcaaggaggccgttcgctacaagagctcgggcaaacggggccattctgcccagattgccaaacccgtccggcctggccactacccagcatcctcacccaccaacccctatggcacccggagccctgagtgcatcagttacaccaacagcctcttccagaactaccagaatctctacctgcaggccacacccagctccacctcagatatgtactttgcaaactcctgtaccagcagtggagccacatcttctggcggccccttggcttcctaccagaaggccaacatggacaatggaaatgccacagatatcaatgacaataggagtgacctgccgtgtggctatgaggctgaggaccaggccaagcttttccctctccaccaagagacagcagccagctaatctcccacacccacggctgcatacctgcactttcagtttctaagagggactgaggcctcttctcagcatgctgcaaacctgtggtctctgatactaactccctccccaacccctgttgttggactgtactatgtttgatgtcttctcttacttactctgtatctctttgtactctgtatctatatatcaaaagctgctgctatgtctctcttctgtcttattctcaagtatctactgatgtatttagcaatttcaaagcatagtctaccttccttatttggggcaatagggaggagggtgaatgtttcttctttctcatctactcgtctcacactgagtggtgttagtcactgagtagaggtcacagagatgacaaaaggaaaaatgggagctagagggttgtgacccttcatacacacacgcacgcacgcacacaaacatgcacacacgcatgcacacacacaaagccttaagcagaagaatgtcttagcatcatgagacagagaaatagactcttcctccctcctctttcacatatagcacaggggaaggtaaaatggaagggctgctaattgagacatataattttcttcatacacccctcaccttaatcaaaggattcaggtgttacttctgccctacaaagtctgccttttgcctccctcttcctgttttcccctggactgagaaatgggttgctcaagggaccatttccctttttcttcaagctccttttgatattccctgccccagagctcatgaccagaacccagagctgatttaaaatattttgaaaaatggaggaggcagactgctcccagcagcctgtcaatggctgctcatctgtccatggagatggttacaggcaggtgtagtcaaaatgattgattccttgggtttgggggtgaataggctgggaaatttctgagccttttttttttgtcacagtgccctcaagttgaagtgatgagctggatttctttcttgttccatactgggcggcatgctcctcccatctccaccccttggtttgggggcttccagctcattggcaaaatctctctagttgccttcctttcaagctggagcctgacttttccccaatgtacattttttttttctccacaaagagttccttctctaatgtccccatctggtattaagtgcactttaaagaaaggggcagggtggattttcaagaggtgggaagctctaaggcttgaccctgaggggtcttctcccagccattctcagcccatatgcagcaccctccatactgaagaggactgttgttttagtttcagacggtcctttccttccacatggtgctaaggtggttttctaggtaactgcagggatggaggtcactagccattccaaaccaggagagaaagtctggtgtcctgatatccagtcttttctaggaggaagaccaagattctccagcggcagggcagcctatcacccaacttctaagtcaggaaaggaagctgagtgggaatgccagctggtaagcgcaggctgcactggcccatgactccttcaaggaaaagaggccctgctccctttacctgctgagctccttttagcagttagggagaactgcagggggaaaaataccagtggagtgtggaataaatccaaagcagtgatttttaaatgtttttcaaaaacaaatcttacatagaaccccaatataaaaaataaagtaatgcagacctgggcagtttgca

SEQ ID NO: 737119 - DNA, 4963 bp, Homo sapiens
atctagaggatcccagtccgttagactgagcacctgtcctccgcctcggcctctgctgagagccctctcctctggagcacacaccacccctgcagcccaagaagagtcccagccccacgccggctaccaccatggcggagaccaacaacgaatgtagcatcaaggtgctctgccgattccggcccctgaaccaggctgagattctgcggggagacaagttcatccccattttccaaggggacgacagcgtcgttattggggggaagccatatgtttttgaccgtgtattccccccaaacacgactcaagagcaagtttatcatgcatgtgccatgcagattgtcaaagatgtccttgctggctacaatggcaccatttttgcttatggacagacatcctcagggaaaacacataccatggagggaaagctgcacgaccctcagctgatgggaatcattcctcgaattgcccgagacatcttcaaccacatctactccatggatgagaaccttgagttccacatcaaggtttcttactttgaaatttacctggacaaaattcgtgaccttctggatgtgaccaagacaaatctgtccgtgcacgaggacaagaaccgggtgccatttgtcaagggttgtactgaacgctttgtgtccagcccggaggagattctggatgtgattgatgaagggaaatcaaatcgtcatgtggctgtcaccaacatgaatgaacacagctctcggagccacagcatcttcctcatcaacatcaagcaggagaacatggaaacggagcagaagctcagtgggaagctgtatctggtggacctggcagggagtgagaaggtcagcaagactggagcagagggagccgtgctggacgaggcaaagaatatcaacaagtcactgtcagctctgggcaatgtgatctccgcactggctgagggcactaaaagctatgttccatatcgtgacagcaaaatgacaaggattctccaggactctctcgggggaaactgccggacgactatgttcatctgttgctcaccatccagttataatgatgcagagaccaagtccaccctgatgtttgggcagcgggcaaagaccattaagaacactgcctcagtaaatttggagttgactgctgagcagtggaagaagaaatatgagaaggagaaggagaagacaaaggcccagaaggagacgattgcgaagctggaggctgagctgagccggtggcgcaatggagagaatgtgcctgagacagagcgcctggctggggaggaggcagccctgggagccgagctctgtgaggagacccctgtgaatgacaactcatccatcgtggtgcgcatcgcgcccgaggagcggcagaaatacgaggaggagatccgccgtctctataagcagcttgacgacaaggatgatgaaatcaaccaacaaagccaactcatagagaagctcaagcagcaaatgctggaccaggaagagctgctggtgtccacccgaggagacaacgagaaggtccagcgggagctgagccacctgcaatcagagaacgatgccgctaaggatgaggtgaaggaagtgctgcaggccctggaggagctggctgtgaactatgaccagaagtcccaggaggtggaggagaagagccagcagaaccagcttctggtggatgagctgtctcagaaggtggccaccatgctgtccctggagtctgagttgcagcggctacaggaggtcagtggacaccagcgaaaacgaattgctgaggtgctgaacgggctgatgaaggatctgagcgagttcagtgtcattgtgggcaacggggagattaagctgccagtggagatcagtggggccatcgaggaggagttcactgtggcccgactctacatcagcaaaatcaaatcagaagtcaagtctgtggtcaagcggtgccggcagctggagaacctccaggtggagtgtcaccgcaagatggaagtgaccgggcgggagctctcatcctgccagctcctcatctctcagcatgaggccaagatccgctcgcttacggaatacatgcagagcgtggagctaaagaagcggcacctggaagagtcctatgactccttgagcgatgagctggccaagctccaggcccaggaaactgtgcatgaagtggccctgaaggacaaggagcctgacactcaggatgcagatgaagtgaagaaggctctggagctgcagatggagagtcaccgggaggcccatcaccggcagctggcccggctccgggacgagatcaacgagaagcagaagaccattgatgagctcaaagacctaaatcagaagctccagttagagctagagaagcttcaggctgactacgagaagctgaagagcgaagaacacgagaagagcaccaagctgcaggagctgacatttctgtacgagcgacatgagcagtccaagcaggacctcaagggtctggaggagacagttgcccgggaactccagaccctccacaaccttcgcaagctgttcgttcaagacgtcacgactcgagtcaagaaaagtgcagaaatggagcccgaagacagtggggggattcactcccaaaagcagaagatttcctttcttgagaacaacctggaacagcttacaaaggttcacaaacagctggtacgtgacaatgcagatctgcgttgtgagcttcctaaattggaaaaacgacttagggctacggctgagagagttaaggccctggagggtgcactgaaggaggccaaggagggcgccatgaaggacaagcgccggtaccagcaggaggtggaccgcatcaaggaggccgttcgctacaagagctcgggcaaacggggccattctgcccagattgccaaacccgtccggcctggccactacccagcatcctcacccaccaacccctatggcacccggagccctgagtgcatcagttacaccaacagcctcttccagaactaccagaatctctacctgcaggccacacccagctccacctcagatatgtactttgcaaactcctgtaccagcagtggagccacatcttctggcggccccttggcttcctaccagaaggccaacatggacaatggaaatgccacagatatcaatgacaataggagtgacctgccgtgtggctatgaggctgaggaccaggccaagcttttccctctccaccaagagacagcagccagctaatctcccacacccacggctgcatacctgcactttcagtttctaagagggactgaggcctcttctcagcatgctgcaaacctgtggtctctgatactaactccctccccaacccctgttgttggactgtactatgtttgatgtcttctcttacttactctgtatctctttgtactctgtatctatatatcaaaagctgctgctatgtctctcttctgtcttattctcaagtatctactgatgtatttagcaatttcaaagcatagtctaccttccttatttggggcaatagggaggagggtgaatgtttcttctttctcatctactcgtctcacactgagtggtgttagtcactgagtagaggtcacagagatgacaaaaggaaaaatgggagctagagggttgtgacccttcatacacacacgcacgcacgcacacaaacatgcacacacgcatgcacacacacaaagccttaagcagaagaatgtcttagcatcatgagacagagaaatagactcttcctccctcctctttcacatatagcacaggggaaggtaaaatggaagggctgctaattgagacatataattttcttcatacacccctcaccttaatcaaaggattcaggtgttacttctgccctacaaagtctgccttttgcctccctcttcctgttttcccctggactgagaaatgggttgctcaagggaccatttccctttttcttcaagctccttttgatattccctgccccagagctcatgaccagaacccagagctgatttaaaatattttgaaaaatggaggaggcagactgctcccagcagcctgtcaatggctgctcatctgtccatggagatggttacaggcaggtgtagtcaaaatgattgattccttgggtttgggggtgaataggctgggaaatttctgagccttttttttttgtcacagtgccctcaagttgaagtgatgagctggatttctttcttgttccatactgggcggcatgctcctcccatctccaccccttggtttgggggcttccagctcattggcaaaatctctctagttgccttcctttcaagctggagcctgacttttccccaatgtacattttttttttctccacaaagagttccttctctaatgtccccatctggtattaagtgcactttaaagaaaggggcagggtggattttcaagaggtgggaagctctaaggcttgaccctgaggggtcttctcccagccattctcagcccatatgcagcaccctccatactgaagaggactgttgttttagtttcagacggtcctttccttccacatggtgctaaggtggttttctaggtaactgcagggatggaggtcactagccattccaaaccaggagagaaagtctggtgtcctgatatccagtcttttctaggaggaagaccaagattctccagcggcagggcagcctatcacccaacttctaagtcaggaaaggaagctgagtgggaatgccagctggtaagcgcaggctgcactggcccatgactccttcaaggaaaagaggccctgctccctttacctgctgagctccttttagcagttagggagaactgcagggggaaaaataccagtggagtgtggaataaatccaaagcagtgatttttaaatgtttttcaaaaacaaatcttacatagaaccccaatataaaaaataaagtaatgcagacctgggcagtttgca

SEQ ID NO: 737120 - DNA, 4588 bp, Homo sapiens
tcagctcggtaccttcttgcacccatggttgtagttctaaggaggtgggatgtgggattctgccaagacgtgggcagccctcaccccaaccagttcagccaaaagtgagggtgcctccctgggtggggacccagcaccaaaccacagtccttgaccccacagagagagcgtcgacgctctctctgtggagggagccgtgctggacgaggcaaagaatatcaacaagtcactgtcagctctgggcaatgtgatctccgcactggctgagggcactaaaagctatgttccatatcgtgacagcaaaatgacaaggattctccaggactctctcgggggaaactgccggacgactatgttcatctgttgctcaccatccagttataatgatgcagagaccaagtccaccctgatgtttgggcagcgggcaaagaccattaagaacactgcctcagtaaatttggagttgactgctgagcagtggaagaagaaatatgagaaggagaaggagaagacaaaggcccagaaggagacgattgcgaagctggaggctgagctgagccggtggcgcaatggagagaatgtgcctgagacagagcgcctggctggggaggaggcagccctgggagccgagctctgtgaggagacccctgtgaatgacaactcatccatcgtggtgcgcatcgcgcccgaggagcggcagaaatacgaggaggagatccgccgtctctataagcagcttgacgacaaggatgatgaaatcaaccaacaaagccaactcatagagaagctcaagcagcaaatgctggaccaggaagagctgctggtgtccacccgaggagacaacgagaaggtccagcgggagctgagccacctgcaatcagagaacgatgccgctaaggatgaggtgaaggaagtgctgcaggccctggaggagctggctgtgaactatgaccagaagtcccaggaggtggaggagaagagccagcagaaccagcttctggtggatgagctgtctcagaaggtggccaccatgctgtccctggagtctgagttgcagcggctacaggaggtcagtggacaccagcgaaaacgaattgctgaggtgctgaacgggctgatgaaggatctgagcgagttcagtgtcattgtgggcaacggggagattaagctgccagtggagatcagtggggccatcgaggaggagttcactgtggcccgactctacatcagcaaaatcaaatcagaagtcaagtctgtggtcaagcggtgccggcagctggagaacctccaggtggagtgtcaccgcaagatggaagtgaccgggcgggagctctcatcctgccagctcctcatctctcagcatgaggccaagatccgctcgcttacggaatacatgcagagcgtggagctaaagaagcggcacctggaagagtcctatgactccttgagcgatgagctggccaagctccaggcccaggaaactgtgcatgaagtggccctgaaggacaaggagcctgacactcaggatgcagatgaagtgaagaaggctctggagctgcagatggagagtcaccgggaggcccatcaccggcagctggcccggctccgggacgagatcaacgagaagcagaagaccattgatgagctcaaagacctaaatcagaagctccagttagagctagagaagcttcaggctgactacgagaagctgaagagcgaagaacacgagaagagcaccaagctgcaggagctgacatttctgtacgagcgacatgagcagtccaagcaggacctcaagggtctggaggagacagttgcccgggaactccagaccctccacaaccttcgcaagctgttcgttcaagacgtcacgactcgagtcaagaaaagtgcagaaatggagcccgaagacagtggggggattcactcccaaaagcagaagatttcctttcttgagaacaacctggaacagcttacaaaggttcacaaacagctggtacgtgacaatgcagatctgcgttgtgagcttcctaaattggaaaaacgacttagggctacggctgagagagttaaggccctggagggtgcactgaaggaggccaaggagggcgccatgaaggacaagcgccggtaccagcaggaggtggaccgcatcaaggaggccgttcgctacaagagctcgggcaaacggggccattctgcccagattgccaaacccgtccggcctggccactacccagcatcctcacccaccaacccctatggcacccggagccctgagtgcatcagttacaccaacagcctcttccagaactaccagaatctctacctgcaggccacacccagctccacctcagatatgtagtgagtgaccacacgtgtgggttggagtcccacccaaagctccctggaccctagaaggcatagggtgggggcagttattggttgtggcttaattattttcctaaaccctttctcaacttcatgcctatgattagaaggtaggtgtctgccctcccagcctgtggccatgtttgttttcctctgctctctggggatggggagggctgagcagctctatcgctgaggatgagtgtggattagtggtcctcagactagtggagggtgggtgtcagaggctgcctctttcctctgctccatccagctttgcaaactcctgtaccagcagtggagccacatcttctggcggccccttggcttcctaccagaaggccaacatggacaatggaaatgccacagatatcaatgacaataggagtgacctgccgtgtggctatgaggctgaggaccaggccaagcttttccctctccaccaagagacagcagccagctaatctcccacacccacggctgcatacctgcactttcagtttctaagagggactgaggcctcttctcagcatgctgcaaacctgtggtctctgatactaactccctccccaacccctgttgttggactgtactatgtttgatgtcttctcttacttactctgtatctctttgtactctgtatctatatatcaaaagctgctgctatgtctctcttctgtcttattctcaagtatctactgatgtatttagcaatttcaaagcatagtctaccttccttatttggggcaatagggaggagggtgaatgtttcttctttctcatctactcgtctcacactgagtggtgttagtcactgagtagaggtcacagagatgacaaaaggaaaaatgggagctagagggttgtgacccttcatacacacacgcacgcacgcacacaaacatgcacacacgcatgcacacacacaaagccttaagcagaagaatgtcttagcatcatgagacagagaaatagactcttcctccctcctctttcacatatagcacaggggaaggtaaaatggaagggctgctaattgagacatataattttcttcatacacccctcaccttaatcaaaggattcaggtgttacttctgccctacaaagtctgccttttgcctccctcttcctgttttcccctggactgagaaatgggttgctcaagggaccatttccctttttcttcaagctccttttgatattccctgccccagagctcatgaccagaacccagagctgatttaaaatattttgaaaaatggaggaggcagactgctcccagcagcctgtcaatggctgctcatctgtccatggagatggttacaggcaggtgtagtcaaaatgattgattccttgggtttgggggtgaataggctgggaaatttctgagccttttttttttgtcacagtgccctcaagttgaagtgatgagctggatttctttcttgttccatactgggcggcatgctcctcccatctccaccccttggtttgggggcttccagctcattggcaaaatctctctagttgccttcctttcaagctggagcctgacttttccccaatgtacattttttttttctccacaaagagttccttctctaatgtccccatctggtattaagtgcactttaaagaaaggggcagggtggattttcaagaggtgggaagctctaaggcttgaccctgaggggtcttctcccagccattctcagcccatatgcagcaccctccatactgaagaggactgttgttttagtttcagacggtcctttccttccacatggtgctaaggtggttttctaggtaactgcagggatggaggtcactagccattccaaaccaggagagaaagtctggtgtcctgatatccagtcttttctaggaggaagaccaagattctccagcggcagggcagcctatcacccaacttctaagtcaggaaaggaagctgagtgggaatgccagctggtaagcgcaggctgcactggcccatgactccttcaaggaaaagaggccctgctccctttacctgctgagctccttttagcagttagggagaactgcagggggaaaaataccagtggagtgtggaataaatccaaagcagtgatttttaaatgtttttcaaaaacaaatcttacatagaaccccaatataaaaaataaagtaatgcagacctgggcagtttgca

SEQ ID NO: 737121 - DNA, 649 bp, Homo sapiens
cagcacagtgtacagcaggccagccaacttgctcttccctgcgctgtagccagagaccgggcttatgtaggcgtagaagacagcggtgtaatacatgcacaccacggtgaggtgggaagagcaggtggagaaggctttctgcctcccccaggcagtcttcaccttcaggatgctggagacgatgaagccataggacgcgatggtcatcaggaagttcactatgccgtagaaagcatccgccaggacaatcatgacaccgttgacgtaggtggagctgcaggagagaagcagcaggggagggacctcgcagaagaaatggataatgacattggggccacagaaatccaagcgcagcatcagccccgtgtggatggccgtgttgacggcgcagagcagccacacggctgtggccagcccgctgcagaacaccttgctcatcatgctgctgtaatgcagcgggtggcagatggctgcgtaccggtcataggccatgaccgtgaggagcagcagctctgaggatgcagcccacgtgaggaaatagagctgggccatgcagcccccgtaggagatggagctctcttccgacaccagactggccagcgccttgggcatgatggaagaggtgcagataatgtccatagtagccaag

SEQ ID NO: 737122 - DNA, 2828 bp, Homo sapiens
cgtctggctaatttttgtatttttagtagagacggggtttctccatgttggtcaggctggtctcaaactcccgacctcaggtgatccgcccgcctcggcctcccaaagtgctgaaattacaggtgtgagccactgcacccggccaaacttattgttttaatcccagcatttatgtttagaagaattaatttaaatatttcttactatttctctgtcgaatgtttactctcatcttatctcaatgaaagaagtattaaaagtcttatggccccaaaagaaacaagccaaactgtactgtcttaaaagtgattcattctgagcttgaaacgactctgtcagtgtttgacattgtcatttctagtggcatgtatcttaacattcttttcctgcttcaggaatgaaatcacttgtcctgctgagaaaataaggggaaaacaagatagaagtaaaaaacaacacacctgttgaactattttcataaagatggcgttttcactttcaaaagaaatgaaaaccagatggtctatgctaagaagtgaaggcattttgttgtcttcagaactgatcaacatggtcatgatcatcatcaaatttcttgtttccaaaggccactattgtagtacagtctccagcaggattttgtaccatgtgctgcctttggaataaagtattataatgtatcttgtcaccttcatcaacaccaccattaaatatgtaagttcctatatgtgactttttctgggcatatttgcatcaaaaatcacagtccttgcctccttgcttgcttttactccatgaaacgcttcatgaagcagagcatgattgtcaagtgaccagaggatgacatttgtaagtgaacgtgggtatactcacacatgctatactcatactacataacttagtttctccaaatcaactgcagtccgttttatctatgatattcctggcttcgtataatggttttgtaaaatacattaaatacaattaagtccgttattactatgctggaaataactaggtcagacaatgaaaccttagacttttgattggggctgtttggacttgatccaatgataaggtaataaggttgttgcaatttctcaaagcatcttaattctcaaactgaaacatttagcaaatacatggtgaatctggtgtaaacttacaatctaacaaataattttctttcaactcttctctttttctgcctaacaatctatacgaaattgccaatatctaagcaatcaaaagtttctgaaatctctgtttccttagtagaaatgaccttgacaacttattttctgagataccactaggcctactgtctttcatgccattttatataaacattttgatagatactctgtcttttgttttttatctcttctcttttcaagagtcacttgactttttcaaatattcttaaaagatagatttagttattgtattttggtctacaattttggacttggcagtttgttttactaatgcagaattattctttttgtttcaaacatagtttgccatcatctggctactacctaatcatgttgtactagttattgtggaaagaaaattgtacatacatttccttgtcctttgggagatgtctttgagtcaaacccacaagcatgaactctcacctgaaagaaaactggaaaaggagaaactttaaatcagtatgttttgaaaggaagagatttccagactttttaaagcaaattggaatcgttttatttttttgtttgggccttaggcacaatagaagcaaatgttgcaatattaaatataatagggagagttcactgtttcctgggacattgtggtcatgtccttaatccttcattgtgatgccccttcttggagttggcattttgtgacaattcatagagatcttgcagcaatatttggctattggttttattaacttaaaattcaacagaaatggagtaattaaaaaaaaaaaacaaaaaacagagaagaattgcaaaatctgaagtggaatggcacttccttgggtatgtaagggttgtttttagataaaactcccgatttgttcttcctacactttaatagtctcaaattctttctggggaagcaacgtcagtgtctacctccacagtaactatgatataggaaattgtcctttcagtggtttctaggtataacaaacaagccgttaaaaatgagtgaccattttgtaggttacagcctcagcaatctgtgtcatttgaaagcaaatatcctgatatttttaaataaggtgagcagggcaggcaggaaaccaatatttagtacttttgtgattaaacattctagaccaggcttgttgatatgtatgccaatagcctagaatttttggcttagtgtaaaataaaaatgtcttttctattgtggtctgatatccgtttctgtaataagatcagtttgttgtcctctgtgcaccagtggttttgcccttaattttttttggctagcatcaccaagatctgtcatccagagctgctgagaaaaatacatgttgccaaacttttcttaaaattgtgctgccagtggtattttcccagatgtgaaaaataataatctaataaaggattaatatctaataacaataccattgttgaacatgctcatggaatgtccaccttcttctgattcctttttttgtatttgaaaatgcaatggtgtgttccaaattattgttggtgttgttaatgtcatgactctcctttgaatagaataaaataaccccttttgttttgtgttttctactgaattagattttcctctagtcctatgtgaataaaaagctatttgaaataaaagtg

SEQ ID NO: 737123 - DNA, 606 bp, Homo sapiens
ggacgcgtgggtcggacgcgtgggtcgacccacgcgtccgggtgagcagggcaggcaggaaaccaatatttagtacttttgtgattaaacattctagaccaggcttgttgatatgtatgccaatagcctagaatttttggcttagtgtaaaataaaaatgtcttttctattgtggtctgatatccgtttctgtaataagatcagtttgttgtcctctgtgcaccagtggttttgcccttaattttttttggctagcatcaccaagatctgtcatccagagctgctgagaaaaatacatgttgccaaacttttcttaaaattgtgctgccagtggtattttcccagatgtgaaaaataataatctaataaaggattaatatctaataacaataccattgttgaacatgctcatggaatgtccaccttcttctgattcctttttttgtatttgaaaatgcaatggtgtgttccaaattattgttggtgttgttaatgtcatgactctcctttgaatagaataaaataaccccttttgttttgtgttttctactgaattagattttcctctagtcctatgtgaataaaaagctatttgaaataaaagtg

SEQ ID NO: 737124 - DNA, 2807 bp, Homo sapiens
cgtctggctaatttttgtatttttagtagagacggggtttctccatgttggtcaggctggtctcaaactcccgacctcaggtgatccgcccgcctcggcctcccaaagtgctgaaattacaggtgtgagccactgcacccggccaaacttattgttttaatcccagcatttatgtttagaagaattaatttaaatatttcttactatttctctgtcgaatgtttactctcatcttatctcaatgaaagaagtattaaaagtcttatggccccaaaagaaacaagccaaactgtactgtcttaaaagtgattcattctgagcttgaaacgactctgtcagtgtttgacattgtcatttctagtggcatgtatcttaacattcttttcctgcttcaggaatgaaatcacttgtcctgctgagaaaataaggggaaaacaagatagaagtaaaaaacaacacacctgttgaactattttcataaagatggcgttttcactttcaaaagaaatgaaaaccagatggtctatgctaagaagtgaaggcattttgttgtcttcagaactgatcaacatggtcatgatcatcatcaaatttcttgtttccaaaggccactattgtagtacagtctccagcaggattttgtaccatgtgctgcctttggaataaagtattataatgtatcttgtcaccttcatcaacaccaccattaaatatgtaagttcctatatgtgactttttctgggcatatttgcatcaaaaatcacagtccttgcctccttgcttgcttttactccatgaaacgcttcatgaagcagagcatgattgtcaagtgaccagaggatgacatttgtaagtgaacgtgggtatactcacacatgctatactcatactacataacttagtttctccaaatcaactgcagtccgttttatctatgatattcctggcttcgtataatggttttgtaaaatacattaaatacaattaagtccgttattactatgctggaaataactaggtcagacaatgaaaccttagacttttgattggggctgtttggacttgatccaatgataaggtaataaggttgttgcaatttctcaaagcatcttaattctcaaactgaaacatttagcaaatacatggtgaatctggtgtaaacttacaatctaacaaataattttctttcaactcttctctttttctgcctaacaatctatacgaaattgccaatatctaagcaatcaaaagtttctgaaatctctgtttccttagtagaaatgaccttgacaacttattttctgagataccactaggcctactgtctttcatgccattttatataaacattttgatagatactctgtcttttgttttttatctcttctcttttcaagagtcacttgactttttcaaatattcttaaaagatagatttagttattgtattttggtctacaattttggacttggcagtttgttttactaatgcagaattattctttttgtttcaaacatagtttgccatcatctggctactacctaatcatgttgtactagttattgtggaaagaaaattgtacatacatttccttgtcctttgggagatgtctttgagtcaaacccacaagcatgaactctcacctgaaagaaaactggaaaaggagaaactttaaatcagtatgttttgaaaggaagagatttccagactttttaaagcaaattggaatcgttttatttttttgtttgggccttaggcacaatagaagcaaatgttgcaatattaaatataatagggagagttcactgtttcctgggacattgtggtcatgtccttaatccttcattgtgatgccccttcttggagttggcattttgtgacaattcatagagatcttgcagcaatatttggctattggttttattaacttaaaattcaacagaaatggagtaattaaaaaaaaaaaacaaaaaacagagaagaattgcaaaatctgaagtggaatggcacttccttgggtatgtaagggttgtttttagataaaactcccgatttgttcttcctacactttaatagtctcaaattctttctggggaagcaacgtcagtgtctacctccacagtaactatgatataggaaattgtcctttcagtggtttctaggtataacaaacaagccgttaaaaatgagtgaccattttgtaggttacagcctcagcaatctgtgtcatttgaaagcaaatatcctgatatttttaaataaggtgagcagggcaggcaggaaaccaatatttagtacttttgtgattaaacattctagaccaggcttgttgatatgtatgccaatagcctagaatttttggcttagtgtaaaataaaaatgtcttttctattgtggtctgatatccgtttctgtaataagatcagtttgttgtcctctgtgcaccagtggttttgcccttaattttttttggctagcatcaccaagatctgtcatccagagctgctgagaaaaatacatgttgccaaacttttcttaaaattgtgctgccagtggtattttcccagatgtgaaaaataataatctaataaaggattaatatctaataacaataccattgttgaacatgctcatggaatgtccaccttcttctgattcctttttttgtatttgaaaatgcaatggtgtgttccaaattatgactctcctttgaatagaataaaataaccccttttgttttgtgttttctactgaattagattttcctctagtcctatgtgaataaaaagctatttgaaataaaagtg

SEQ ID NO: 737125 - DNA, 837 bp, Homo sapiens
  misc_feature (829)..(829): n is a, c, g, or t
gctttattcatgtgttagtcaagatcgagtgaagtaagaataaaacactctagataaattgaacaggaaaggatcgaatatagggaattacctgcttacacactgttcgagaaatttgggagtcaaagtcaaggatacttttgttggtatcaagaactcagaaagtgcagcaaaggcaagaaatgactacctaatatcttagcaacctagaacacttaatggggtcattctcaggaagatgcttggaagacaccaacaaaacactacatatatattaatgcccaaacgtccgactccagctgctgccagtgaataatgtcttctctttctcttcccctaccaggtttctgtcagtgatggtcattggcagaatatgaatgcaaaccctactgctaaagagagctggggaaatgtttccagactttcagccctagtgatactggggagagttttgaagggcaaggacagaactgaatacaagagatgctgtcctgcttactcagcttaattcctttccttcaaaacaaaaacaaaagcacttgcttctcagaaggattctgttaatctatttatttacaccaaggtattatggaccaacaataccttcaaatgcatttttttcccccaggacaatttgtactttcacaagaacaaagatttgatttaaagaagcgaatccatctaattgacaactggttggaacagggactcactgacaacactgtttcctgaggggtcctcagagatacaaagacattttagacagaaatctactcttcaggattttaatctatttagccttttctttgtatgtgcaaagatatttggntttgttga

SEQ ID NO: 737126 - DNA, 974 bp, Homo sapiens
ccatgtctgtggcattccattgtttgctagaccttgttcgtggaatcacaagtatgattgaaggagagctaggagagcttgaaacagaatgtcaaaccaccactgaagaaggttcttcaccaacacagtcgacagaacagcaggatttacagtcaacatcagaccaaatggataaggaaattgttagtagggctgtttgggaagaaatggtgaatgcctgctggtgtggtcttcttgctgcactctcactccttcttgatgccagcacagatgaagctgccactgagaatattttaaaagctgaactgactatggctgctctttgtggaagactgggccttgtaacttcaagagatgcctttataactgcaatatgcaaaggttccctgcctccccattatgctcttactgtattgaataccaccactgcagctacactttccaacaaatcatattccgttcagggccaaagtgttatgatgataagtccatcaagtgaatctcaccaacaagttgtggcagtgggtcaacctttagcagtccagcctcaagggacagtaatgctgacttccaaaaatatccagtgtatgaggactttacttaacttggcgcattgccatggggctgttcttggaacatcatggcaacttgtcttggcaactcttcagcatcttgtgtggattctgggattaaagcctagtagtggcggtgccttgaaacctgggagagctgtagaaggacccagtacagttctaacaacagcagtgatgacagatttaccagtgatttccaatatactttcaagattgtttgaaagctcacagtatcttgatgatgtatcactgcatcatttaataaatgcactttgctccttgtctctagaagcaatggatatggcctatggaaataataaggaaccatctctttttgctgttgccaaattgttagaaactggtttagttaatatgcaccga

SEQ ID NO: 737127 - DNA, 2566 bp, Homo sapiens
aacagatgagtttcgaactaaatcaaatgagagcaaatggaaacaccacatctaataagaacagtgcagcaatggatgcagagattgtgttaagatctcttatggattttttggacaaaacattaagtctctcagcaaaaatctgtgagaaaacagtcctaaagcgagttttaaaagagttatggaagctagttctcaacaaaatagaaaaacaaattgttcttcctcctctgacagatcaaacaggaccccagatgattttcattgcagctaaagatcttggacaattatccaaactgaaggagcacatgattcgagaggatgccaggggtctgacgccaagacaatgcgctataatggaggtagtcctggctaccatcaagcaatactttcatgcaggaggaaatggcctgaaaaagaatttcttggagaaaagcccagatcttcagtctctgagatatgctctcagtctttatacccaaactactgatgccttgataaagaaattcatagatactcaaacctcacagagtcgttcctccaaagatgccgtgggtcagatatctgttcatgtggacatcactgccaccccaggaacgggagatcataaagtcactgtaaaagtgattgctattaatgacctaaactggcagaccacagcaatgttccgcccctttgtggaagtttgtatactgggacccaaccttggagacaagaagagaaaacaaggcacaaaaacaaaaagcaacacatggtcaccaaagtacaatgaaacatttcagttcattctcggaaaggaaaatcggccaggggcttatgaacttcatctctcagttaaggattactgctttgccagagaagatcgaattatcggaatgacagtcattcagctacagaacatagcagaaaagggaagctatggggcatggtatcctcttctgaaaaatatctctatggatgaaactggtttgactatccttagaatactctctcagaggaccagtgatgatgtggctaaagaatttgtaagacttaaatctgaaacaagatctactgaagagagtgcttgaaacaaacactgcaagctaaatacataactataattgtttgactactgcatgcatgtgcaaatacatgggaatgtttagttcactacatttcaatgtttgccagtactcatgtacgatgtctacaaggtatgtaaaaaacctgctgaacttttataccaattctggtctttgggaaatcagtgttccatgaagtgccaaaattatgatgtaaagtgaaatatcaagaacaccttttaacatgtttattttgtttctttacccatttcacattcattaaacataatttttaaaaactagtcttttgagtttgcccatcagttgtctttgttaaatgagattatattgcccatagatcagaaaacatttattactcaatttccattttatttacttacctcattatagatgtcttacaaatacccttttctaccataactagaaatgcagtcacttctagaaagcatttgtaattttatagtcgcagatattgtgatttttgcatacacattaaaatagaaaaggtgggaaatattttctgctgaccagtttccaacctttctgaaatatcactgtgaagaaatgctgttaaagcaaacttacataaagcaatgctagagtttgttaacaatgtttgatatatattgacaaaactttgttctctaaaactgccaagatcacatcacatttgtaaaaatggtaagttaatgcatttgtcatatagtgttatgtcttggctttaccatatttcattctttaaaaagtcattaatggtttagaaatgggatggaaagtttactgaaaatacctgtaagtaactatattgttaatatcttccctctgacagttatgactctataatcagttcaatgctttatttttaaaaatattcaatgattagtattgaatgcagcattactatatattgtactgatgccaaaagtcatgttttcatccacttagtgaaaaaatagtaaaattaagtcggaagaaattgcttaaaattttgtaatttgtatttataagccccaaatgcatcaaatgcagtaggagaacaatgtaatacagcttggtacctaaaaatatagctaagttggtttttgaatataaaacagtttatgaatatgtgcattttctgtattgttatgatttgactttttagagtctatgccaaaatatatggctgtaaaacagtactttgtaattataacttatggtcataactgttagtggactacttacagaagcagaaacaagagcctgttatgattgtgctttgtgaacaagctgatctaatacgttaagtaaagtacagaagtgcttagtatcatgactgtcagaaccattctgcaactgagtatgaaatcacagaccagtgaggtgagctaattcatgttaaactgttaggccactgctttgttaatgactcctctaaatgcatagtgtgatgcgatcctctggcatatgctttaataaatggatgtatattgagcacatgc

SEQ ID NO: 737128 - DNA, 2232 bp, Homo sapiens
gtaagcagagatggacagtatattcaagaaatctgattaagataacacctaaagaagagaaggtccatccataggttggctgagttcttatttctgaaataatctctggaggaacttttaagaatcctgaaagattcaactattttaaactcttctggaaaagtatatgcatatactcctttgaaacccctatgattgtcgttcctccaaagatgccgtgggtcagatatctgttcatgtggacatcactgccaccccaggaacgggagatcataaagtcactgtaaaagtgattgctattaatgacctaaactggcagaccacagcaatgttccgcccctttgtggaagtttgtatactgggacccaaccttggagacaagaagagaaaacaaggcacaaaaacaaaaagcaacacatggtcaccaaagtacaatgaaacatttcagttcattctcggaaaggaaaatcggccaggggcttatgaacttcatctctcagttaaggattactgctttgccagagaagatcgaattatcggaatgacagtcattcagctacagaacatagcagaaaagggaagctatggggcatggtatcctcttctgaaaaatatctctatggatgaaactggtttgactatccttagaatactctctcagaggaccagtgatgatgtggctaaagaatttgtaagacttaaatctgaaacaagatctactgaagagagtgcttgaaacaaacactgcaagctaaatacataactataattgtttgactactgcatgcatgtgcaaatacatgggaatgtttagttcactacatttcaatgtttgccagtactcatgtacgatgtctacaaggtatgtaaaaaacctgctgaacttttataccaattctggtctttgggaaatcagtgttccatgaagtgccaaaattatgatgtaaagtgaaatatcaagaacaccttttaacatgtttattttgtttctttacccatttcacattcattaaacataatttttaaaaactagtcttttgagtttgcccatcagttgtctttgttaaatgagattatattgcccatagatcagaaaacatttattactcaatttccattttatttacttacctcattatagatgtcttacaaatacccttttctaccataactagaaatgcagtcacttctagaaagcatttgtaattttatagtcgcagatattgtgatttttgcatacacattaaaatagaaaaggtgggaaatattttctgctgaccagtttccaacctttctgaaatatcactgtgaagaaatgctgttaaagcaaacttacataaagcaatgctagagtttgttaacaatgtttgatatatattgacaaaactttgttctctaaaactgccaagatcacatcacatttgtaaaaatggtaagttaatgcatttgtcatatagtgttatgtcttggctttaccatatttcattctttaaaaagtcattaatggtttagaaatgggatggaaagtttactgaaaatacctgtaagtaactatattgttaatatcttccctctgacagttatgactctataatcagttcaatgctttatttttaaaaatattcaatgattagtattgaatgcagcattactatatattgtactgatgccaaaagtcatgttttcatccacttagtgaaaaaatagtaaaattaagtcggaagaaattgcttaaaattttgtaatttgtatttataagccccaaatgcatcaaatgcagtaggagaacaatgtaatacagcttggtacctaaaaatatagctaagttggtttttgaatataaaacagtttatgaatatgtgcattttctgtattgttatgatttgactttttagagtctatgccaaaatatatggctgtaaaacagtactttgtaattataacttatggtcataactgttagtggactacttacagaagcagaaacaagagcctgttatgattgtgctttgtgaacaagctgatctaatacgttaagtaaagtacagaagtgcttagtatcatgactgtcagaaccattctgcaactgagtatgaaatcacagaccagtgaggtgagctaattcatgttaaactgttaggccactgctttgttaatgactcctctaaatgcatagtgtgatgcgatcctctggcatatgctttaataaatggatgtatattgagcacatgc

SEQ ID NO: 737129 - DNA, 2135 bp, Homo sapiens
cggtccggaattctcgggataaattcagcaatttgttcatgatagctgcttggcggggtggataatatcctggtcaaaatgactgagccacatcagtgatgtcgttcctccaaagatgccgtgggtcagatatctgttcatgtggacatcactgccaccccaggaacgggagatcataaagtcactgtaaaagtgattgctattaatgacctaaactggcagaccacagcaatgttccgcccctttgtggaagtttgtatactgggacccaaccttggagacaagaagagaaaacaaggcacaaaaacaaaaagcaacacatggtcaccaaagtacaatgaaacatttcagttcattctcggaaaggaaaatcggccaggggcttatgaacttcatctctcagttaaggattactgctttgccagagaagatcgaattatcggaatgacagtcattcagctacagaacatagcagaaaagggaagctatggggcatggtatcctcttctgaaaaatatctctatggatgaaactggtttgactatccttagaatactctctcagaggaccagtgatgatgtggctaaagaatttgtaagacttaaatctgaaacaagatctactgaagagagtgcttgaaacaaacactgcaagctaaatacataactataattgtttgactactgcatgcatgtgcaaatacatgggaatgtttagttcactacatttcaatgtttgccagtactcatgtacgatgtctacaaggtatgtaaaaaacctgctgaacttttataccaattctggtctttgggaaatcagtgttccatgaagtgccaaaattatgatgtaaagtgaaatatcaagaacaccttttaacatgtttattttgtttctttacccatttcacattcattaaacataatttttaaaaactagtcttttgagtttgcccatcagttgtctttgttaaatgagattatattgcccatagatcagaaaacatttattactcaatttccattttatttacttacctcattatagatgtcttacaaatacccttttctaccataactagaaatgcagtcacttctagaaagcatttgtaattttatagtcgcagatattgtgatttttgcatacacattaaaatagaaaaggtgggaaatattttctgctgaccagtttccaacctttctgaaatatcactgtgaagaaatgctgttaaagcaaacttacataaagcaatgctagagtttgttaacaatgtttgatatatattgacaaaactttgttctctaaaactgccaagatcacatcacatttgtaaaaatggtaagttaatgcatttgtcatatagtgttatgtcttggctttaccatatttcattctttaaaaagtcattaatggtttagaaatgggatggaaagtttactgaaaatacctgtaagtaactatattgttaatatcttccctctgacagttatgactctataatcagttcaatgctttatttttaaaaatattcaatgattagtattgaatgcagcattactatatattgtactgatgccaaaagtcatgttttcatccacttagtgaaaaaatagtaaaattaagtcggaagaaattgcttaaaattttgtaatttgtatttataagccccaaatgcatcaaatgcagtaggagaacaatgtaatacagcttggtacctaaaaatatagctaagttggtttttgaatataaaacagtttatgaatatgtgcattttctgtattgttatgatttgactttttagagtctatgccaaaatatatggctgtaaaacagtactttgtaattataacttatggtcataactgttagtggactacttacagaagcagaaacaagagcctgttatgattgtgctttgtgaacaagctgatctaatacgttaagtaaagtacagaagtgcttagtatcatgactgtcagaaccattctgcaactgagtatgaaatcacagaccagtgaggtgagctaattcatgttaaactgttaggccactgctttgttaatgactcctctaaatgcatagtgtgatgcgatcctctggcatatgctttaataaatggatgtatattgagcacatgc

SEQ ID NO: 737130 - DNA, 2148 bp, Homo sapiens
caacactgttcagtgactcactcacatgctcacaaattcagcaatttgttcatgatagctgcttggcggggtggataatatcctggtcaaaatgactgagccacatcagtgatgtcgttcctccaaagatgccgtgggtcagatatctgttcatgtggacatcactgccaccccaggaacgggagatcataaagtcactgtaaaagtgattgctattaatgacctaaactggcagaccacagcaatgttccgcccctttgtggaagtttgtatactgggacccaaccttggagacaagaagagaaaacaaggcacaaaaacaaaaagcaacacatggtcaccaaagtacaatgaaacatttcagttcattctcggaaaggaaaatcggccaggggcttatgaacttcatctctcagttaaggattactgctttgccagagaagatcgaattatcggaatgacagtcattcagctacagaacatagcagaaaagggaagctatggggcatggtatcctcttctgaaaaatatctctatggatgaaactggtttgactatccttagaatactctctcagaggaccagtgatgatgtggctaaagaatttgtaagacttaaatctgaaacaagatctactgaagagagtgcttgaaacaaacactgcaagctaaatacataactataattgtttgactactgcatgcatgtgcaaatacatgggaatgtttagttcactacatttcaatgtttgccagtactcatgtacgatgtctacaaggtatgtaaaaaacctgctgaacttttataccaattctggtctttgggaaatcagtgttccatgaagtgccaaaattatgatgtaaagtgaaatatcaagaacaccttttaacatgtttattttgtttctttacccatttcacattcattaaacataatttttaaaaactagtcttttgagtttgcccatcagttgtctttgttaaatgagattatattgcccatagatcagaaaacatttattactcaatttccattttatttacttacctcattatagatgtcttacaaatacccttttctaccataactagaaatgcagtcacttctagaaagcatttgtaattttatagtcgcagatattgtgatttttgcatacacattaaaatagaaaaggtgggaaatattttctgctgaccagtttccaacctttctgaaatatcactgtgaagaaatgctgttaaagcaaacttacataaagcaatgctagagtttgttaacaatgtttgatatatattgacaaaactttgttctctaaaactgccaagatcacatcacatttgtaaaaatggtaagttaatgcatttgtcatatagtgttatgtcttggctttaccatatttcattctttaaaaagtcattaatggtttagaaatgggatggaaagtttactgaaaatacctgtaagtaactatattgttaatatcttccctctgacagttatgactctataatcagttcaatgctttatttttaaaaatattcaatgattagtattgaatgcagcattactatatattgtactgatgccaaaagtcatgttttcatccacttagtgaaaaaatagtaaaattaagtcggaagaaattgcttaaaattttgtaatttgtatttataagccccaaatgcatcaaatgcagtaggagaacaatgtaatacagcttggtacctaaaaatatagctaagttggtttttgaatataaaacagtttatgaatatgtgcattttctgtattgttatgatttgactttttagagtctatgccaaaatatatggctgtaaaacagtactttgtaattataacttatggtcataactgttagtggactacttacagaagcagaaacaagagcctgttatgattgtgctttgtgaacaagctgatctaatacgttaagtaaagtacagaagtgcttagtatcatgactgtcagaaccattctgcaactgagtatgaaatcacagaccagtgaggtgagctaattcatgttaaactgttaggccactgctttgttaatgactcctctaaatgcatagtgtgatgcgatcctctggcatatgctttaataaatggatgtatattgagcacatgc

SEQ ID NO: 737131 - DNA, 760 bp, Homo sapiens
tcactaattgaataaatattcttcacagataccatttctctgtctccataatctacaaatgttacattgacatgctccacagactgtatcccactaataagtgctctggaccactgtctgtttactgttcgcttagccaaacaagcaagggtgtttctctggtgaggagcagctgtatttttgcaatagtactgaatatcagacattagagttttaagtccttgtatgttcctggtcagctgacaccagaaatagccagggttttcaacataagacactctgacttctactgtacttccaacttccagctctcctttactagaggagcctggcttaatttccaagcaattctgcataagaggaaaataaacagatgctcttttcactttttcctgcacaactagttcagttgaaccatttgttacaactgttgtgtcactcaaagcttttgaaacagatgtggttttattctctctcttggctttctgctctccttctccagtcttggcaaaaggtattttgttactctccgtagtaaagtggtttgaaacatgccctggggagtgggcatttaccaggatattttcctttgtttcaaattcctgatacttggcatatccagcttgggcaattaccttactaatgttttcttcccctgttcttgattcgtcaagaatctcaataacatattgatgatcctgtttatcaagaatatggatgactaattctttgtggagcacagtctttttaaaaaaggaaa

SEQ ID NO: 737132 - DNA, 2794 bp, Homo sapiens
  misc_feature (103)..(103): n is a, c, g, or t
tacagggcatatcattaacaaattgtttgagaaaacccgaaaagttagtgctcacattaaagatgtgaaagcccgggtggagaagcaacaaattcatgttaanaaagttgaagtcaagcaagaggaaataatgaagaaaaacaaattccgcgtggtaatattccaggagaagtttcggtgtccgacatccctgtctgttgttaaagacagaaacctaactgagaaccaagaagaggatgatgatgatatctttgatcccccagtagatctgtcttcggatgaagaatattatgttgaagaaagcagatctgccaggcttaggaagtcaggcaaggagcacattgataatatcaagaaggcattttccaaagaaaacatgcagaagacacggcagaatcttgacaagaaagtgaacagaattagaactagaatagtgaccccggagaggagagagaggctaaggcagtcaggagagaggctgagacagtcaggggagaggctgagacagtcaggggagaggtttaagaaatctatttctaatgcagctccctcaaaggaagcttttaagatgcgcagcctcaggaaaggtaaggaccgaacagtggctgaaggtgaggaatgtgccagggagatgggtgtggacatcattgccaggagcgagtctctgggccccatcagtgagctctactctgatgagctcagtgaaccagaacacgaggcagccaggccggtgtatcctccccatgaaggaagggaaatccccacccccgagcctttaaaagttacttttaaatctcaggtgaaagtagaggatgatgaatctcttttgttagatttaaagcactcatcgtaaagaggaattaagtatatcctaaatatgaatctcctaatcatgcagttttagtttgaatagtgtagtcgtctacatttctgtgccatgtaggaaaacataaatgtattttttttcttatatttaaaatcttgaagataatataaatattattatcactctttctcatggcagctgtggattttttagttcctttctcttgtccaccagaaaaatagtttcctaggttgggccagttacgtgtttggtaagggcaactttgcggccgtcatttgcaggagaactctaaatattggttaggattaatattgtggccagcctcaaaggggaataactcatgtgtgggttatatcgtccagatgttcagatcaacagatttgttagtaaattagcagtcacaccccttttttgatgctttcacattaaaaaattgaagttttggacttgagcatttggctctagtatcatagctttacttataagaaaaccctgggcaagtcatctgcttattctcatcagtaaaaatggagagggttggcctctgctgcctgcctcagaggactgttgtgatgatcaaaggaaatggtacacattctgggggaacaagaagcacacccagagaaaacaagcctcatcagttcctccaaaacagaatggaaagagttacaccttctgaaaaagccctcagcaccaatcaataaggtcctaggttggagagaaactaaagctggtcttcagaagccttttcacagaatcaagagtgaaaaataagtaaatgtttgggtgaccactttttcatcagactaactatatcttgggttttagttgggtctcaaaatgttccccagccagaccctttctaatttccttttgattaagatctttggtggactatagcactaaatttgtttaagcagtatgaggcataaaattgtgactatgtttctaaagtcggccctgatgcattgggtttggaaatgaccacaaatattcctgttttcctgagtgtacccttcagggtccagctgtccaaaacagtgttgataggagttcatcatagctgctttgggaggaagccagattctccttatcttttagctttagatcgtggaatccaggaagtagaacaatgtctattgttgctaaagaaagaaagaaatgggccgggtgtggtggctcacggggagtaatcccagcactttgcgaggccgaggtgggtgaatcacctgaggtcagaagttcacgaccagcctgaccaacatggcgaaaccctgactctactgaaaatacaaaaattagctgggcatggtgcatgcgcctgtcccagctactcaggaggctgagacaggagaattgcctgaacccaggaggcggaggttgcagtgagccgagattgtgccactgcactcaagcctgggcaaaagagccagactctgtttcaaaaaaaaagaaaaaaagaaaagaaagaaatggtagtactgattctgtacttgaaggatgtttaatgtagcatggtgttgtaatagagaagaaatgatgaaattgttgaatttgaagagttgggacaacgatcagctatcccactttttttctcactttcagatcagtttttggataatcatatggtagttaaaataataagtgtacacatatacacacaggcatacataaatcggctttaaaatatttgactcagttactcagatgtttgggtttgggagtctgattcagcatcatttcctcttcaccttgcatgaatacatgaaatcataatatcgttcatgttgttacctttttatattgaaaactaaagtgtatacaacattggataacactttcaaatgaataattttaaaatgtttttatgacattttggaaagatcttgggtgcctaatcacatattttcttaagaaccataataaatttgaatttaagaaaatgtt

SEQ ID NO: 737133 - DNA, 584 bp, Homo sapiens
ggctcactgcaacctccacctcccaggttcaagatattctcctgcactcaagcctgggcaaaagagccagactctgtttcaaaaaaaaagaaaaaaagaaaagaaagaaatggtagtactgattctgtacttgaaggatgtttaatgtagcatggtgttgtaatagagaagaaatgatgaaattgttgaatttgaagagttgggacaacgatcagctatcccactttttttctcactttcagatcagtttttggataatcatatggtagttaaaataataagtgtacacatatacacacaggcatacataaatcggctttaaaatatttgactcagttactcagatgtttgggtttgggagtctgattcagcatcatttcctcttcaccttgcatgaatacatgaaatcataatatcgttcatgttgttacctttttatattgaaaactaaagtgtatacaacattggataacactttcaaatgaataattttaaaatgtttttatgacattttggaaagatcttgggtgcctaatcacatattttcttaagaaccataataaatttgaatttaagaaaatgtt

SEQ ID NO: 737134 - DNA, 703 bp, Homo sapiens
tcggtaccgaccactcctatagatcagtctaattacatttagtcaggtggatttatttgatcacctcttaaaaatggcatcttcctggcaaactagaattctgttctgtgcatctgctgagttgacattcagtgtctgctggtaatggaaatagagtaattcttagttactgtagtcttcagctaatcatttccttcataaagtttaaactgactggaatttttcagcaacgtggatggatttggactggaagcagaagcccgcatgaccacatggcacattatgatcccctcggacattgaaccagatggtagttacagccaagatattagtgaagggcgtcagcttctcataaaagctgtcaacagagtttggactgaactgatacatagtaagaaacaagtcttagaggaacttttcaaagtaactctacctgtgaatgaaaggggccacgtggacatagctacagcaaggccactcattgaagaagctgccctgaagtgctggcagaatcatttggcccatgaaaagaaatgcataagtcgaggagaagctttagcgcccaccacacagtccaaattatcccgtgtcagcagtggctttggtctttccaagttaacaggatcaagaaggaatcgaaaagaaagtggtcttaataaacacagtctttccacccaggtacttttttagtttcattgctgat

SEQ ID NO: 737135 - DNA, 367 bp, Homo sapiens
gtcagagtctaatgtgattaccgtatctttccacttgattttactaggtgactgaccttgatgatgaagttggatctccagcagaagagtttaaagcgtttgcagcagacacagggatgaacaggagccaatcagagtactgcaatgtgggcaccaagacatatctgaccaatcacccggctaaaaagttcgtttttgacttcatgcgggtcttaatcatagacaacctctgtctcactcctgccagcaagcaaactccactaattgatcttttgttggaggtaaagaaaaagaaacgcatttacatctcttttgcattactttttaaattagaacattagtaaccaaacaagttctataacaagga

SEQ ID NO: 737136 - DNA, 1520 bp, Homo sapiens
gcagtttgatttggattccatttggacattcatctttggagttcctgcctccagcggaactgtggtctcttctatccataacgtatgcacagaagctgtttttttattattgggaatgctccgcagcatgctgacttcaccttggcaatcagaagaagagggatcttggctccgagaatatcctgtgaccctgatgcagttcttcagatatttgtatcacaacgtgccagaccttgcctccatgtggatgagccctgacttcctgtgtgcattagcagccaccgtcttccccttcaatattcgcccttactcagagatggtgactgaccttgatgatgaagttggatctccagcagaagagtttaaagcgtttgcagcagacacagggatgaacaggagccaatcagagtactgcaatgtgggcaccaagacatatctgaccaatcacccggctaaaaagttcgtttttgacttcatgcgggtcttaatcatagacaacctctgtctcactcctgccagcaagcaaactccactaattgatcttttgttggaggcttcccctgaaaggtctacaagaactcagcaaaaagaatttcaaacttacattttggatagcgtgatggaccatttgcttgcagctgatgtgttattaggggaagatgcatctctgcctattaccagtggaggaagctaccaggtattggtgaacaatgtgttttatttcacacagcgtgtggtggacaagctttggcaaggcatgttcaacaaagaatctaaacttcttatagattttataattcaactaattgcacagtcaaagagaagatcacagggattgtcactggatgcagtgtatcattgcctcaataggaccatcttgtaccagttctcacgggcacacaaaaccgttcctcagcaagtagctctgcttgattcactcagggtcctcactgtaaacagaaacttgatcctgggacctgggaaccatgaccaagaattcattagctgtctggcccactgcttgataaatctacatgttggaagcaacgtggatggatttggactggaagcagaagcccgcatgaccacatggcacattatgatcccctcggacattgaaccagatggtagttacagccaagatattagtgaagggcgtcagcttctcataaaagctgtcaacagagtttggactgaactgatacatagtaagaaacaagtcttagaggaacttttcaaagtaactctacctgtgaatgaaaggggccacgtggacatagctacagcaaggccactcattgaagaagctgccctgaagtgctggcagaatcatttggcccatgaaaagaaatgcataagtcgaggagaagctttagcgcccaccacacagtccaaattatcccgtgtcagcagtggctttggtctttccaagttaacaggatcaagaaggaatcgaaaagaaagtggtcttaataaacacagtctttccacccaggtacttttttagtttcattgctgat

SEQ ID NO: 737137 - DNA, 721 bp, Homo sapiens
aagcggaaaataccggcatgcgtgcggatgaggcctctttccctgccgccgccgagtcgcgcggaggcggaggcttgggtgcgttcaagattcaacttcacccgtaacccaccgccatggccgaggaaggcattgctgctggaggtgtaatggacgttaatactgctttacaagaggttctgaagactgccctcatccacgatggcctagcacgtggaattcgcgaagctgccaaagccttagacaagcgccaagcccatctttgtgtgcttgcatccaactgtgatgagcctatgtatgtcaagttggtggaggccctttgtgctgaacaccaaatcaacctaattaaggttgatgacaacaagaaactaggagaatgggtaggcctttgtaaaattgacagagaggggaaaccccgtaaagtggttggttgcagttgtgtagtagttaaggactatggcaaggagtctcaggccaaggatgtcattgaagagtatttcaaatgcaagaaatgaagaaataaatctttggctcacaaaaaaaaaacaaaaaacaaaaaaaaaaacaaaccaattcccctatagggaagtcgtttacaataactggcccgcgttttacaactccggactgggactctgctttaccccaataatcgcttggagtcccctttccagtggggtattacgagaggccgacccattcgcttccaacatgggcgctg

SEQ ID NO: 737138 - DNA, 595 bp, Homo sapiens
gcggccgcctactactactaaatttgcggccgctcgaccggcggagggcaggcttgggtgcgttcaagattcaacttcacccgtaacccaccgccatggccgaggaaggcattgctgctggaggtgtaatggacgttaatactgctttacaagaggttctgaagactgccctcatccacgatggcctagcacgtggaattcgcgaagctgccaaagccttagacaagcgccaagcccatctttgtgtgcttgcatccaactgtgatgagcctatgtatgtcaagttggtggaggccctttgtgctgaacaccaaatcaacctaattaaggttgatgacaacaagaaactaggagaatgggtaggcctttgtaaaattgacagagaggggaaaccccgtaaagtggttggttgcagttgtgtagtagttaaggactatggcaaggagtctcaggccaaggatgtcattgaagagtatttcaaatgcaagaaatgaagaaataaatctttggctcacaaaaaaaaaaacacaacaccctacaactccccatgcacatatccgtatcacctacacaatacaacaccacaacaggcggg

SEQ ID NO: 737139 - DNA, 720 bp, Homo sapiens
  misc_feature (1)..(1): n is a, c, g, or t
nattcggcatgaggccagtgcgcgcggagggcggaggcttgggtgcgttcaagattcaacttcacccgtaacccaccgccatggccgaggaaggcattgctgctggaggtgtaatggacgttaatactgctttacaagaggttctgaagactgccctcatccacgatggcctagcacgtggaattcgcgaagctgccaaagccttagacaagcgccaagcccatctttgtgtgcttgcatccaactgtgatgagcctatgtatgtcaagttggtggaggccctttgtgctgaacaccaaatcaacctaattaaggttgatgacaacaagaaactaggagaatgggtaggcctttgtaaaattgacagagaggggaaaccccgtaaagtggttggttgcagttgtgtagtagttaaggactatggcagcttcgcgaattccacgtgctaggccaaggtcagggacacagatggtgccacccggtgcaggtctctccgctcatcaagctcggccgctactccgccctgttccctcggggtggcctaacggagccacgcgctagaattacctaaaagctcgggcagaagagggagaggaggataggagcagaaagagaaagaagaaagcaggatgaactgaaggggatcgccagagagttggcagaagatgacagcatataaagtgagtgacctggaccatcttggacagcagcggatgatag

SEQ ID NO: 737140 - DNA, 527 bp, Homo sapiens
gtgatgctgcggtcgctctgaggatccgagtccattcttgtcgcgcggaggcggaggcttgggtgcgttcaagattcaacttcacccgtaacccaccgccatggccgaggaaggcattgctgctggaggtgtaatggacgttaatactgctttacaagaggttctgaagactgccctcatccacgatggcctagcacgtggaattcgcgaagctgccaaagccttagacaagcgccaagcccatctttgtgtgcttgcatccaactgtgatgagcctatgtatgtcaagttggtggaggccctttggccctttgtgctgaacaccaaatcaacctaattaaggttgatgacaacaagaaactaggagaatgggtaggcctttgtaaaattgacagagaggggaaaccccgtaaagtggttggttgcagttgtgtagtagctcaggccaaggatgtcattgaagagtatttcaaatgcaagaatggacgtctatgcaagaatggacgtctatgcgagaatggacgtct

SEQ ID NO: 737141 - DNA, 827 bp, Homo sapiens
  misc_feature (553)..(554): n is a, c, g, or t
ggcctgggtggcgattccagacgaggggtcgcgcggaggcggaggcttgggtgcgttcaagattcaacttcacccgtaacccaccgccatggccgaggaaggcattgctgctggaggtgtaatggacgttaatactgctttacaagaggttctgaagactgccctcatccacgatggcctagcacgtggaattcgcgaagctgccaaagccttagacaagcgccaagcccatctttgtgtgcttgcatccaactgtgatgagcctatgtatgtcaagttggtggaggccctttgtgctgaacaccaaatcaacctaattaaggttgatgacaacaagaaactaggagaatgggtaggcctttgtaaaattgacagagaggggaaaccccgtaaagtggttggttgcagttgtgtagtagttaaggactatggcaaggagtctcaggccaaggatgtcattgaagagtatttcaaatgcaagaaatgaagaaataaatctttggctcacaaaaaaaaaaaaaaaaaaaaaaaaacaaaaaaaaaaaaaaaaaanngggggggggggcaaaaaaacccccggggggcgcccatgtatggctacccccggtttttgttgaaaaagggcgccccaagaagggagaccatattatagaagaggcaggggccggagttaaacacacgtcgctgggggaaaagcggcgcggggacttgtggagaagacccacttctggggggtgaatatgtgcacgcaccaagagtatagggcgggagataaattgggtgctgtgtaaccacggtaatttggcggaaaagtcccgggttgtaaa

SEQ ID NO: 737142 - DNA, 725 bp, Homo sapiens
ctggaccggtccggaattctcgggatgtgcggcgctgaaccgcccatgccgcgctcatgaccagaacgagaaacagcgccgccgagtcgcgcggaggcggaggcttgggtgcgttcaagattcaacttcacccgtaacccaccgccatggccgaggaaggcattgctgctggaggtgtaatggacgttaatactgctttacaagaggttctgaagactgccctcatccacgatggcctagcacgtggaattcgcgaagctgccaaagccttagacaagcgccaagcccatctttgtgtgcttgcatccaactgtgatgagcctatgtatgtcaagttggtggaggccctttgtgctgaacaccaaatcaacctaattaaggttgatgacaacaagaaactaggagaatgggtaggcctttgtaaaattgacagagaggggaaaccccgtaaagtggttggttgcagttgtgtagtagttaaggactatggcaaggagtctcaggccaaggatgtcattgaagagtatttcaaatgcaagaaatgaagaaataaatctttggctcacaaaaaaaaaatatttctttctcttcctcctctctttccctcttcttcttctctttcccacccctaattaatgggccgtctttaaacacgcggcatgggaaatccctgggcttccccaacttatcaccttggatctctacccttttccccaggtgggcct

SEQ ID NO: 737143 - DNA, 958 bp, Homo sapiens
  misc_feature (23)..(23): n is a, c, g, or t
  misc_feature (26)..(28): n is a, c, g, or t
  misc_feature (31)..(32): n is a, c, g, or t
  misc_feature (37)..(38): n is a, c, g, or t
  misc_feature (40)..(40): n is a, c, g, or t
  misc_feature (574)..(574): n is a, c, g, or t
gaccggtcggattctccgaatcntcnnncanncgtcnncnacgcgtccggtcgcgcggaggcggaggcttgggtgcgttcaagattcaacttcacccgtaacccaccgccatggccgaggaaggcattgctgctggaggtgtaatggacgttaatactgctttacaagaggttctgaagactgccctcatccacgatggcctagcacgtggaattcgcgaagctgccaaagccttagacaagcgccaagcccatctttgtgtgcttgcatccaactgtgatgagcctatgtatgtcaagttggtggaggccctttgtgctgaacaccaaatcaacctaattaaggttgatgacaacaagaaactaggagaatgggtaggcctttgtaaaattgacagagaggggaaaccccgtaaagtggttggttgcagttgtgtagtagttaaggactatggcaaggagtctcaggccaaggatgtcattgaagagtatttcaaatgcaagaaatgaagaaataaatctttggctcacaaaaaaaaaaaaaaaaaaaaaaaaaaaaaaaaaaacccgggggnttttttgtggggggggggaaaaggggtttggaatgggcctggtgcatagggtttcggacccgttttttggtcaagggggaaatcggggggaccccccaaaagggaggcgaataaattcgaataagccggttaaccgggtaaacgcgcgggaaagcccgcgggatattacccggctaatgaaggggctaatttgtgacaccaagacctcctttgaaaaccatccacgggaggaaccgcgggtcacacaagaatccgcgctacagggggtgtagctgcgcggcaccgaggctcaactctttcacggatagcggctgcagcgcatcacaaactgctagtacggagagggccatctaactgtccaggatatacgcgacaggcacggcg

SEQ ID NO: 737144 - DNA, 849 bp, Homo sapiens
cggacgcgttgggcggacgcgtggcgccgccgagtcgcgcggaggcggaggcttgggtgcgttcaagattcaacttcacccgtaacccaccgccatggccgaggaaggcattgctgctggaggtgtaatggacgttaatactgctttacaagaggttctgaagactgccctcatccacgatggcctagcacgtggaattcgcgaagctgccaaagccttagacaagcgccaagcccatctttgtgtgcttgcatccaactgtgatgagcctatgtatgtcaagttggtggaggccctttgtgctgaacaccaaatcaacctaattaaggttgatgacaacaagaaactaggagaatgggtaggcctttgtaaaattgacagagaggggaaaccccgtaaagtggttggttgcagttgtgtagtagttaaggactatggcaaggagtctcaggccaaggatgtcattgaagagtatttcaaatgcaagaaatgaagaaataaatctttggctcacaaaaaaaaaaaaaaaaaaaaaaaaaaaaaaaaaaaaaaaaaaaaaatgacaaaaaaacaacaccggggggacatatgggggggggggcacaagcgtgacaaaagggccaggcgcaccaagaggacgagaccccacttaggcacacagcgggggaaaccgaggagcgccccaaaaagagagcggaacaaattagagaaacccgaggcacctataatttcctctgcagcacatacaaaaaaaaaaaggaggtaagagggggagtaacaatgggtaaaaagaagggataaaaagaaataatatattagaaataaattatatagtaaatcaaaagaagt

SEQ ID NO: 737145 - DNA, 668 bp, Homo sapiens
  misc_feature (18)..(18): n is a, c, g, or t
gagagagagagagagagngagagagaggtcgcgcggagggcggaggcttgggtgcgttcaagattcaacttcacccgtaacccaccgccatggccgaggaaggcattgctgctggaggtgtaatggacgttaatactgctttacaagaggttctgaagactgccctcatccacgatggcctagcacgtggaattcgcgaagctgccaaagccttagacaagcgccaagcccatctttgtgtgcttgcatccaactgtgatgagcctatgtatgtcaagttggtggaggccctttggccctttgtgctgaacaccaaatcaacctaattaaggttgatgacaacaagaaactaggagaatgggtaggcctttgtaaaattgacagagaggggaaaccccgtaaagtggttggttgcagttgtgtagtagctcaggccaaggatgtcattgaagagtatttcaaatgcaagaaatgaagaaataaatctttggctcacaaaaaaaaaaaaaaaaaaaaaaaaaaaaccccggggcctcattggccggggggggaaacaaggggtcggaaggggcccggggccaaggggtcccggcccgtttcttggccaagggggaaaccggcgggcccccaaagggagcggtataatcggaaaaccgggtaccgcgtaa

SEQ ID NO: 737146 - DNA, 1306 bp, Homo sapiens
  misc_feature (23)..(23): n is a, c, g, or t
  misc_feature (26)..(28): n is a, c, g, or t
  misc_feature (31)..(32): n is a, c, g, or t
  misc_feature (37)..(38): n is a, c, g, or t
  misc_feature (40)..(40): n is a, c, g, or t
gaccggtcggattctccgaatcntcnnncanncgtcnncnacgcgtccggtcgcgcggaggcggaggcttgggtgcgttcaagattcaacttcacccgtaacccaccgccatggccgaggaaggcattgctgctggaggtgtaatggacgttaatactgctttacaagaggttctgaagactgccctcatccacgatggcctagcacgtggaattcgcgaagctgccaaagccttagacaagcgccaagcccatctttgtgtgcttgcatccaactgtgatgagcctatgtatgtcaagttggtggaggccctttgtgctgaacaccaaatcaacctaattaaggttgatgacaacaagaaactaggagaatgggtaggcctttgtaaaattgacagagaggggaaaccccgtaaagtggttggttgcagttgtgtagtagttaaggactatggcaaggagtctcaggccaaggatgtcattgaagagtatttcaaatgcaagaaatgaagaaataaatctttggctcacaaaaaaaaaaaaaaaaaaaaaaaaaaaaaaaaaaaaaaaaaaaaaaaaaaaaaaaaaacaaaaaaaaaaaaaaaaaaaaaaaaaaaaaaaaaaaaaaaaaaaaaaaaaaaaaagaaaaaaaacaaaaaaaaaaaaaaaaaaaaaaaaaaaaaaaagcagggggggggggaaaggacccagggcggggggggcaaaaaccaagaagccacccgggagaggagcgagcggcgagacagggcgggcagaggaacaaggacgaggccgcagcaggcgcacgggagaacgcagcggaaccaacccagcgagcccaaggaggcaacagggacgaacgaagatgggggcacagcacgacgcaaggaaggaggagcgggcgagacggagaacacggaggggtccagcgccgaggacaaggagggcggaacgcacggaagagagacagggggagcggcggggcgaaaggagcggagcagaaagcgggccgggggggggagggaagccggggacgacatgcggggcggcggccgcgccacgcgggagagagagagggggagcagggccgacgaacaagggagtcgccgacgaacgagcgcggcaccggggcggcgacaagcacaccggagcagccgaggcggcggagagaggataggggaggggacagggaaagggcgagcaggcaaccgaccaacgacgaaggcaccaagcagagccggggcaaggaggaaggagaggcggggggagaagcgacgcggggggagcggcgagggaagcaggcaaca

SEQ ID NO: 737147 - DNA, 333 bp, Homo sapiens
aagcggcctggctgtattcactcgccatggccgaggaaggcattgctgctggaggtgtaatggacgttaatactgctttacaagaggttctgaagactgccctcatccacgatggcctagcacgtggaattcgcgaagctgccaaagccttagacaagcgccaagcccatctttgtgtgcttgcatccaactgtgatgagcctatgtatgtcaagttggtggaggccctttgtgctgaacaccaaatcaacctaattaaggttgatgacaacaagaaactaggagaatgggtaggccccggtagcccgaagctgtgagggtcctctagacacc

SEQ ID NO: 737148 - DNA, 443 bp, Homo sapiens
  misc_feature (335)..(336): n is a, c, g, or t
gcggccgcctactactactactactgctcgaattcaagcttctaacgatgtacggggacatggccgaggaaggcattgctgctggaggtgtaatggacgttaatactgctttacaagaggttctgaagactgccctcatccacgatggcctagcacgtggaattcgcgaagctgccaaagccttagacaagcgccaagcccatctttgtgtgcttgcatccaactgtgatgagcctatgtatgtcaagttggtggaggccctttgtgctgaacaccaaatcaacctaattaaggttgatgacaacaagaaactaggagaatgggtaggcctttgnnaaattggcacagaggggaaaaccccggaagagggtgtgttccatttgtaaaaattaaggctcttggcggggggtcagcccggggtgattttagagattttgcgcgtg

SEQ ID NO: 737149 - DNA, 390 bp, Homo sapiens
gatccctcctaacgagctgcatggccgaggaaggcattgctgctggaggtgtaatggacgttaatactgctttacaagaggttctgaagactgccctcatccacgatggcctagcacgtggaattcgcgaagctgccaaagccttagacaagcgccaagcccatctttgtgtgcttgcatccaactgtgatgagcctatgtatgtcaagttggtggaggccctttgtgctgaacaccaaatcaacctaattaaggttgatgacaacaagaaactaggagaatgggtaggccgcgctcgttacggaggcgctcgttacggagggcgtcgttacggaggcgctcgttacggaggcgctcgttacggagggtgtaaggaggcgtcgttacgga

SEQ ID NO: 737150 - DNA, 825 bp, Homo sapiens
catgtggccgagtaccactggaatgctcgatgccaggcatggctccaactcgtgcacacgccaccatgcccagctagtttttgtactttcagtagaaacggggtttcgccatgttggtctctggctggtctggtactcctgacctcgggtcatctgcccccctcgtcttcccaaagtgctgggattacaggagtgagccatcgtgcccggcctttcacatgtttctttaggtatatgaagctggcttacaagaaagctattatggttgggttttggccagaagttttaaaaatgacttacaccaattcagtgtgtcagggacagaggttttactgaagaccagttgtaggttaattgaagatgtatatgctccctagcaggttcttcagactcaagcaattttgtacgcatttatgtgttcagtggattggctgcttatgtttcgcaagtgttagtgcaaagataaccctcctaaaatgcaagaatgatggatttggatctgagttttagctccattttcattgtaatttgaatttcaggcgccaagcccatctttgtgtgcttgcatccaactgtgatgagcctatgtatgtcaagttggtggaggccctttgtgctgaacaccaaatcaacctaattaaggttgatgacaacaagaaactaggagaatgggtaggcctttgtaaaattgacagagaggggaaaccccgtaaagtggttggttgcagttgtgtagtagttaaggactatggcaaggagtctcaggccaaggatgtcattgaagagtatttcaaatgcaagaattaagatacgaattttagggcg

SEQ ID NO: 737151 - DNA, 896 bp, Homo sapiens
gctccgcgcagatttaaaacgggttaaccgggctctttgcgaaattatgtgccgtctccccttaagggggggtcccgcgcgcgattttcaccccgctggtgtgaacagaaaagaccggggtcagcggaaaaactgttatggaacaacggggccacttggacgaagccctttcttttgttccgccgccccacaaattagaagggccccgcacgtcttttttgttatgttcactttgtgatgtgttttgtgttgccagaaaaaggaatatttttttttattcaagtaactgcaaataggaaaccagagagggagccccaggctgggacaaatcatggctacccctcccgcaacagaacagggggaggaggtggcccctacaccctttatggtcgattcgggcccccttgctcactctgctgcagcatcctaggggcagggccccaccttcctgggactggggtagtcggtcacccagcctgccatgccccagcccctcttccccacaaagagtatcttgggggaggggatcgtgggcagaacaggaggcaatgaggatgaacatttggcgctggtagcagcagcaatgacggatgtcgaagaatggaacattgaacaaaaaacaacacaactgtccggaattcgcgaagctgccaaagccttagacaagcgccaagcccatctttgtgtgcttgcatccaactgtgatgagcctatgtatgtcaagttggtggaggccctttgtgctgaacaccaaatcaacctaattaaggttgatgacaacaagaaactaggagaatgggtaggcctttgtaaaattgacagagaggggaaaccccgtaaagtggttggttgcagttgtgtagtagtccttaactactacacaactgcaaccaacc

SEQ ID NO: 737152 - DNA, 400 bp, Homo sapiens
gtcatttgctacagcgtgatagcagccgtatatatgtcaagttggtggaggcccgtgctgaacaccaaatcaacctaattaaggttgatgacaacaagaaactaggagaatgggtaggcctttgtaaaattgacagagaggggaaaccccgtaaagtggttggttgcagttgtgtagtagttaaggtaagtcaccgtttattctagggatgaaggttatgctgggtaatcatataaaaccttgtattgaaataagttgaggatcttataaaaggaaaaaactgattcaacaggtttaaagcattttctgcatttcaggaaaaaaataaaagctgtaatttacaagccagccaatgaatctgggcagagaggggatcctctaggaatcgactatcaccctg

SEQ ID NO: 737153 - DNA, 205 bp, Homo sapiens
acccgggccctactttattcttttgcctaggagaatgggtaggcctttgtaaaattgacagagaggggaaaccccgtaaagtggttggttgcagttgtgtagtagctcaggccaaggatgtcattgaagagtatttcaaatgcaagaaatgaagaaataaatctttggctcacaaaaaaaaaattaatgctgccagtatccggct

SEQ ID NO: 737154 - DNA, 751 bp, Homo sapiens
aagcggaaaataccggcatgcgtgcggatgaggcctctttccctgccgccgccgagtcgcgcggaggcggaggcttgggtgcgttcaagattcaacttcacccgtaacccaccgccatggccgaggaaggcattgctgctggaggtgtaatggacgttaatactgctttacaagaggttctgaagactgccctcatccacgatggcctagcacgtggaattcgcgaagctgccaaagccttagacaagcgccaagcccatctttgtgtgcttgcatccaactgtgatgagcctatgtatgtcaagttggtggaggccctttgtgctgaacaccaaatcaacctaattaaggttgatgacaacaagaaactaggagaatgggtaggcctttgtaaaattgacagagaggggaaaccccgtaaagtggttggttgcagttgtgtagtagttaaggactatggcaaggagtctcaggccaaggatgtcattgaagagtatttcaaatgcaagaaatgaagaaataaatctttggctcacaaaaaaaaaacaaaaaaaaaaaaaaaaaaaaaaaaaaaaaaaaaaaaaaaaacaaaaaaaaaaaaaaacaaaaaaaaaaaaaaaaaaaaaaaaaaaataaaataaaataaattaatttaatcataatcatatttaaaaactctataaaaaaaattattatatatttatttactatacaaatttcctcaattttgcgtttatttataatccgcccg

SEQ ID NO: 737155 - DNA, 858 bp, Homo sapiens
  misc_feature (614)..(614): n is a, c, g, or t
  misc_feature (628)..(628): n is a, c, g, or t
aagcggaaaataccggcatgcgtgcggatgaggcctctttccctgccgccgccgagtcgcgcggaggcggaggcttgggtgcgttcaagattcaacttcacccgtaacccaccgccatggccgaggaaggcattgctgctggaggtgtaatggacgttaatactgctttacaagaggttctgaagactgccctcatccacgatggcctagcacgtggaattcgcgaagctgccaaagccttagacaagcgccaagcccatctttgtgtgcttgcatccaactgtgatgagcctatgtatgtcaagttggtggaggccctttgtgctgaacaccaaatcaacctaattaaggttgatgacaacaagaaactaggagaatgggtaggcctttgtaaaattgacagagaggggaaaccccgtaaagtggttggttgcagttgtgtagtagttaaggactatggcaaggagtctcaggccaaggatgtcattgaagagtatttcaaatgcaagaaatgaagaaataaatctttggctcacaaaaaaaaaacaaaaaaaaaaaaaaaaaaaaaaaaaaaaaaaaaaaaaaaaacaaaaggggggggggggaaaaaaatntcccgggggggggnacagatgttatggagacacccagatgttgctttgaacgaggcggccgcatatagggaggtattataaaggagagagggggcgcgtataaacaggcgcgatgggaaaaagctctgggggatttttgaaggagcccatactgggggggggaaaaggggcaaactaccgagaatagaggcgggaataaactggggtagggtagccgggcatttgcggaaatgccggtttgaat

SEQ ID NO: 737156 - DNA, 599 bp, Homo sapiens
aagcggaaaataccggcatgcgtgcggatgaggcctctttccctgccgccgccgagtcgcgcggaggcggaggcttgggtgcgttcaagattcaacttcacccgtaacccaccgccatggccgaggaaggcattgctgctggaggtgtaatggacgttaatactgctttacaagaggttctgaagactgccctcatccacgatggcctagcacgtggaattcgcgaagctgccaaagccttagacaagcgccaagcccatctttgtgtgcttgcatccaactgtgatgagcctatgtatgtcaagttggtggaggccctttgtgctgaacaccaaatcaacctaattaaggttgatgacaacaagaaactaggagaatgggtaggcctttgtaaaattgacagagaggggaaaccccgtaaagtggttggttgcagttgtgtagtagttaaggactatggcaaggagtctcaggccaaggatgtcattgaagagtatttcaaatgcaagaaatgaagaaataaatctttggctcacaaaaaaaaaacaaaaaaaaaaaaaaaaaagggggggggggcaaaaaatttccctgggggggcc

SEQ ID NO: 737157 - DNA, 580 bp, Homo sapiens
aagcggaaaataccggcatgcgtgcggatgaggcctctttccctgccgccgccgagtcgcgcggaggcggaggcttgggtgcgttcaagattcaacttcacccgtaacccaccgccatggccgaggaaggcattgctgctggaggtgtaatggacgttaatactgctttacaagaggttctgaagactgccctcatccacgatggcctagcacgtggaattcgcgaagctgccaaagccttagacaagcgccaagcccatctttgtgtgcttgcatccaactgtgatgagcctatgtatgtcaagttggtggaggccctttgtgctgaacaccaaatcaacctaattaaggttgatgacaacaagaaactaggagaatgggtaggcctttgtaaaattgacagagaggggaaaccccgtaaagtggttggttgcagttgtgtagtagttaaggactatggcaaggagtctcaggccaaggatgtcattgaagagtatttcaaatgcaagaaatgaagaaataaatctttggctcacaaaaaaaaaaagtcgacgcggccgcgaatttagtagtagtaggc

SEQ ID NO: 737158 - DNA, 1623 bp, Homo sapiens
  misc_feature (1489)..(1489): n is a, c, g, or t
aagcggaaaataccggcatgcgtgcggatgaggcctctttccctgccgccgccgagtcgcgcggaggcggaggcttgggtgcgttcaagattcaacttcacccgtaacccaccgccatggccgaggaaggcattgctgctggaggtgtaatggacgttaatactgctttacaagaggttctgaagactgccctcatccacgatggcctagcacgtggaattcgcgaagctgccaaagccttagacaagcgccaagcccatctttgtgtgcttgcatccaactgtgatgagcctatgtatgtcaagttggtggaggccctttgtgctgaacaccaaatcaacctaattaaggttgatgacaacaagaaactaggagaatgggtaggcctttgtaaaattgacagagaggggaaaccccgtaaagtggttggttgcagttgtgtagtagttaaggactatggcaaggagtctcaggccaaggatgtcattgaagagtatttcaaatgcaagaaatgaagaaataaatctttggctcacaaaaaaaaaaaaaaaaaaaaaaaaaaaaaaaaaaacaaaaaaaaaaaaaaaaaaaaaaaaaaaaaaaaaaaaaaaaacaaaaaaaaaaaaaaacaaaaaaaagggggggcccctcaaaaaaatcccccggggggcccaagttaacgcgtacccattttttttggaaaagggggcccctaaagggagcccatttaaaagtaaggcccgggcccccttttaaccactccgggacgggaaaaactgctacttgggaatttttgggaagaaaccttattctgggggggggaaaatttgggaaaaattccctacaaagattaaaagctcaagggaaaataaaaaatttttaagggaaaaaggggtaaaacaaatcgcatttgctggcggcttaaaatttttgctcttcgggatttgatttttgaaaattttatccccgggacccaagggcatcccattggtggggggaatttttaaactccccagtccccagggcctcttttttggggccccctcatccccccaaaaaccgggtcctggtactaaaaacacgcccattcccacatttgttaaaaagggtttacccctcgcttaaaaaaaaaatttcaaaaaaaatctcccccctgaaccccctggaaccattataaaaggaatgcggccccctggggggtcccggctaaacccctggcttaatattgcagctcttaaaaaagaggggcttccacaatattaaggtgcaaatttgctcctcctccaaatttttctccgcaaaataaaaagagcactttttttcttccccccgtgcaatctttcaaatattggggcggttttttgtccccccaaaaaatccctcttacaaggggcattcttttttatatcaacattgtccttggtgatataacccaaaccccgtgcggcaattatatcggggcaaacacccggccccaaaaactctgccncgtcgccgcggctaacaaaacagcaggcggattctaccccacccgaaactgtcgggcacgacgcggtctttccgctatcccaccccccccttcttagaacgcgcccctacctacccctcccctatactccgcgc

SEQ ID NO: 737159 - DNA, 732 bp, Homo sapiens
  misc_feature (623)..(624): n is a, c, g, or t
  misc_feature (627)..(627): n is a, c, g, or t
  misc_feature (629)..(629): n is a, c, g, or t
  misc_feature (641)..(641): n is a, c, g, or t
  misc_feature (644)..(644): n is a, c, g, or t
aagcggaaaataccggcatgcgtgcggatgaggcctctttccctgccgccgccgagtcgcgcggaggcggaggcttgggtgcgttcaagattcaacttcacccgtaacccaccgccatggccgaggaaggcattgctgctggaggtgtaatggacgttaatactgctttacaagaggttctgaagactgccctcatccacgatggcctagcacgtggaattcgcgaagctgccaaagccttagacaagcgccaagcccatctttgtgtgcttgcatccaactgtgatgagcctatgtatgtcaagttggtggaggccctttgtgctgaacaccaaatcaacctaattaaggttgatgacaacaagaaactaggagaatgggtaggcctttgtaaaattgacagagaggggaaaccccgtaaagtggttggttgcagttgtgtagtagttaaggactatggcaaggagtctcaggccaaggatgtcattgaagagtatttcaaatgcaagaaatgaagaaataaatctttggctcacaaaaaaaaaaaaaaaaaaaaaaaaaaaaaaaaaaaaaaaaaacacggggggtcatctataggggggggggggaaaaagggggttatnnaanangggcattgtggncanaagttgttttctttaggccccttttttttggacaaaggggggggaatagggggggccccatagaggaggggcataaatttcggaagct

SEQ ID NO: 737160 - DNA, 1312 bp, Homo sapiens
aagcggaaaataccggcatgcgtgcggatgaggcctctttccctgccgccgccgagtcgcgcggaggcggaggcttgggtgcgttcaagattcaacttcacccgtaacccaccgccatggccgaggaaggcattgctgctggaggtgtaatggacgttaatactgctttacaagaggttctgaagactgccctcatccacgatggcctagcacgtggaattcgcgaagctgccaaagccttagacaagcgccaagcccatctttgtgtgcttgcatccaactgtgatgagcctatgtatgtcaagttggtggaggccctttgtgctgaacaccaaatcaacctaattaaggttgatgacaacaagaaactaggagaatgggtaggcctttgtaaaattgacagagaggggaaaccccgtaaagtggttggttgcagttgtgtagtagttaaggactatggcaaggagtctcaggccaaggatgtcattgaagagtatttcaaatgcaagaaatgaagaaataaatctttggctcacaaaaaaaaaaaaaaaaaaaaaaaaaaaaaaaaaaaaaaaaaaaaaaaaaaaaaaaaaacaaaaaaaaaaaaaaaaaaaaaaaaaaaaaaaaaaaaaaaaaaaaaaaaaaaaaagaaaaaaaacaaaaaaaaaaaaaaaaaaaaaaaaaaaaaaaagcagggggggggggaaaggacccagggcggggggggcaaaaaccaagaagccacccgggagaggagcgagcggcgagacagggcgggcagaggaacaaggacgaggccgcagcaggcgcacgggagaacgcagcggaaccaacccagcgagcccaaggaggcaacagggacgaacgaagatgggggcacagcacgacgcaaggaaggaggagcgggcgagacggagaacacggaggggtccagcgccgaggacaaggagggcggaacgcacggaagagagacagggggagcggcggggcgaaaggagcggagcagaaagcgggccgggggggggagggaagccggggacgacatgcggggcggcggccgcgccacgcgggagagagagagggggagcagggccgacgaacaagggagtcgccgacgaacgagcgcggcaccggggcggcgacaagcacaccggagcagccgaggcggcggagagaggataggggaggggacagggaaagggcgagcaggcaaccgaccaacgacgaaggcaccaagcagagccggggcaaggaggaaggagaggcggggggagaagcgacgcggggggagcggcgagggaagcaggcaaca

SEQ ID NO: 737161 - DNA, 1294 bp, Homo sapiens
aagcggaaaataccggcatgcgtgcggatgaggcctctttccctgccgccgccgagtcgcgcggaggcggaggcttgggtgcgttcaagattcaacttcacccgtaacccaccgccatggccgaggaaggcattgctgctggaggtgtaatggacgttaatactgctttacaagaggttctgaagactgccctcatccacgatggcctagcacgtggaattcgcgaagctgccaaagccttagacaagcgccaagcccatctttgtgtgcttgcatccaactgtgatgagcctatgtatgtcaagttggtggaggccctttgtgctgaacaccaaatcaacctaattaaggttgatgacaacaagaaactaggagaatgggtaggcctttgtaaaattgacagagaggggaaaccccgtaaagtggttggttgcagttgtgtagtagttaaggactatggcaaggagtctcaggccaaggatgtcattgaagagtatttcaaatgcaagaaatgaagaaataaatctttggctcacaaaaaaaaaaaaaaaaaaaaaaaaaaaaaaaaaaaaaaaaaaaacaaaaaaaaaaaaaaaaaaaaaaaaaaaaaaaaaaaaaaaaaaaaaaaaaagaaaaaaaacaaaaaaaaaaaaaaaaaaaaaaaaaaaaaaaagcagggggggggggaaaggacccagggcggggggggcaaaaaccaagaagccacccgggagaggagcgagcggcgagacagggcgggcagaggaacaaggacgaggccgcagcaggcgcacgggagaacgcagcggaaccaacccagcgagcccaaggaggcaacagggacgaacgaagatgggggcacagcacgacgcaaggaaggaggagcgggcgagacggagaacacggaggggtccagcgccgaggacaaggagggcggaacgcacggaagagagacagggggagcggcggggcgaaaggagcggagcagaaagcgggccgggggggggagggaagccggggacgacatgcggggcggcggccgcgccacgcgggagagagagagggggagcagggccgacgaacaagggagtcgccgacgaacgagcgcggcaccggggcggcgacaagcacaccggagcagccgaggcggcggagagaggataggggaggggacagggaaagggcgagcaggcaaccgaccaacgacgaaggcaccaagcagagccggggcaaggaggaaggagaggcggggggagaagcgacgcggggggagcggcgagggaagcaggcaaca

SEQ ID NO: 737162 - DNA, 736 bp, Homo sapiens
  misc_feature (590)..(590): n is a, c, g, or t
aagcggaaaataccggcatgcgtgcggatgaggcctctttccctgccgccgccgagtcgcgcggaggcggaggcttgggtgcgttcaagattcaacttcacccgtaacccaccgccatggccgaggaaggcattgctgctggaggtgtaatggacgttaatactgctttacaagaggttctgaagactgccctcatccacgatggcctagcacgtggaattcgcgaagctgccaaagccttagacaagcgccaagcccatctttgtgtgcttgcatccaactgtgatgagcctatgtatgtcaagttggtggaggccctttgtgctgaacaccaaatcaacctaattaaggttgatgacaacaagaaactaggagaatgggtaggcctttgtaaaattgacagagaggggaaaccccgtaaagtggttggttgcagttgtgtagtagttaaggactatggcaaggagtctcaggccaaggatgtcattgaagagtatttcaaatgcaagaaatgaagaaataaatctttggctcacaaaaaaaaaaaaaaaaaaaaaaaaaaaaaaaaaaaaaaaaaaaaccccgggggnttttttgtggggggggggaaaagggggagaaaaaagggcgccgggcacaagaggaccggggcccagtttccggacaccacggggaaacatcagaggagccccataggaggcgggacataatcgcgaaagcccggtacccggataag

SEQ ID NO: 737163 - DNA, 576 bp, Homo sapiens
aagcggaaaataccggcatgcgtgcggatgaggcctctttccctgccgccgccgagtcgcgcggaggcggaggcttgggtgcgttcaagattcaacttcacccgtaacccaccgccatggccgaggaaggcattgctgctggaggtgtaatggacgttaatactgctttacaagaggttctgaagactgccctcatccacgatggcctagcacgtggaattcgcgaagctgccaaagccttagacaagcgccaagcccatctttgtgtgcttgcatccaactgtgatgagcctatgtatgtcaagttggtggaggccctttgtgctgaacaccaaatcaacctaattaaggttgatgacaacaagaaactaggagaatgggtaggcctttgtaaaattgacagagaggggaaaccccgtaaagtggttggttgcagttgtgtagtagttaaggactatggcaaggagtctcaggccaaggatgtcattgaagagtatttcaaatgcaagaaatgaagaaataaatctttggctcacaaaaaaaaaattctactgcattctatgtgtcggtaccggc

SEQ ID NO: 737164 - DNA, 557 bp, Homo sapiens
  misc_feature (533)..(533): n is a, c, g, or t
aagcggaaaataccggcatgcgtgcggatgaggcctctttccctgccgccgccgagtcgcgcggaggcggaggcttgggtgcgttcaagattcaacttcacccgtaacccaccgccatggccgaggaaggcattgctgctggaggtgtaatggacgttaatactgctttacaagaggttctgaagactgccctcatccacgatggcctagcacgtggaattcgcgaagctgccaaagccttagacaagcgccaagcccatctttgtgtgcttgcatccaactgtgatgagcctatgtatgtcaagttggtggaggccctttgtgctgaacaccaaatcaacctaattaaggttgatgacaacaagaaactaggagaatgggtaggcctttgtaaaattgacagagaggggaaaccccgtaaagtggttggttgcagttgtgtagtagttaaggactatggcaaggagtctcaggccaaggatgtcattgaagagtatttcttcatttcttgcatttgaagtcgacgggccgcnaatttagtagtagtaggcggccgc

SEQ ID NO: 737165 - DNA, 492 bp, Homo sapiens
aagcggaaaataccggcatgcgtgcggatgaggcctctttccctgccgccgccgagtcgcgcggaggcggaggcttgggtgcgttcaagattcaacttcacccgtaacccaccgccatggccgaggaaggcattgctgctggaggtgtaatggacgttaatactgctttacaagaggttctgaagactgccctcatccacgatggcctagcacgtggaattcgcgaagctgccaaagccttagacaagcgccaagcccatctttgtgtgcttgcatccaactgtgatgagcctatgtatgtcaagttggtggaggccctttgtgctgaacaccaaatcaacctaattaaggttgatgacaacaagaaactaggagaatgggtaggcctttgtaaaattgacagagaggggaaaccccgtaaagtggttggttgcagttgtgtagtagttaaggactatggcaaggagtgctgacgcttggtaccgagctcga

SEQ ID NO: 737166 - DNA, 2041 bp, Homo sapiens
  misc_feature (1907)..(1907): n is a, c, g, or t
aagcggaaaataccggcatgcgtgcggatgaggcctctttccctgccgccgccgagtcgcgcggaggcggaggcttgggtgcgttcaagattcaacttcacccgtaacccaccgccatggccgaggaaggcattgctgctggaggtgtaatggacgttaatactgctttacaagaggttctgaagactgccctcatccacgatggcctagcacgtggaattcgcgaagctgccaaagccttagacaagcgccaagcccatctttgtgtgcttgcatccaactgtgatgagcctatgtatgtcaagttggtggaggccctttgtgctgaacaccaaatcaacctaattaaggttgatgacaacaagaaactaggagaatgggtaggcctttgtaaaattgacagagaggggaaaccccgtaaagtggttggttgcagttgtgtagtagttaaggtaagtcaccgtttattctagggatgaaggttatgctgggtaatcatataaaaccttgtattgaaataagttgaggatcttataaaaggaaaaaactgattcaacaggtttaaagcattttctgcatttcaggaaaaaaataaaagctgtaatttacaagccagccaatgaatctgcttacctgattgtgtttgtgcagacatactttaaaaactggcaatagtaaagccatgttacgagccttaaggacattgaagtcgttaaggtccctgagaatggctataacaaatcttagtgatgggaaacatttttataagacatagctaattgttgaagctccactataattgatactaatagcttggtgaaattcctaaatattaacaagaaattgcatgcgtgttttgttttttttaaggactatggcaaggagtctcaggccaaggatgtcattgaagagtatttcaaatgcaagaaatgaagaaataaatctttggctcacaaaaaaaaaaaaaaaaaaaaaaaaaaaaaaaaaaacaaaaaaaaaaaaaaaaaaaaaaaaaaaaaaaaaaaaaaaaacaaaaaaaaaaaaaaacaaaaaaaagggggggcccctcaaaaaaatcccccggggggcccaagttaacgcgtacccattttttttggaaaagggggcccctaaagggagcccatttaaaagtaaggcccgggcccccttttaaccactccgggacgggaaaaactgctacttgggaatttttgggaagaaaccttattctgggggggggaaaatttgggaaaaattccctacaaagattaaaagctcaagggaaaataaaaaatttttaagggaaaaaggggtaaaacaaatcgcatttgctggcggcttaaaatttttgctcttcgggatttgatttttgaaaattttatccccgggacccaagggcatcccattggtggggggaatttttaaactccccagtccccagggcctcttttttggggccccctcatccccccaaaaaccgggtcctggtactaaaaacacgcccattcccacatttgttaaaaagggtttacccctcgcttaaaaaaaaaatttcaaaaaaaatctcccccctgaaccccctggaaccattataaaaggaatgcggccccctggggggtcccggctaaacccctggcttaatattgcagctcttaaaaaagaggggcttccacaatattaaggtgcaaatttgctcctcctccaaatttttctccgcaaaataaaaagagcactttttttcttccccccgtgcaatctttcaaatattggggcggttttttgtccccccaaaaaatccctcttacaaggggcattcttttttatatcaacattgtccttggtgatataacccaaaccccgtgcggcaattatatcggggcaaacacccggccccaaaaactctgccncgtcgccgcggctaacaaaacagcaggcggattctaccccacccgaaactgtcgggcacgacgcggtctttccgctatcccaccccccccttcttagaacgcgcccctacctacccctcccctatactccgcgc

SEQ ID NO: 737167 - DNA, 503 bp, Homo sapiens
ccactacactgttcccctcctttccgattcttgtttaaagagaaaccttgtttaattcttcttccagtatattttccagcttgtacactgcatattgggaaagtttggtgtgagtctccctctatcttttgttctacttgctgctccagtggggaaagttaactgtgattttatttcccgtttatttgtaaatgtccatctaatttatatgactttgaatgtaacttaacgtcttttcccactcttcctttttaattaaggatacagaaattgttgatttagattcagacggtcctggtacttcatctggaagaagggtgagtaaataagtgaactgctgaggagatatgttttcaggtttcctgtgtcagtgatccctaagaccaaccccatatttggagaattgctagaaggattcttgcaactaagtatattaggtatgctcattgataatatttattagagtgatgcagtaagggtacccagttgagtcatgggtgaaa

SEQ ID NO: 737168 - DNA, 500 bp, Homo sapiens; identical to SEQ ID NO: 219780

SEQ ID NO: 737169 - DNA, 2408 bp, Homo sapiens
gtctgtaatgatgatgcttaatattggtctaggcatgtttatacctttttttaaaatataaaactagttaagactatataatttctgccttctcagatctatagcatgatgctgcgattatctgccttatttgaaagtcatatcaaaaatatcatctctgaatataagtcagcaatccagagtcagaagaggagaaggccacggtacagaaaacgtctaagaagcagcagcagttcattatctagtagtggagcacctaggtatcattacattgatgcaacattttttgttctcaaagcattttgtatgtattacctaatttgtgaaagtttatgaataatttggggagatcccaagaggtctttttttgtttgtttcctaaactcttatgcctatgtagagttagtaatcaaaagtactatttatgtgggttttactatcccagaaactttttttaaattttaatgattgaagtttcactgtcaaattatctatttcatgaattttagggcatttcttctttggccagctaatacctgaccttgatacctctttgtatcatactgtctatcataatatgttgctaacagaaaaaaaaaaatgctcgttgttacatatttttacttctagtccaaaagggaagcagaaacaaatgaagttgcagcctaaaaatgaccagaatacctcagtatctcatgccaggactagctctcctttctcatctcctgtttcagatgctgctgaagggctttcactatatctacttgatgatgagccagatgggccattttcttcatcgagcttcggtggatatagccgaagtggaaatagccatgacccagggaaagccaaatcatttcggaatagagttttgccagttaaacaagatcactcccttgatggaccccttacaaatggtgatggcagagagccccggacaggaatcaagagaaaactacttagtgcatcagaagaagatgaaaacatgggaggagaagataaagagaaaaaagaaacaaaagagaaatctcatttatccacctcagagagtggagagttaggatccagtttaagttctgaaagtacctgtggttctgactctgactctgaatcaacttccagaacagatcaagattacgtagatggagaccatgattatagcaaattcatacaaaccagacctaaaagaaaactcagaaagcaacatggcaatggaaaaagaaattggaagaccagaggcacaggaggaagaggcagatggggaagatggggtagatggagtagaggaggcagaggaagaggaggcaggggacgagggagtcgaggaagaggtggaggtggcactagggggaggggaagagggagaggaggaagaggtgcttctagaggagctaccagagccaaacgagcacgtattgcagatgatgaatttgataccatgttttcaggacgtttcagtagactgcctcgaattaaaacaagaaaccaaggcaggaggactgttttatataatgatgattctgataatgacaattttgtgtccactgaggatcctctgaatcttggtacatccagatcaggcagagtgcgtaaaatgacagaaaaagccagggttagccatctcatgggatggaattattaacagttaataaatttagaataacttaaaaaattcaatggccttctactgcagggaatttaccaggaaatctacaaagcaagttgtgtggggacttctgcttcctttcacattggtgcttttccatttatgccagtatacatttgtttcaagacttttgatctccacacttcatttgttcaaataagccttactcattaggccttaaattaaaagaaattctgcccacacacacacaaacacatacacacacatacacacacacagacacacacgaaacacaacacagacactacagatttactacattaaaggagcattcagcttcttaagagtagcatgacatttttatctcaatagaatagccctcttttgcttttgtatcacagaagtatagcaccttcttacagagttttatatagtttgtttttgccattttgattcctatacccagtaataataacttttgcacaatacaccaatcctaaaggcagctattaaatgtttacagtttctatattgtaagagcgatctggattattttactcttcccaggccaaactttcatgacttgtactgaactgaagtatatatttatactacagttttttggggggtggggggatcttgatatgcttttcattgatttgcataattcacgttaaaggtgagaaagggttggtgccttgtaaatatgtagcagatcttcgtggtgtgttctgatgtgtgcattaactttattaaaaaagaatacttgaggtatcaatct

SEQ ID NO: 737170 - DNA, 2946 bp, Homo sapiens
  misc_feature (2937)..(2938): n is a, c, g, or t
  misc_feature (2940)..(2940): n is a, c, g, or t
  misc_feature (2942)..(2945): n is a, c, g, or t
ttctttccgtgttacagtgttcactgggacaataatgagagagaaaagatgagcccatgggatatggagccaattccagaaggaactgcctttccagatgaagttggtgctggtgttcctgtctcccaggaagaattgactgctttgctatacaaaccccaggaaggagagtggggggctcattccagagacgaagaatgtgaacgggttattcagggcatcaaccaccttctttccctggattttgccagcccttttgctgttccagtggatctcagtgcctaccccttgtattgtactgtagttgcttatccaactgacctcaataccatcaggcggagacttgaaaatcgcttttacaggagaatatcagcattaatgtgggaggtacgctatattgaacataatgccaggactttcaatgagccagacagtcctatagttaaagcagctaaaattgtaactgatgtcttacttcgatttattggggatcagagctgtactgatatactggatacttataataaaattaaagcagaagaacgaaacagtactgatgcagaggaggatacagaaattgttgatttagattcagacggtcctggtacttcatctggaagaagggtcaaatgccgaggcagaagacagtctttaaagtgtaatcctgatgcttggaaaaaacaatgcaaggaactattgagcctcatttatgaacgtgaagactcggagccatttcgacagccagctgatcttctttcttacccaggtcatcaggagcaagagggagaatcctcagagtctgttgttccagaaagacaacaagattcatctctttctgaggattatcaagatgttatagatactcctgtggacttcagcactgtgaaagaaactttggaagcaggaaactatggtagtcctctggaattttataaggatgttcgccaaatattcaacaactccaaagcttatacctctaataaaaagtcaaggatctatagcatgatgctgcgattatctgccttatttgaaagtcatatcaaaaatatcatctctgaatataagtcagcaatccagagtcagaagaggagaaggccacggtacagaaaacgtctaagaagcagcagcagttcattatctagtagtggagcacctagtccaaaagggaagcagaaacaaatgaagttgcagcctaaaaatgaccagaatacctcagtatctcatgccaggactagctctcctttctcatctcctgtttcagatgctgctgaagggctttcactatatctacttgatgatgagccagatgggccattttcttcatcgagcttcggtggatatagccgaagtggaaatagccatgacccagggaaagccaaatcatttcggaatagagttttgccagttaaacaagatcactcccttgatggaccccttacaaatggtgatggcagagagccccggacaggaatcaagagaaaactacttagtgcatcagaagaagatgaaaacatgggaggagaagataaagagaaaaaagaaacaaaagagaaatctcatttatccacctcagagagtggagagttaggatccagtttaagttctgaaagtacctgtggttctgactctgactctgaatcaacttccagaacagatcaagattacgtagatggagaccatgattatagcaaattcatacaaaccagacctaaaagaaaactcagaaagcaacatggcaatggaaaaagaaattggaagaccagaggcacaggaggaagaggcagatggggaagatggggtagatggagtagaggaggcagaggaagaggaggcaggggacgagggagtcgaggaagaggtggaggtggcactagggggaggggaagagggagaggaggaagaggtgcttctagaggagctaccagagccaaacgagcacgtattgcagatgatgaatttgataccatgttttcaggacgtttcagtagactgcctcgaattaaaacaagaaaccaaggcaggaggactgttttatataatgatgattctgataatgacaattttgtgtccactgaggatcctctgaatcttggtacatccagatcaggcagagtgcgtaaaatgacagaaaaagccagggttagccatctcatgggatggaattattaacagttaataaatttagaataacttaaaaaattcaatggccttctactgcagggaatttaccaggaaatctacaaagcaagttgtgtggggacttctgcttcctttcacattggtgcttttccatttatgccagtatacatttgtttcaagacttttgatctccacacttcatttgttcaaataagccttactcattaggccttaaattaaaagaaattctgcccacacacacacaaacacatacacacacatacacacacacagacacacacgaaacacaacacagacactacagatttactacattaaaggagcattcagcttcttaagagtagcatgacatttttatctcaatagaatagccctcttttgcttttgtatcacagaagtatagcaccttcttacagagttttatatagtttgtttttgccattttgattcctatacccagtaataataacttttgcacaatacaccaatcctaaaggcagctattaaatgtttacagtttctatattgtaagagcgatctggattattttactcttcccaggccaaactttcatgacttgtactgaactgaagtatatatttatactacagttttttggggggtggggggatcttgatatgcttttcattgatttgcataattcacgttaaaggtgagaaagggttggtgccttgtaaatatgtagcagatcttcgtggtgtgttctgatgtgtgcattaactttattaaaaaagaatacttgaggtatcaatctcnntngnnnng

SEQ ID NO: 737171 - DNA, 2197 bp, Homo sapiens
ttttttttgaaaagcagttgtgtttaatcaccaaaattattctgaccctaatggaaaggaaataatctaaatttaaaaaggctggggatttttctcctacatttattttagaggcaagtagaggtgaacaaagaaaatggaatccctaagctcagagctcaggccctggtaaaggctccagagagcagaagcccctctcctcttgcccttatgtgaaacgttgctgccctcaggataccagccatcccgctttggaacacggctgccccaggggatgccttcagtctattcctccagaggcttctcactctgccccagaggactggtcctcctcatcctcatcatcagtgtcctgaagaatcctaagtagtttgagctcagagttccagcctgtgctagccataatttctgaaaagttaaaggagatcttcttttgcctggcagcctgggcttctggcacagcgtccactggagcactaatgtccttgttagtgggttctgtttcatacaattcaggactttttacactgtggtggaaatccgcatggtcatagtagttcatctttggtctctccgtggaatcctgtttcgaagtggttcctttttccatctgctgctgctgcttcatgtcactgttctgacctggcagagttctgtaaccatagagacggtcatgaacggtggtaactggatgtttatgtgaagtgctctggatccctggatcactcttggctttctttttagcctcctgtttcttaataggtgttttcaccttcttctgttgctgctgctgctgctgctgccgctgctgctgtttcctgtaaccttctgtcttcaggttatgtaatttcttcaaacgttcaggatatcgcagtgctggtctttccagggtgaggcggtgtatagatagaaacatcttagaagaaatcacactgtcaggtcggttcttttccaagggaagattctttttcatcatggccaattttatcttcatctctggacagagcatggtttgctttccacctggcaaaagttccttcagtagatcctgaggtaacgcttcggattgagcccagagaggtaggaaatctgaactgaattgttcagacaattgcactggggttgggggaggcacgatcatccctggtgttcctactcgtgttcctgcggactgatttccagagagacccagaaatgacttgcttttcactgccgagttctttcttttcttcttcccatgctggctcacatgtatctctgtttcttctgggatccacaatacaaccatatttctaacatcttcagggcagggaagttgcgtctcattcaaattcaacactggaaatttgggaagtctgttagtacagttgatcaaacttttgtcaggtaaacccttcggaggcctgccatgaaatttggagtaaaactttgaactctgagacaataaagaatgggccttagtaaaggtacattctggtaaatgatgagctgcaaagccggaatctaagatgtctaccacggtgagcactgggagtttatcttcagcatccaggggagttttgcaggatgagccgaggattcgaggatggcccctctcaatgcggcggatagttgcccagcattgtgggtgctgacaaacagccaagccacaggtggtttcgtcccactggctctcatctggcaagtccatagctagaaatggtttaggccaaaggccaaccctgcagcattctagtgctctgcccagtccgaattgactcctgagacctaatcaggcgcatctctatatggccagcattatccctgggctgcctaaatagttcgcgttaaacacaaacaacaacaataaaatctaaataacactcagtcttagtaccattattacaaaagcgtgaggggcgaaaagattaaaaatgaacatcaacttcggtagagatggaaaaagactgcccactccattccaggaaagaaaaaagaaagtgggagaatctgatcacgacgggctgaggtcctgtgagagcaaagcagattccaaaccgcttagggttgctaaatcaagtggtaaaacgtggccccttgcggcgcggtgagattaacggacccggcgggcccagagcctgcctcgggtcctaaagggatccgccccgccgagtcagccacgccttcgtctcccacgcgctgcgcccggccgcccgct

SEQ ID NO: 737172 - DNA, 2060 bp, Homo sapiens
ttttttttgaaaagcagttgtgtttaatcaccaaaattattctgaccctaatggaaaggaaataatctaaatttaaaaaggctggggatttttctcctacatttattttagaggcaagtagaggtgaacaaagaaaatggaatccctaagctcagagctcaggccctggtaaaggctccagagagcagaagcccctctcctcttgcccttatgtgaaacgttgctgccctcaggataccagccatcccgctttggaacacggctgccccaggggatgccttcagtctattcctccagaggcttctcactctgccccagaggactggtcctcctcatcctcatcatcagtgtcctgaagaatcctaagtagtttgagctcagagttccagcctgtgctagccataatttctgaaaagttaaaggagatcttcttttgcctggcagcctgggcttctggcacagcgtccactggagcactaatgtccttgttagtgggttctgtttcatacaattcaggactttttacactgtggtggaaatccgcatggtcatagtagttcatctttggtctctccgtggaatcctgtttcgaagtggttcctttttccatctgctgctgctgcttcatgtcactgttctgacctggcagagttctgtaaccatagagacggtcatgaacggtggtaactggatgtttatgtgaagtgctctggatccctggatcactcttggctttctttttagcctcctgtttcttaataggtgttttcaccttcttctgttgctgctgctgctgctgctgccgctgctgctgtttcctgtaaccttctgtcttcaggttatgtaatttcttcaaacgttcaggatatcgcagtgctggtctttccagggtgaggcggtgtatagatagaaacatcttagaagaaatcacactgtcaggtcggttcttttccaagggaagattctttttcatcatggccaattttatcttcatctctggacagagcatggtttgctttccacctggcaaaagttccttcagtagatcctgaggtaacgcttcggattgagcccagagaggtaggaaatctgaactgaattgttcagacaattgcactggggttgggggaggcacgatcatccctggtgttcctactcgtgttcctgcggactgatttccagagagacccagaaatgacttgcttttcactgccgagttctttcttttcttcttcccatgctggctcacatgtatctctgtttcttctgggatccacaatacaaccatatttctaacatcttcagggcagggaagttgcgtctcattcaaattcaacactggaaatttgggaagtctgttagtacagttgatcaaacttttgtcaggtaaacccttcggaggcctgccatgaaatttggagtaaaactttgaactctgagacaataaagaatgggccttagtaaaggtacattctggtaaatgatgagctgcaaagccggaatctaagatgtctaccacggtgagcactgggagtttatcttcagcatccaggggagttttgcaggatgagccgaggattcgaggatggcccctctcaatgcggcggatagttgcccagcattgtgggtgctgacaaacagccaagccacaggtggtttcgtcccactggctctcatctggcaagtccatagctagaaatggtttaggccaaaggccaaccctgcagcattctagtgctcattattacaaaagcgtgaggggcgaaaagattaaaaatgaacatcaacttcggtagagatggaaaaagactgcccactccattccaggaaagaaaaaagaaagtgggagaatctgatcacgacgggctgaggtcctgtgagagcaaagcagattccaaaccgcttagggttgctaaatcaagtggtaaaacgtggccccttgcggcgcggtgagattaacggacccggcgggcccagagcctgcctcgggtcctaaagggatccgccccgccgagtcagccacgccttcgtctcccacgcgctgcgcccggccgcccgct

SEQ ID NO: 737173 - DNA, 1118 bp, Homo sapiens
  misc_feature (981)..(981): n is a, c, g, or t
  misc_feature (990)..(990): n is a, c, g, or t
  misc_feature (999)..(999): n is a, c, g, or t
  misc_feature (1001)..(1001): n is a, c, g, or t
  misc_feature (1057)..(1057): n is a, c, g, or t
aacggacggaagctccattgagccaaataagttgagaccgtagcgacgcgggaagtccggacgcagtagctccctgaagcggaggcgaaggggagtttaagccccagcggcggcaatggcggagaggcccgaggacctaaacctgcccaatgccgtgatcaccaggatcatcaaggaggcgctcccggacggtgtcaacatctccaaggaggcccggagcgccatctcccgcgccgccagcgtcttcgtgctgtacgccacatcctgtgctaacaactttgcaatgaaaggaaagcggaagacgctgaatgccagtgatgtgctctcagccatggaagagatggagttccagcggttcgttaccccattgaaagaagctctggaagcatataggcgggagcagaaaggcaagaaggaggcctcagagcaaaagaagaaggacaaagacaaaaaaacagactcggaagagcaagacaagagcagggatgaggacaatgatgaagacgaagaaaggctggaagaagaagaacagaatgaagaggaagaagtagacaactgaaaagggcgggagactgtggcaccttggaaggtaccacttgaaatgagacgtgctacgtgtttctgtgaagcttttccatgctgggcagagtagtctcaggcaaaagtgcctgaaaagatcagaataaaaactgactagaaataccgtcaaaaccagcacttaccaaactcagagcatctgagtagcagaatcctgttttgcttcatcaatctgaaggttatggccttttgacaagagggattctgaacgactaaattagtcagtttgctcgcttttgtttacttaaatgtatggttagatggtttttgatctgcagtcttccctagtcccccaaataagtaataataacttccatgctgcctgctgtgttccagatcacagaggcagccaaggctcaggaaaaaaactggggggcctttggncttatgggnccagccccnantgttttgatttgcccccattccttttggaacaataaggtaagctcttacacttaangacttggcctccaggaaatggggagttaaaaggccttttttagggggaaaacctcacctcc

SEQ ID NO: 737174 - DNA, 3718 bp, Homo sapiens
ttttttttgaaaagcagttgtgtttaatcaccaaaattattctgaccctaatggaaaggaaataatctaaatttaaaaaggctggggatttttctcctacatttattttagaggcaagtagaggtgaacaaagaaaatggaatccctaagctcagagctcaggccctggtaaaggctccagagagcagaagcccctctcctcttgcccttatgtgaaacgttgctgccctcaggataccagccatcccgctttggaacacggctgccccaggggatgccttcagtctattcctccagaggcttctcactctgccccagaggactggtcctcctcatcctcatcatcagtgtcctgaagaatcctaagtagtttgagctcagagttccagcctgtgctagccataatttctgaaaagttaaaggagatcttcttttgcctggcagcctgggcttctggcacagcgtccactggagcactaatgtccttgttagtgggttctgtttcatacaattcaggactttttacactgtggtggaaatccgcatggtcatagtagttcatctttggtctctccgtggaatcctgtttcgaagtggttcctttttccatctgctgctgctgcttcatgtcactgttctgacctggcagagttctgtaaccatagagacggtcatgaacggtggtaactggatgtttatgtgaagtgctctggatccctggatcactcttggctttctttttagcctcctgtttcttaataggtgttttcaccttcttctgttgctgctgctgctgctgctgccgctgctgctgtttcctgtaaccttctgtcttcaggttatgtaatttcttcaaacgttcaggatatcgcagtgctggtctttccagggtgaggcggtgtatagatagaaacatcttagaagaaatcacactgtcaggtcggttcttttccaagggaagattctttttcatcatggccaattttatcttcatctctggacagagcatggtttgctttccacctggcaaaagttccttcagtagatcctgaggtaacgcttcggattgagcccagagaggtaggaaatctgaactgaattgttcagacaattgcactggggttgggggaggcacgatcatccctggtgttcctactcgtgttcctgcggactgatttccagagagacccagaaatgacttgcttttcactgccgagttctttcttttcttcttcccatgctggctcacatgtatctctgtttcttctgggatccacaatacaaccatatttctaacatcttcagggcagggaagttgcgtctcattcaaattcaacactggaaatttgggaagtctgttagtacagttgatcaaacttttgtcaggtaaacccttcggaggcctgccatgaaatttggagtaaaactttgaactctgagacaataaagaatgggccttagtaaaggtacattctggtaaatgatgagctgcaaagccggaatctaagatgtctaccacggtgagcactgggagtttatcttcagcatccaggggagttttgcaggatgagccgaggattcgaggatggcccctctcaatgcggcggatagttgcccagcattgtgggtgctgacaaacagccaagccacaggtggtttcgtcccactggctctcatctggcaagtccatagctagaaatggtttaggccaaaggccaaccctgcagcattctagtgctctcccggacggtgtcaacatctccaaggaggcccggagcgccatctcccgcgccgccagcgtcttcgtgctgtacgccacatcctgtgctaacaactttgcaatgaaaggaaagcggaagacgctgaatgccagtgatgtgctctcagccatggaagagatggagttccagcggttcgttaccccattgaaagaagctctggaagcatataggcgggagcagaaaggcaagaaggaggcctcagagcaaaagaagaaggacaaagacaaaaaaacagactcggaagagcaagacaagagcagggatgaggacaatgatgaagacgaagaaaggctggaagaagaagaacagaatgaagaggaagaagtagacaactgaaaagggcgggagactgtggcaccttggaaggtaccacttgaaatgagacgtgctacgtgtttctgtgaagcttttccatgctgggcagagtagtctcaggcaaaagtgcctgaaaagatcagaataaaaactgactagaaataccgtcaaaaccagcacttaccaaactcagagcatctgagtagcagaatcctgttttgcttcatcaatctgaaggttatggccttttgacaagagggattctgaacgactaaattagtcagtttgctcgcttttgtttacttaaatgtatggttagatggtttttgatctgcagtcttccctagtcccccaaataagtaataataacttccatgctgcctgctgtgttccagatcacagaggcagccaaggctcaggaaaaactggggctttgcttatggtcagcctatgtttgattgcacagtctttgacaatagtagcttactaagactgctcagaatgagtaagctttaggaaactactaaaatgctgtgggagaataacaaaatccgttctctctcttcacttgacagaagcattaactgaatttgtttttcatagacccacttggcccaaaacctttctatattgcctgtagatgatcggcctgctggtgtggtagtaatctgatcacagatattcttaaatcagcagtgtggaatggtattagtcaaacatggtgccagtgtcttttacaaaaacagatggcatagtgtcagatgtaccttactctctgctactgtacagctttaggatttgtcatcacctcccggaaggtgtaaaacccaggcttcctcttcttgtagtccatctcccagacttgtgactatggcttttcattcttcaattcatgacgagtgccaaacttgattttctctaggcacagctttctccctctgtgcctcctgcttcctttctctctcctgcctctcctctgctccccatcccactttctcatctgcctccttttctcacttctgtcagtctgtaagctttgataacctgcttaatactccaaagtgtgagttcctctgatctcttgattccttagttctaatctcacgttttgtttttaagagatggagtctctcactctgtggcccaggctggagtgcagtggcatgatcatagctcattgcatccttgaaatcctgggctcaggtgatcctcccgcctgagcctcctgagtatctgggactacagatgcgtgccaccaagcctggctaattttgtctcatgtcttctaaaaattattttgtgaagccccttcacaaaaaaccttaagggaaatctgatggtgctcaggaatctaactctccctaaaccatcctctttaactgcttctaaaatatctctgttggcctttcttagcctttttctgtttccattcagtgctccaagcgctttttgtttctaagttgagtgcttggggtttgacaggtagtgacgtgtagtttgacactgttaacttgttaaatacagtgaaaagtttgtgagtgaagaatgctgagaagattgtaatgctttgtacaaataaaagtcttgttaaaaaaaaaacacaaacacaacaaacaaaaaaa

SEQ ID NO: 737175 - DNA, 4040 bp, Homo sapiens
ttttttttgaaaagcagttgtgtttaatcaccaaaattattctgaccctaatggaaaggaaataatctaaatttaaaaaggctggggatttttctcctacatttattttagaggcaagtagaggtgaacaaagaaaatggaatccctaagctcagagctcaggccctggtaaaggctccagagagcagaagcccctctcctcttgcccttatgtgaaacgttgctgccctcaggataccagccatcccgctttggaacacggctgccccaggggatgccttcagtctattcctccagaggcttctcactctgccccagaggactggtcctcctcatcctcatcatcagtgtcctgaagaatcctaagtagtttgagctcagagttccagcctgtgctagccataatttctgaaaagttaaaggagatcttcttttgcctggcagcctgggcttctggcacagcgtccactggagcactaatgtccttgttagtgggttctgtttcatacaattcaggactttttacactgtggtggaaatccgcatggtcatagtagttcatctttggtctctccgtggaatcctgtttcgaagtggttcctttttccatctgctgctgctgcttcatgtcactgttctgacctggcagagttctgtaaccatagagacggtcatgaacggtggtaactggatgtttatgtgaagtgctctggatccctggatcactcttggctttctttttagcctcctgtttcttaataggtgttttcaccttcttctgttgctgctgctgctgctgctgccgctgctgctgtttcctgtaaccttctgtcttcaggttatgtaatttcttcaaacgttcaggatatcgcagtgctggtctttccagggtgaggcggtgtatagatagaaacatcttagaagaaatcacactgtcaggtcggttcttttccaagggaagattctttttcatcatggccaattttatcttcatctctggacagagcatggtttgctttccacctggcaaaagttccttcagtagatcctgaggtaacgcttcggattgagcccagagaggtaggaaatctgaactgaattgttcagacaattgcactggggttgggggaggcacgatcatccctggtgttcctactcgtgttcctgcggactgatttccagagagacccagaaatgacttgcttttcactgccgagttctttcttttcttcttcccatgctggctcacatgtatctctgtttcttctgggatccacaatacaaccatatttctaacatcttcagggcagggaagttgcgtctcattcaaattcaacactggaaatttgggaagtctgttagtacagttgatcaaacttttgtcaggtaaacccttcggaggcctgccatgaaatttggagtaaaactttgaactctgagacaataaagaatgggccttagtaaaggtacattctggtaaatgatgagctgcaaagccggaatctaagatgtctaccacggtgagcactgggagtttatcttcagcatccaggggagttttgcaggatgagccgaggattcgaggatggcccctctcaatgcggcggatagttgcccagcattgtgggtgctgacaaacagccaagccacaggtggtttcgtcccactggctctcatctggcaagtccatagctagaaatggtttaggccaaaggccaaccctgcagcattctagtgctctcccggacggtgtcaacatctccaaggaggcccggagcgccatctcccgcgccgccagcgtcttcgtgctgtacgccacatcctgtgctaacaactttgcaatgaaaggaaagcggaagacgctgaatgccagtgatgtgctctcagccatggaagagatggagttccagcggttcgttaccccattgaaagaagctctggaagcatataggcgggagcagaaaggcaagaaggaggcctcagagcaaaagaagaaggacaaagacaaaaaaacagactcggaagagcaagacaagagcagggatgaggacaatgatgaagacgaagaaaggctggaagaagaagaacagaatgaagaggaagaagtagacaactgaaaagggcgggagactgtggcaccttggaaggtaccacttgaaatgagacgtgctacgtgtttctgtgaagcttttccatgctgggcagagtagtctcaggcaaaagtgcctgaaaagatcagaataaaaactgactagaaataccgtcaaaaccagcacttaccaaactcagagcatctgagtagcagaatcctgttttgcttcatcaatctgaaggttatggccttttgacaagagggattctgaacgactaaattagtcagtttgctcgcttttgtttacttaaatgtatggttagatggtttttgatctgcagtcttccctagtcccccaaataagtaataataacttccatgctgcctgctgtgttccagatcacagaggcagccaaggctcaggaaaaactggggctttgcttatggtcagcctatgtttgattgcacagtctttgacaatagtagcttactaagactgctcagaatgagtaagctttaggaaactactaaaatgctgtgggagaataacaaaatccgttctctctcttcacttgacagaagcattaactgaatttgtttttcatagacccacttggcccaaaacctttctatattgcctgtagatgatcggcctgctggtgtggtagtaatctgatcacagatattcttaaatcagcagtgtggaatggtattagtcaaacatggtgccagtgtcttttacaaaaacagatggcatagtgtcagatgtaccttactctctgctactgtacagctttaggatttgtcatcacctcccggaaggtgtaaaacccaggcttcctcttcttgtagtccatctcccagacttgtgactatggcttttcattcttcaattcatgacgagtgccaaacttgattttctctaggcacagctttctccctctgtgcctcctgcttcctttctctctcctgcctctcctctgctccccatcccactttctcatctgcctccttttctcacttctgtcagtctgtaagctttgataacctgcttaatactccaaagtgtgagttcctctgatctcttgattccttagttctaatctcacgttttgtttttaagagatggagtctctcactctgtggcccaggctggagtgcagtggcatgatcatagctcattgcatccttgaaatcctgggctcaggtgatcctcccgcctgagcctcctgagtatctgggactacagatgcgtgccaccaagcctggctaattttgtctcatgtcttctaaaaattattttgtgaagccccttcacaaaaaaccttaagggaaatctgatggtgctcaggaatctaactctccctaaaccatcctctttaactgcttctaaaatatctctgttggcctttcttagcctttttctgtttccattcagtgctccaagcgctttttgtttctaagttgagtgcttggggtttgacaggtagtgacgtgtagtttgacactgttaacttgttaaatacagtgaaaagtttgtgagtgaagaatgctgagaagattgtaatgctttgtacaaataaaagtcttgttaaaaaaaaaaaaaaaaaaaaaaaaaaagaaaataaaaaaaaacaaaagataaagaaaaaagaacaaaaaaaaaaggcaaaaagaaacaaaaaagaacaacaacagaaaacaaaccgcgaacaacacgacgcaacaaacacaactacatagaaccacaaaaacaaaaatagaaaaaagagagaaggcagacaaacaaactagaaacaaagactaaacacaaaaagaacaaaaagaagggcgtggagcgcgagcaccaaagtagggctcgagacgaccggagacaaagaagcaggagcacaactctaaccgagaacctacacgagctacgctactagcgagcgaactagccacgaga

SEQ ID NO: 737176 - DNA, 3700 bp, Homo sapiens
ttttttttgaaaagcagttgtgtttaatcaccaaaattattctgaccctaatggaaaggaaataatctaaatttaaaaaggctggggatttttctcctacatttattttagaggcaagtagaggtgaacaaagaaaatggaatccctaagctcagagctcaggccctggtaaaggctccagagagcagaagcccctctcctcttgcccttatgtgaaacgttgctgccctcaggataccagccatcccgctttggaacacggctgccccaggggatgccttcagtctattcctccagaggcttctcactctgccccagaggactggtcctcctcatcctcatcatcagtgtcctgaagaatcctaagtagtttgagctcagagttccagcctgtgctagccataatttctgaaaagttaaaggagatcttcttttgcctggcagcctgggcttctggcacagcgtccactggagcactaatgtccttgttagtgggttctgtttcatacaattcaggactttttacactgtggtggaaatccgcatggtcatagtagttcatctttggtctctccgtggaatcctgtttcgaagtggttcctttttccatctgctgctgctgcttcatgtcactgttctgacctggcagagttctgtaaccatagagacggtcatgaacggtggtaactggatgtttatgtgaagtgctctggatccctggatcactcttggctttctttttagcctcctgtttcttaataggtgttttcaccttcttctgttgctgctgctgctgctgctgccgctgctgctgtttcctgtaaccttctgtcttcaggttatgtaatttcttcaaacgttcaggatatcgcagtgctggtctttccagggtgaggcggtgtatagatagaaacatcttagaagaaatcacactgtcaggtcggttcttttccaagggaagattctttttcatcatggccaattttatcttcatctctggacagagcatggtttgctttccacctggcaaaagttccttcagtagatcctgaggtaacgcttcggattgagcccagagaggtaggaaatctgaactgaattgttcagacaattgcactggggttgggggaggcacgatcatccctggtgttcctactcgtgttcctgcggactgatttccagagagacccagaaatgacttgcttttcactgccgagttctttcttttcttcttcccatgctggctcacatgtatctctgtttcttctgggatccacaatacaaccatatttctaacatcttcagggcagggaagttgcgtctcattcaaattcaacactggaaatttgggaagtctgttagtacagttgatcaaacttttgtcaggtaaacccttcggaggcctgccatgaaatttggagtaaaactttgaactctgagacaataaagaatgggccttagtaaaggtacattctggtaaatgatgagctgcaaagccggaatctaagatgtctaccacggtgagcactgggagtttatcttcagcatccaggggagttttgcaggatgagccgaggattcgaggatggcccctctcaatgcggcggatagttgcccagcattgtgggtgctgacaaacagccaagccacaggtggtttcgtcccactggctctcatctggcaagtccatagctagaaatggtttaggccaaaggccaaccctgcagcattctagtgctctcccggacggtgtcaacatctccaaggaggcccggagcgccatctcccgcgccgccagcgtcttcgtgctgtacgccacatcctgtgctaacaactttgcaatgaaaggaaagcggaagacgctgaatgccagtgatgtgctctcagccatggaagagatggagttccagcggttcgttaccccattgaaagaagctctggaagcatataggcgggagcagaaaggcaagaaggaggcctcagagcaaaagaagaaggacaaagacaaaaaaacagactcggaagagcaagacaagagcagggatgaggacaatgatgaagacgaagaaaggctggaagaagaagaacagaatgaagaggaagaagtagacaactgaaaagggcgggagactgtggcaccttggaaggtaccacttgaaatgagacgtgctacgtgtttctgtgaagcttttccatgctgggcagagtagtctcaggcaaaagtgcctgaaaagatcagaataaaaactgactagaaataccgtcaaaaccagcacttaccaaactcagagcatctgagtagcagaatcctgttttgcttcatcaatctgaaggttatggccttttgacaagagggattctgaacgactaaattagtcagtttgctcgcttttgtttacttaaatgtatggttagatggtttttgatctgcagtcttccctagtcccccaaataagtaataataacttccatgctgcctgctgtgttccagatcacagaggcagccaaggctcaggaaaaactggggctttgcttatggtcagcctatgtttgattgcacagtctttgacaatagtagcttactaagactgctcagaatgagtaagctttaggaaactactaaaatgctgtgggagaataacaaaatccgttctctctcttcacttgacagaagcattaactgaatttgtttttcatagacccacttggcccaaaacctttctatattgcctgtagatgatcggcctgctggtgtggtagtaatctgatcacagatattcttaaatcagcagtgtggaatggtattagtcaaacatggtgccagtgtcttttacaaaaacagatggcatagtgtcagatgtaccttactctctgctactgtacagctttaggatttgtcatcacctcccggaaggtgtaaaacccaggcttcctcttcttgtagtccatctcccagacttgtgactatggcttttcattcttcaattcatgacgagtgccaaacttgattttctctaggcacagctttctccctctgtgcctcctgcttcctttctctctcctgcctctcctctgctccccatcccactttctcatctgcctccttttctcacttctgtcagtctgtaagctttgataacctgcttaatactccaaagtgtgagttcctctgatctcttgattccttagttctaatctcacgttttgtttttaagagatggagtctctcactctgtggcccaggctggagtgcagtggcatgatcatagctcattgcatccttgaaatcctgggctcaggtgatcctcccgcctgagcctcctgagtatctgggactacagatgcgtgccaccaagcctggctaattttgtctcatgtcttctaaaaattattttgtgaagccccttcacaaaaaaccttaagggaaatctgatggtgctcaggaatctaactctccctaaaccatcctctttaactgcttctaaaatatctctgttggcctttcttagcctttttctgtttccattcagtgctccaagcgctttttgtttctaagttgagtgctgggttgaccggatagcgggtttgtgagcgttcctgttcaccgcgagggggtggaagggggaggcgtgtccaaattgttaaaaaaggggggggagatttcagggaggcacctttaagccagagatataagcggaat

SEQ ID NO: 737177 - DNA, 3527 bp, Homo sapiens
ttttttttgaaaagcagttgtgtttaatcaccaaaattattctgaccctaatggaaaggaaataatctaaatttaaaaaggctggggatttttctcctacatttattttagaggcaagtagaggtgaacaaagaaaatggaatccctaagctcagagctcaggccctggtaaaggctccagagagcagaagcccctctcctcttgcccttatgtgaaacgttgctgccctcaggataccagccatcccgctttggaacacggctgccccaggggatgccttcagtctattcctccagaggcttctcactctgccccagaggactggtcctcctcatcctcatcatcagtgtcctgaagaatcctaagtagtttgagctcagagttccagcctgtgctagccataatttctgaaaagttaaaggagatcttcttttgcctggcagcctgggcttctggcacagcgtccactggagcactaatgtccttgttagtgggttctgtttcatacaattcaggactttttacactgtggtggaaatccgcatggtcatagtagttcatctttggtctctccgtggaatcctgtttcgaagtggttcctttttccatctgctgctgctgcttcatgtcactgttctgacctggcagagttctgtaaccatagagacggtcatgaacggtggtaactggatgtttatgtgaagtgctctggatccctggatcactcttggctttctttttagcctcctgtttcttaataggtgttttcaccttcttctgttgctgctgctgctgctgctgccgctgctgctgtttcctgtaaccttctgtcttcaggttatgtaatttcttcaaacgttcaggatatcgcagtgctggtctttccagggtgaggcggtgtatagatagaaacatcttagaagaaatcacactgtcaggtcggttcttttccaagggaagattctttttcatcatggccaattttatcttcatctctggacagagcatggtttgctttccacctggcaaaagttccttcagtagatcctgaggtaacgcttcggattgagcccagagaggtaggaaatctgaactgaattgttcagacaattgcactggggttgggggaggcacgatcatccctggtgttcctactcgtgttcctgcggactgatttccagagagacccagaaatgacttgcttttcactgccgagttctttcttttcttcttcccatgctggctcacatgtatctctgtttcttctgggatccacaatacaaccatatttctaacatcttcagggcagggaagttgcgtctcattcaaattcaacactggaaatttgggaagtctgttagtacagttgatcaaacttttgtcaggtaaacccttcggaggcctgccatgaaatttggagtaaaactttgaactctgagacaataaagaatgggccttagtaaaggtacattctggtaaatgatgagctgcaaagccggaatctaagatgtctaccacggtgagcactgggagtttatcttcagcatccaggggagttttgcaggatgagccgaggattcgaggatggcccctctcaatgcggcggatagttgcccagcattgtgggtgctgacaaacagccaagccacaggtggtttcgtcccactggctctcatctggcaagtccatagctagaaatggtttaggccaaaggccaaccctgcagcattctagtgctctcccggacggtgtcaacatctccaaggaggcccggagcgccatctcccgcgccgccagcgtcttcgtgctgtacgccacatcctgtgctaacaactttgcaatgaaaggaaagcggaagacgctgaatgccagtgatgtgctctcagccatggaagagatggagttccagcggttcgttaccccattgaaagaagctctggaagcatataggcgggagcagaaaggcaagaaggaggcctcagagcaaaagaagaaggacaaagacaaaaaaacagactcggaagagcaagacaagagcagggatgaggacaatgatgaagacgaagaaaggctggaagaagaagaacagaatgaagaggaagaagtagacaactgaaaagggcgggagactgtggcaccttggaaggtaccacttgaaatgagacgtgctacgtgtttctgtgaagcttttccatgctgggcagagtagtctcaggcaaaagtgcctgaaaagatcagaataaaaactgactagaaataccgtcaaaaccagcacttaccaaactcagagcatctgagtagcagaatcctgttttgcttcatcaatctgaaggttatggccttttgacaagagggattctgaacgactaaattagtcagtttgctcgcttttgtttacttaaatgtatggttagatggtttttgatctgcagtcttccctagtcccccaaataagtaataataacttccatgctgcctgctgtgttccagatcacagaggcagccaaggctcaggaaaaactggggctttgcttatggtcagcctatgtttgattgcacagtctttgacaatagtagcttactaagactgctcagaatgagtaagctttaggaaactactaaaatgctgtgggagaataacaaaatccgttctctctcttcacttgacagaagcattaactgaatttgtttttcatagacccacttggcccaaaacctttctatattgcctgtagatgatcggcctgctggtgtggtagtaatctgatcacagatattcttaaatcagcagtgtggaatggtattagtcaaacatggtgccagtgtcttttacaaaaacagatggcatagtgtcagatgtaccttactctctgctactgtacagctttaggatttgtcatcacctcccggaaggtgtaaaacccaggcttcctcttcttgtagtccatctcccagacttgtgactatggcttttcattcttcaattcatgacgagtgccaaacttgattttctctaggcacagctttctccctctgtgcctcctgcttcctttctctctcctgcctctcctctgctccccatcccactttctcatctgcctccttttctcacttctgtcagtctgtaagctttgataacctgcttaatactccaaagtgtgagttcctctgatctcttgattccttagttctaatctcacgttttgtttttaagagatggagtctctcactctgtggcccaggctggagtgcagtggcatgatcatagctcattgcatccttgaaatcctgggctcaggtgatcctcccgcctgagcctcctgagtatctgggaccgcagtcacgtgccaccacacccagcccatccttgtacttttagtagagatgggtttcaccacgttggtctcgaactcctgaccccaagcgatccatcccgcctccacctccctaagtgctgggattacatggcatgagtcaccactcccagcattcatgtctgaagattctatagtggatactttatagt

SEQ ID NO: 737178 - DNA, 3177 bp, Homo sapiens
ttttttttgaaaagcagttgtgtttaatcaccaaaattattctgaccctaatggaaaggaaataatctaaatttaaaaaggctggggatttttctcctacatttattttagaggcaagtagaggtgaacaaagaaaatggaatccctaagctcagagctcaggccctggtaaaggctccagagagcagaagcccctctcctcttgcccttatgtgaaacgttgctgccctcaggataccagccatcccgctttggaacacggctgccccaggggatgccttcagtctattcctccagaggcttctcactctgccccagaggactggtcctcctcatcctcatcatcagtgtcctgaagaatcctaagtagtttgagctcagagttccagcctgtgctagccataatttctgaaaagttaaaggagatcttcttttgcctggcagcctgggcttctggcacagcgtccactggagcactaatgtccttgttagtgggttctgtttcatacaattcaggactttttacactgtggtggaaatccgcatggtcatagtagttcatctttggtctctccgtggaatcctgtttcgaagtggttcctttttccatctgctgctgctgcttcatgtcactgttctgacctggcagagttctgtaaccatagagacggtcatgaacggtggtaactggatgtttatgtgaagtgctctggatccctggatcactcttggctttctttttagcctcctgtttcttaataggtgttttcaccttcttctgttgctgctgctgctgctgctgccgctgctgctgtttcctgtaaccttctgtcttcaggttatgtaatttcttcaaacgttcaggatatcgcagtgctggtctttccagggtgaggcggtgtatagatagaaacatcttagaagaaatcacactgtcaggtcggttcttttccaagggaagattctttttcatcatggccaattttatcttcatctctggacagagcatggtttgctttccacctggcaaaagttccttcagtagatcctgaggtaacgcttcggattgagcccagagaggtaggaaatctgaactgaattgttcagacaattgcactggggttgggggaggcacgatcatccctggtgttcctactcgtgttcctgcggactgatttccagagagacccagaaatgacttgcttttcactgccgagttctttcttttcttcttcccatgctggctcacatgtatctctgtttcttctgggatccacaatacaaccatatttctaacatcttcagggcagggaagttgcgtctcattcaaattcaacactggaaatttgggaagtctgttagtacagttgatcaaacttttgtcaggtaaacccttcggaggcctgccatgaaatttggagtaaaactttgaactctgagacaataaagaatgggccttagtaaaggtacattctggtaaatgatgagctgcaaagccggaatctaagatgtctaccacggtgagcactgggagtttatcttcagcatccaggggagttttgcaggatgagccgaggattcgaggatggcccctctcaatgcggcggatagttgcccagcattgtgggtgctgacaaacagccaagccacaggtggtttcgtcccactggctctcatctggcaagtccatagctagaaatggtttaggccaaaggccaaccctgcagcattctagtgctctcccggacggtgtcaacatctccaaggaggcccggagcgccatctcccgcgccgccagcgtcttcgtgctgtacgccacatcctgtgctaacaactttgcaatgaaaggaaagcggaagacgctgaatgccagtgatgtgctctcagccatggaagagatggagttccagcggttcgttaccccattgaaagaagctctggaagcatataggcgggagcagaaaggcaagaaggaggcctcagagcaaaagaagaaggacaaagacaaaaaaacagactcggaagagcaagacaagagcagggatgaggacaatgatgaagacgaagaaaggctggaagaagaagaacagaatgaagaggaagaagtagacaactgaaaagggcgggagactgtggcaccttggaaggtaccacttgaaatgagacgtgctacgtgtttctgtgaagcttttccatgctgggcagagtagtctcaggcaaaagtgcctgaaaagatcagaataaaaactgactagaaataccgtcaaaaccagcacttaccaaactcagagcatctgagtagcagaatcctgttttgcttcatcaatctgaaggttatggccttttgacaagagggattctgaacgactaaattagtcagtttgctcgcttttgtttacttaaatgtatggttagatggtttttgatctgcagtcttccctagtcccccaaataagtaataataacttccatgctgcctgctgtgttccagatcacagaggcagccaaggctcaggaaaaactggggctttgcttatggtcagcctatgtttgattgcacagtctttgacaatagtagcttactaagactgctcagaatgagtaagctttaggaaactactaaaatgctgtgggagaataacaaaatccgttctctctcttcacttgacagaagcattaactgaatttgtttttcatagacccacttggcccaaaacctttctatattgcctgtagatgatcggcctgctggtgtggtagtaatctgatcacagatattcttaaatcagcagtgtggaatggtattagtcaaacatggtgccagtgtcttttacaaaaacagatggcatagtgtcagatgtaccttactctctgctactgtacagctttaggatttgtcatcacctcccggaaggtgtaaaacccaggcttcctcttcttgtagtccatctcccagacttgtgactatggcttttcattcttcaattcatgacgagtgccaaacttgattttctctaggcacagctttctccctctgtgcctcctgcttcctttctctctcctgcctctcctctgctccccatcccactttctcatctgcctccttttctcacttctgtcagtctgtaagctttgataacctgcttaatactccagcctgggcacagaagaaaaggc

SEQ ID NO: 737179 - DNA, 3693 bp, Homo sapiens
ttttttttgaaaagcagttgtgtttaatcaccaaaattattctgaccctaatggaaaggaaataatctaaatttaaaaaggctggggatttttctcctacatttattttagaggcaagtagaggtgaacaaagaaaatggaatccctaagctcagagctcaggccctggtaaaggctccagagagcagaagcccctctcctcttgcccttatgtgaaacgttgctgccctcaggataccagccatcccgctttggaacacggctgccccaggggatgccttcagtctattcctccagaggcttctcactctgccccagaggactggtcctcctcatcctcatcatcagtgtcctgaagaatcctaagtagtttgagctcagagttccagcctgtgctagccataatttctgaaaagttaaaggagatcttcttttgcctggcagcctgggcttctggcacagcgtccactggagcactaatgtccttgttagtgggttctgtttcatacaattcaggactttttacactgtggtggaaatccgcatggtcatagtagttcatctttggtctctccgtggaatcctgtttcgaagtggttcctttttccatctgctgctgctgcttcatgtcactgttctgacctggcagagttctgtaaccatagagacggtcatgaacggtggtaactggatgtttatgtgaagtgctctggatccctggatcactcttggctttctttttagcctcctgtttcttaataggtgttttcaccttcttctgttgctgctgctgctgctgctgccgctgctgctgtttcctgtaaccttctgtcttcaggttatgtaatttcttcaaacgttcaggatatcgcagtgctggtctttccagggtgaggcggtgtatagatagaaacatcttagaagaaatcacactgtcaggtcggttcttttccaagggaagattctttttcatcatggccaattttatcttcatctctggacagagcatggtttgctttccacctggcaaaagttccttcagtagatcctgaggtaacgcttcggattgagcccagagaggtaggaaatctgaactgaattgttcagacaattgcactggggttgggggaggcacgatcatccctggtgttcctactcgtgttcctgcggactgatttccagagagacccagaaatgacttgcttttcactgccgagttctttcttttcttcttcccatgctggctcacatgtatctctgtttcttctgggatccacaatacaaccatatttctaacatcttcagggcagggaagttgcgtctcattcaaattcaacactggaaatttgggaagtctgttagtacagttgatcaaacttttgtcaggtaaacccttcggaggcctgccatgaaatttggagtaaaactttgaactctgagacaataaagaatgggccttagtaaaggtacattctggtaaatgatgagctgcaaagccggaatctaagatgtctaccacggtgagcactgggagtttatcttcagcatccaggggagttttgcaggatgagccgaggattcgaggatggcccctctcaatgcggcggatagttgcccagcattgtgggtgctgacaaacagccaagccacaggtggtttcgtcccactggctctcatctggcaagtccatagctagaaatggtttaggccaaaggccaaccctgcagcattctagtgctctcccggacggtgtcaacatctccaaggaggcccggagcgccatctcccgcgccgccagcgtcttcgtgctgtacgccacatcctgtgctaacaactttgcaatgaaaggaaagcggaagacgctgaatgccagtgatgtgctctcagccatggaagagatggagttccagcggttcgttaccccattgaaagaagctctggaagcatataggcgggagcagaaaggcaagaaggaggcctcagagcaaaagaagaaggacaaagacaaaaaaacagactcggaagagcaagacaagagcagggatgaggacaatgatgaagacgaagaaaggctggaagaagaagaacagaatgaagaggaagaagtagacaactgaaaagggcgggagactgtggcaccttggaaggtaccacttgaaatgagacgtgctacgtgtttctgtgaagcttttccatgctgggcagagtagtctcaggcaaaagtgcctgaaaagatcagaataaaaactgactagaaataccgtcaaaaccagcacttaccaaactcagagcatctgagtagcagaatcctgttttgcttcatcaatctgaaggttatggccttttgacaagagggattctgaacgactaaattagtcagtttgctcgcttttgtttacttaaatgtatggttagatggtttttgatctgcagtcttccctagtcccccaaataagtaataataacttccatgctgcctgctgtgttccagatcacagaggcagccaaggctcaggaaaaactggggctttgcttatggtcagcctatgtttgattgcacagtctttgacaatagtagcttactaagactgctcagaatgagtaagctttaggaaactactaaaatgctgtgggagaataacaaaatccgttctctctcttcacttgacagaagcattaactgaatttgtttttcatagacccacttggcccaaaacctttctatattgcctgtagatgatcggcctgctggtgtggtagtaatctgatcacagatattcttaaatcagcagtgtggaatggtattagtcaaacatggtgccagtgtcttttacaaaaacagatggcatagtgtcagatgtaccttactctctgctactgtacagctttaggatttgtcatcacctcccggaaggtgtaaaacccaggcttcctcttcttgtagtccatctcccagacttgtgactatggcttttcattcttcaattcatgacgagtgccaaacttgattttctctaggcacagctttctccctctctgcctctcctctgctccccatcccactttctcatctgcctccttttctcacttctgtcagtctgtaagctttgataacctgcttaatactccaaagtgtgagttcctctgatctcttgattccttagttctaatctcacgttttgtttttaagagatggagtctctcactctgtggcccaggctggagtgcagtggcatgatcatagctcattgcatccttgaaatcctgggctcaggtgatcctcccgcctgagcctcctgagtatctgggactacagatgcgtgccaccaagcctggctaattttgtctcatgtcttctaaaaattattttgtgaagccccttcacaaaaaaccttaagggaaatctgatggtgctcaggaatctaactctccctaaaccatcctctttaactgcttctaaaatatctctgttggcctttcttagcctttttctgtttccattcagtgctccaagcgctttttgtttctaagttgagtgcttggggtttgacaggtagtgacgtgtagtttgacactgttaacttgttaaatacagtgaaaagtttgtgagtgaagaatgctgagaagattgtaatgctttgtacaaataaaagtcttgttaaaaaaaaaacacaaacacaacaaacaaaaaaa

SEQ ID NO: 737180 - DNA, 3523 bp, Homo sapiens
ttttttttgaaaagcagttgtgtttaatcaccaaaattattctgaccctaatggaaaggaaataatctaaatttaaaaaggctggggatttttctcctacatttattttagaggcaagtagaggtgaacaaagaaaatggaatccctaagctcagagctcaggccctggtaaaggctccagagagcagaagcccctctcctcttgcccttatgtgaaacgttgctgccctcaggataccagccatcccgctttggaacacggctgccccaggggatgccttcagtctattcctccagaggcttctcactctgccccagaggactggtcctcctcatcctcatcatcagtgtcctgaagaatcctaagtagtttgagctcagagttccagcctgtgctagccataatttctgaaaagttaaaggagatcttcttttgcctggcagcctgggcttctggcacagcgtccactggagcactaatgtccttgttagtgggttctgtttcatacaattcaggactttttacactgtggtggaaatccgcatggtcatagtagttcatctttggtctctccgtggaatcctgtttcgaagtggttcctttttccatctgctgctgctgcttcatgtcactgttctgacctggcagagttctgtaaccatagagacggtcatgaacggtggtaactggatgtttatgtgaagtgctctggatccctggatcactcttggctttctttttagcctcctgtttcttaataggtgttttcaccttcttctgttgctgctgctgctgctgctgccgctgctgctgtttcctgtaaccttctgtcttcaggttatgtaatttcttcaaacgttcaggatatcgcagtgctggtctttccagggtgaggcggtgtatagatagaaacatcttagaagaaatcacactgtcaggtcggttcttttccaagggaagattctttttcatcatggccaattttatcttcatctctggacagagcatggtttgctttccacctggcaaaagttccttcagtagatcctgaggtaacgcttcggattgagcccagagaggtaggaaatctgaactgaattgttcagacaattgcactggggttgggggaggcacgatcatccctggtgttcctactcgtgttcctgcggactgatttccagagagacccagaaatgacttgcttttcactgccgagttctttcttttcttcttcccatgctggctcacatgtatctctgtttcttctgggatccacaatacaaccatatttctaacatcttcagggcagggaagttgcgtctcattcaaattcaacactggaaatttgggaagtctgttagtacagttgatcaaacttttgtcaggtaaacccttcggaggcctgccatgaaatttggagtaaaactttgaactctgagacaataaagaatgggccttagtaaaggtacattctggtaaatgatgagctgcaaagccggaatctaagatgtctaccacggtgagcactgggagtttatcttcagcatccaggggagttttgcaggatgagccgaggattcgaggatggcccctctcaatgcggcggatagttgcccagcattgtgggtgctgacaaacagccaagccacaggtggtttcgtcccactggctctcatctggcaagtccatagctagaaatggtttaggccaaaggccaaccctgcagcattctagtgctctcccggacggtgtcaacatctccaaggaggcccggagcgccatctcccgcgccgccagcgtcttcgtgctgtacgccacatcctgtgctaacaactttgcaatgaaaggaaagcggaagacgctgaatgccagtgatgtgctctcagccatggaagagatggagttccagcggttcgttaccccattgaaagaagctctggaagcatataggcgggagcagaaaggcaagaaggaggcctcagagcaaaagaagaaggacaaagacaaaaaaacagactcggaagagcaagacaagagcagggatgaggacaatgatgaagacgaagaaaggctggaagaagaagaacagaatgaagaggaagaagtagacaactgaaaagggcgggagactgtggcaccttggaaggtaccacttgaaatgagacgtgctacgtgtttctgtgaagcttttccatgctgggcagagtagtctcaggcaaaagtgcctgaaaagatcagaataaaaactgactagaaataccgtcaaaaccagcacttaccaaactcagagcatctgagtagcagaatcctgttttgcttcatcaatctgaaggttatggccttttgacaagagggattctgaacgactaaattagtcagtttgctcgcttttgtttacttaaatgtatggttagatggtttttgatctgcagtcttccctagtcccccaaataagtaataataacttccatgctgcctgctgtgttccagatcacagaggcagccaaggctcaggaaaaactggggctttgcttatggtcagcctatgtttgattgcacagtctttgacaatagtagcttactaagactgctcagaatgagtaagctttaggaaactactaaaatgctgtgggagaataacaaaatccgttctctctcttcacttgacagaagcattaactgaatttgtttttcatagacccacttggcccaaaacctttctatattgcctgtagatgatcggcctgctggtgtggtagtaatctgatcacagatattcttaaatcagcagtgtggaatggtattagtcaaacatggtgccagtgtcttttacaaaaacagatggcatagtgtcagatgtaccttactctctgctactgtacagctttaggatttgtcatcacctcccggaaggtgtaaaacccaggcttcctcttcttgtagtccatctcccagacttgtgactatggcttttcattcttcaattcttagcctttttctgtttccattcagtgctccaagcgctttttgtttctaagttgagtgcttggggtttgacaggtagtgacgtgtagtttgacactgttaacttgttaaatacagtgaaaagtttgtgagtgaagaatgctgagaagattgtaatgctttgtacaaataaaagtcttgttaaaaaaaaaaaaaaaaaaaaaaaaaaagaaaataaaaaaaaacaaaagataaagaaaaaagaacaaaaaaaaaaggcaaaaagaaacaaaaaagaacaacaacagaaaacaaaccgcgaacaacacgacgcaacaaacacaactacatagaaccacaaaaacaaaaatagaaaaaagagagaaggcagacaaacaaactagaaacaaagactaaacacaaaaagaacaaaaagaagggcgtggagcgcgagcaccaaagtagggctcgagacgaccggagacaaagaagcaggagcacaactctaaccgagaacctacacgagctacgctactagcgagcgaactagccacgaga

SEQ ID NO: 737181 - DNA, 3115 bp, Homo sapiens
  misc_feature (2990)..(2990): n is a, c, g, or t
  misc_feature (2998)..(2998): n is a, c, g, or t
  misc_feature (3005)..(3005): n is a, c, g, or t
  misc_feature (3011)..(3011): n is a, c, g, or t
  misc_feature (3013)..(3013): n is a, c, g, or t
ttttttttgaaaagcagttgtgtttaatcaccaaaattattctgaccctaatggaaaggaaataatctaaatttaaaaaggctggggatttttctcctacatttattttagaggcaagtagaggtgaacaaagaaaatggaatccctaagctcagagctcaggccctggtaaaggctccagagagcagaagcccctctcctcttgcccttatgtgaaacgttgctgccctcaggataccagccatcccgctttggaacacggctgccccaggggatgccttcagtctattcctccagaggcttctcactctgccccagaggactggtcctcctcatcctcatcatcagtgtcctgaagaatcctaagtagtttgagctcagagttccagcctgtgctagccataatttctgaaaagttaaaggagatcttcttttgcctggcagcctgggcttctggcacagcgtccactggagcactaatgtccttgttagtgggttctgtttcatacaattcaggactttttacactgtggtggaaatccgcatggtcatagtagttcatctttggtctctccgtggaatcctgtttcgaagtggttcctttttccatctgctgctgctgcttcatgtcactgttctgacctggcagagttctgtaaccatagagacggtcatgaacggtggtaactggatgtttatgtgaagtgctctggatccctggatcactcttggctttctttttagcctcctgtttcttaataggtgttttcaccttcttctgttgctgctgctgctgctgctgccgctgctgctgtttcctgtaaccttctgtcttcaggttatgtaatttcttcaaacgttcaggatatcgcagtgctggtctttccagggtgaggcggtgtatagatagaaacatcttagaagaaatcacactgtcaggtcggttcttttccaagggaagattctttttcatcatggccaattttatcttcatctctggacagagcatggtttgctttccacctggcaaaagttccttcagtagatcctgaggtaacgcttcggattgagcccagagaggtaggaaatctgaactgaattgttcagacaattgcactggggttgggggaggcacgatcatccctggtgttcctactcgtgttcctgcggactgatttccagagagacccagaaatgacttgcttttcactgccgagttctttcttttcttcttcccatgctggctcacatgtatctctgtttcttctgggatccacaatacaaccatatttctaacatcttcagggcagggaagttgcgtctcattcaaattcaacactggaaatttgggaagtctgttagtacagttgatcaaacttttgtcaggtaaacccttcggaggcctgccatgaaatttggagtaaaactttgaactctgagacaataaagaatgggccttagtaaaggtacattctggtaaatgatgagctgcaaagccggaatctaagatgtctaccacggtgagcactgggagtttatcttcagcatccaggggagttttgcaggatgagccgaggattcgaggatggcccctctcaatgcggcggatagttgcccagcattgtgggtgctgacaaacagccaagccacaggtggtttcgtcccactggctctcatctggcaagtccatagctagaaatggtttaggccaaaggccaaccctgcagcattctagtgctctcccggacggtgtcaacatctccaaggaggcccggagcgccatctcccgcgccgccagcgtcttcgtgctgtacgccacatcctgtgctaacaactttgcaatgaaaggaaagcggaagacgctgaatgccagtgatgtgctctcagccatggaagagatggagttccagcggttcgttaccccattgaaagaagctctggaagcatataggcgggagcagaaaggcaagaaggaggcctcagagcaaaagaagaaggacaaagacaaaaaaacagactcggaagagcaagacaagagcagggatgaggacaatgatgaagacgaagaaaggctggaagaagaagaacagaatgaagaggaagaagtagacaactgaaaagggcgggagactgtggcaccttggaaggtaccacttgaaatgagacgtgctacgtgtttctgtgaagcttttccatgctgggcagagtagtctcaggcaaaagtgcctgaaaagatcagaataaaaactgactagaaataccgtcaaaaccagcacttaccaaactcagagcatctgagtagcagaatcctgttttgcttcatcaatctgaaggttatggccttttgacaagagggattctgaacgactaaattagtcagtttgctcgcttttgtttacttaaatgtatggttagatggtttttgatctgcagtcttccctagtcccccaaataagtaataataacttccatgctgcctgctgtgttccagatcacagaggcagccaaggctcaggaaaaactggggctttgcttatggtcagcctatgtttgattgcacagtctttgacaatagtagcttactaagactgctcagaatgagtaagctttaggaaactactaaaatgctgtgggagaataacaaaatccgttctctctcttcacttgacagaagcattaactgaatttgtttttcatagacccacttggcccaaaacctttctatattgcctgtagatgatcggcctgctggtgtggtagtaatctgatcacagatattcttaaatcagcagtgtggaatggtattagtcaaacatggtgccagtgtcttttacaaaaacagatggcatagtgtcagatgtaccttactctctgctactgtacagctttaggatttgtcatcacctcccggaaggtgtaaaacccaggcttcctcttcttgtagtccatctcccagacttgtgactatggcttttcattcttcaattggngaggccantgggttnctaggncngttccccgggccgggcttcttcggcgccttggcccaccttttttgccgctttttgggggtggacccgcccccgggccgctcgtctcctactgggagacccgg

SEQ ID NO: 737182 - DNA, 3455 bp, Homo sapiens
ttttttttgaaaagcagttgtgtttaatcaccaaaattattctgaccctaatggaaaggaaataatctaaatttaaaaaggctggggatttttctcctacatttattttagaggcaagtagaggtgaacaaagaaaatggaatccctaagctcagagctcaggccctggtaaaggctccagagagcagaagcccctctcctcttgcccttatgtgaaacgttgctgccctcaggataccagccatcccgctttggaacacggctgccccaggggatgccttcagtctattcctccagaggcttctcactctgccccagaggactggtcctcctcatcctcatcatcagtgtcctgaagaatcctaagtagtttgagctcagagttccagcctgtgctagccataatttctgaaaagttaaaggagatcttcttttgcctggcagcctgggcttctggcacagcgtccactggagcactaatgtccttgttagtgggttctgtttcatacaattcaggactttttacactgtggtggaaatccgcatggtcatagtagttcatctttggtctctccgtggaatcctgtttcgaagtggttcctttttccatctgctgctgctgcttcatgtcactgttctgacctggcagagttctgtaaccatagagacggtcatgaacggtggtaactggatgtttatgtgaagtgctctggatccctggatcactcttggctttctttttagcctcctgtttcttaataggtgttttcaccttcttctgttgctgctgctgctgctgctgccgctgctgctgtttcctgtaaccttctgtcttcaggttatgtaatttcttcaaacgttcaggatatcgcagtgctggtctttccagggtgaggcggtgtatagatagaaacatcttagaagaaatcacactgtcaggtcggttcttttccaagggaagattctttttcatcatggccaattttatcttcatctctggacagagcatggtttgctttccacctggcaaaagttccttcagtagatcctgaggtaacgcttcggattgagcccagagaggtaggaaatctgaactgaattgttcagacaattgcactggggttgggggaggcacgatcatccctggtgttcctactcgtgttcctgcggactgatttccagagagacccagaaatgacttgcttttcactgccgagttctttcttttcttcttcccatgctggctcacatgtatctctgtttcttctgggatccacaatacaaccatatttctaacatcttcagggcagggaagttgcgtctcattcaaattcaacactggaaatttgggaagtctgttagtacagttgatcaaacttttgtcaggtaaacccttcggaggcctgccatgaaatttggagtaaaactttgaactctgagacaataaagaatgggccttagtaaaggtacattctggtaaatgatgagctgcaaagccggaatctaagatgtctaccacggtgagcactgggagtttatcttcagcatccaggggagttttgcaggatgagccgaggattcgaggatggcccctctcaatgcggcggatagttgcccagcattgtgggtgctgacaaacagccaagccacaggtggtttcgtcccactggctctcatctggcaagtccatagctagaaatggtttaggccaaaggccaaccctgcagcattctagtgctctcccggacggtgtcaacatctccaaggaggcccggagcgccatctcccgcgccgccagcgtcttcgtgctgtacgccacatcctgtgctaacaactttgcaatgaaaggaaagcggaagacgctgaatgccagtgatgtgctctcagccatggaagagatggagttccagcggttcgttaccccattgaaagaagctctggaagcatataggcgggagcagaaaggcaagaaggaggcctcagagcaaaagaagaaggacaaagacaaaaaaacagactcggaagagcaagacaagagcagggatgaggacaatgatgaagacgaagaaaggctggaagaagaagaacagaatgaagaggaagaagtagacaactgaaaagggcgggagactgtggcaccttggaaggtaccacttgaaatgagacgtgctacgtgtttctgtgaagcttttccatgctgggcagagtagtctcaggcaaaagtgcctgaaaagatcagaataaaaactgactagaaataccgtcaaaaccagcacttaccaaactcagagcatctgagtagcagaatcctgttttgcttcatcaatctgaaggttatggccttttgacaagagggattctgaacgactaaattagtcagtttgctcgcttttgtttacttaaatgtatggttagatggtttttgatctgcagtcttccctagtcccccaaataagtaataataacttccatgctgcctgctgtgttccagatcacagaggcagccaaggctcaggaaaaactggggctttgcttatggtcagcctatgtttgattgcacagtctttgacaatagtagcttactaagactgctcagaatgagtaagctttaggaaactactaaaatgctgtgggagaataacaaaatccgttctctctcttcacttgacagaagcattaactgaatttgtttttcatagacccacttggcccaaaacctttctatattgcctgtagatgatcggcctgctggtgtggtagtaatctgatcacagatattcttaaatcagcagtgtggaatggtattagtcaaacatggtgccagtgtcttttacaaaaacagatggcatagtgtcagatgtaccttactctctgctactgtacagctttaggatttgtcatcacctcccggaaggtgtaaaacccaggcttcctcttcttgtagtccatctcccagacttgtgactatggcttttcattcttcaatttgcagtggcatgatcatagctcattgcatccttgaaatcctgggctcaggtgatcctcccgcctgagcctcctgagtatctgggactacagatgcgtgccaccaagcctggctaattttgtctcatgtcttctaaaaattattttgtgaagccccttcacaaaaaaccttaagggaaatctgatggtgctcaggaatctaactctccctaaaccatcctctttaactgcttctaaaatatctctgttggcctttcttagcctttttctgtttccattcagtgctccaagcgctttttgtttctaagttgagtgcttggggtttgacaggtagtgacgtgtagtttgacactgttaacttgttaaatacagtgaaaagtttgtgagtgaagaatgctgagaagattgtaatgctttgtacaaataaaagtcttgttaaaaaaaaaacacaaacacaacaaacaaaaaaa

SEQ ID NO: 737183 - DNA, 3106 bp, Homo sapiens
  misc_feature (3072)..(3072): n is a, c, g, or t
  misc_feature (3074)..(3074): n is a, c, g, or t
  misc_feature (3078)..(3078): n is a, c, g, or t
ttttttttgaaaagcagttgtgtttaatcaccaaaattattctgaccctaatggaaaggaaataatctaaatttaaaaaggctggggatttttctcctacatttattttagaggcaagtagaggtgaacaaagaaaatggaatccctaagctcagagctcaggccctggtaaaggctccagagagcagaagcccctctcctcttgcccttatgtgaaacgttgctgccctcaggataccagccatcccgctttggaacacggctgccccaggggatgccttcagtctattcctccagaggcttctcactctgccccagaggactggtcctcctcatcctcatcatcagtgtcctgaagaatcctaagtagtttgagctcagagttccagcctgtgctagccataatttctgaaaagttaaaggagatcttcttttgcctggcagcctgggcttctggcacagcgtccactggagcactaatgtccttgttagtgggttctgtttcatacaattcaggactttttacactgtggtggaaatccgcatggtcatagtagttcatctttggtctctccgtggaatcctgtttcgaagtggttcctttttccatctgctgctgctgcttcatgtcactgttctgacctggcagagttctgtaaccatagagacggtcatgaacggtggtaactggatgtttatgtgaagtgctctggatccctggatcactcttggctttctttttagcctcctgtttcttaataggtgttttcaccttcttctgttgctgctgctgctgctgctgccgctgctgctgtttcctgtaaccttctgtcttcaggttatgtaatttcttcaaacgttcaggatatcgcagtgctggtctttccagggtgaggcggtgtatagatagaaacatcttagaagaaatcacactgtcaggtcggttcttttccaagggaagattctttttcatcatggccaattttatcttcatctctggacagagcatggtttgctttccacctggcaaaagttccttcagtagatcctgaggtaacgcttcggattgagcccagagaggtaggaaatctgaactgaattgttcagacaattgcactggggttgggggaggcacgatcatccctggtgttcctactcgtgttcctgcggactgatttccagagagacccagaaatgacttgcttttcactgccgagttctttcttttcttcttcccatgctggctcacatgtatctctgtttcttctgggatccacaatacaaccatatttctaacatcttcagggcagggaagttgcgtctcattcaaattcaacactggaaatttgggaagtctgttagtacagttgatcaaacttttgtcaggtaaacccttcggaggcctgccatgaaatttggagtaaaactttgaactctgagacaataaagaatgggccttagtaaaggtacattctggtaaatgatgagctgcaaagccggaatctaagatgtctaccacggtgagcactgggagtttatcttcagcatccaggggagttttgcaggatgagccgaggattcgaggatggcccctctcaatgcggcggatagttgcccagcattgtgggtgctgacaaacagccaagccacaggtggtttcgtcccactggctctcatctggcaagtccatagctagaaatggtttaggccaaaggccaaccctgcagcattctagtgctctcccggacggtgtcaacatctccaaggaggcccggagcgccatctcccgcgccgccagcgtcttcgtgctgtacgccacatcctgtgctaacaactttgcaatgaaaggaaagcggaagacgctgaatgccagtgatgtgctctcagccatggaagagatggagttccagcggttcgttaccccattgaaagaagctctggaagcatataggcgggagcagaaaggcaagaaggaggcctcagagcaaaagaagaaggacaaagacaaaaaaacagactcggaagagcaagacaagagcagggatgaggacaatgatgaagacgaagaaaggctggaagaagaagaacagaatgaagaggaagaagtagacaactgaaaagggcgggagactgtggcaccttggaaggtaccacttgaaatgagacgtgctacgtgtttctgtgaagcttttccatgctgggcagagtagtctcaggcaaaagtgcctgaaaagatcagaataaaaactgactagaaataccgtcaaaaccagcacttaccaaactcagagcatctgagtagcagaatcctgttttgcttcatcaatctgaaggttatggccttttgacaagagggattctgaacgactaaattagtcagtttgctcgcttttgtttacttaaatgtatggttagatggtttttgatctgcagtcttccctagtcccccaaataagtaataataacttccatgctgcctgctgtgttccagatcacagaggcagccaaggctcaggaaaaactggggctttgcttatggtcagcctatgtttgattgcacagtctttgacaatagtagcttactaagactgctcagaatgagtaagctttaggaaactactaaaatgctgtgggagaataacaaaatccgttctctctcttcacttgacagaagcattaactgaatttgtttttcatagacccacttggcccaaaacctttctatattgcctgtagatgatcggcctgctggtgtggtagtaatctgatcacagatattcttaaatcagcagtgtggaatggtattagtcaaacatggtgccagtgtcttttacaaaaacagatggcatagtgtcagatgtaccttactctctgctactgtacagctttaggatttgtcatcacctcccggaaggtgtaaaacccaggcttcctcttcttgtagtccatctcccagggcatgggttcatctccatcctgggagggcactggtttcttggaggttccccgggccgggcttttccgggccctggcccccttttgcctttctctgggggggggcgcgaccggggngncttnccccgggaagacccgggggggggatcaa

SEQ ID NO: 737184 - DNA, 3105 bp, Homo sapiens
  misc_feature (2976)..(2976): n is a, c, g, or t
ttttttttgaaaagcagttgtgtttaatcaccaaaattattctgaccctaatggaaaggaaataatctaaatttaaaaaggctggggatttttctcctacatttattttagaggcaagtagaggtgaacaaagaaaatggaatccctaagctcagagctcaggccctggtaaaggctccagagagcagaagcccctctcctcttgcccttatgtgaaacgttgctgccctcaggataccagccatcccgctttggaacacggctgccccaggggatgccttcagtctattcctccagaggcttctcactctgccccagaggactggtcctcctcatcctcatcatcagtgtcctgaagaatcctaagtagtttgagctcagagttccagcctgtgctagccataatttctgaaaagttaaaggagatcttcttttgcctggcagcctgggcttctggcacagcgtccactggagcactaatgtccttgttagtgggttctgtttcatacaattcaggactttttacactgtggtggaaatccgcatggtcatagtagttcatctttggtctctccgtggaatcctgtttcgaagtggttcctttttccatctgctgctgctgcttcatgtcactgttctgacctggcagagttctgtaaccatagagacggtcatgaacggtggtaactggatgtttatgtgaagtgctctggatccctggatcactcttggctttctttttagcctcctgtttcttaataggtgttttcaccttcttctgttgctgctgctgctgctgctgccgctgctgctgtttcctgtaaccttctgtcttcaggttatgtaatttcttcaaacgttcaggatatcgcagtgctggtctttccagggtgaggcggtgtatagatagaaacatcttagaagaaatcacactgtcaggtcggttcttttccaagggaagattctttttcatcatggccaattttatcttcatctctggacagagcatggtttgctttccacctggcaaaagttccttcagtagatcctgaggtaacgcttcggattgagcccagagaggtaggaaatctgaactgaattgttcagacaattgcactggggttgggggaggcacgatcatccctggtgttcctactcgtgttcctgcggactgatttccagagagacccagaaatgacttgcttttcactgccgagttctttcttttcttcttcccatgctggctcacatgtatctctgtttcttctgggatccacaatacaaccatatttctaacatcttcagggcagggaagttgcgtctcattcaaattcaacactggaaatttgggaagtctgttagtacagttgatcaaacttttgtcaggtaaacccttcggaggcctgccatgaaatttggagtaaaactttgaactctgagacaataaagaatgggccttagtaaaggtacattctggtaaatgatgagctgcaaagccggaatctaagatgtctaccacggtgagcactgggagtttatcttcagcatccaggggagttttgcaggatgagccgaggattcgaggatggcccctctcaatgcggcggatagttgcccagcattgtgggtgctgacaaacagccaagccacaggtggtttcgtcccactggctctcatctggcaagtccatagctagaaatggtttaggccaaaggccaaccctgcagcattctagtgctctcccggacggtgtcaacatctccaaggaggcccggagcgccatctcccgcgccgccagcgtcttcgtgctgtacgccacatcctgtgctaacaactttgcaatgaaaggaaagcggaagacgctgaatgccagtgatgtgctctcagccatggaagagatggagttccagcggttcgttaccccattgaaagaagctctggaagcatataggcgggagcagaaaggcaagaaggaggcctcagagcaaaagaagaaggacaaagacaaaaaaacagactcggaagagcaagacaagagcagggatgaggacaatgatgaagacgaagaaaggctggaagaagaagaacagaatgaagaggaagaagtagacaactgaaaagggcgggagactgtggcaccttggaaggtaccacttgaaatgagacgtgctacgtgtttctgtgaagcttttccatgctgggcagagtagtctcaggcaaaagtgcctgaaaagatcagaataaaaactgactagaaataccgtcaaaaccagcacttaccaaactcagagcatctgagtagcagaatcctgttttgcttcatcaatctgaaggttatggccttttgacaagagggattctgaacgactaaattagtcagtttgctcgcttttgtttacttaaatgtatggttagatggtttttgatctgcagtcttccctagtcccccaaataagtaataataacttccatgctgcctgctgtgttccagatcacagaggcagccaaggctcaggaaaaactggggctttgcttatggtcagcctatgtttgattgcacagtctttgacaatagtagcttactaagactgctcagaatgagtaagctttaggaaactactaaaatgctgtgggagaataacaaaatccgttctctctcttcacttgacagaagcattaactgaatttgtttttcatagacccacttggcccaaaacctttctatattgcctgtagatgatcggcctgctggtgtggtagtaatctgatcacagatattcttaaatcagcagtgtggaatggtattagtcaaacatggtgccagtgtcttttacaaaaacagatggcatagtgtcagatgtaccttactctctgctactgtacagctttaggatttgtcatcacctcccggaaggtgtaaaacccaggcttcctcttcttgtagtccatctcccaaattggacatgggttcatctnaacatgagggggcaacgggtttttggaggttccctgggcggggtcttttctggcgtcggcccctttttgcctttctgggggggggacggccggggggcctgctacctgagacccccgggggccttccgc

SEQ ID NO: 737185 - DNA, 3112 bp, Homo sapiens
  misc_feature (2978)..(2978): n is a, c, g, or t
  misc_feature (2986)..(2986): n is a, c, g, or t
ttttttttgaaaagcagttgtgtttaatcaccaaaattattctgaccctaatggaaaggaaataatctaaatttaaaaaggctggggatttttctcctacatttattttagaggcaagtagaggtgaacaaagaaaatggaatccctaagctcagagctcaggccctggtaaaggctccagagagcagaagcccctctcctcttgcccttatgtgaaacgttgctgccctcaggataccagccatcccgctttggaacacggctgccccaggggatgccttcagtctattcctccagaggcttctcactctgccccagaggactggtcctcctcatcctcatcatcagtgtcctgaagaatcctaagtagtttgagctcagagttccagcctgtgctagccataatttctgaaaagttaaaggagatcttcttttgcctggcagcctgggcttctggcacagcgtccactggagcactaatgtccttgttagtgggttctgtttcatacaattcaggactttttacactgtggtggaaatccgcatggtcatagtagttcatctttggtctctccgtggaatcctgtttcgaagtggttcctttttccatctgctgctgctgcttcatgtcactgttctgacctggcagagttctgtaaccatagagacggtcatgaacggtggtaactggatgtttatgtgaagtgctctggatccctggatcactcttggctttctttttagcctcctgtttcttaataggtgttttcaccttcttctgttgctgctgctgctgctgctgccgctgctgctgtttcctgtaaccttctgtcttcaggttatgtaatttcttcaaacgttcaggatatcgcagtgctggtctttccagggtgaggcggtgtatagatagaaacatcttagaagaaatcacactgtcaggtcggttcttttccaagggaagattctttttcatcatggccaattttatcttcatctctggacagagcatggtttgctttccacctggcaaaagttccttcagtagatcctgaggtaacgcttcggattgagcccagagaggtaggaaatctgaactgaattgttcagacaattgcactggggttgggggaggcacgatcatccctggtgttcctactcgtgttcctgcggactgatttccagagagacccagaaatgacttgcttttcactgccgagttctttcttttcttcttcccatgctggctcacatgtatctctgtttcttctgggatccacaatacaaccatatttctaacatcttcagggcagggaagttgcgtctcattcaaattcaacactggaaatttgggaagtctgttagtacagttgatcaaacttttgtcaggtaaacccttcggaggcctgccatgaaatttggagtaaaactttgaactctgagacaataaagaatgggccttagtaaaggtacattctggtaaatgatgagctgcaaagccggaatctaagatgtctaccacggtgagcactgggagtttatcttcagcatccaggggagttttgcaggatgagccgaggattcgaggatggcccctctcaatgcggcggatagttgcccagcattgtgggtgctgacaaacagccaagccacaggtggtttcgtcccactggctctcatctggcaagtccatagctagaaatggtttaggccaaaggccaaccctgcagcattctagtgctctcccggacggtgtcaacatctccaaggaggcccggagcgccatctcccgcgccgccagcgtcttcgtgctgtacgccacatcctgtgctaacaactttgcaatgaaaggaaagcggaagacgctgaatgccagtgatgtgctctcagccatggaagagatggagttccagcggttcgttaccccattgaaagaagctctggaagcatataggcgggagcagaaaggcaagaaggaggcctcagagcaaaagaagaaggacaaagacaaaaaaacagactcggaagagcaagacaagagcagggatgaggacaatgatgaagacgaagaaaggctggaagaagaagaacagaatgaagaggaagaagtagacaactgaaaagggcgggagactgtggcaccttggaaggtaccacttgaaatgagacgtgctacgtgtttctgtgaagcttttccatgctgggcagagtagtctcaggcaaaagtgcctgaaaagatcagaataaaaactgactagaaataccgtcaaaaccagcacttaccaaactcagagcatctgagtagcagaatcctgttttgcttcatcaatctgaaggttatggccttttgacaagagggattctgaacgactaaattagtcagtttgctcgcttttgtttacttaaatgtatggttagatggtttttgatctgcagtcttccctagtcccccaaataagtaataataacttccatgctgcctgctgtgttccagatcacagaggcagccaaggctcaggaaaaactggggctttgcttatggtcagcctatgtttgattgcacagtctttgacaatagtagcttactaagactgctcagaatgagtaagctttaggaaactactaaaatgctgtgggagaataacaaaatccgttctctctcttcacttgacagaagcattaactgaatttgtttttcatagacccacttggcccaaaacctttctatattgcctgtagatgatcggcctgctggtgtggtagtaatctgatcacagatattcttaaatcagcagtgtggaatggtattagtcaaacatggtgccagtgtcttttacaaaaacagatggcatagtgtcagatgtaccttactctctgctactgtacagctttaggatttgtcatcacctcccggaaggtgtaaaacccaggcttcctcttcttgtagtccatctcccaagaatgggaatgggttcactctncattctgngcagggccactgattcttagcacagtttccctggccgggcttcctccggcttctggccaaccatttattgcctttattcgggggggaacgcgtaacacggggccgcggtgcacacgggagagcggg

SEQ ID NO: 737186 - DNA, 3603 bp, Homo sapiens
ttttttttgaaaagcagttgtgtttaatcaccaaaattattctgaccctaatggaaaggaaataatctaaatttaaaaaggctggggatttttctcctacatttattttagaggcaagtagaggtgaacaaagaaaatggaatccctaagctcagagctcaggccctggtaaaggctccagagagcagaagcccctctcctcttgcccttatgtgaaacgttgctgccctcaggataccagccatcccgctttggaacacggctgccccaggggatgccttcagtctattcctccagaggcttctcactctgccccagaggactggtcctcctcatcctcatcatcagtgtcctgaagaatcctaagtagtttgagctcagagttccagcctgtgctagccataatttctgaaaagttaaaggagatcttcttttgcctggcagcctgggcttctggcacagcgtccactggagcactaatgtccttgttagtgggttctgtttcatacaattcaggactttttacactgtggtggaaatccgcatggtcatagtagttcatctttggtctctccgtggaatcctgtttcgaagtggttcctttttccatctgctgctgctgcttcatgtcactgttctgacctggcagagttctgtaaccatagagacggtcatgaacggtggtaactggatgtttatgtgaagtgctctggatccctggatcactcttggctttctttttagcctcctgtttcttaataggtgttttcaccttcttctgttgctgctgctgctgctgctgccgctgctgctgtttcctgtaaccttctgtcttcaggttatgtaatttcttcaaacgttcaggatatcgcagtgctggtctttccagggtgaggcggtgtatagatagaaacatcttagaagaaatcacactgtcaggtcggttcttttccaagggaagattctttttcatcatggccaattttatcttcatctctggacagagcatggtttgctttccacctggcaaaagttccttcagtagatcctgaggtaacgcttcggattgagcccagagaggtaggaaatctgaactgaattgttcagacaattgcactggggttgggggaggcacgatcatccctggtgttcctactcgtgttcctgcggactgatttccagagagacccagaaatgacttgcttttcactgccgagttctttcttttcttcttcccatgctggctcacatgtatctctgtttcttctgggatccacaatacaaccatatttctaacatcttcagggcagggaagttgcgtctcattcaaattcaacactggaaatttgggaagtctgttagtacagttgatcaaacttttgtcaggtaaacccttcggaggcctgccatgaaatttggagtaaaactttgaactctgagacaataaagaatgggccttagtaaaggtacattctggtaaatgatgagctgcaaagccggaatctaagatgtctaccacggtgagcactgggagtttatcttcagcatccaggggagttttgcaggatgagccgaggattcgaggatggcccctctcaatgcggcggatagttgcccagcattgtgggtgctgacaaacagccaagccacaggtggtttcgtcccactggctctcatctggcaagtccatagctagaaatggtttaggccaaaggccaaccctgcagcattctagtgctctcccggacggtgtcaacatctccaaggaggcccggagcgccatctcccgcgccgccagcgtcttcgtgctgtacgccacatcctgtgctaacaactttgcaatgaaaggaaagcggaagacgctgaatgccagtgatgtgctctcagccatggaagagatggagttccagcggttcgttaccccattgaaagaagctctggaagcatataggcgggagcagaaaggcaagaaggaggcctcagagcaaaagaagaaggacaaagacaaaaaaacagactcggaagagcaagacaagagcagggatgaggacaatgatgaagacgaagaaaggctggaagaagaagaacagaatgaagaggaagaagtagacaactgaaaagggcgggagactgtggcaccttggaaggtaccacttgaaatgagacgtgctacgtgtttctgtgaagcttttccatgctgggcagagtagtctcaggcaaaagtgcctgaaaagatcagaataaaaactgactagaaataccgtcaaaaccagcacttaccaaactcagagcatctgagtagcagaatcctgttttgcttcatcaatctgaaggttatggccttttgacaagagggattctgaacgactaaattagtcagtttgctcgcttttgtttacttaaatgtatggttagatggtttttgatctgcagtcttccctagtcccccaaataagtaataataacttccatgctgcctgctgtgttccagatcacagaggcagccaaggctcaggaaaaactggggctttgcttatggtcagcctatgtttgattgcacagtctttgacaatagtagcttactaagactgctcagaatgagtaagctttaggaaactactaaaatgctgtgggagaataacaaaatccgttctctctcttcacttgacagaagcattaactgaatttgtttttcatagacccacttggcccaaaacctttctatattgcctgtagatgatcggcctgctggtgtggtagtaatctgatcacagatattcttaaatcagcagtgtggaatggtattagtcaaacatggtgccagtgtcttttacaaaaacagatggcatagtgtcagatgtaccttactctctgctactgtacagctttaggatttgtcatcacctcccggaaggtgtaaaacccaggcttctaagttgagtgcttggggtttgacaggtagtgacgtgtagtttgacactgttaacttgttaaatacagtgaaaagtttgtgagtgaagaatgctgagaagattgtaatgctttgtacaaataaaagtcttgttagcttagcctttttctgtttccattcagtgctccaagcgctttttgtttctaagttgagtgcttggggtttgacaggtagtgacgtgtagtttgacactgttaacttgttaaatacagtgaaaagtttgtgagtgaagaatgctgagaagattgtaatgctttgtacaaataaaagtcttgttaaaaaaaaaaaaaaaaaaaaaaaaaaagaaaataaaaaaaaacaaaagataaagaaaaaagaacaaaaaaaaaaggcaaaaagaaacaaaaaagaacaacaacagaaaacaaaccgcgaacaacacgacgcaacaaacacaactacatagaaccacaaaaacaaaaatagaaaaaagagagaaggcagacaaacaaactagaaacaaagactaaacacaaaaagaacaaaaagaagggcgtggagcgcgagcaccaaagtagggctcgagacgaccggagacaaagaagcaggagcacaactctaaccgagaacctacacgagctacgctactagcgagcgaactagccacgaga

SEQ ID NO: 737187 - DNA, 2034 bp, Homo sapiens
ttttttttgaaaagcagttgtgtttaatcaccaaaattattctgaccctaatggaaaggaaataatctaaatttaaaaaggctggggatttttctcctacatttattttagaggcaagtagaggtgaacaaagaaaatggaatccctaagctcagagctcaggccctggtaaaggctccagagagcagaagcccctctcctcttgcccttatgtgaaacgttgctgccctcaggataccagccatcccgctttggaacacggctgccccaggggatgccttcagtctattcctccagaggcttctcactctgccccagaggactggtcctcctcatcctcatcatcagtgtcctgaagaatcctaagtagtttgagctcagagttccagcctgtgctagccataatttctgaaaagttaaaggagatcttcttttgcctggcagcctgggcttctggcacagcgtccactggagcactaatgtccttgttagtgggttctgtttcatacaattcaggactttttacactgtggtggaaatccgcatggtcatagtagttcatctttggtctctccgtggaatcctgtttcgaagtggttcctttttccatctgctgctgctgcttcatgtcactgttctgacctggcagagttctgtaaccatagagacggtcatgaacggtggtaactggatgtttatgtgaagtgctctggatccctggatcactcttggctttctttttagcctcctgtttcttaataggtgttttcaccttcttctgttgctgctgctgctgctgctgccgctgctgctgtttcctgtaaccttctgtcttcaggttatgtaatttcttcaaacgttcaggatatcgcagtgctggtctttccagggtgaggcggtgtatagatagaaacatcttagaagaaatcacactgtcaggtcggttcttttccaagggaagattctttttcatcatggccaattttatcttcatctctggacagagcatggtttgctttccacctggcaaaagttccttcagtagatcctgaggtaacgcttcggattgagcccagagaggtaggaaatctgaactgaattgttcagacaattgcactggggttgggggaggcacgatcatccctggtgttcctactcgtgttcctgcggactgatttccagagagacccagaaatgacttgcttttcactgccgagttctttcttttcttcttcccatgctggctcacatgtatctctgtttcttctgggatccacaatacaaccatatttctaacatcttcagggcagggaagttgcgtctcattcaaattcaacactggaaatttgggaagtctgttagtacagttgatcaaacttttgtcaggtaaacccttcggaggcctgccatgaaatttggagtaaaactttgaactctgagacaataaagaatgggccttagtaaaggtacattctggtaaatgatgagctgcaaagccggaatctaagatgtctaccacggtgagcactgggagtttatcttcagcatccaggggagttttgcaggatgagccgaggattcgaggatggcccctctcaatgcggcggatagttgcccagcattgtgggtgctgacaaacagccaagccacaggtggtttcgtcccactggctctcatctggcaagtccatagctagaaatggtttaggccaaaggccaaccctgcagcattctagtgctctcccggacggtgtcaacatctccaaggaggcccggagcgccatctcccgcgccgccagcgtcttcgtgctgtacgccacatcctgtgctaacaactttgcaatgaaaggaaagcggaagacgctgaatgccagtgatgtgctctcagccatggaagagatggagttccagcggttcgttaccccattgaaagaagctctggaagcatataggcgggagcagaaaggcaagaaggaggcctcagagcaaaagaagaaggacaaagaaaaataaagccctcctgggggcttggcca

SEQ ID NO: 737188 - DNA, 2487 bp, Homo sapiens
aacggacggaagctccattgagccaaataagttggtgagaaggttcccgacgcggcgatggcgagaagcagagaaatggacctggggaggggcgtgcggggtgcggtagggttggatggaagccttggcgggccaaaaccactgcggcttcaaaatccggatgcgccggtatttgaggcggaggcggggctgtggggggaggagggaggctatggcgctcagagcactgtgggacactgtaggccacgtggggcggaacggaaacctcgcagggtcagaccgtagcgacgcgggaagtccggacgcagtagctccctgaagcggaggcgaaggggagtttaagccccagcggcggcaatggcggagaggcccgaggacctaaacctgcccaatgccgtgatcaccaggatcatcaaggaggcggtgagcagctcggggggggcggacgaacgggcaggagggaagcaggtgctggaacggcagctttgctcacccccggtctcctcgcctcccggacggtgtcaacatctccaaggaggcccggagcgccatctcccgcgccgccagcgtcttcgtgctgtacgccacatcctgtgctaacaactttgcaatgaaaggaaagcggaagacgctgaatgccagtgatgtgctctcagccatggaagagatggagttccagcggttcgttaccccattgaaagaagctctggaagcatataggcgggagcagaaaggcaagaaggaggcctcagagcaaaagaagaaggacaaagacaaaaaaacagactcggaagagcaagacaagagcagggatgaggacaatgatgaagacgaagaaaggctggaagaagaagaacagaatgaagaggaagaagtagacaactgaaaagggcgggagactgtggcaccttggaaggtaccacttgaaatgagacgtgctacgtgtttctgtgaagcttttccatgctgggcagagtagtctcaggcaaaagtgcctgaaaagatcagaataaaaactgactagaaataccgtcaaaaccagcacttaccaaactcagagcatctgagtagcagaatcctgttttgcttcatcaatctgaaggttatggccttttgacaagagggattctgaacgactaaattagtcagtttgctcgcttttgtttacttaaatgtatggttagatggtttttgatctgcagtcttccctagtcccccaaataagtaataataacttccatgctgcctgctgtgttccagatcacagaggcagccaaggctcaggaaaaactggggctttgcttatggtcagcctatgtttgattgcacagtctttgacaatagtagcttactaagactgctcagaatgagtaagctttaggaaactactaaaatgctgtgggagaataacaaaatccgttctctctcttcacttgacagaagcattaactgaatttgtttttcatagacccacttggcccaaaacctttctatattgcctgtagatgatcggcctgctggtgtggtagtaatctgatcacagatattcttaaatcagcagtgtggaatggtattagtcaaacatggtgccagtgtcttttacaaaaacagatggcatagtgtcagatgtaccttactctctgctactgtacagctttaggatttgtcatcacctcccggaaggtgtaaaacccaggcttcctcttcttgtagtccatctcccagacttgtgactatggcttttcattcttcaattcatgacgagtgccaaacttgattttctctaggcacagctttctccctctgtgcctcctgcttcctttctctctcctgcctctcctctgctccccatcccactttctcatctgcctccttttctcacttctgtcagtctgtaagctttgataacctgcttaatactccaaagtgtgagttcctctgatctcttgattccttagttctaatctcacgttttgtttttaagagatggagtctctcactctgtggcccaggctggagtgcagtggcatgatcatagctcattgcatccttgaaatcctgggctcaggtgatcctcccgcctgagcctcctgagtatctgggactacagatgcgtgccaccaagcctggctaattttgtctcatgtcttctaaaaattattttgtgaagccccttcacaaaaaaccttaagggaaatctgatggtgctcaggaatctaactctccctaaaccatcctctttaactgcttctaaaatatctctgttggcctttcttagcctttttctgtttccattcagtgctccaagcgctttttgtttctaagttgagtgcttggggtttgacaggtagtgacgtgtagtttgacactgttaacttgttaaatacagtgaaaagtttgtgagtgaagaatgctgagaagattgtaatgctttgtacaaataaaagtcttgttaaaaaaaaaacacaaacacaacaaacaaaaaaa

SEQ ID NO: 737189 - DNA, 836 bp, Homo sapiens
ttttttttcttgtaaaatgaggtctctttctcaaaccaacaattttgtagttgttaggataaaggaatcaaatataacatctcaagcaaatggaccttcttggacaagttcctggtctcctctttaaatgccaactgggtgctaaggcactgtttaggtgttttgggcacatcatctcactaaatcctcacaccaccacatgtcagtgatggtttctattttacatacagaagttttgggactctaagtaacccatccaggtttaccacagtggaactggggtttaggcttagactcaccgcattccaaatccttgctcttagctttacaccaactatctctacctaatgtcaaaggcacaggctccttattgtgagtcatttcccccatactatatggctttttggtttggctacacagagcactattcctaatcttacttaaaatcaaattgatcaaagtcaaattttaattggaagaaaaaggggtgagtttaacccaagatactcaactttttcatttctaagtcttgcggagtataccccttgctcattaaagtcattaggaagctccctattcagaaactttcatatatggcacacgatttattcctttatctggcaccaccctgtttgaagttacacagacctgatcagaatcttggcatcgcacttaccagctgaggggaccttaggaaagttagttatgctttctgagcctcagtttatttatctacgaaatggaacccctaccttatagacttgctatgagaattaaataagataatatatttagaagccaacacatatttgctgaataaatgactgcctacaacg

SEQ ID NO: 737190 - DNA, 1866 bp, Homo sapiens
tgacgagctcttctcccatcacagccccatgaagaagggggagtcccagatcacaccccctttctctccatttgttggagcaggaaattggcaagaagtagaaaccagtgagcgagcgcactcagggccaagcaatgtgcggctctcccagctgacgccactcgggactgcccaagaccactgagcaataaccacgcctggtctggggtgtccagctcctgggatgcagatggctgaggttggggcacccttgggacagtgctctccagtccaacttgggccaagaaggtggcctggggtccttgctctgcctgcccccacctctactctctactagtcctgtggttgcgcctgtaccatctctgtcccccctcaagtgtgtgtactcactgcacccctattctgtccccctccctttcagaacctgtcttgtgtgtgagggcctcactcctctctcggaggtgcccagaggactgtgggaagaagggcaaagtctctttccagaggagcgtgcacagaccctcatctcccacgaccacacttttggggtgaacagggtgactttgttaggtcgattcttctgcagagatggtgaagtactctatctgcccacccacccactaaaagccatagctccgtccgcctggcctccccccagctctatagcaatagcccccttcccccttccctcctgggcatccagggtgtccagctaggggcccccaccgcactctggtcccagggatcttccagtggcctgcctgcttctcccgaagtgaccccatcagctccacccaactcccatccctcttccagcaaccacagataatgacaattgtttgtgaggtgcttggagatcccctagatgaaaggttctgggtgctggggcagctgactcactgactctcagctgaggtgctggaggtgcctgggaaaggaaataaggcaagctgggggagcacctgtagcagatacagggttccagttttcacagaaattcccctcctcgccctcctggaaataatggaaacccctccacccgcctgcacagaaccctctgtgcagcagaacgagactgggagctggagtgcatggcccgctcttggccacaggggcccaactctcctcagcctcagggccctggagaggccccaccctccctgggtctggcttgagagcccacctggccaaagggaaacctcgcacccccacgcgctcctggcccctggaatatcttggtgactaagaagggaaaggactgcatttctctctcctctgctgcacgaatccccattgggagagagagtgttgaagaggacactcaggtccctaggcggagctcctgccacaccccaagtatggacagctccaggacacagagctgcaggtggggacctccccctgctctggaaatcagccagggagcactgggcagtgcggtttgaggctctgtacccctggcccccacagctcagccacagcaccctctagcttgggggactagtccagggccaaaatgggataacccttccccatataagcagtaggatggcgtcccccctggtggagagaggaaggaggcctagagggtgtggggcagcttcgaagcgcggggagccgggggtctccaagcaccttctcctggacatgccagccttgaatgggggatgtgcagggcttcaaacccacctggcaggagccctgtggcagggcagagggaccctgctccaaattctctgttggctgcgcttttgtatccaatgcttttcagagtgtattcactcacccacagaaatagagccctgtgctttaggggtgactgtcatatgccttattcttaataaaatctctgaaaaacaaaaaaaa

SEQ ID NO: 737191 - DNA, 974 bp, Homo sapiens
  misc_feature (2)..(2): n is a, c, g, or t
  misc_feature (15)..(15): n is a, c, g, or t
cnaacgtaaataatntattgaaattcttgaaaagtgcagagtctcaagggcgaagtgaaatcttaatgagtctacagaaagttctaagtggactgggtggtgcagcagcttcctcccatcgtgatatttacaagaatgccaggtctctcttgactgataggtcaatggctgttcgatgtgcagtggccaagtgtctactagaactacagaatgaagctgtatttatgtggactgctgaactagaaaatatagccactctctgctttaaggctttggaaaactcaaattatggggtacgagtggcagtgtctaaacttttaggaacagtcatggccacagcattaatgccaaaacaggcaacagtaatgcgtcagaatgtgaagcgagcaacatttgatgaagtcttagaactcatggccacaggatttctgcgtggagggtcaggtttcttaaagagcggtggagaaatgttaaaagttggagggtccgttaatcgtgaagtgagagttggagttacgcaggcgtatgttgtttttgtgacaacattgggtggtcagtggttggagcgcagctttgccacgttcctgtcccatgtacttgatctggtttcccatcctcgggcaacacaaacacatgtggaggctgtgtactccagacgatgtgtttcctttatcctaagagctactgtgggcagtttgctaggtgaaaaagcccagattgcagctgccaaagaaatctgccaagctattggaaaacaaatgaaagccgtagaagcagtagtgaatgacacaagtggagaaaacaaatctggcgcagcagacattgcagcaagccagcatgtgatggtctgtgccctccaggaactcgggagcctggtgcagagcttgaatgccaccgcatcccctcttattcaagaagcatctatagggcttttggagattgtgacttcagtgctgcttcatccaagcatggct

SEQ ID NO: 737192 - DNA, 2123 bp, Homo sapiens; identical to SEQ ID NO: 338851

SEQ ID NO: 737193 - DNA, 1417 bp, Homo sapiens
gtgtaatggatttaaatttttaggtatctttgtctactttttcataaaatgaaagaacctggctgggcgcggtgactcatgcctgtaatcccagcacttctgggaggccgagacaggtggatcacgaggtcaggagttcaagactagcctggccaagatgctgaaaccccgtctctactgaaaatacaaaaattagccaggcatggtgtcatgcacctgtcatcccagctacttgggaggctgaggcaggagaatcgcatgaacccgggcagcagagattgcagtgagccaagatcgcaccactgtactccagcctgggcgacagagcaagactccatctcaaaaaattaaaaaaaaaaaaaaaagaacccaaatggcattttccttgatgtagtcacattttttgtgatgataatgtacaggatatctagcaattatgctggacatataagcacataagatttatgaaatgattttggataatgtataaggtactggaatctggcactttatttgctacttattttcagcactttatttgctattttctgtctctgatgagtagatccccatttgtaccacagtattaatttttaatttttcttgattatcattataaacagaatcagaggcagcactgagttttcaaattactcttgctttgcttcacagttccgtagagatatctcaggggtgcctgtgagcagatgctgagtgaaccctgccccagtcttgtccctacctctaccccacctctgtatcatagaaagagaaccagatgttttaggttcaagtcctgtctcttatatttattaactgtgaaaccctatttcacttctttgagctttgattttcatctttaatgataattatttcagtagatgatgatgatgatgatgatgatgatgtaatgttttaaagtgctaactatgtgccaggcactgaattaagtgtattacaaaatttaatcctcataaaagcccttgtgaattatatggactgttactactattttatagatgaggaaattgagacttagattctgtaactatttttctaaaaactgttctgtgtcggaaatgaaattcaaattccgggcagccaaataccaaagcttgaattcttagccatgagctttatacctcctctgcagaatttttgtgaggattgcatttgctactatatgtggaaggacttcataaaatatgaaactctgtactagggatgccaattcagttgcattcccagtaacatcttaatctattggtaactactgtatagaaagcactgtgatgagaaaagttttttgtgtccacctcaggcgggaatgagaactgagatcagttagtagtatctgctgtgggtatgctttgtccttattgtgttacacatagttcagcgtctgacgggtacgaga

SEQ ID NO: 737194 - DNA, 1463 bp, Homo sapiens
cattgtgatacactgtgatgagtatactatcagaaataacaataagcactatgagaatatggatataacagtttgagttagtcacaagaagatgaaggtttgctgtatttctgacatgtttttttaaatgtgttggatgttttctgcttccttttttggatcatttatatattatttctcaacttttttacttaatattttacgttctgaaatattttatatattgagatatgatattgaagcttttgaatctcttcatgttttcattatattgtatgtacttcagtaattcatagaaatattggaatatatttacttaaaacctaattttttagaaagatattatttaattgactattcttacttgccaggtactttctagaatacttaattttattgtacttttcattatttaccgtttataatttggaggtaagaccattagacccaaagaacttttgtcttggtgtgttcttgtttaaatatggaatttattttacaaaatagttttgttttgtatacatgtctagtctcaagggcgaagtgaaatcttaatgagtctacagaaagttctaagtggactgggtggtgcagcagcttcctcccatcgtgatatttacaagaatgccaggtctctcttgactgataggtcaatggctgttcgatgtgcagtggccaagtgtctactagaactacagaatgaagctgtatttatgtggactgctgaactagaaaatatagccactctctgctttaaggctttggaaaactcaaattatggggtacgagtggcagtgtctaaacttttaggaacagtcatggccacagcattaatgccaaaacaggcaacagtaatgcgtcagaatgtgaagcgagcaacatttgatgaagtcttagaactcatggccacaggatttctgcgtggagggtcaggtttcttaaagagcggtggagaaatgttaaaagttggagggtccgttaatcgtgaagtgagagttggagttacgcaggcgtatgttgtttttgtgacaacattgggtggtcagtggttggagcgcagctttgccacgttcctgtcccatgtacttgatctggtttcccatcctcgggcaacacaaacacatgtggaggctgtgtactccagacgatgtgtttcctttatcctaagagctactgtgggcagtttgctaggtgaaaaagcccagattgcagctgccaaagaaatctgccaagctattggaaaacaaatgaaagccgtagaagcagtagtgaatgacacaagtggagaaaacaaatctggcgcagcagacattgcagcaagccagcatgtgatggtctgtgccctccaggaactcgggagcctggtgcagagcttgaatgccaccgcatcccctcttattcaagaagcatctatagggcttttggagattgtgacttcagtgctgcttcatccaagcatggct

SEQ ID NO: 737195 - DNA, 314 bp, Homo sapiens
  misc_feature (231)..(231): n is a, c, g, or t
acttctttaacaagcccccccgtttcccctgaccttcacgaaagccgaaggaggcggggaaagggggtgagggtcttttccaaagggtactgacctcttcccaacgtctccccctgctcgccagtccgccacacgtacccagcttttgagttcagcttttcaaaataaccacaatcatgataaacttctacaaaacgtgattctcctcccctcccaccccatcccccaagncaatagtgtgggattcggggagggagagagcgagctaaagggactctttccaagtccggctcccccttttccccccggccgcc

SEQ ID NO: 737196 - DNA, 1491 bp, Homo sapiens
ggaaagggggcaaagctgattgattacaagtaaaatgaaaaaatactgtttctgctaagacagaaagggacctttaatacgcgcccttttaatctgattgtcagaagtaggacagtgcacagtttctcaaagatggccagaggatctgataaaatacaaaagaattgtggaggcgatagtaaacattcttcttcctgtgctgctgatccacaggcttctctttgagaatgactggcctgcaagctgacaagggtgtttacccgctgactctggtggagtccatttggttcaccagaagggcttgagggcagacaaaagaccttgagctctctgcgtgtgccagtcatcctgtgtttcctgacccctgtctctctcagaacccactcacagaaccagatccgagagcctgggagagcttgcccggatttcagcccttgatttgccacttaagcacgtgattgccatctgtgcttgcttaaaggggatgctgattaggagagtgatacttcatttggataatacgatttaagcccaagtgcaagaggtgttgcttgtgctggaactgcaggaaatatgagccatgtaaacgcaccacccaacctcctgcagtggtccaggtggtcctaccggtcactgactacagtatgtctgtgtgggagatgacagtgatcccaagccctggtttccatgcaggcatatggactcctgcttaatgagattgaaggatagtaattgtctccacccttatttagatgatgcccatcgctctggcgtttgtgttttcaaatgttttggataaagcgagtgccgggagagtgtgctatttagtgagctcagtccagcctcggtcttgagcattgactgtgggtcctctgctgttggggttctcgacttgcccaccagctgccttatctcaggttgagaaaggtagtgggaaccccattttgcaaatggggaaactcttggtgacttgaagtcacctggttaaaatggcacacaactttgaagctgcctgccattttaaccaagtgtgccagacataagtttctggagtgtgtatctcgtctatgtgacactccagtaccaggttcttcccacctcagggatcagtttatggaaacacctcagaattgagaccagggcttctcaatctgtgatttggggctggataaatattagttgtgaggggcgtgttgtgcattgtaggttggttagcagcgttctcggcctctacaccctctcagttgtgaaaaccaaaaatgtgtattgagatcagccctggttgagaatcaccaagctagacctctttgggttttgttgggcaatttaacggaactctggctatgccttttttgaggcagttgtagctagcttggttcattgaagctaggtttgaaatcattcataactaagttatgatgttaggaattcgacagtccatgcattgtttcatctgaaaaacaactactctaccttgcacgacaacacata

SEQ ID NO: 737197 - DNA, 749 bp, Homo sapiens
  misc_feature (623)..(623): n is a, c, g, or t
cggaaatttcggagactgtagagaaagtcattcttccacccagacctgtattgaatgatgtaagtgctgcattacagaagctgtgtggagaagtatggttaagttatccagctggaagggaattaggtcctggagaagtgaacccagaatttcctgaagcagtacagccagtatgtagccccctaaatcctccaggagtgatatcaccatgggctacgatggacaccatagttccagacaggaaggatttttattcctccaatgtagttcctgataaaactcatgaagttggatcttatttagctgcccaaatgtctccatcagaccagacgcttagctcatttgcttccattgttgctcaatatggcaaaggcctccctcaggaagtggaagaaattgtgagggaaacaattgttcaacccaaatcagagttcctcgaattcagtgctggcttagaaaaactactgaaggaagaaactgaaaccttcccctcaaaatatgaaagtgatacagggaatctttctccatcaaagttaataggtagtacagaggagcccaggcgagccacttctgaatgccatcctgaggaattaaaagaaacagtagaaaaggccgaggctccnttaataactgagagtgcttttgatgctggttttgagaaacttcttaaagaaataactgaagctcctccttatcagccccaggtgtcagtgagagaagaaactcacgagaaggagtcctcacagtca

SEQ ID NO: 737198 - DNA, 1830 bp, Homo sapiens
tatcgagtttatatttcatctccccaacgcatttgtgacattcttaagggcgtgaaccatgtactcaatagggccctgatgatagaaaagaaaatcagcttggtccctgttctcaagttcatagtttagtgtgggagactaatacaataactcgccgattcaacagatatttttccaacgtccgtatgtattgggtggaaaaggtgaggcaagagttgtatttcccagactcctgaacaggttgcgagatgattgactcctgagggagaccttctcaccttttcattggttgtcgctggccctctcgtctatcacccaaccaaccccgaatgcctcttgtaagccccacctccggcagccagccaatcagaagtgccgggggccagggtgctgctggggcactgacgcggtttcgattctagcgaaaaatgatttggctcggactgtcccgtgacaggcggtgcgaggaggccaggcccgcgcccgccgagccctagggccgctgctgccgacagccatggaggacgagcagcctgacagcctggagggctgggtgccggtccgggagggcctcttcgccgagcccgagaggcaccggctgcgcttcctggtggcctggaacggcgcggagggcaagttcgctgtgacttgtcacgaccgtaccgcgcagcagcggcggctgcgcgagggggcccggttggggcccgagcccgagcccaagcctgaggccgccgtctccccgtccagctgggccggcctgctctcggccgcggggctccgcggcgcgcaccggcagttggcggcgctgtggccgcctctggagcgctgcttcccgcggctgccgccggagctggacgtgggcggcggcggggcctggggtctggggctcgggctgtgggcgctgctgtggccgacgcgcgcgggtcccggcgaggcggcgctgcaggagctgtgcgggcagctggaacgctatctgggcgcggcggccgacggctgcggcggcgccacagtgcgcgacgcactcttcccggctgagggcggcgcggccgactgcgaaagcccgcgcgagttccgggagcgggccttgcgcgcgcggtgggtcgaggcggacgcgcggctgcgccaggttattcaaggacacggaaaagccaacaccatggtagcattaatgaacgtttaccaagaggaagatgaagcataccaggaattggttaccgtggcaaccatgttcttccagtacttattgcagccatttagggctatgcgagaagttgcaactttatgtaagcttgatattttgaagtctttggatgaggatgacctaggtcctagaagggtagttgccctggagaaagaagctgaagaatggaccagacgggctgaagaagctgtcgtctctattcaggatatcacagtgaattattttaaggagacagtaaaagcattagcaggaatgcagaaagaaatggaacaggatgcgaagagatttggtcaggctgcctgggccacagcaattcccaggttggaaaaacttcagctaatgctagctcgagagactctgcaactcatgagagcgaaagagttgtgtttaaatcacaaaagagctgaaattcagggaaagatggaagatcttccagaacaagaaaaaaatacaaatgttgtagatgaattagaaatacaattttatgaaattcaattagaactatatgaagttaaatttgagatattaaaaaacgaagaaatactgcttactacacagttggactctcttaaaagacttataaaagatgaaatttagaatcaagttcaaaacaaaaactcgttggaatt

SEQ ID NO: 737199 - DNA, 1682 bp, Homo sapiens
tcagtggtgggattacaagtgatctttatttttcttacatttaaaaaaattcaatgcattttttaaaataataaaatatgttttaaacaatcattaatacatttttagaaaaacaagatgaagttgtctattacgatccatgtgaaaatccagaggaacttaaagtcattgactgtgtggtggggctgcaggatgataagaatttggaagtgaaagaactcagaaggcagtgccagcagctggagtctaaacggggcaggatctgtgccaaaagagcctctctccggagtagaaaggtaggtacgctcagagcggctttcttttcttttctctttcagagatttattcttgtatgaaggataaaggtattgaaataaggtttttaccaacacagtgattacattttgtgtgcttatgtacttatccatggctatagttaaaatgcttttaaatatttttcttaaaaatattttttttcttttgggatttaagcatttagcaaatctcaaggttttaatttattcattcaacaactatttgttgaatgcccattgcatacacaggcacacaggcactttatttttatttttttgagacagagtcttgctctgtcacccaggctagagtgcagaggcatgatgttggctcactgcaacttctgcctcctaggttcaagcgatcctcatgccttagcctgccaagtagctgggtttacaggcacgcgccagcacgcccagctaatttttgtatattttgtagaggtggggtttcaccatgttggctaggctggtcttgaactcctgacctcaagtgatccgcccaccttggcctcccaaagtgctgggattacaggtgtgagccaccacccctggaccacagtactttaaaaaccacaataggtagaaactctatttctaatagccaactataacaattctaaatatattttactgtaaattattgagtacacaaaagaattacagataacaatattcagctcacctcagacattatatttggtgattttttttcttaattttaaaaaatccatgaatacataaaaagataacactaagaaatttaattttctctgacagaaaaggaagctcctatatatcatttttatacagacttttatattatacttttctcctttttttttttttgaaacagagtctcgctctgtctcctagtctggagtgcaatggcgcaatctcagctcactgcaacctccacctcccaggttcaagcgagtcttctgcctcagcctcccgtgtagctgggattacaggtgcctgccaccacacccggctaatatatatatatatatatttttgagatgggagtctcactctgtcgccaggctggagtgcagtggcacgatctcggctcactgcaaccttcatctccaggattcaagcctgcctcagccccctgagtagctgggattacaggcatgtgccaccacccctggctaatttttgtatttttagtagagacggggtttcaccatgttggccaagctggtcttgaactcctgacctcaggtgatccacccgccttggcctcccaaagtgctgggattacgggcatgagtcacagcgcctggccacacccggctaatttttgtatttttagtagagacggggtttcaccatgttggtcagactggtcttgaattc

SEQ ID NO: 737200 - DNA, 4277 bp, Homo sapiens
tatcgagtttatatttcatctccccaacgcatttgtgacattcttaagggcgtgaaccatgtactcaatagggccctgatgatagaaaagaaaatcagcttggtccctgttctcaagttcatagtttagtgtgggagactaatacaataactcgccgattcaacagatatttttccaacgtccgtatgtattgggtggaaaaggtgaggcaagagttgtatttcccagactcctgaacaggttgcgagatgattgactcctgagggagaccttctcaccttttcattggttgtcgctggccctctcgtctatcacccaaccaaccccgaatgcctcttgtaagccccacctccggcagccagccaatcagaagtgccgggggccagggtgctgctggggcactgacgcggtttcgattctagcgaaaaatgatttggctcggactgtcccgtgacaggcggtgcgaggaggccaggcccgcgcccgccgagccctagggccgctgctgccgacagccatggaggacgagcagcctgacagcctggagggctgggtgccggtccgggagggcctcttcgccgagcccgagaggcaccggctgcgcttcctggtggcctggaacggcgcggagggcaagttcgctgtgacttgtcacgaccgtaccgcgcagcagcggcggctgcgcgagggggcccggttggggcccgagcccgagcccaagcctgaggccgccgtctccccgtccagctgggccggcctgctctcggccgcggggctccgcggcgcgcaccggcagttggcggcgctgtggccgcctctggagcgctgcttcccgcggctgccgccggagctggacgtgggcggcggcggggcctggggtctggggctcgggctgtgggcgctgctgtggccgacgcgcgcgggtcccggcgaggcggcgctgcaggagctgtgcgggcagctggaacgctatctgggcgcggcggccgacggctgcggcggcgccacagtgcgcgacgcactcttcccggctgagggcggcgcggccgactgcgaaagcccgcgcgagttccgggagcgggccttgcgcgcgcggtgggtcgaggcggacgcgcggctgcgccaggttattcaaggacacggaaaagccaacaccatggtagcattaatgaacgtttaccaagaggaagatgaagcataccaggaattggttaccgtggcaaccatgttcttccagtacttattgcagccatttagggctatgcgagaagttgcaactttatgtaagcttgatattttgaagtctttggatgaggatgacctaggtcctagaagggtagttgccctggagaaagaagctgaagaatggaccagacgggctgaagaagctgtcgtctctattcaggatatcacagtgaattattttaaggagacagtaaaagcattagcaggaatgcagaaagaaatggaacaggatgcgaagagatttggtcaggctgcctgggccacagcaattcccaggttggaaaaacttcagctaatgctagctcgagagactctgcaactcatgagagcgaaagagttgtgtttaaatcacaaaagagctgaaattcagggaaagatggaagatcttccagaacaagaaaaaaatacaaatgttgtagatgaattagaaatacaattttatgaaattcaattagaactatatgaagttaaatttgagatattaaaaaacgaagaaatactgcttactacacagttggactctcttaaaagacttataaaagaaaaacaagatgaagttgtctattacgatccatgtgaaaatccagaggaacttaaagtcattgactgtgtggtggggctgcaggatgataagaatttggaagtgaaagaactcagaaggcagtgccagcagctggagtctaaacggggcaggatctgtgccaaaagagcctctctccggagtagaaaggatcagtgcaaagaaaatcatcggttcagattgcaacaggctgaagaaagcataagatactctcgtcagcatcacagtattcagatgaaaagagacaagataaaagaagaggagcaaaagaaaaaagaatggatcaaccaagaacgtcaaaaaacactccaacgattgagatcatttaaagataaacgcctagctcaatctgtccgaaacacctctggctcagaacctgtggctccaaacctgccaagtgatctttcccagcagatgtgcttgccagcttcccacgcggtgtcagtaattcacccgtcctctaggaaaactagaggtgttcccctatcggaagctggtaatgtgaaaagccccaagtgtcaaaactgtcatggaaatatccctgtccaggtttttgttccagttggtgatcaaacacattccaaatccagtgaggaattgtcactgccaccacctcctcctcctccaccaccaccaccgccgccaccgccgcccccaccccctcctctccgtgctctgtcctcatcctctcaagctgcaactcatcagaacttaggcttccgggctccagtgaaagatgaccagccacgtcctctagtgtgcgaatcacctgctgagcgaccacgtgactccttggaaagtttttcatgtccaggatctatggatgaagtgttggcctccttaaggcatggcagagctcctctccggaaggtggaagtgccggcggtgcgccctccccacgcctcaatcaatgagcacattctggctgccataaggcaaggggtcaaactgaagaaagttcaccctgatcttggcccaaaccccagcagcaaaccaaccagcaacagacgcaccagtgaccttgagaggagcatcaaggctgcgctccagagaatcaagagggtgtctgctgactctgaggaggacagtgatgagcaggaccctggccagtgggatggttaggctcaagtttgacaaaggcacctgccacagtaggcttgaataaagtgggtgagtcttagacctatcgaaaagcatactaacagggtgctgatagatgggccacataacaccccggaagatcagcagggccttgtgtaggctgctgcagcattttttttttttttcttttttgagatggagtctcactctgtcgcccaggctggggtgcagtggcgccatctcggctcaccgcaagctccgcttcccaggctggggtgcagtggtgcgatcttggctcactgcaagctccgcctcctgggttcacgccattctcctgcctcagcctcccgagtagctgggactacaggcgccaccaccttgcccaactaattttttgtattttttagtagagacgaggtttcaccgtgttagccaggatggtctcgatcttctgacctcgtgatccgcctgcctcagactcccaaagtgctgggattacaggtgtgagccaccacgcccagccttttttttttctttcttttgagacagaatctctctgtcatccaggctagagtgcagtggcacgatcttggcttactgcaacctccacctcccaggttcaagcaattctctgtctcagcctcccgagtagctgggattacaggcatgcaccaccacgcctggctaatttttgtatatttaagtagagacaaggtttcgctatgttggccaggctggtcttgaactcctgacctcgtgatccacctgccttggccacccaaagtgttgggattataggcatgagccaccgtgcctggctgatgctggagcttttatgtgacatggtgactcttaaaactggggagggacgtagagatgagagtttcacacaccagcccataggtgggatgtcaagacccatcggaagtgtcgctggcctaagagaagagcacttatttctcaccatggctgatctagaattgttccctgattctgaaagaagtttacactacactggtaagcagtactattagactactgactgtggccttctgtgcatatggaataatgatttctcagatttgtaggcttgaatgtgaatgttattttatcagtaatcagaataaattgcttatattcaggagttattttaaatatttaaatgaaatttattttaggcaccaagcaccacataaactcataataactatttgcaatgcattagcatcactcacggggtaatgaaaacataccttagctgctgtaaaagcaaagtcttccgtgtccgggtgggctgaaagtttttaataaaattttagctaaacatttgtttaagtgaatactaaggatg

SEQ ID NO: 737201 - DNA, 4713 bp, Homo sapiens
tatcgagtttatatttcatctccccaacgcatttgtgacattcttaagggcgtgaaccatgtactcaatagggccctgatgatagaaaagaaaatcagcttggtccctgttctcaagttcatagtttagtgtgggagactaatacaataactcgccgattcaacagatatttttccaacgtccgtatgtattgggtggaaaaggtgaggcaagagttgtatttcccagactcctgaacaggttgcgagatgattgactcctgagggagaccttctcaccttttcattggttgtcgctggccctctcgtctatcacccaaccaaccccgaatgcctcttgtaagccccacctccggcagccagccaatcagaagtgccgggggccagggtgctgctggggcactgacgcggtttcgattctagcgaaaaatgatttggctcggactgtcccgtgacaggcggtgcgaggaggccaggcccgcgcccgccgagccctagggccgctgctgccgacagccatggaggacgagcagcctgacagcctggagggctgggtgccggtccgggagggcctcttcgccgagcccgagaggcaccggctgcgcttcctggtggcctggaacggcgcggagggcaagttcgctgtgacttgtcacgaccgtaccgcgcagcagcggcggctgcgcgagggggcccggttggggcccgagcccgagcccaagcctgaggccgccgtctccccgtccagctgggccggcctgctctcggccgcggggctccgcggcgcgcaccggcagttggcggcgctgtggccgcctctggagcgctgcttcccgcggctgccgccggagctggacgtgggcggcggcggggcctggggtctggggctcgggctgtgggcgctgctgtggccgacgcgcgcgggtcccggcgaggcggcgctgcaggagctgtgcgggcagctggaacgctatctgggcgcggcggccgacggctgcggcggcgccacagtgcgcgacgcactcttcccggctgagggcggcgcggccgactgcgaaagcccgcgcgagttccgggagcgggccttgcgcgcgcggtgggtcgaggcggacgcgcggctgcgccaggttattcaaggacacggaaaagccaacaccatggtagcattaatgaacgtttaccaagaggaagatgaagcataccaggaattggttaccgtggcaaccatgttcttccagtacttattgcagccatttagggctatgcgagaagttgcaactttatgtaagcttgatattttgaagtctttggatgaggatgacctaggtcctagaagggtagttgccctggagaaagaagctgaagaatggaccagacgggctgaagaagctgtcgtctctattcaggatatcacagtgaattattttaaggagacagtaaaagcattagcaggaatgcagaaagaaatggaacaggatgcgaagagatttggtcaggctgcctgggccacagcaattcccaggttggaaaaacttcagctaatgctagctcgagagactctgcaactcatgagagcgaaagagttgtgtttaaatcacaaaagagctgaaattcagggaaagatggaagatcttccagaacaagaaaaaaatacaaatgttgtagatgaattagaaatacaattttatgaaattcaattagaactatatgaagttaaatttgagatattaaaaaacgaagaaatactgcttactacacagttggactctcttaaaagacttataaaagaaaaacaagatgaagttgtctattacgatccatgtgaaaatccagaggaacttaaagtcattgactgtgtggtggggctgcaggatgataagaatttggaagtgaaagaactcagaaggcagtgccagcagctggagtctaaacggggcaggatctgtgccaaaagagcctctctccggagtagaaaggatcagtgcaaagaaaatcatcggttcagattgcaacaggctgaagaaagcataagatactctcgtcagcatcacagtattcagatgaaaagagacaagataaaagaagaggagcaaaagaaaaaagaatggatcaaccaagaacgtcaaaaaacactccaacgattgagatcatttaaagataaacgcctagctcaatctgtccgaaacacctctggctcagaacctgtggctccaaacctgccaagtgatctttcccagcagatgtgcttgccagcttcccacgcggtgtcagtaattcacccgtcctctaggaaaactagaggtgttcccctatcggaagctggtaatgtgaaaagccccaagtgtcaaaactgtcatggaaatatccctgtccaggtttttgttccagttggtgatcaaacacattccaaatccagtgaggaattgtcactgccaccacctcctcctcctccaccaccaccaccgccgccaccgccgcccccaccccctcctctccgtgctctgtcctcatcctctcaagctgcaactcatcagaacttaggcttccgggctccagtgaaagatgaccagccacgtcctctagtgtgcgaatcacctgctgagcgaccacgtgactccttggaaagtttttcatgtccaggatctatggatgaagtgttggcctccttaaggcatggcagagctcctctccggaaggtggaagtgccggcggtgcgccctccccacgcctcaatcaatgagcacattctggctgccataaggcaaggggtcaaactgaagaaagttcaccctgatcttggcccaaaccccagcagcaaaccaaccagcaacagacgcaccagtgaccttgagaggagcatcaaggctgcgctccagagaatcaagagggtgtctgctgactctgaggaggacagtgatgagcaggaccctggccagtgggatggttaggctcaagtttgacaaaggcacctgccacagtaggcttgaataaagtgggtgagtcttagacctatcgaaaagcatactaacagggtgctgatagatgggccacataacaccccggaagatcagcagggccttgtgtaggctgctgcagcattttttttttttttcttttttgagatggagtctcactctgtcgcccaggctggggtgcagtggcgccatctcggctcaccgcaagctccgcttcccaggctggggtgcagtggtgcgatcttggctcactgcaagctccgcctcctgggttcacgccattctcctgcctcagcctcccgagtagctgggactacaggcgccaccaccttgcccaactaattttttgtattttttagtagagacgaggtttcaccgtgttagccaggatggtctcgatcttctgacctcgtgatccgcctgcctcagactcccaaagtgctgggattacaggtgtgagccaccacgcccagccttttttttttctttcttttgagacagaatctctctgtcatccaggctagagtgcagtggcacgatcttggcttactgcaacctccacctcccaggttcaagcaattctctgtctcagcctcccgagtagctgggattacaggcatgcaccaccacgcctggctaatttttgtatatttaagtagagacaaggtttcgctatgttggccaggctggtcttgaactcctgacctcgtgatccacctgccttggccacccaaagtgttgggattataggcatgagccaccgtgcctggctgatgctggagcttttatgtgacatggtgactcttaaaactggggagggacgtagagatgagagtttcacacaccagcccataggtgggatgtcaagacccatcggaagtgtcgctggcctaagagaagagcacttatttctcaccatggctgatctagaattgttccctgattctgaaagaagtttacactacactggtaagcagtactattagactactgactgtggccttctgtgcatatggaataatgatttctcagatttgtaggcttgaatgtgaatgttattttatcagtaatcagaataaattgcttatattcaggagttattttaaataaaaaaaaaaaacaaaaaaaaaaacaacaaaaaaaaaaaaaaaaaaaaagcaaaacacacaaaacgcaaacaaaacaaacccaaaggagagcgaagagcggagggacgagcggcaggacgagacgcggaggcagaggggacgagcagaccgaacgcgcggagcgcagacacggccaccgcggggccgccaacgggaacggcgcggcaccaagagaggaggaccggcgcagcgggcggagcggcggcgagggagagagagggaagaccgggcggacccagagggcggcgcagcgccgggaggccacagcggcggagcagcggcggcgcgcggcgggcagccgggggcacgcagtaccgccggcgtcgggcgcacaggcgccgagcgcgaacagacgcgggacgaaccgtcgcgaggcagagaagcgcgaggagaggacagcaaacgggagcacgcgaggcgcgaaggacgggacagcacgaggcgcgcagccgaggagagaccggccgcggaccgcccgcggcaccggcggccgctggggcgcacgccgcgccgcggcccgcccccgcgccgcccgccccgcccccgcccccccccgcgcgacccccccgggcgggacgacgggcgacgaca

SEQ ID NO: 737202 - DNA, 4735 bp, Homo sapiens
tatcgagtttatatttcatctccccaacgcatttgtgacattcttaagggcgtgaaccatgtactcaatagggccctgatgatagaaaagaaaatcagcttggtccctgttctcaagttcatagtttagtgtgggagactaatacaataactcgccgattcaacagatatttttccaacgtccgtatgtattgggtggaaaaggtgaggcaagagttgtatttcccagactcctgaacaggttgcgagatgattgactcctgagggagaccttctcaccttttcattggttgtcgctggccctctcgtctatcacccaaccaaccccgaatgcctcttgtaagccccacctccggcagccagccaatcagaagtgccgggggccagggtgctgctggggcactgacgcggtttcgattctagcgaaaaatgatttggctcggactgtcccgtgacaggcggtgcgaggaggccaggcccgcgcccgccgagccctagggccgctgctgccgacagccatggaggacgagcagcctgacagcctggagggctgggtgccggtccgggagggcctcttcgccgagcccgagaggcaccggctgcgcttcctggtggcctggaacggcgcggagggcaagttcgctgtgacttgtcacgaccgtaccgcgcagcagcggcggctgcgcgagggggcccggttggggcccgagcccgagcccaagcctgaggccgccgtctccccgtccagctgggccggcctgctctcggccgcggggctccgcggcgcgcaccggcagttggcggcgctgtggccgcctctggagcgctgcttcccgcggctgccgccggagctggacgtgggcggcggcggggcctggggtctggggctcgggctgtgggcgctgctgtggccgacgcgcgcgggtcccggcgaggcggcgctgcaggagctgtgcgggcagctggaacgctatctgggcgcggcggccgacggctgcggcggcgccacagtgcgcgacgcactcttcccggctgagggcggcgcggccgactgcgaaagcccgcgcgagttccgggagcgggccttgcgcgcgcggtgggtcgaggcggacgcgcggctgcgccaggttattcaaggacacggaaaagccaacaccatggtagcattaatgaacgtttaccaagaggaagatgaagcataccaggaattggttaccgtggcaaccatgttcttccagtacttattgcagccatttagggctatgcgagaagttgcaactttatgtaagcttgatattttgaagtctttggatgaggatgacctaggtcctagaagggtagttgccctggagaaagaagctgaagaatggaccagacgggctgaagaagctgtcgtctctattcaggatatcacagtgaattattttaaggagacagtaaaagcattagcaggaatgcagaaagaaatggaacaggatgcgaagagatttggtcaggctgcctgggccacagcaattcccaggttggaaaaacttcagctaatgctagctcgagagactctgcaactcatgagagcgaaagagttgtgtttaaatcacaaaagagctgaaattcagggaaagatggaagatcttccagaacaagaaaaaaatacaaatgttgtagatgaattagaaatacaattttatgaaattcaattagaactatatgaagttaaatttgagatattaaaaaacgaagaaatactgcttactacacagttggactctcttaaaagacttataaaagaaaaacaagatgaagttgtctattacgatccatgtgaaaatccagaggaacttaaagtcattgactgtgtggtggggctgcaggatgataagaatttggaagtgaaagaactcagaaggcagtgccagcagctggagtctaaacggggcaggatctgtgccaaaagagcctctctccggagtagaaaggtgatttgtattattccaccaggatcagtgcaaagaaaatcatcggttcagattgcaacaggctgaagaaagcataagatactctcgtcagcatcacagtattcagatgaaaagagacaagataaaagaagaggagcaaaagaaaaaagaatggatcaaccaagaacgtcaaaaaacactccaacgattgagatcatttaaagataaacgcctagctcaatctgtccgaaacacctctggctcagaacctgtggctccaaacctgccaagtgatctttcccagcagatgtgcttgccagcttcccacgcggtgtcagtaattcacccgtcctctaggaaaactagaggtgttcccctatcggaagctggtaatgtgaaaagccccaagtgtcaaaactgtcatggaaatatccctgtccaggtttttgttccagttggtgatcaaacacattccaaatccagtgaggaattgtcactgccaccacctcctcctcctccaccaccaccaccgccgccaccgccgcccccaccccctcctctccgtgctctgtcctcatcctctcaagctgcaactcatcagaacttaggcttccgggctccagtgaaagatgaccagccacgtcctctagtgtgcgaatcacctgctgagcgaccacgtgactccttggaaagtttttcatgtccaggatctatggatgaagtgttggcctccttaaggcatggcagagctcctctccggaaggtggaagtgccggcggtgcgccctccccacgcctcaatcaatgagcacattctggctgccataaggcaaggggtcaaactgaagaaagttcaccctgatcttggcccaaaccccagcagcaaaccaaccagcaacagacgcaccagtgaccttgagaggagcatcaaggctgcgctccagagaatcaagagggtgtctgctgactctgaggaggacagtgatgagcaggaccctggccagtgggatggttaggctcaagtttgacaaaggcacctgccacagtaggcttgaataaagtgggtgagtcttagacctatcgaaaagcatactaacagggtgctgatagatgggccacataacaccccggaagatcagcagggccttgtgtaggctgctgcagcattttttttttttttcttttttgagatggagtctcactctgtcgcccaggctggggtgcagtggcgccatctcggctcaccgcaagctccgcttcccaggctggggtgcagtggtgcgatcttggctcactgcaagctccgcctcctgggttcacgccattctcctgcctcagcctcccgagtagctgggactacaggcgccaccaccttgcccaactaattttttgtattttttagtagagacgaggtttcaccgtgttagccaggatggtctcgatcttctgacctcgtgatccgcctgcctcagactcccaaagtgctgggattacaggtgtgagccaccacgcccagccttttttttttctttcttttgagacagaatctctctgtcatccaggctagagtgcagtggcacgatcttggcttactgcaacctccacctcccaggttcaagcaattctctgtctcagcctcccgagtagctgggattacaggcatgcaccaccacgcctggctaatttttgtatatttaagtagagacaaggtttcgctatgttggccaggctggtcttgaactcctgacctcgtgatccacctgccttggccacccaaagtgttgggattataggcatgagccaccgtgcctggctgatgctggagcttttatgtgacatggtgactcttaaaactggggagggacgtagagatgagagtttcacacaccagcccataggtgggatgtcaagacccatcggaagtgtcgctggcctaagagaagagcacttatttctcaccatggctgatctagaattgttccctgattctgaaagaagtttacactacactggtaagcagtactattagactactgactgtggccttctgtgcatatggaataatgatttctcagatttgtaggcttgaatgtgaatgttattttatcagtaatcagaataaattgcttatattcaggagttattttaaataaaaaaaaaaaacaaaaaaaaaaacaacaaaaaaaaaaaaaaaaaaaaagcaaaacacacaaaacgcaaacaaaacaaacccaaaggagagcgaagagcggagggacgagcggcaggacgagacgcggaggcagaggggacgagcagaccgaacgcgcggagcgcagacacggccaccgcggggccgccaacgggaacggcgcggcaccaagagaggaggaccggcgcagcgggcggagcggcggcgagggagagagagggaagaccgggcggacccagagggcggcgcagcgccgggaggccacagcggcggagcagcggcggcgcgcggcgggcagccgggggcacgcagtaccgccggcgtcgggcgcacaggcgccgagcgcgaacagacgcgggacgaaccgtcgcgaggcagagaagcgcgaggagaggacagcaaacgggagcacgcgaggcgcgaaggacgggacagcacgaggcgcgcagccgaggagagaccggccgcggaccgcccgcggcaccggcggccgctggggcgcacgccgcgccgcggcccgcccccgcgccgcccgccccgcccccgcccccccccgcgcgacccccccgggcgggacgacgggcgacgaca

SEQ ID NO: 737203 - DNA, 952 bp, Homo sapiens
gcctcccaaagtgctgggattacaggcatgagccaccgcgcccggcctaagatttcttattgtggtattctgcagtggagaatgggagttggaaagaaatgttttctcccacacctgtcccgctcctgtctactgaaagctgattaatcagtcagatagtgagttcctattggtagtacgcctccaaaatttggaagaggggaggtggcgtgatgtgaaaaagcaaggctttagggagagattcccgctgggggcattcaccctctggtccagcgtgcctgttacagtgatcactccatagtggttttgcatgaacaagactgcccagtttgcttaggaagaaaacaaaggacataaggtagttctcatgtcttcccagcaccctaaatactcgggctaaacttccacagtcagaccgtcagcttcaggaagggctgctgttgggaactttttttttagtttgcagttagttcagctccagccaaaaacctacaaaaagccactgcaagccctctgcctgctcgtataagacaccttggttgggcccctgtgactgtccatccataggatggttggccattgactgcacagagaggtagggcaagataaaacgactcatttgtggatctgactccttgtacttctgtttggattcaaacagaggaagatagagtagtggccttgggaaaccgtggagagagaaaaggcatagtcagaatgttttcagaggagcgcagacttttcaaaacccctctcatcacgttcccactgaccttcagttccagtgctgtggccacagggtgtctgcaccccaacttctttgccaagaaattaatgatctgtgaagacacacagacatgaggcggacttactatttaaaggaatcctgaaacgaatatttttctgatacatatttatcctaatatatttgctgagcatggttttttttttt

SEQ ID NO: 737204 - DNA, 579 bp, Homo sapiens; identical to SEQ ID NO: 94211

SEQ ID NO: 737205 - DNA, 1997 bp, Homo sapiens
tgcagccgccgccgccgccgacaccgcggcacatgggccggccccgccgctgccgtcgcccctagccccagcagccctggtctcgcagcctcctgcggctctggtcgcccgaccagccatgtctctcggcggagcctccgagcgcagcgtcccggccaccaagattgaaattaccgtgtcctgccggaacctgctagaccttgataccttctccaagtccgaccccatggtggtgctttacacgcagagccgggccagccaggagtggcgggagttcggacggaccgaggtgattgataacacgctgaacccagacttcgtgcgcaaattcgtcctcgactatttctttgaggaaaagcaaaatctgcgcttcgatgtgtacaacgtggactccaaaaccaacatctccaaaccggatttcctgggacaagcgttcctggccctgggagaggtgattggaggccagggcagccgagtagagcgaaccctcacgggtgtaccaggcaagaagtgtgggaccatattgctgactgcagaagagcttagcaattgtcgggacattgccaccatgcagctgtgtgcaaacaagctggacaagaaggacttctttgggaaatcagaccccttccttgtgttctacaggagcaatgaggatggcacgttcaccatctgccacaagacagaggttgtgaaaaacacgctgaatcctgtgtggcagcccttcagcatccctgtgcgggctctgtgcaatggagactatgacagaacggtgaagattgatgtgtacgactgggaccgggatggaagccacgatttcattggtgagttcaccaccagctaccgggagctgagcaaggcccagaaccagttcacagtatatgaggttcttaaccctcggaagaaatgtaagaagaagaaatatgtcaactcaggaactgtgacgctgctctccttctctgtggactctgaattcacttttgttgattacatcaagggagggacacagctgaacttcacagtagccattgacttcacggcttccaatgggaatcctctgcagcctacctccctgcactacatgagtccctaccagctcagcgcctatgccatggccctcaaggcagtgggagagatcatccaggactatgacagtgataagctcttcccagcttatggctttggggccaagctgcccccagagggacggatctcccaccagttccccctgaacaacaatgatgaggaccccaactgtgcgggcatcgagggtgtgctggagagctatttccagagcctgcgcacagtgcagctctatgggcccacctactttgctcctgtcatcaaccaagtggccagggctgcagccaagatctctgatggctcccagtactatgttctgctcatcatcactgatggggtcatctctgacatgacgcagaccaaggaggccatcgtcagcgcctcctcattgcccatgtctatcattatcgtcggtgtaggaccagccatgtttgaggcaatggaagagttggacggtgatgatgtgcgcgtgtcctctaggggacgctacgcagagcgggacatcgttcagttcgtcccattccgagactatgttgaccggtcggggaaccaggtgttgagcatggcccgactggccaaggatgtgctggccgagatcccggagcagctgctgtcctatatgcgcaccagagacatccagcctcggcccccaccccctgccaaccccagcccgatcccagctccagagcagccctgaggattccacatatccaatgcctcacagtctgcaagcctgctcacccactgcttctgctttaagccagaggcacctggaaccctggacttcactgggagggccaacttggaggatcagtgctggctgacaagccctccgcctccttgcctgcagagggcctggcactatcaccacctctctgccttcatgccaataataaagctgatctttattccaaaaa

SEQ ID NO: 737206 - DNA, 1935 bp, Homo sapiens
tgcagccgccgccgccgccgacaccgcggcacatgggccggccccgccgctgccgtcgcccctagccccagcagccctggtctcgcagcctcctgcggctctggtcgcccgaccagccatgtctctcggcggagcctccgagcgcagcgtcccggccaccaagattgaaattaccgtgtcctgccggaacctgctagaccttgataccttctccaagtccgaccccatggtggtgctttacacgcagagccgggccagccaggagtggcgggagttcggacggaccgaggtgattgataacacgctgaacccagacttcgtgcgcaaattcgtcctcgactatttctttgaggaaaagcaaaatctgcgcttcgatgtgtacaacgtggactccaaaaccaacatctccaaaccggatttcctgggacaagcgttcctggccctgggagaggtgattggaggccagggcagccgagtagagcgaaccctcacgggtgtaccaggcaagaagtgtgggaccatattgctgactgcagaagagcttagcaattgtcgggacattgccaccatgcagctgtgtgcaaacaagctggacaagaaggacttctttgggaaatcagaccccttccttgtgttctacaggagcaatgaggatggcacgttcaccatctgccacaagacagaggttgtgaaaaacacgctgaatcctgtgtggcagcccttcagcatccctgtgcgggctctgtgcaatggagactatgacagaacggtgaagattgatgtgtacgactgggaccgggatggaagccacgatttcattggtgagttcaccaccagctaccgggagctgagcaaggcccagaaccagttcacagtatatgaggttcttaaccctcggaagaaatgtaagaagaagaaatatgtcaactcaggaactgacacagctgaacttcacagtagccattgacttcacggcttccaatgggaatcctctgcagcctacctccctgcactacatgagtccctaccagctcagcgcctatgccatggccctcaaggcagtgggagagatcatccaggactatgacagtgataagctcttcccagcttatggctttggggccaagctgcccccagagggacggatctcccaccagttccccctgaacaacaatgatgaggaccccaactgtgcgggcatcgagggtgtgctggagagctatttccagagcctgcgcacagtgcagctctatgggcccacctactttgctcctgtcatcaaccaagtggccagggctgcagccaagatctctgatggctcccagtactatgttctgctcatcatcactgatggggtcatctctgacatgacgcagaccaaggaggccatcgtcagcgcctcctcattgcccatgtctatcattatcgtcggtgtaggaccagccatgtttgaggcaatggaagagttggacggtgatgatgtgcgcgtgtcctctaggggacgctacgcagagcgggacatcgttcagttcgtcccattccgagactatgttgaccggtcggggaaccaggtgttgagcatggcccgactggccaaggatgtgctggccgagatcccggagcagctgctgtcctatatgcgcaccagagacatccagcctcggcccccaccccctgccaaccccagcccgatcccagctccagagcagccctgaggattccacatatccaatgcctcacagtctgcaagcctgctcacccactgcttctgctttaagccagaggcacctggaaccctggacttcactgggagggccaacttggaggatcagtgctggctgacaagccctccgcctccttgcctgcagagggcctggcactatcaccacctctctgccttcatgccaataataaagctgatctttattccaaaaa

SEQ ID NO: 737207 - DNA, 1416 bp, Homo sapiens
tattaacagtgcatgccagaaataggatccagaaatttaagtggaataaatggaaagttctggactttggtttaacaaacccgtgacacagctgaaagattttagctgactaaatgctcaatatgagttcataggaaccaagccacgttaagcagctcatgtttcccctttgccttcaggatgccagatccctccttagtgtccagcagggggtcctccagatgtgagctggctaccaatcctgtgtcaggctgcagacttgccatgtccttgaacacctttgcacctctgcacatggtctcatctctttctcctgtagctcgccagctgaggtcctattcacactttctttctttctgagtcagaatccctgtcccccaggctgcagtgcaatgccgtgatcatggttcactgtggcctcaaacttccaggctcaagtgatcctcccacctcagcctccagagtagtcgaaaccagaggcttgtgcgaccacacccggctaatttttttattttttgaagagacagggttttgccatgttgcccaggctggtcttgaattcctgggctcaagcggtctgcctgcctcaggattcctattcactctttacaatccagctctgctgcacccctgagcttctggagatgccacagaacacttgtctgtgctcctttgtggcactcaccacgttttgttaaaatgaccaatcgccctccttgacagggttgtgtgctgcttgagggcaggggctgtctcattcacgtggaggttcaacacatgtctgtggaatgggtttcgctgccccaaagctgattctatcttttgctgtgtttgcattggaacaatgggcagaaatgatttcctaattctgcttgcatggggtaggtcagacaacttggatgtgggttttagttctgggtcttatacttcaaatgatgcagggcagagtgatcccacgccagggcaagctgggtgctaaaggatttaggcgctctatcacaagaggaacaggaaaaaagaaggcttaggtggggaatacgagagctgtcttcaaacatctgggagaatgtcctgtgttccctcaccgtctaaggctcagggacttcttcccagaacaggatggagccctggacacacaactacacacacaaacaattgtcacagagtgggaggcaggataaagtggtgagtaacagcctggcctgagacacaggctcacgcatctgacactggctgagccgcgcactagctgagtggccttgggcatgttttgtaacctccttgactgttcccttatctgtgaaattgagataaatgtactacccacttcataaaaagatcaaatgtgataatacttgaaatatgtttagaacaaagttggccatattcaataaatgttagcttaaaaaaaaaaca

SEQ ID NO: 737208 - DNA, 1019 bp, Homo sapiens; identical to SEQ ID NO: 101446

SEQ ID NO: 737209 - DNA, 920 bp, Homo sapiens; identical to SEQ ID NO: 8329

SEQ ID NO: 737210 - DNA, 439 bp, Homo sapiens
cttcgggacagctgcaactcacaaccagtcttttgttgaccttcagctgatttcccaggaaccagaggcccaagggcaataataaggtggaatttgcaggtcagcccaggaattggcagaggaagtaggtgtctgataaccctttgtggagaatgagattccccccacctgtgtgagaaaaataaacagctctggagtcttgttcctgactccagaggaacgagagcattccaggaaagagagattccctggaaaattgaaaatgtgaatcctagggggaaattggggattgtgtctttccctgttgaaaatgtttggatgggaataaatatcttcaggaaacataaaagtctgtgagtcttcaatgaaagcctctgtctagaaccccgagtgttgatctgtctcccctctgccttggtcagaggccctgctttctcat

SEQ ID NO: 737211 - DNA, 433 bp, Homo sapiens
tcaagcttctaacgatgtacggggacatgtaaatatgacctcagacaaaaaggaaccagaggcccaagggcaataataaggtggaatttgcaggtcagcccaggaattggcagaggaagtaggtgtctgataaccctttgtggagaatgagattccccccacctgtgtgagaaaaataaacagctctggagtcttgttcctgactccagaggaacgagagcattccaggaaagagagattccctggaaaattgaaaatgtgaatcctagggggaaattggggattgtgtctttccctgttgaaaatgtttggatgggaataaatatcttcaggaaacataaaagtctgtgagtcttcaatgaaagcctctgtctagaaccccgagtgttgatctgtctcccctctgccttggtcagaggccctgctttctcat

SEQ ID NO: 737212 - DNA, 576 bp, Homo sapiens
ctataccaccctataccaccctatacaccataccacacgtctcatggaggtagtgcttttcttatacctcagcgctaatgaggactgtcctccgcaccggtggtatagctgataaagccaccacgtgccctacgatggcctaacaggagtgcccattggcagattacacatgtaaatatgacctcagacaaaaaggaaccagaggcccaagggcaataataaggtggaatttgcaggtcagcccaggaattggcagaggaagtaggtgtctgataaccctttgtggagaatgagattccccccacctgtgtgagaaaaataaacagctctggagtcttgttcctgactccagaggaacgagagcattccaggaaagagagattccctggaaaattgaaaatgtgaatcctagggggaaattggggattgtgtctttccctgttgaaaatgtttggatgggaataaatatcttcaggaaacataaaagtctgtgagtcttcaatgaaagcctctgtctagaaccccgagtgttgatctgtctcccctctgccttggtcagaggccctgctttctcat

SEQ ID NO: 737213 - DNA, 488 bp, Homo sapiens
cgcgaacgcgtgggcggacggtgggtaagccaccacgtgccctacgatggcctaacaggagtgcccattggcagattacacatgtaaatatgacctcagacaaaaaggaaccagaggcccaagggcaataataaggtggaatttgcaggtcagcccaggaattggcagaggaagtaggtgtctgataaccctttgtggagaatgagattccccccacctgtgtgagaaaaataaacagctctggagtcttgttcctgactccagaggaacgagagcattccaggaaagagagattccctggaaaattgaaaatgtgaatcctagggggaaattggggattgtgtctttccctgttgaaaatgtttggatgggaataaatatcttcaggaaacataaaagtctgtgagtcttcaatgaaagcctctgtctagaaccccgagtgttgatctgtctcccctctgccttggtcagaggccctgctttctcat

SEQ ID NO: 737214 - DNA, 674 bp, Homo sapiens
caagaattcggcacgagggttaccattctgatgttggagcggccgcagatcatttgggacattcagtaggagcatttgggcttccggggcccctgagaccaaagaagaggggccaagtaccctgggaaatcagctgaaggtcaacaaaagactggttgtgagttgcagctgtcccgaaggccccagttgggaagccatgggcagtccagatcaagccaccacgtgccctacgatggcctaacaggagtgcccattggcagattacacatgtaaatatgacctcagacaaaaaggaaccagaggcccaagggcaataataaggtggaatttgcaggtcagcccaggaattggcagaggaagtaggtgtctgataaccctttgtggagaatgagattccccccacctgtgtgagaaaaataaacagctctggagtcttgttcctgactccagaggaacgagagcattccaggaaagagagattccctggaaaattgaaaatgtgaatcctagggggaaattggggattgtgtctttccctgttgaaaatgtttggatgggaataaatatcttcaggaaacataaaagtctgtgagtcttcaatgaaagcctctgtctagaaccccgagtgttgatctgtctcccctctgccttggtcagaggccctgctttctcat

SEQ ID NO: 737215 - DNA, 890 bp, Homo sapiens
tagaggatcgcttagagacacatgtgagggaggtgcagaggcagcagaggattggcataaaactgaaaaggagttctgtctgcatgagaaaggatggcaagtctctgaggtgacctcagggtggaattctctgttaagtccaccctgccccagggtgctcctaccctcttggtctttttaaagccaaggtgcgatttgggcacctgactgtccagtttaccttaacaagtttgggaatccatgtgatgtttttgatacttcttcctcatttgggacattcagtaggagcatttgggcttccggggcccctgagaccaaagaagaggggccaagtaccctgggaaatcagctgaaggtcaacaaaagactggttgtgagttgcagctgtcccgaaggccccagttgggaagccatgggcagtccagatcaagccaccacgtgccctacgatggcctaacaggagtgcccattggcagattacacatgtaaatatgacctcagacaaaaaggaaccagaggcccaagggcaataataaggtggaatttgcaggtcagcccaggaattggcagaggaagtaggtgtctgataaccctttgtggagaatgagattccccccacctgtgtgagaaaaataaacagctctggagtcttgttcctgactccagaggaacgagagcattccaggaaagagagattccctggaaaattgaaaatgtgaatcctagggggaaattggggattgtgtctttccctgttgaaaatgtttggatgggaataaatatcttcaggaaacataaaagtctgtgagtcttcaatgaaagcctctgtctagaaccccgagtgttgatctgtctcccctctgccttggtcagaggccctgctttctcat

SEQ ID NO: 737216 - DNA, 534 bp, Homo sapiens
catgtaaatatgacctcagacaaaaaggaaccagaggcccaagggcaataataaggtggaatttgcaggtcagcccaggaattggcagagaatccacacaggagaaaaaccctatacctgtcatgagtgcggagacagcttctctcacagctccaatcggattcgccacctgagaacgcatacgggagagagaccctataaatgttctgaatgtggagaaagcttctctcggagttctttgtggagaatgagattccccccacctgtgtgagaaaaataaacagctctggagtcttgttcctgactccagaggaacgagagcattccaggaaagagagattccctggaaaattgaaaatgtgaatcctagggggaaattggggattgtgtctttccctgttgaaaatgtttggatgggaataaatatcttcaggaaacataaaagtctgtgagtcttcaatgaaagcctctgtctagaaccccgagtgttgatctgtctcccctctgccttggtcagaggccctgctttctcat

SEQ ID NO: 737217 - DNA, 3548 bp, Homo sapiens
  misc_feature (56)..(56): n is a, c, g, or t
caaccccatcctctgcccctccccccttccgcccacgccatgggtaggcaaagggnccggaattttcaaaacagcgtcgacccacgcgtctttacctgacctaatgggcgctggagttcgcaaaacgtgacccggaaattggtcacgagcaggcgccgtgggcttgtggacgcctaacttgcgcgctgagatttccggcgtgggagcagaggtctgagtcttgcgtgggtcctctatatagggtgagaagcgtggcgctcggttcctgcctcggggaagtcctggcgcagatgggccacggggccggcgtggcggcgcctgggaccgactgaggcctaggcgccggagccggccgcgcctgggctggagcggggctcctcggcctggactgggagcccccggccccgggctcctgctggcgccgtccaaccttacatgggttcagggcgccttcgtaggcgggcacggctggtttcgggctaaggcgctctggagacctgacgatggcgtcgggcccgggctcccaggaacgggaagggctcctgatagtgaagctggaggaggactgcgcctggagccaggagctgcccccacctgacccaggaccgagccccgaggcctcccacttgcgcttcagacggttccgcttccaagaggcagctggtccccgggaagccctcagccggctccaagagctttgccatgggtggcttcggcctgagatgcgcacgaaggagcagatcttggagctgctggtgttagagcagttcctgaccatcctgccccaggagatccagagcagggtgcaggagctgcatccggagagcggcgaagaagcggtgacccttgtggaggatatgcagagagagcttgggagactgagacaacaggtcacaaaccatgggcggggaacagaagtgcttttggaggagcctttgcctctggaaacagcacgagagtcaccgagcttcaagctggagccaatggagactgagcgaagccctggccccaggctgcaggagctgctaggccccagcccccaaagggacccccaggctgtaaaggagagggcattatctgctccctggctttctctttttcctcctgaagggaacatggaagacaaggagatgactgggccccagttgcctgagagcttagaggacgtggcaatgtacatctcccaggaggagtgggggcatcaggatcctagtaagagggccctctccagggacacggtgcaggagagttatgagaatgtggactcactggagtctcacattcccagtcaggaggtcccaggcacccaggtgggacaaggaggaaagctatgggatcccagtgtccagagctgcaaggagggcctgagccccagaggcccagctccaggagaagagaaatttgagaacctggaaggtgttccgtctgtatgctctgagaacatccaccctcaggtgctgcttcctgaccaggcccgaggggaggtgccctggagtcctgagctgggaagacctcatgaccggtcgcaaggggattgggcgcctcccccagagggtggaatggagcaggccttggcaggagcctcaagtggcagagaactggggcgaccgaaggaactgcagccaaagaaactccatttatgtcccttgtgtggcaaaaatttctctaacaactcaaacctaattaggcaccagagaatacatgcagctgaaagactgtgtatgggtgtggactgcactgaaatctttggtgggaacccacgtttcctgtcactacacagagcacacctgggagaggaggcccacaagtgccttgaatgtgggaaatgcttcagtcagaacacccatctgactcgccaccaacgcacccacacgggtgagaagccctatcagtgcaacatttgcggaaaatgtttctcctgcaactccaacctccacaggcaccagagaacgcacactggggagaagccctacaagtgccctgagtgtggggagatctttgctcacagttccaacctccttcggcaccagagaattcacactggagagcgaccttataagtgtcccgagtgtgggaaaagtttctctcggagttcacacctcgtcattcacgaaagaactcatgagagagagagactttaccccttctctgagtgtggggaagctgtgagtgacagcaccccctttcttacaaaccatggagcccataaggcagagaagaagctctttgaatgtttgacttgtgggaaaagcttccggcagggcatgcacctcaccagacatcagagaacacacacaggagagaaaccgtataaatgtaccctttgtggggaaaacttctctcatagatccaatttaatcaggcaccagagaatccacacaggagaaaaaccctatacctgtcatgagtgcggagacagcttctctcacagctccaatcggattcgccacctgagaacgcatacgggagagagaccctataaatgttctgaatgtggagaaagcttctctcggagttcccgtcttatgagtcatcagagaactcacacaggttagtaacagtggggtttctctttgccccaggtgaggtggcatattcagaggagcctgttggcaagagctggtattccctgcccagccgaccaaatgacctctgcattcttcaggtaatgggggctcattgtgagggaggtgcagaggcagcagaggattggcataaaactgaaaaggagttctgtctgcatgagaaaggatggcaagtctctgaggtgacctcagggtggaattctctgttaagtccaccctgccccagggtgctcctaccctcttggtctttttaaagccaaggtgcgatttgggcacctgactgtccagtttaccttaacaagtttgggaatccatgtgatgtttttgatacttcttcctcatttgggacattcagtaggagcatttgggcttccggggcccctgagaccaaagaagaggggccaagtaccctgggaaatcagctgaaggtcaacaaaagactggttgtgagttgcagctgtcccgaaggccccagttgggaagccatgggcagtccagatcaagccaccacgtgccctacgatggcctaacaggagtgcccattggcagattacacatgtaaatatgacctcagacaaaaaggaaccagaggcccaagggcaataataaggtggaatttgcaggtcagcccaggaattggcagaggaagtaggtgtctgataaccctttgtggagaatgagattccccccacctgtgtgagaaaaataaacagctctggagtcttgttcctgactccagaggaacgagagcattccaggaaagagagattccctggaaaattgaaaatgtgaatcctagggggaaattggggattgtgtctttccctgttgaaaatgtttggatgggaataaatatcttcaggaaacataaaagtctgtgagtcttcaatgaaagcctctgtctagaaccccgagtgttgatctgtctcccctctgccttggtcagaggccctgctttctcat

SEQ ID NO: 737218 - DNA, 1088 bp, Homo sapiens
catgtaaatatgacctcagacaaaaaggaaccagaggcccaagggcaataataaggtggaatttgcaggtcagcccaggaattggcagagaatccacacaggagaaaaaccctatacctgtcatgagtgcggagacagcttctctcacagctccaatcggattcgccacctgagaacgcatacgggagagagaccctataaatgttctgaatgtggagaaagcttctctcggagttcccgtcttatgagtcatcagagaactcacacaggttagtaacagtggggtttctctttgccccaggtgaggtggcatattcagaggagcctgttggcaagagctggtattccctgcccagccgaccaaatgacctctgcattcttcaggtaatgggggctcattgtgagggaggtgcagaggcagcagaggattggcataaaactgaaaaggagttctgtctgcatgagaaaggatggcaagtctctgaggtgacctcagggtggaattctctgttaagtccaccctgccccagggtgctcctaccctcttggtctttttaaagccaaggtgcgatttgggcacagctgtcccgaaggccccagttgggaagccatgggcagtccagatcaagccaccacgtgccctacgatggcctaacaggagtgcccattggcagattacacatgtaaatatgacctcagacaaaaaggaaccagaggcccaagggcaataataaggtggaatttgcaggtcagcccaggaattggcagaggaagtaggtgtctgataaccctttgtggagaatgagattccccccacctgtgtgagaaaaataaacagctctggagtcttgttcctgactccagaggaacgagagcattccaggaaagagagattccctggaaaattgaaaatgtgaatcctagggggaaattggggattgtgtctttccctgttgaaaatgtttggatgggaataaatatcttcaggaaacataaaagtctgtgagtcttcaatgaaagcctctgtctagaaccccgagtgttgatctgtctcccctctgccttggtcagaggccctgctttctcat

SEQ ID NO: 737219 - DNA, 3281 bp, Homo sapiens
catgtaaatatgacctcagacaaaaaggaaccagaggcccaagggcaataataaggtggaatttgcaggtcagcccaggaattggcagagaatccacacaggagaaaaaccctatacctgtcatgagtgcggagacagcttctctcacagctccaatcggattcgccacctgagaacgcatacgggagagagaccctataaatgttctgaatgtggagaaagcttctctcggagttcccgtcttatgagtcatcagagaactcacatgtgaagtggaatctctgaaactcaggtgtggcatcaacaaagtcaagaaggtagtccaaactctctcttacagcagataatttaaattcagcagtctgcttctcagcttctcctcctttttgaacaacttcctttgttattccacctttggtttttaggagacaacccttttcttcatctccatttaaccacaccctatcatcatccaacttagtttccaactccccacatttttcaagaatttctctataatccccatgttctaagccttgaaaatcatattcaggttcctttttgtaaagaagattttcccatgcatttgctatggttatttgttttacttcttcccaactttttgcccagttaaaaattgcactttttatattgtagattttaattttggaaactcctttatctcctttctcttgctcatcatcactttcttcaaatattacaagactctcttcaagttgcttccatctatacagccgtttgcagctcaagatcacaccttgattcattggttgaatcaaggttgaagtgttatgggggaagaacatacattttattcgaccatcctcactggttagggattcagaggaaggatgagccgggcaactgtccagaagtaacaatgccctgacgtcctcgtcatgaaatcttagaacattaagttgaaaatgtcggacctcaggaacaaagttttgaaaaaaccattctgaaaacaattctctggtgaaccaaacatctttactgggtttatatatcacaggcaatgtacttgtgtcctctttcacacttttgggcagttttgattttccaataatgattgactttaatttatgagttccgtctgcatttgcacataaaaaggcagacaacctttctttgtttattttcttccctggtaggcagatatctttcctacttgcctgagaattttctggcattgacttccaaaagaggtctgtttcatccccactgtatagctgagctagacacagtttctcctctttgattatcatggacagtttttgtcgaaatggctcaacattttcagaaactgaacttaggacttgttccccacatccttttcggttcccaattgcatgccgatttcgaaatctaaaaagccaaccagtgctagctttgaaatctgttcgcccaaaacaccgtgcaaatctctctgcagcagcctgaagctccacgcctcttaccggaacaccggctgagcgtttctgttggtaccacatgtagaccgcatcatctacatcaccatatttggctcccgttgtcctctttctcttctcagcccctactaatggcatgtcctgcttcagtacaaagtccagaattaacttcttattttttttaatgtcataaaatgttgacttactgattccaaattcatccattacacttttaagtgatcgtccagcttcaattctacttagaaccttcattttctcctccaaattcagtgttgtatatttccctctcttattcatactgaatttaactctgaaccaccaacaggagaaaacaaagggaaaagccttaatgaattggcaaaaaaaaaacccacattttttaaacaaaacttagctgaaagccccagaaggcatgggcattgtattggaggataatggactgaaggggctaaccatgactgaagagctagtctagaggtggaggtcttatgcactcagaaagctgccagttgcaaagtcctgtctggctcttgctcctgcaagccatgagtgatcatttttcagaatgccccctacctctcctctcttttgacagatacaacagcctcagtcaggaatgacaggaatacctgcatactttccctaactcaataccggaaaacggacaatatgaagagaggagggatggagcaagatgtgcccacaagacaggtgtgataagtttccataaaaactgatgcttcagaagaagggagcgtgaaagactcaaaggcaatgacagagtaatcttgtgtgtagcagagatgcaatgtggcttctccccttccaaaaagacctgattttacctcactgccagaaaagagaatggtgctcaaattgctttgtacatagtgttcactgggcagcagttcatctacctggataagggctccgagctacagggaccctgacattgggatgtatggagagttggaattcaggaacagttgtaccgaatcttgaagtgaagaagaaagtagtttgttgtacatatgaatgaaatccaacttttattgcattcaatatagtattgtcaagcaccgtgctttaacttgaatgtctcttgtgtttgccaaggtaatatgtaagtatgtaaataatttatttgtcagtggcactttaccattctcagatcttctttcttgggaacatctgatttattctcaagtgctatttttcactgaaactgttctctatttgagatattatcaaagtttcagaatcacagcaattctcagagatgagcccaaaagttttacaaatatttcaccatagttaaaaatttttaaagatctgtcctttcatttgttttcctaaatttacactataagtaacatactttttatatttgagattttgatttctcttcagtgtttattttacttaatttgaaccaagactcaacttttccacagaagaaatctaaaaggtttctctgctgctgtttctgatcaattgtttctcataaatcctactggcaaactcttctgtccctctaggccctcaaatactcttttcgggtcctcctggtgctccccaaagccattccaggtccttagaaatgtcttagtctagattaatttcctggttctcagtccagatacacaacctcatgggaagaaacaaaaactgccacttttatccattccaggtgctacgaagaaagaaaagtatgtcagagaaataagggaaatggctggtatctcagttattcttcctcttctttagggcagaatctgactggcccattcattcctcaactac

SEQ ID NO: 737220 - DNA, 5792 bp, Homo sapiens
catgtaaatatgacctcagacaaaaaggaaccagaggcccaagggcaataataaggtggaatttgcaggtcagcccaggaattggcagagaatccacacaggagaaaaaccctatacctgtcatgagtgcggagacagcttctctcacagctccaatcggattcgccacctgagaacgcatacgggagagagaccctataaatgttctgaatgtggagaaagcttctctcggagttcccgtcttatgagtcatcagagaactcacatgtgaagtggaatctctgaaactcaggtgtggcatcaacaaagtcaagaaggtagtccaaactctctcttacagcagataatttaaattcagcagtctgcttctcagcttctcctcctttttgaacaacttcctttgttattccacctttggtttttaggagacaacccttttcttcatctccatttaaccacaccctatcatcatccaacttagtttccaactccccacatttttcaagaatttctctataatccccatgttctaagccttgaaaatcatattcaggttcctttttgtaaagaagattttcccatgcatttgctatggttatttgttttacttcttcccaactttttgcccagttaaaaattgcactttttatattgtagattttaattttggaaactcctttatctcctttctcttgctcatcatcactttcttcaaatattacaagactctcttcaagttgcttccatctatacagccgtttgcagctcaagatcacaccttgattcattggttgaatcaaggttgaagtgttatgggggaagaacatacattttattcgaccatcctcactggttagggattcagaggaaggatgagccgggcaactgtccagaagtaacaatgccctgacgtcctcgtcatgaaatcttagaacattaagttgaaaatgtcggacctcaggaacaaagttttgaaaaaaccattctgaaaacaattctctggtgaaccaaacatctttactgggtttatatatcacaggcaatgtacttgtgtcctctttcacacttttgggcagttttgattttccaataatgattgactttaatttatgagttccgtctgcatttgcacataaaaaggcagacaacctttctttgtttattttcttccctggtaggcagatatctttcctacttgcctgagaattttctggcattgacttccaaaagaggtctgtttcatccccactgtatagctgagctagacacagtttctcctctttgattatcatggacagtttttgtcgaaatggctcaacattttcagaaactgaacttaggacttgttccccacatccttttcggttcccaattgcatgccgatttcgaaatctaaaaagccaaccagtgctagctttgaaatctgttcgcccaaaacaccgtgcaaatctctctgcagcagcctgaagctccacgcctcttaccggaacaccggctgagcgtttctgttggtaccacatgtagaccgcatcatctacatcaccatatttggctcccgttgtcctctttctcttctcagcccctactaatggcatgtcctgcttcagtacaaagtccagaattaacttcttattttttttaatgtcataaaatgttgacttactgattccaaattcatccattacacttttaagtgatcgtccagcttcaattctacttagaaccttcattttctcctccaaattcagtgttgtatatttccctctcttattcatactgaatttaactctgaaccaccaacaggagaaaacaaagggaaaagccttaatgaattggcaaaaaaaaaacccacattttttaaacaaaacttagctgaaagccccagaaggcatgggcattgtattggaggataatggactgaaggggctaaccatgactgaagagctagtctagaggtggaggtcttatgcactcagaaagctgccagttgcaaagtcctgtctggctcttgctcctgcaagccatgagtgatcatttttcagaatgccccctacctctcctctcttttgacagatacaacagcctcagtcaggaatgacaggaatacctgcatactttccctaactcaataccggaaaacggacaatatgaagagaggagggatggagcaagatgtgcccacaagacaggtgtgataagtttccataaaaactgatgcttcagaagaagggagcgtgaaagactcaaaggcaatgacagagtaatcttgtgtgtagcagagatgcaatgtggcttctccccttccaaaaagacctgattttacctcactgccagaaaagagaatggtgctcaaattgctttgtacatagtgttcactgggcagcagttcatctacctggataagggctccgagctacagggaccctgacattgggatgtatggagagttggaattcaggaacagttgtaccgaatcttgaagtgaagaagaaagtagtttgttgtacatatgaatgaaatccaacttttattgcattcaatatagtattgtcaagcaccgtgctttaacttgaatgtctcttgtgtttgccaaggtaatatgtaagtatgtaaataatttatttgtcagtggcactttaccattctcagatcttctttcttgggaacatctgatttattctcaagtgctatttttcactgaaactgttctctatttgagatattatcaaagtttcagaatcacagcaattctcagagatgagcccaaaagttttacaaatatttcaccatagttaaaaatttttaaagatctgtcctttcatttgttttcctaaatttacactataagtaacatactttttatatttgagattttgatttctcttcagtgtttattttacttaatttgaaccaagactcaacttttccacagaagaaatctaaaaggtttctctgctgctgtttctgatcaattgtttctcataaatcctactggcaaactcttctgtccctctaggccctcaaatactcttttcgggtcctcctggtgctccccaaagccattccaggtccttagaaatgtcttagtctagattaatttcctggttctcagtccagatacacaacctcatgggaagaaacaaaaactgccacttttatccattccaggtgccggcgaggctcccgggaccaaacgccgcccgacagccacgcagaacagacgtggcagtgcgacgcctcccccactggggacacgagacagcgacagccacgcggtgagccggtacaaggccctctaggcttcagcgggtctggatactcggtggcattaacccttccctaccgccggggaagacagcagtttctctggcgaggaagtaggccgggctcaggcgccttagccagagggcgggcctgcgccaccctcggaaagcgtcacttccacttccggccggcgctctggctctgtacctggacagggctgcggtaggccagcggtgggctggcggttgcgctcctcagatcggcggcctttcgggcggtggcttgcgtttgagcctcagaaagcgaggagcggcctccacggaagccaagctggccgaggttgcagtccatgagctgggaaaggaggcagtgctcttgggagaaacagcagaggcctcaagtttcgggctgaagccaacagagtcccaaccagtgggcgtatcccaagatgaagaattttggaatacatacgagggtctgcaagaacagctcagcaggaatactcataaagagactgagcctgtgtatgagagggctgtgcctactcaacagattctagcttttcctgagcaaacaaacaccaaagactggacagtgacacctgagcacgtcttgcctgagtcccagagcttgttgacatttgaagaagtggccatgtatttttcccaggaagaatgggagttattggatcccactcagaaggccctctacaatgatgtaatgcaggaaaactatgagactgtcatctctctagcattgtttgtgctccccaaacctaaagtgatctcctgtctagagcaaggggaagagccatgggttcaagtatccccggagtttaaggatagtgccggaaaatctcctacagggttaaagctcaaaaacgacactgaaaatcatcagcctgtgtctctttctgacttagaaatacaagcatcagcaggcgtcatatcaaaaaaggccaaagtaaaagttccccagaaaacagcaggcaaagaaaatcattttgatatgcacagagtgggaaaatggcaccaagattttccagtgaagaaaagaaagaaactttcaacctggaaacaagagctgctcaaacttatggatcgtcacaagaaagattgtgcaagagagaagccttttaaatgtcaggaatgtgggaaaaccttcagagttagctctgaccttattaagcaccaaagaattcacactgaagagaaaccctataaatgtcaacagtgtgataagaggtttagatggagttcagatcttaataagcacttaacaacacaccaaggaataaaaccatataaatgttcatggtgtgggaaaagcttcagtcaaaatacaaatttacatacacaccaaagaactcatacaggagaaaagcccttcacatgtcatgaatgtggaaaaaaattcagtcagaactcccaccttattaaacaccggagaacccacacaggtgagcagccatatacttgtagcatatgcaggagaaacttcagcaggcggtcaagccttcttagacaccagaaactccacctgtgaagagaagcttgtccagtgtcctcattctgaagacattcaccaaatggagcttggcactaaaatttatgtaaaagaaaaatcacaaaccttgaaaaattttacatcagaaaatgggataaacatacatttcacagaaaataatcaagacttgctctgcagccactcagtagtcttctgtggtcacagaagtaaacattgttggctttgtattgatctctccagtcatttttgaacacatccaatagaaacattggcagcatggtcttccaaaacaaaaagcagtaacatgcatgtttaattgcataccattctcttcacagtagcaggcttaccaatttccatagtctcatgaggccgaaatgaattacaatgtaaagtgttccaggaaccaaattggattttctttcttttgtcattggacacggtttgcaaagttggacatcacttgagttccttcttaaacttttcggcaacttctcttggatcctgttatcacagttttttactgtgatgaaatcttgttaaccaccactagggaatctccagatgaactattaatgcactgtcttatgcctctcattggtgatgtttggaaaatagaagacatctctaatggaatcatgggggaaacgggttggaatttgtagccatggaatatatattagatgtaaagaattttctgcaataaaagaaactagacttgttaatccctgccttgcaatgtcagtaggataaagcagctataaaaattagtacttgcccaaggcctgaaagagaattagtgggaattaagatcaacttctcagttttgtttgtttactttttaattggcttttctttgttgttaagaatgagagacttaatttccatgggagttggagtgtgtgtgctgcaggcaggatcctgtggctcatttggcatggagacctggacatgtagtcagcaggagacggttccctaaataaaagatttgggcactggtg

SEQ ID NO: 737221 - DNA, 3402 bp, Homo sapiens
catgtaaatatgacctcagacaaaaaggaaccagaggcccaagggcaataataaggtggaatttgcaggtcagcccaggaattggcagagaatccacacaggagaaaaaccctatacctgtcatgagtgcggagacagcttctctcacagctccaatcggattcgccacctgagaacgcatacgggagagagaccctataaatgttctgaatgtggagaaagcttctctcggagttcccgtcttatgagtcatcagagaactcacatgtgaagtggaatctctgaaactcaggtgtggcatcaacaaagtcaagaaggtagtccaaactctctcttacagcagataatttaaattcagcagtctgcttctcagcttctcctcctttttgaacaacttcctttgttattccacctttggtttttaggagacaacccttttcttcatctccatttaaccacaccctatcatcatccaacttagtttccaactccccacatttttcaagaatttctctataatccccatgttctaagccttgaaaatcatattcaggttcctttttgtaaagaagattttcccatgcatttgctatggttatttgttttacttcttcccaactttttgcccagttaaaaattgcactttttatattgtagattttaattttggaaactcctttatctcctttctcttgctcatcatcactttcttcaaatattacaagactctcttcaagttgcttccatctatacagccgtttgcagctcaagatcacaccttgattcattggttgaatcaaggttgaagtgttatgggggaagaacatacattttattcgaccatcctcactggttagggattcagaggaaggatgagccgggcaactgtccagaagtaacaatgccctgacgtcctcgtcatgaaatcttagaacattaagttgaaaatgtcggacctcaggaacaaagttttgaaaaaaccattctgaaaacaattctctggtgaaccaaacatctttactgggtttatatatcacaggcaatgtacttgtgtcctctttcacacttttgggcagttttgattttccaataatgattgactttaatttatgagttccgtctgcatttgcacataaaaaggcagacaacctttctttgtttattttcttccctggtaggcagatatctttcctacttgcctgagaattttctggcattgacttccaaaagaggtctgtttcatccccactgtatagctgagctagacacagtttctcctctttgattatcatggacagtttttgtcgaaatggctcaacattttcagaaactgaacttaggacttgttccccacatccttttcggttcccaattgcatgccgatttcgaaatctaaaaagccaaccagtgctagctttgaaatctgttcgcccaaaacaccgtgcaaatctctctgcagcagcctgaagctccacgcctcttaccggaacaccggctgagcgtttctgttggtaccacatgtagaccgcatcatctacatcaccatatttggctcccgttgtcctctttctcttctcagcccctactaatggcatgtcctgcttcagtacaaagtccagaattaacttcttattttttttaatgtcataaaatgttgacttactgattccaaattcatccattacacttttaagtgatcgtccagcttcaattctacttagaaccttcattttctcctccaaattcagtgttgtatatttccctctcttattcatactgaatttaactctgaaccaccaacaggagaaaacaaagggaaaagccttaatgaattggcaaaaaaaaaacccacattttttaaacaaaacttagctgaaagccccagaaggcatgggcattgtattggaggataatggactgaaggggctaaccatgactgaagagctagtctagaggtggaggtcttatgcactcagaaagctgccagttgcaaagtcctgtctggctcttgctcctgcaagccatgagtgatcatttttcagaatgccccctacctctcctctcttttgacagatacaacagcctcagtcaggaatgacaggaatacctgcatactttccctaactcaataccggaaaacggacaatatgaagagaggagggatggagcaagatgtgcccacaagacaggtgtgataagtttccataaaaactgatgcttcagaagaagggagcgtgaaagactcaaaggcaatgacagagtaatcttgtgtgtagcagagatgcaatgtggcttctccccttccaaaaagacctgattttacctcactgccagaaaagagaatggtgctcaaattgctttgtacatagtgttcactgggcagcagttcatctacctggataagggctccgagctacagggaccctgacattgggatgtatggagagttggaattcaggaacagttgtaccgaatcttgaagtgaagaagaaagtagtttgttgtacatatgaatgaaatccaacttttattgcattcaatatagtattgtcaagcaccgtgctttaacttgaatgtctcttgtgtttgccaaggtaatatgtaagtatgtaaataatttatttgtcagtggcactttaccattctcagatcttctttcttgggaacatctgatttattctcaagtgctatttttcactgaaactgttctctatttgagatattatcaaagtttcagaatcacagcaattctcagagatgagcccaaaagttttacaaatatttcaccatagttaaaaatttttaaagatctgtcctttcatttgttttcctaaatttacactataagtaacatactttttatatttgagattttgatttctcttcagtgtttattttacttaatttgaaccaagactcaacttttccacagaagaaatctaaaaggtttctctgctgctgtttctgatcaattgtttctcataaatcctactggcaaactcttctgtccctctaggccctcaaatactcttttcgggtcctcctggtgctccccaaagccattccaggtccttagaaatgtcttagtctagattaatttcctggttctcagtccagatacacaacctcatgggaagaaacaaaaactgccacttttatccattccaggtgccggcgaggctcccgggaccaaacgccgcccgacagccacgcagaacagacgtggcagtgcgacgcctcccccactggggacacgagacagcgacagccacgcggtgagccggtacaaggccctctaggcttcagcgggtctggatactcggtggcattaacccttccctaccgccggggaagacagcagtttctacggacgcggggtcgacgatatcccgaaatccgacc

SEQ ID NO: 737222 - DNA, 6203 bp, Homo sapiens
catgtaaatatgacctcagacaaaaaggaaccagaggcccaagggcaataataaggtggaatttgcaggtcagcccaggaattggcagagaatccacacaggagaaaaaccctatacctgtcatgagtgcggagacagcttctctcacagctccaatcggattcgccacctgagaacgcatacgggagagagaccctataaatgttctgaatgtggagaaagcttctctcggagttcccgtcttatgagtcatcagagaactcacatgtgaagtggaatctctgaaactcaggtgtggcatcaacaaagtcaagaaggtagtccaaactctctcttacagcagataatttaaattcagcagtctgcttctcagcttctcctcctttttgaacaacttcctttgttattccacctttggtttttaggagacaacccttttcttcatctccatttaaccacaccctatcatcatccaacttagtttccaactccccacatttttcaagaatttctctataatccccatgttctaagccttgaaaatcatattcaggttcctttttgtaaagaagattttcccatgcatttgctatggttatttgttttacttcttcccaactttttgcccagttaaaaattgcactttttatattgtagattttaattttggaaactcctttatctcctttctcttgctcatcatcactttcttcaaatattacaagactctcttcaagttgcttccatctatacagccgtttgcagctcaagatcacaccttgattcattggttgaatcaaggttgaagtgttatgggggaagaacatacattttattcgaccatcctcactggttagggattcagaggaaggatgagccgggcaactgtccagaagtaacaatgccctgacgtcctcgtcatgaaatcttagaacattaagttgaaaatgtcggacctcaggaacaaagttttgaaaaaaccattctgaaaacaattctctggtgaaccaaacatctttactgggtttatatatcacaggcaatgtacttgtgtcctctttcacacttttgggcagttttgattttccaataatgattgactttaatttatgagttccgtctgcatttgcacataaaaaggcagacaacctttctttgtttattttcttccctggtaggcagatatctttcctacttgcctgagaattttctggcattgacttccaaaagaggtctgtttcatccccactgtatagctgagctagacacagtttctcctctttgattatcatggacagtttttgtcgaaatggctcaacattttcagaaactgaacttaggacttgttccccacatccttttcggttcccaattgcatgccgatttcgaaatctaaaaagccaaccagtgctagctttgaaatctgttcgcccaaaacaccgtgcaaatctctctgcagcagcctgaagctccacgcctcttaccggaacaccggctgagcgtttctgttggtaccacatgtagaccgcatcatctacatcaccatatttggctcccgttgtcctctttctcttctcagcccctactaatggcatgtcctgcttcagtacaaagtccagaattaacttcttattttttttaatgtcataaaatgttgacttactgattccaaattcatccattacacttttaagtgatcgtccagcttcaattctacttagaaccttcattttctcctccaaattcagtgttgtatatttccctctcttattcatactgaatttaactctgaaccaccaacaggagaaaacaaagggaaaagccttaatgaattggcaaaaaaaaaacccacattttttaaacaaaacttagctgaaagccccagaaggcatgggcattgtattggaggataatggactgaaggggctaaccatgactgaagagctagtctagaggtggaggtcttatgcactcagaaagctgccagttgcaaagtcctgtctggctcttgctcctgcaagccatgagtgatcatttttcagaatgccccctacctctcctctcttttgacagatacaacagcctcagtcaggaatgacaggaatacctgcatactttccctaactcaataccggaaaacggacaatatgaagagaggagggatggagcaagatgtgcccacaagacaggtgtgataagtttccataaaaactgatgcttcagaagaagggagcgtgaaagactcaaaggcaatgacagagtaatcttgtgtgtagcagagatgcaatgtggcttctccccttccaaaaagacctgattttacctcactgccagaaaagagaatggtgctcaaattgctttgtacatagtgttcactgggcagcagttcatctacctggataagggctccgagctacagggaccctgacattgggatgtatggagagttggaattcaggaacagttgtaccgaatcttgaagtgaagaagaaagtagtttgttgtacatatgaatgaaatccaacttttattgcattcaatatagtattgtcaagcaccgtgctttaacttgaatgtctcttgtgtttgccaaggtaatatgtaagtatgtaaataatttatttgtcagtggcactttaccattctcagatcttctttcttgggaacatctgatttattctcaagtgctatttttcactgaaactgttctctatttgagatattatcaaagtttcagaatcacagcaattctcagagatgagcccaaaagttttacaaatatttcaccatagttaaaaatttttaaagatctgtcctttcatttgttttcctaaatttacactataagtaacatactttttatatttgagattttgatttctcttcagtgtttattttacttaatttgaaccaagactcaacttttccacagaagaaatctaaaaggtttctctgctgctgtttctgatcaattgtttctcataaatcctactggcaaactcttctgtccctctaggccctcaaatactcttttcgggtcctcctggtgctccccaaagccattccaggtccttagaaatgtcttagtctagattaatttcctggttctcagtccagatacacaacctcatgggaagaaacaaaaactgccacttttatccattccaggtgcttagatgaactgccatagaaagcagctcagtccaaaacgctcaaatggtgctccaggatttacttttttgtattgttttgttttgttttttgcgacggagtctcgctctgtcgcccaggctggaatgcagtggcgtgaactcggctcactgcaagctccgcctcccgggttcacgccattctcctgcctcagcctcccgagtagctgggactacaggcgcccaccaccacgcccggctaatttttttttgtattttttagtagagacggggtttcaccatgttagccaggatggtctcgatctcctgacctcatgatccgcccgcctcggcctcccaaagtgctgggattacaggcgtaagccaccgcgcccggccaggatttactttcttaaatgcactcttttcattcccattcaaaggactccagtataagtgccacataaactcgttttctaacttttaaaactcttcctctaaatgcagcccaactcagtaaaaacgtacctaagatctcacagtctaatgtttccagcttttaaagcctttactcctacccttccctctgcctggaaagtgtctccattccctgctgtggacaaaatccctcaaggtcttttataatttcccccaaccccaaatcaacttggattttcttggagttctcacagcattcagtttatgtcctattcttacccttgtgttactgatattcacgaaattgctcagtcctttcaagagattgcttaaggacaaagacttcttactcaactctgcaatattggctacacatagctgacttaataaatagtcccttgactggtataagctgacgttacaaaaactggtaattccgaaaccactcatactggacttattaaataatccctcaactggtacagactgacattacaaaaacggattaattcagagatcactgaacacccaaaacactcagattcttataactatgattcagtaaatatgtgtggaatgcctatcttaccaggtgactatgttaggcgctgcatgagatataagatgaaaacaaggttcccattttccagggaagaatactggagtggaaaacgcagaggataccacaacaggagagctatttccgattagcggccgccactgctgagctatgtgaccctgagcaagtcacttcttaggtctccgtttctctgtcaaggagagatagaaaaagaacctatttcacaggttcaaacctacctcaagaaaaaatagttgtggggaatgcgtcacgagacctagaaaacggtacaaaaccctcggggggccgctgtttctgacctagcgagtggcccgacccggacaaaatgcctcttcctcgaggaggcggcgacgagcccagcaacagctcgagcacggccggccgggccgcgggaagcccgagaacgcggcgcgcgcagctgggaggcgacccttacccggcgaggctcccgggaccaaacgccgcccgacagccacgcagaacagacgtggcagtgcgacgcctcccccactggggacacgagacagcgacagccacgcggtgagccggtacaaggccctctaggcttcagcgggtctggatactcggtggcattaacccttccctaccgccggggaagacagcagtttctctggcgaggaagtaggccgggctcaggcgccttagccagagggcgggcctgcgccaccctcggaaagcgtcacttccacttccggccggcgctctggctctgtacctggacagggctgcggtaggccagcggtgggctggcggttgcgctcctcagatcggcggcctttcgggcggtggcttgcgtttgagcctcagaaagcgaggagcggcctccacggaagccaagctggccgagtgcttttaggaagaagatccttttattgcttttgtacaagaccagacaggatctcatttgttaaacgtggtaccaattgggtgtcttaacacaggagcagaacttcctagagcagaatgatgatggtagatctgaaagtggctgcgtacttggaccctcagatcagggctttgtgggagaccaaggggcctgcaagagagagctccggtcagagtaaaaaatctcctcaaatggactgtctcgatcctaagagctcttgctggcacttccggaatttcacctatgatgaagcaggtggaccccgtgaggctgtcagcaaacttcaagaattatgtcatctatggctgaagccagagatccactcaaaagagcagatactggaactgctggtgctggagcagttcctgactattctgcccagggagacacagacccagatgcagaagcaccatccacagagcattgaggaggctgtggctctggtagaacacttgcagagggaatctggtcaaacatggaatggggtgagaagaaagattcctgacatgtacagtgaaataggatgcaggtggatatagtagagatggtggcagttagttgagaaattagatggattaggtaggtcattgttggttttcttcttaaggacagttaaggtgggacttgaaactacaggcccacagaaaagttcacaggtttcagagattgtggtagatacttccctggccttagagaaagagagttgcttttgccctctttggagccagggtgaattgagggtgttgggcctagtctggcttggccaaggagacaggacttaagtacttagaaacagaataaaaggtaataaagagtcagggaggctggatgcagtggctcacacctgtaatctcagcactttaggaggctgaggcgggtagatcacctgaggtcaggagttcaagaccagcctggacagcatggtggaaccctctctctacaaaaataaacaaattagctgggcatgatgaccggtgcctgtaatcccggctatcctcgaggctgaggagggagaatcatttgaacctgggaggttgcagtgagccgagatcgcaccattgcactccagcctgggcaacacagcaagactccatctcacaaaaaaaaa

SEQ ID NO: 737223 - DNA, 6136 bp, Homo sapiens
catgtaaatatgacctcagacaaaaaggaaccagaggcccaagggcaataataaggtggaatttgcaggtcagcccaggaattggcagagaatccacacaggagaaaaaccctatacctgtcatgagtgcggagacagcttctctcacagctccaatcggattcgccacctgagaacgcatacgggagagagaccctataaatgttctgaatgtggagaaagcttctctcggagttcccgtcttatgagtcatcagagaactcacatgtgaagtggaatctctgaaactcaggtgtggcatcaacaaagtcaagaaggtagtccaaactctctcttacagcagataatttaaattcagcagtctgcttctcagcttctcctcctttttgaacaacttcctttgttattccacctttggtttttaggagacaacccttttcttcatctccatttaaccacaccctatcatcatccaacttagtttccaactccccacatttttcaagaatttctctataatccccatgttctaagccttgaaaatcatattcaggttcctttttgtaaagaagattttcccatgcatttgctatggttatttgttttacttcttcccaactttttgcccagttaaaaattgcactttttatattgtagattttaattttggaaactcctttatctcctttctcttgctcatcatcactttcttcaaatattacaagactctcttcaagttgcttccatctatacagccgtttgcagctcaagatcacaccttgattcattggttgaatcaaggttgaagtgttatgggggaagaacatacattttattcgaccatcctcactggttagggattcagaggaaggatgagccgggcaactgtccagaagtaacaatgccctgacgtcctcgtcatgaaatcttagaacattaagttgaaaatgtcggacctcaggaacaaagttttgaaaaaaccattctgaaaacaattctctggtgaaccaaacatctttactgggtttatatatcacaggcaatgtacttgtgtcctctttcacacttttgggcagttttgattttccaataatgattgactttaatttatgagttccgtctgcatttgcacataaaaaggcagacaacctttctttgtttattttcttccctggtaggcagatatctttcctacttgcctgagaattttctggcattgacttccaaaagaggtctgtttcatccccactgtatagctgagctagacacagtttctcctctttgattatcatggacagtttttgtcgaaatggctcaacattttcagaaactgaacttaggacttgttccccacatccttttcggttcccaattgcatgccgatttcgaaatctaaaaagccaaccagtgctagctttgaaatctgttcgcccaaaacaccgtgcaaatctctctgcagcagcctgaagctccacgcctcttaccggaacaccggctgagcgtttctgttggtaccacatgtagaccgcatcatctacatcaccatatttggctcccgttgtcctctttctcttctcagcccctactaatggcatgtcctgcttcagtacaaagtccagaattaacttcttattttttttaatgtcataaaatgttgacttactgattccaaattcatccattacacttttaagtgatcgtccagcttcaattctacttagaaccttcattttctcctccaaattcagtgttgtatatttccctctcttattcatactgaatttaactctgaaccaccaacaggagaaaacaaagggaaaagccttaatgaattggcaaaaaaaaaacccacattttttaaacaaaacttagctgaaagccccagaaggcatgggcattgtattggaggataatggactgaaggggctaaccatgactgaagagctagtctagaggtggaggtcttatgcactcagaaagctgccagttgcaaagtcctgtctggctcttgctcctgcaagccatgagtgatcatttttcagaatgccccctacctctcctctcttttgacagatacaacagcctcagtcaggaatgacaggaatacctgcatactttccctaactcaataccggaaaacggacaatatgaagagaggagggatggagcaagatgtgcccacaagacaggtgtgataagtttccataaaaactgatgcttcagaagaagggagcgtgaaagactcaaaggcaatgacagagtaatcttgtgtgtagcagagatgcaatgtggcttctccccttccaaaaagacctgattttacctcactgccagaaaagagaatggtgctcaaattgctttgtacatagtgttcactgggcagcagttcatctacctggataagggctccgagctacagggaccctgacattgggatgtatggagagttggaattcaggaacagttgtaccgaatcttgaagtgaagaagaaagtagtttgttgtacatatgaatgaaatccaacttttattgcattcaatatagtattgtcaagcaccgtgctttaacttgaatgtctcttgtgtttgccaaggtaatatgtaagtatgtaaataatttatttgtcagtggcactttaccattctcagatcttctttcttgggaacatctgatttattctcaagtgctatttttcactgaaactgttctctatttgagatattatcaaagtttcagaatcacagcaattctcagagatgagcccaaaagttttacaaatatttcaccatagttaaaaatttttaaagatctgtcctttcatttgttttcctaaatttacactataagtaacatactttttatatttgagattttgatttctcttcagtgtttattttacttaatttgaaccaagactcaacttttccacagaagaaatctaaaaggtttctctgctgctgtttctgatcaattgtttctcataaatcctactggcaaactcttctgtccctctaggccctcaaatactcttttcgggtcctcctggtgctccccaaagccattccaggtccttagaaatgtcttagtctagattaatttcctggttctcagtccagatacacaacctcatgggaagaaacaaaaactgccacttttatccattccaggtgcttagatgaactgccatagaaagcagctcagtccaaaacgctcaaatggtgctccaggatttacttttttgtattgttttgttttgttttttgcgacggagtctcgctctgtcgcccaggctggaatgcagtggcgtgaactcggctcactgcaagctccgcctcccgggttcacgccattctcctgcctcagcctcccgagtagctgggactacaggcgcccaccaccacgcccggctaatttttttttgtattttttagtagagacggggtttcaccatgttagccaggatggtctcgatctcctgacctcatgatccgcccgcctcggcctcccaaagtgctgggattacaggcgtaagccaccgcgcccggccaggatttactttcttaaatgcactcttttcattcccattcaaaggactccagtataagtgccacataaactcgttttctaacttttaaaactcttcctctaaatgcagcccaactcagtaaaaacgtacctaagatctcacagtctaatgtttccagcttttaaagcctttactcctacccttccctctgcctggaaagtgtctccattccctgctgtggacaaaatccctcaaggtcttttataatttcccccaaccccaaatcaacttggattttcttggagttctcacagcattcagtttatgtcctattcttacccttgtgttactgatattcacgaaattgctcagtcctttcaagagattgcttaaggacaaagacttcttactcaactctgcaatattggctacacatagctgacttaataaatagtcccttgactggtataagctgacgttacaaaaactggtaattccgaaaccactcatactggacttattaaataatccctcaactggtacagactgacattacaaaaacggattaattcagagatcactgaacacccaaaacactcagattcttataactatgattcagtaaatatgtgtggaatgcctatcttaccaggtgactatgttaggcgctgcatgagatataagatgaaaacaaggttcccattttccagggaagaatactggagtggaaaacgcagaggataccacaacaggagagctatttccgattagcggccgccactgctgagctatgtgaccctgagcaagtcacttcttaggtctccgtttctctgtcaaggagagatagaaaaagaacctatttcacaggttcaaacctacctcaagaaaaaatagttgtggggaatgcgtcacgagacctagaaaacggtacaaaaccctcggggggccgctgtttctgacctagcgagtggcccgacccggacaaaatgcctcttcctcgaggaggcggcgacgagcccagcaacagctcgagcacggccggccgggccgcgggaagcccgagaacgcggcgcgcgcagctgggaggcgacccttacccggcgaggctcccgggaccaaacgccgcccgacagccacgcagaacagacgtggcagtgcgacgcctcccccactggggacacgagacagcgacagccacgcggtgagccggtacaaggccctctaggcttcagcgggtctggatactcggtggcattaacccttccctaccgccggggaagacagcagtttctctggcgaggaagtaggccgggctcaggcgccttagccagagggcgggcctgcgccaccctcggaaagcgtcacttccacttccggccggcgctctggctctgtacctggacagggctgcggtaggccagcggtgggctggcggttgcgctcctcagatcggcggcctttcgggcggtggcttgcgtttgagcctcagaaagcgaggagcggcctccacggaagccaagctggccgagtgcttttaggaagaagatccttttattgcttttgtacaagaccagacaggatctcatttgttaaacgtggtaccaattgggtgtcttaacacaggagcagaacttcctagagcagaatgatgatggtagatctgaaagtggctgcgtacttggaccctcagatcagggctttgtgggagaccaaggggcctgcaagagagagctccggtcagagtaaaaaatctcctcaaatggactgtctcgatcctaagagctcttgctggcacttccggaatttcacctatgatgaagcaggtggaccccgtgaggctgtcagcaaacttcaagaattatgtcatctatggctgaagccagagatccactcaaaagagcagatactggaactgctggtgctggagcagttcctgactattctgcccagggagacacagacccagatgcagaagcaccatccacagagcattgaggaggctgtggctctggtagaacacttgcagagggaatctggtcaaacatggaatggggttgcagtccatgagctgggaaaggaggcagtgctcttgggagaaacagcagaggcctcaagtttcgggctgaagccaacagagtcccaaccagtgggcgtatcccaagatgaagaattttggaatacatacgagggtctgcaagaacagctcagcaggaatactcataaagagactgagcctgtgtatgagagggctgtgcctactcaacagattctagcttttcctgagcaaacaaacaccaaagactggacagtgacacctgagcacgtcttgcctgagtcccaggtgagctgtgctttccagctgttgagggctacctttctctgctatgtatgattaatactgtccaggaggggttcagaggtgtgttagtcccgggtgttctctgggcaactgggtacctcccaggctgtgggctgacgccttttctcctttttttctgccttctcacttaaaaaaatcatgttctgttaattcctttatcgcctggccaattcatagccaggtggctaggctgcttctgtacagtggcaggttctgagctgaagtccat

SEQ ID NO: 737224 - DNA, 7769 bp, Homo sapiens
catgtaaatatgacctcagacaaaaaggaaccagaggcccaagggcaataataaggtggaatttgcaggtcagcccaggaattggcagagaatccacacaggagaaaaaccctatacctgtcatgagtgcggagacagcttctctcacagctccaatcggattcgccacctgagaacgcatacgggagagagaccctataaatgttctgaatgtggagaaagcttctctcggagttcccgtcttatgagtcatcagagaactcacatgtgaagtggaatctctgaaactcaggtgtggcatcaacaaagtcaagaaggtagtccaaactctctcttacagcagataatttaaattcagcagtctgcttctcagcttctcctcctttttgaacaacttcctttgttattccacctttggtttttaggagacaacccttttcttcatctccatttaaccacaccctatcatcatccaacttagtttccaactccccacatttttcaagaatttctctataatccccatgttctaagccttgaaaatcatattcaggttcctttttgtaaagaagattttcccatgcatttgctatggttatttgttttacttcttcccaactttttgcccagttaaaaattgcactttttatattgtagattttaattttggaaactcctttatctcctttctcttgctcatcatcactttcttcaaatattacaagactctcttcaagttgcttccatctatacagccgtttgcagctcaagatcacaccttgattcattggttgaatcaaggttgaagtgttatgggggaagaacatacattttattcgaccatcctcactggttagggattcagaggaaggatgagccgggcaactgtccagaagtaacaatgccctgacgtcctcgtcatgaaatcttagaacattaagttgaaaatgtcggacctcaggaacaaagttttgaaaaaaccattctgaaaacaattctctggtgaaccaaacatctttactgggtttatatatcacaggcaatgtacttgtgtcctctttcacacttttgggcagttttgattttccaataatgattgactttaatttatgagttccgtctgcatttgcacataaaaaggcagacaacctttctttgtttattttcttccctggtaggcagatatctttcctacttgcctgagaattttctggcattgacttccaaaagaggtctgtttcatccccactgtatagctgagctagacacagtttctcctctttgattatcatggacagtttttgtcgaaatggctcaacattttcagaaactgaacttaggacttgttccccacatccttttcggttcccaattgcatgccgatttcgaaatctaaaaagccaaccagtgctagctttgaaatctgttcgcccaaaacaccgtgcaaatctctctgcagcagcctgaagctccacgcctcttaccggaacaccggctgagcgtttctgttggtaccacatgtagaccgcatcatctacatcaccatatttggctcccgttgtcctctttctcttctcagcccctactaatggcatgtcctgcttcagtacaaagtccagaattaacttcttattttttttaatgtcataaaatgttgacttactgattccaaattcatccattacacttttaagtgatcgtccagcttcaattctacttagaaccttcattttctcctccaaattcagtgttgtatatttccctctcttattcatactgaatttaactctgaaccaccaacaggagaaaacaaagggaaaagccttaatgaattggcaaaaaaaaaacccacattttttaaacaaaacttagctgaaagccccagaaggcatgggcattgtattggaggataatggactgaaggggctaaccatgactgaagagctagtctagaggtggaggtcttatgcactcagaaagctgccagttgcaaagtcctgtctggctcttgctcctgcaagccatgagtgatcatttttcagaatgccccctacctctcctctcttttgacagatacaacagcctcagtcaggaatgacaggaatacctgcatactttccctaactcaataccggaaaacggacaatatgaagagaggagggatggagcaagatgtgcccacaagacaggtgtgataagtttccataaaaactgatgcttcagaagaagggagcgtgaaagactcaaaggcaatgacagagtaatcttgtgtgtagcagagatgcaatgtggcttctccccttccaaaaagacctgattttacctcactgccagaaaagagaatggtgctcaaattgctttgtacatagtgttcactgggcagcagttcatctacctggataagggctccgagctacagggaccctgacattgggatgtatggagagttggaattcaggaacagttgtaccgaatcttgaagtgaagaagaaagtagtttgttgtacatatgaatgaaatccaacttttattgcattcaatatagtattgtcaagcaccgtgctttaacttgaatgtctcttgtgtttgccaaggtaatatgtaagtatgtaaataatttatttgtcagtggcactttaccattctcagatcttctttcttgggaacatctgatttattctcaagtgctatttttcactgaaactgttctctatttgagatattatcaaagtttcagaatcacagcaattctcagagatgagcccaaaagttttacaaatatttcaccatagttaaaaatttttaaagatctgtcctttcatttgttttcctaaatttacactataagtaacatactttttatatttgagattttgatttctcttcagtgtttattttacttaatttgaaccaagactcaacttttccacagaagaaatctaaaaggtttctctgctgctgtttctgatcaattgtttctcataaatcctactggcaaactcttctgtccctctaggccctcaaatactcttttcgggtcctcctggtgctccccaaagccattccaggtccttagaaatgtcttagtctagattaatttcctggttctcagtccagatacacaacctcatgggaagaaacaaaaactgccacttttatccattccaggtgcttagatgaactgccatagaaagcagctcagtccaaaacgctcaaatggtgctccaggatttacttttttgtattgttttgttttgttttttgcgacggagtctcgctctgtcgcccaggctggaatgcagtggcgtgaactcggctcactgcaagctccgcctcccgggttcacgccattctcctgcctcagcctcccgagtagctgggactacaggcgcccaccaccacgcccggctaatttttttttgtattttttagtagagacggggtttcaccatgttagccaggatggtctcgatctcctgacctcatgatccgcccgcctcggcctcccaaagtgctgggattacaggcgtaagccaccgcgcccggccaggatttactttcttaaatgcactcttttcattcccattcaaaggactccagtataagtgccacataaactcgttttctaacttttaaaactcttcctctaaatgcagcccaactcagtaaaaacgtacctaagatctcacagtctaatgtttccagcttttaaagcctttactcctacccttccctctgcctggaaagtgtctccattccctgctgtggacaaaatccctcaaggtcttttataatttcccccaaccccaaatcaacttggattttcttggagttctcacagcattcagtttatgtcctattcttacccttgtgttactgatattcacgaaattgctcagtcctttcaagagattgcttaaggacaaagacttcttactcaactctgcaatattggctacacatagctgacttaataaatagtcccttgactggtataagctgacgttacaaaaactggtaattccgaaaccactcatactggacttattaaataatccctcaactggtacagactgacattacaaaaacggattaattcagagatcactgaacacccaaaacactcagattcttataactatgattcagtaaatatgtgtggaatgcctatcttaccaggtgactatgttaggcgctgcatgagatataagatgaaaacaaggttcccattttccagggaagaatactggagtggaaaacgcagaggataccacaacaggagagctatttccgattagcggccgccactgctgagctatgtgaccctgagcaagtcacttcttaggtctccgtttctctgtcaaggagagatagaaaaagaacctatttcacaggttcaaacctacctcaagaaaaaatagttgtggggaatgcgtcacgagacctagaaaacggtacaaaaccctcggggggccgctgtttctgacctagcgagtggcccgacccggacaaaatgcctcttcctcgaggaggcggcgacgagcccagcaacagctcgagcacggccggccgggccgcgggaagcccgagaacgcggcgcgcgcagctgggaggcgacccttacccggcgaggctcccgggaccaaacgccgcccgacagccacgcagaacagacgtggcagtgcgacgcctcccccactggggacacgagacagcgacagccacgcggtgagccggtacaaggccctctaggcttcagcgggtctggatactcggtggcattaacccttccctaccgccggggaagacagcagtttctctggcgaggaagtaggccgggctcaggcgccttagccagagggcgggcctgcgccaccctcggaaagcgtcacttccacttccggccggcgctctggctctgtacctggacagggctgcggtaggccagcggtgggctggcggttgcgctcctcagatcggcggcctttcgggcggtggcttgcgtttgagcctcagaaagcgaggagcggcctccacggaagccaagctggccgagtgcttttaggaagaagatccttttattgcttttgtacaagaccagacaggatctcatttgttaaacgtggtaccaattgggtgtcttaacacaggagcagaacttcctagagcagaatgatgatggtagatctgaaagtggctgcgtacttggaccctcagatcagggctttgtgggagaccaaggggcctgcaagagagagctccggtcagagtaaaaaatctcctcaaatggactgtctcgatcctaagagctcttgctggcacttccggaatttcacctatgatgaagcaggtggaccccgtgaggctgtcagcaaacttcaagaattatgtcatctatggctgaagccagagatccactcaaaagagcagatactggaactgctggtgctggagcagttcctgactattctgcccagggagacacagacccagatgcagaagcaccatccacagagcattgaggaggctgtggctctggtagaacacttgcagagggaatctggtcaaacatggaatggggttgcagtccatgagctgggaaaggaggcagtgctcttgggagaaacagcagaggcctcaagtttcgggctgaagccaacagagtcccaaccagtgggcgtatcccaagatgaagaattttggaatacatacgagggtctgcaagaacagctcagcaggaatactcataaagagactgagcctgtgtatgagagggctgtgcctactcaacagattctagcttttcctgagcaaacaaacaccaaagactggacagtgacacctgagcacgtcttgcctgagtcccagagcttgttgacatttgaagaagtggccatgtatttttcccaggaagaatgggagttattggatcccactcagaaggccctctacaatgatgtaatgcaggaaaactatgagactgtcatctctctagcattgtttgtgctccccaaacctaaagtgatctcctgtctagagcaaggggaagagccatgggttcaagtatccccggagtttaaggatagtgccggaaaatctcctacagggttaaagctcaaaaacgacactgaaaatcatcagcctgtgtctctttctgacttagaaatacaagcatcagcaggcgtcatatcaaaaaaggccaaagtaaaagttccccagaaaacagcaggcaaagaaaatcattttgatatgcacagagtgggaaaatggcaccaagattttccagtgaagaaaagaaagaaactttcaacctggaaacaagagctgctcaaacttatggatcgtcacaagaaagattgtgcaagagagaagccttttaaatgtcaggaatgtgggaaaaccttcagagttagctctgaccttattaagcaccaaagaattcacactgaagagaaaccctataaatgtcaacagtgtgataagaggtttagatggagttcagatcttaataagcacttaacaacacaccaaggaataaaaccatataaatgttcatggtgtgggaaaagcttcagtcaaaatacaaatttacatacacaccaaagaactcatacaggagaaaagcccttcacatgtcatgaatgtggaaaaaaattcagtcagaactcccaccttattaaacaccggagaacccacacaggtgagcagccatatacttgtagcatatgcaggagaaacttcagcaggcggtcaagccttcttagacaccagaaactccacctgtgaagagaagcttgtccagtgtcctcattctgaagacattcaccaaatggagcttggcactaaaatttatgtaaaagaaaaatcacaaaccttgaaaaattttacatcagaaaatgggataaacatacatttcacagaaaataatcaagacttgctctgcagccactcagtagtcttctgtggtcacagaagtaaacattgttggctttgtattgatctctccagtcatttttgaacacatccaatagaaacattggcagcatggtcttccaaaacaaaaagcagtaacatgcatgtttaattgcataccattctcttcacagtagcaggcttaccaatttccatagtctcatgaggccgaaatgaattacaatgtaaagtgttccaggaaccaaattggattttctttcttttgtcattggacacggtttgcaaagttggacatcacttgagttccttcttaaacttttcggcaacttctcttggatcctgttatcacagttttttactgtgatgaaatcttgttaaccaccactagggaatctccagatgaactattaatgcactgtcttatgcctctcattggtgatgtttggaaaatagaagacatctctaatggaatcatgggggaaacgggttggaatttgtagccatggaatatatattagatgtaaagaattttctgcaataaaagaaactagacttgttaatccctgccttgcaatgtcagtaggataaagcagctataaaaattagtacttgcccaaggcctgaaagagaattagtgggaattaagatcaacttctcagttttgtttgtttactttttaattggcttttctttgttgttaagaatgagagacttaatttccatgggagttggagtgtgtgtgctgcaggcaggatcctgtggctcatttggcatggagacctggacatgtagtcagcaggagacggttccctaaataaaagatttgggcactggtg

SEQ ID NO: 737225 - DNA, 7245 bp, Homo sapiens
catgtaaatatgacctcagacaaaaaggaaccagaggcccaagggcaataataaggtggaatttgcaggtcagcccaggaattggcagagaatccacacaggagaaaaaccctatacctgtcatgagtgcggagacagcttctctcacagctccaatcggattcgccacctgagaacgcatacgggagagagaccctataaatgttctgaatgtggagaaagcttctctcggagttcccgtcttatgagtcatcagagaactcacatgtgaagtggaatctctgaaactcaggtgtggcatcaacaaagtcaagaaggtagtccaaactctctcttacagcagataatttaaattcagcagtctgcttctcagcttctcctcctttttgaacaacttcctttgttattccacctttggtttttaggagacaacccttttcttcatctccatttaaccacaccctatcatcatccaacttagtttccaactccccacatttttcaagaatttctctataatccccatgttctaagccttgaaaatcatattcaggttcctttttgtaaagaagattttcccatgcatttgctatggttatttgttttacttcttcccaactttttgcccagttaaaaattgcactttttatattgtagattttaattttggaaactcctttatctcctttctcttgctcatcatcactttcttcaaatattacaagactctcttcaagttgcttccatctatacagccgtttgcagctcaagatcacaccttgattcattggttgaatcaaggttgaagtgttatgggggaagaacatacattttattcgaccatcctcactggttagggattcagaggaaggatgagccgggcaactgtccagaagtaacaatgccctgacgtcctcgtcatgaaatcttagaacattaagttgaaaatgtcggacctcaggaacaaagttttgaaaaaaccattctgaaaacaattctctggtgaaccaaacatctttactgggtttatatatcacaggcaatgtacttgtgtcctctttcacacttttgggcagttttgattttccaataatgattgactttaatttatgagttccgtctgcatttgcacataaaaaggcagacaacctttctttgtttattttcttccctggtaggcagatatctttcctacttgcctgagaattttctggcattgacttccaaaagaggtctgtttcatccccactgtatagctgagctagacacagtttctcctctttgattatcatggacagtttttgtcgaaatggctcaacattttcagaaactgaacttaggacttgttccccacatccttttcggttcccaattgcatgccgatttcgaaatctaaaaagccaaccagtgctagctttgaaatctgttcgcccaaaacaccgtgcaaatctctctgcagcagcctgaagctccacgcctcttaccggaacaccggctgagcgtttctgttggtaccacatgtagaccgcatcatctacatcaccatatttggctcccgttgtcctctttctcttctcagcccctactaatggcatgtcctgcttcagtacaaagtccagaattaacttcttattttttttaatgtcataaaatgttgacttactgattccaaattcatccattacacttttaagtgatcgtccagcttcaattctacttagaaccttcattttctcctccaaattcagtgttgtatatttccctctcttattcatactgaatttaactctgaaccaccaacaggagaaaacaaagggaaaagccttaatgaattggcaaaaaaaaaacccacattttttaaacaaaacttagctgaaagccccagaaggcatgggcattgtattggaggataatggactgaaggggctaaccatgactgaagagctagtctagaggtggaggtcttatgcactcagaaagctgccagttgcaaagtcctgtctggctcttgctcctgcaagccatgagtgatcatttttcagaatgccccctacctctcctctcttttgacagatacaacagcctcagtcaggaatgacaggaatacctgcatactttccctaactcaataccggaaaacggacaatatgaagagaggagggatggagcaagatgtgcccacaagacaggtgtgataagtttccataaaaactgatgcttcagaagaagggagcgtgaaagactcaaaggcaatgacagagtaatcttgtgtgtagcagagatgcaatgtggcttctccccttccaaaaagacctgattttacctcactgccagaaaagagaatggtgctcaaattgctttgtacatagtgttcactgggcagcagttcatctacctggataagggctccgagctacagggaccctgacattgggatgtatggagagttggaattcaggaacagttgtaccgaatcttgaagtgaagaagaaagtagtttgttgtacatatgaatgaaatccaacttttattgcattcaatatagtattgtcaagcaccgtgctttaacttgaatgtctcttgtgtttgccaaggtaatatgtaagtatgtaaataatttatttgtcagtggcactttaccattctcagatcttctttcttgggaacatctgatttattctcaagtgctatttttcactgaaactgttctctatttgagatattatcaaagtttcagaatcacagcaattctcagagatgagcccaaaagttttacaaatatttcaccatagttaaaaatttttaaagatctgtcctttcatttgttttcctaaatttacactataagtaacatactttttatatttgagattttgatttctcttcagtgtttattttacttaatttgaaccaagactcaacttttccacagaagaaatctaaaaggtttctctgctgctgtttctgatcaattgtttctcataaatcctactggcaaactcttctgtccctctaggccctcaaatactcttttcgggtcctcctggtgctccccaaagccattccaggtccttagaaatgtcttagtctagattaatttcctggttctcagtccagatacacaacctcatgggaagaaacaaaaactgccacttttatccattccaggtgcttagatgaactgccatagaaagcagctcagtccaaaacgctcaaatggtgctccaggatttacttttttgtattgttttgttttgttttttgcgacggagtctcgctctgtcgcccaggctggaatgcagtggcgtgaactcggctcactgcaagctccgcctcccgggttcacgccattctcctgcctcagcctcccgagtagctgggactacaggcgcccaccaccacgcccggctaatttttttttgtattttttagtagagacggggtttcaccatgttagccaggatggtctcgatctcctgacctcatgatccgcccgcctcggcctcccaaagtgctgggattacaggcgtaagccaccgcgcccggccaggatttactttcttaaatgcactcttttcattcccattcaaaggactccagtataagtgccacataaactcgttttctaacttttaaaactcttcctctaaatgcagcccaactcagtaaaaacgtacctaagatctcacagtctaatgtttccagcttttaaagcctttactcctacccttccctctgcctggaaagtgtctccattccctgctgtggacaaaatccctcaaggtcttttataatttcccccaaccccaaatcaacttggattttcttggagttctcacagcattcagtttatgtcctattcttacccttgtgttactgatattcacgaaattgctcagtcctttcaagagattgcttaaggacaaagacttcttactcaactctgcaatattggctacacatagctgacttaataaatagtcccttgactggtataagctgacgttacaaaaactggtaattccgaaaccactcatactggacttattaaataatccctcaactggtacagactgacattacaaaaacggattaattcagagatcactgaacacccaaaacactcagattcttataactatgattcagtaaatatgtgtggaatgcctatcttaccaggtgactatgttaggcgctgcatgagatataagatgaaaacaaggttcccattttccagggaagaatactggagtggaaaacgcagaggataccacaacaggagagctatttccgattagcggccgccactgctgagctatgtgaccctgagcaagtcacttcttaggtctccgtttctctgtcaaggagagatagaaaaagaacctatttcacaggttcaaacctacctcaagaaaaaatagttgtggggaatgcgtcacgagacctagaaaacggtacaaaaccctcggggggccgctgtttctgacctagcgagtggcccgacccggacaaaatgcctcttcctcgaggaggcggcgacgagcccagcaacagctcgagcacggccggccgggccgcgggaagcccgagaacgcggcgcgcgcagctgggaggcgacccttacccggcgaggctcccgggaccaaacgccgcccgacagccacgcagaacagacgtggcagtgcgacgcctcccccactggggacacgagacagcgacagccacgcggtgagccggtacaaggccctctaggcttcagcgggtctggatactcggtggcattaacccttccctaccgccggggaagacagcagtttctctggcgaggaagtaggccgggctcaggcgccttagccagagggcgggcctgcgccaccctcggaaagcgtcacttccacttccggccggcgctctggctctgtacctggacagggctgcggtaggccagcggtgggctggcggttgcgctcctcagatcggcggcctttcgggcggtggcttgcgtttgagcctcagaaagcgaggagcggcctccacggaagccaagctggccgaggttgcagtccatgagctgggaaaggaggcagtgctcttgggagaaacagcagaggcctcaagtttcgggctgaagccaacagagtcccaaccagtgggcgtatcccaagatgaagaattttggaatacatacgagggtctgcaagaacagctcagcaggaatactcataaagagactgagcctgtgtatgagagggctgtgcctactcaacagattctagcttttcctgagcaaacaaacaccaaagactggacagtgacacctgagcacgtcttgcctgagtcccagagcttgttgacatttgaagaagtggccatgtatttttcccaggaagaatgggagttattggatcccactcagaaggccctctacaatgatgtaatgcaggaaaactatgagactgtcatctctctagcattgtttgtgctccccaaacctaaagtgatctcctgtctagagcaaggggaagagccatgggttcaagtatccccggagtttaaggatagtgccggaaaatctcctacagggttaaagctcaaaaacgacactgaaaatcatcagcctgtgtctctttctgacttagaaatacaagcatcagcaggcgtcatatcaaaaaaggccaaagtaaaagttccccagaaaacagcaggcaaagaaaatcattttgatatgcacagagtgggaaaatggcaccaagattttccagtgaagaaaagaaagaaactttcaacctggaaacaagagctgctcaaacttatggatcgtcacaagaaagattgtgcaagagagaagccttttaaatgtcaggaatgtgggaaaaccttcagagttagctctgaccttattaagcaccaaagaattcacactgaagagaaaccctataaatgtcaacagtgtgataagaggtttagatggagttcagatcttaataagcacttaacaacacaccaaggaataaaaccatataaatgttcatggtgtgggaaaagcttcagtcaaaatacaaatttacatacacaccaaagaactcatacaggagaaaagcccttcacatgtcatgaatgtggaaaaaaattcagtcagaactcccaccttattaaacaccggagaacccacacaggtgagcagccatatacttgtagcatatgcaggagaaacttcagcaggcggtcaagccttcttagacaccagaaactccacctgtgaagagaagcttgtccagtgtcctcattctgaagacattcaccaaatggagcttggcactaaaatttatgtaaaagaaaaatcacaaaccttgaaaaattttacatcagaaaatgggataaacatacatttcacagaaaataatcaagacttgctctgcagccactcagtagtcttctgtggtcacagaagtaaacattgttggctttgtattgatctctccagtcatttttgaacacatccaatagaaacattggcagcatggtcttccaaaacaaaaagcagtaacatgcatgtttaattgcataccattctcttcacagtagcaggcttaccaatttccatagtctcatgaggccgaaatgaattacaatgtaaagtgttccaggaaccaaattggattttctttcttttgtcattggacacggtttgcaaagttggacatcacttgagttccttcttaaacttttcggcaacttctcttggatcctgttatcacagttttttactgtgatgaaatcttgttaaccaccactagggaatctccagatgaactattaatgcactgtcttatgcctctcattggtgatgtttggaaaatagaagacatctctaatggaatcatgggggaaacgggttggaatttgtagccatggaatatatattagatgtaaagaattttctgcaataaaagaaactagacttgttaatccctgccttgcaatgtcagtaggataaagcagctataaaaattagtacttgcccaaggcctgaaagagaattagtgggaattaagatcaacttctcagttttgtttgtttactttttaattggcttttctttgttgttaagaatgagagacttaatttccatgggagttggagtgtgtgtgctgcaggcaggatcctgtggctcatttggcatggagacctggacatgtagtcagcaggagacggttccctaaataaaagatttgggcactggtg

SEQ ID NO: 737226 - DNA, 5438 bp, Homo sapiens
catgtaaatatgacctcagacaaaaaggaaccagaggcccaagggcaataataaggtggaatttgcaggtcagcccaggaattggcagagaatccacacaggagaaaaaccctatacctgtcatgagtgcggagacagcttctctcacagctccaatcggattcgccacctgagaacgcatacgggagagagaccctataaatgttctgaatgtggagaaagcttctctcggagttcccgtcttatgagtcatcagagaactcacatgtgaagtggaatctctgaaactcaggtgtggcatcaacaaagtcaagaaggtagtccaaactctctcttacagcagataatttaaattcagcagtctgcttctcagcttctcctcctttttgaacaacttcctttgttattccacctttggtttttaggagacaacccttttcttcatctccatttaaccacaccctatcatcatccaacttagtttccaactccccttccaaaaagacctgattttacctcactgccagaaaagagaatggtgctcaaattgctttgtacatagtgttcactgggcagcagttcatctacctggataagggctccgagctacagggaccctgacattgggatgtatggagagttggaattcaggaacagttgtaccgaatcttgaagtgaagaagaaagtagtttgttgtacatatgaatgaaatccaacttttattgcattcaatatagtattgtcaagcaccgtgctttaacttgaatgtctcttgtgtttgccaaggtaatatgtaagtatgtaaataatttatttgtcagtggcactttaccattctcagatcttctttcttgggaacatctgatttattctcaagtgctatttttcactgaaactgttctctatttgagatattatcaaagtttcagaatcacagcaattctcagagatgagcccaaaagttttacaaatatttcaccatagttaaaaatttttaaagatctgtcctttcatttgttttcctaaatttacactataagtaacatactttttatatttgagattttgatttctcttcagtgtttattttacttaatttgaaccaagactcaacttttccacagaagaaatctaaaaggtttctctgctgctgtttctgatcaattgtttctcataaatcctactggcaaactcttctgtccctctaggccctcaaatactcttttcgggtcctcctggtgctccccaaagccattccaggtccttagaaatgtcttagtctagattaatttcctggttctcagtccagatacacaacctcatgggaagaaacaaaaactgccacttttatccattccaggtgcttagatgaactgccatagaaagcagctcagtccaaaacgctcaaatggtgctccaggatttacttttttgtattgttttgttttgttttttgcgacggagtctcgctctgtcgcccaggctggaatgcagtggcgtgaactcggctcactgcaagctccgcctcccgggttcacgccattctcctgcctcagcctcccgagtagctgggactacaggcgcccaccaccacgcccggctaatttttttttgtattttttagtagagacggggtttcaccatgttagccaggatggtctcgatctcctgacctcatgatccgcccgcctcggcctcccaaagtgctgggattacaggcgtaagccaccgcgcccggccaggatttactttcttaaatgcactcttttcattcccattcaaaggactccagtataagtgccacataaactcgttttctaacttttaaaactcttcctctaaatgcagcccaactcagtaaaaacgtacctaagatctcacagtctaatgtttccagcttttaaagcctttactcctacccttccctctgcctggaaagtgtctccattccctgctgtggacaaaatccctcaaggtcttttataatttcccccaaccccaaatcaacttggattttcttggagttctcacagcattcagtttatgtcctattcttacccttgtgttactgatattcacgaaattgctcagtcctttcaagagattgcttaaggacaaagacttcttactcaactctgcaatattggctacacatagctgacttaataaatagtcccttgactggtataagctgacgttacaaaaactggtaattccgaaaccactcatactggacttattaaataatccctcaactggtacagactgacattacaaaaacggattaattcagagatcactgaacacccaaaacactcagattcttataactatgattcagtaaatatgtgtggaatgcctatcttaccaggtgactatgttaggcgctgcatgagatataagatgaaaacaaggttcccattttccagggaagaatactggagtggaaaacgcagaggataccacaacaggagagctatttccgattagcggccgccactgctgagctatgtgaccctgagcaagtcacttcttaggtctccgtttctctgtcaaggagagatagaaaaagaacctatttcacaggttcaaacctacctcaagaaaaaatagttgtggggaatgcgtcacgagacctagaaaacggtacaaaaccctcggggggccgctgtttctgacctagcgagtggcccgacccggacaaaatgcctcttcctcgaggaggcggcgacgagcccagcaacagctcgagcacggccggccgggccgcgggaagcccgagaacgcggcgcgcgcagctgggaggcgacccttacccggcgaggctcccgggaccaaacgccgcccgacagccacgcagaacagacgtggcagtgcgacgcctcccccactggggacacgagacagcgacagccacgcggtgagccggtacaaggccctctaggcttcagcgggtctggatactcggtggcattaacccttccctaccgccggggaagacagcagtttctctggcgaggaagtaggccgggctcaggcgccttagccagagggcgggcctgcgccaccctcggaaagcgtcacttccacttccggccggcgctctggctctgtacctggacagggctgcggtaggccagcggtgggctggcggttgcgctcctcagatcggcggcctttcgggcggtggcttgcgtttgagcctcagaaagcgaggagcggcctccacggaagccaagctggccgaggttgcagtccatgagctgggaaaggaggcagtgctcttgggagaaacagcagaggcctcaagtttcgggctgaagccaacagagtcccaaccagtgggcgtatcccaagatgaagaattttggaatacatacgagggtctgcaagaacagctcagcaggaatactcataaagagactgagcctgtgtatgagagggctgtgcctactcaacagattctagcttttcctgagcaaacaaacaccaaagactggacagtgacacctgagcacgtcttgcctgagtcccagagcttgttgacatttgaagaagtggccatgtatttttcccaggaagaatgggagttattggatcccactcagaaggccctctacaatgatgtaatgcaggaaaactatgagactgtcatctctctagcattgtttgtgctccccaaacctaaagtgatctcctgtctagagcaaggggaagagccatgggttcaagtatccccggagtttaaggatagtgccggaaaatctcctacagggttaaagctcaaaaacgacactgaaaatcatcagcctgtgtctctttctgacttagaaatacaagcatcagcaggcgtcatatcaaaaaaggccaaagtaaaagttccccagaaaacagcaggcaaagaaaatcattttgatatgcacagagtgggaaaatggcaccaagattttccagtgaagaaaagaaagaaactttcaacctggaaacaagagctgctcaaacttatggatcgtcacaagaaagattgtgcaagagagaagccttttaaatgtcaggaatgtgggaaaaccttcagagttagctctgaccttattaagcaccaaagaattcacactgaagagaaaccctataaatgtcaacagtgtgataagaggtttagatggagttcagatcttaataagcacttaacaacacaccaaggaataaaaccatataaatgttcatggtgtgggaaaagcttcagtcaaaatacaaatttacatacacaccaaagaactcatacaggagaaaagcccttcacatgtcatgaatgtggaaaaaaattcagtcagaactcccaccttattaaacaccggagaacccacacaggtgagcagccatatacttgtagcatatgcaggagaaacttcagcaggcggtcaagccttcttagacaccagaaactccacctgtgaagagaagcttgtccagtgtcctcattctgaagacattcaccaaatggagcttggcactaaaatttatgtaaaagaaaaatcacaaaccttgaaaaattttacatcagaaaatgggataaacatacatttcacagaaaataatcaagacttgctctgcagccactcagtagtcttctgtggtcacagaagtaaacattgttggctttgtattgatctctccagtcatttttgaacacatccaatagaaacattggcagcatggtcttccaaaacaaaaagcagtaacatgcatgtttaattgcataccattctcttcacagtagcaggcttaccaatttccatagtctcatgaggccgaaatgaattacaatgtaaagtgttccaggaaccaaattggattttctttcttttgtcattggacacggtttgcaaagttggacatcacttgagttccttcttaaacttttcggcaacttctcttggatcctgttatcacagttttttactgtgatgaaatcttgttaaccaccactagggaatctccagatgaactattaatgcactgtcttatgcctctcattggtgatgtttggaaaatagaagacatctctaatggaatcatgggggaaacgggttggaatttgtagccatggaatatatattagatgtaaagaattttctgcaataaaagaaactagacttgttaatccctgccttgcaatgtcagtaggataaagcagctataaaaattagtacttgcccaaggcctgaaagagaattagtgggaattaagatcaacttctcagttttgtttgtttactttttaattggcttttctttgttgttaagaatgagagacttaatttccatgggagttggagtgtgtgtgctgcaggcaggatcctgtggctcatttggcatggagacctggacatgtagtcagcaggagacggttccctaaataaaagatttgggcactggtg

SEQ ID NO: 737227 - DNA, 5489 bp, Homo sapiens
catgtaaatatgacctcagacaaaaaggaaccagaggcccaagggcaataataaggtggaatttgcaggtcagcccaggaattggcagagaatccacacaggagaaaaaccctatacctgtcatgagtgcggagacagcttctctcacagctccaatcggattcgccacctgagaacgcatacgggagagagaccctataaatgttctgaatgtggagaaagcttctctcggagttcccgtcttatgagtcatcagagaactcacatgtgaagtggaatctctgaaactcaggtgtggcatcaacaaagtcaagaagatacaacagcctcagtcaggaatgacaggaatacctgcatactttccctaactcaataccggaaaacggacaatatgaagagaggagggatggagcaagatgtgcccacaagacaggtgtgataagtttccataaaaactgatgcttcagaagaagggagcgtgaaagactcaaaggcaatgacagagtaatcttgtgtgtagcagagatgcaatgtggcttctccccttccaaaaagacctgattttacctcactgccagaaaagagaatggtgctcaaattgctttgtacatagtgttcactgggcagcagttcatctacctggataagggctccgagctacagggaccctgacattgggatgtatggagagttggaattcaggaacagttgtaccgaatcttgaagtgaagaagaaagtagtttgttgtacatatgaatgaaatccaacttttattgcattcaatatagtattgtcaagcaccgtgctttaacttgaatgtctcttgtgtttgccaaggtaatatgtaagtatgtaaataatttatttgtcagtggcactttaccattctcagatcttctttcttgggaacatctgatttattctcaagtgctatttttcactgaaactgttctctatttgagatattatcaaagtttcagaatcacagcaattctcagagatgagcccaaaagttttacaaatatttcaccatagttaaaaatttttaaagatctgtcctttcatttgttttcctaaatttacactataagtaacatactttttatatttgagattttgatttctcttcagtgtttattttacttaatttgaaccaagactcaacttttccacagaagaaatctaaaaggtttctctgctgctgtttctgatcaattgtttctcataaatcctactggcaaactcttctgtccctctaggccctcaaatactcttttcgggtcctcctggtgctccccaaagccattccaggtccttagaaatgtcttagtctagattaatttcctggttctcagtccagatacacaacctcatgggaagaaacaaaaactgccacttttatccattccaggtgcttagatgaactgccatagaaagcagctcagtccaaaacgctcaaatggtgctccaggatttacttttttgtattgttttgttttgttttttgcgacggagtctcgctctgtcgcccaggctggaatgcagtggcgtgaactcggctcactgcaagctccgcctcccgggttcacgccattctcctgcctcagcctcccgagtagctgggactacaggcgcccaccaccacgcccggctaatttttttttgtattttttagtagagacggggtttcaccatgttagccaggatggtctcgatctcctgacctcatgatccgcccgcctcggcctcccaaagtgctgggattacaggcgtaagccaccgcgcccggccaggatttactttcttaaatgcactcttttcattcccattcaaaggactccagtataagtgccacataaactcgttttctaacttttaaaactcttcctctaaatgcagcccaactcagtaaaaacgtacctaagatctcacagtctaatgtttccagcttttaaagcctttactcctacccttccctctgcctggaaagtgtctccattccctgctgtggacaaaatccctcaaggtcttttataatttcccccaaccccaaatcaacttggattttcttggagttctcacagcattcagtttatgtcctattcttacccttgtgttactgatattcacgaaattgctcagtcctttcaagagattgcttaaggacaaagacttcttactcaactctgcaatattggctacacatagctgacttaataaatagtcccttgactggtataagctgacgttacaaaaactggtaattccgaaaccactcatactggacttattaaataatccctcaactggtacagactgacattacaaaaacggattaattcagagatcactgaacacccaaaacactcagattcttataactatgattcagtaaatatgtgtggaatgcctatcttaccaggtgactatgttaggcgctgcatgagatataagatgaaaacaaggttcccattttccagggaagaatactggagtggaaaacgcagaggataccacaacaggagagctatttccgattagcggccgccactgctgagctatgtgaccctgagcaagtcacttcttaggtctccgtttctctgtcaaggagagatagaaaaagaacctatttcacaggttcaaacctacctcaagaaaaaatagttgtggggaatgcgtcacgagacctagaaaacggtacaaaaccctcggggggccgctgtttctgacctagcgagtggcccgacccggacaaaatgcctcttcctcgaggaggcggcgacgagcccagcaacagctcgagcacggccggccgggccgcgggaagcccgagaacgcggcgcgcgcagctgggaggcgacccttacccggcgaggctcccgggaccaaacgccgcccgacagccacgcagaacagacgtggcagtgcgacgcctcccccactggggacacgagacagcgacagccacgcggtgagccggtacaaggccctctaggcttcagcgggtctggatactcggtggcattaacccttccctaccgccggggaagacagcagtttctctggcgaggaagtaggccgggctcaggcgccttagccagagggcgggcctgcgccaccctcggaaagcgtcacttccacttccggccggcgctctggctctgtacctggacagggctgcggtaggccagcggtgggctggcggttgcgctcctcagatcggcggcctttcgggcggtggcttgcgtttgagcctcagaaagcgaggagcggcctccacggaagccaagctggccgaggttgcagtccatgagctgggaaaggaggcagtgctcttgggagaaacagcagaggcctcaagtttcgggctgaagccaacagagtcccaaccagtgggcgtatcccaagatgaagaattttggaatacatacgagggtctgcaagaacagctcagcaggaatactcataaagagactgagcctgtgtatgagagggctgtgcctactcaacagattctagcttttcctgagcaaacaaacaccaaagactggacagtgacacctgagcacgtcttgcctgagtcccagagcttgttgacatttgaagaagtggccatgtatttttcccaggaagaatgggagttattggatcccactcagaaggccctctacaatgatgtaatgcaggaaaactatgagactgtcatctctctagcattgtttgtgctccccaaacctaaagtgatctcctgtctagagcaaggggaagagccatgggttcaagtatccccggagtttaaggatagtgccggaaaatctcctacagggttaaagctcaaaaacgacactgaaaatcatcagcctgtgtctctttctgacttagaaatacaagcatcagcaggcgtcatatcaaaaaaggccaaagtaaaagttccccagaaaacagcaggcaaagaaaatcattttgatatgcacagagtgggaaaatggcaccaagattttccagtgaagaaaagaaagaaactttcaacctggaaacaagagctgctcaaacttatggatcgtcacaagaaagattgtgcaagagagaagccttttaaatgtcaggaatgtgggaaaaccttcagagttagctctgaccttattaagcaccaaagaattcacactgaagagaaaccctataaatgtcaacagtgtgataagaggtttagatggagttcagatcttaataagcacttaacaacacaccaaggaataaaaccatataaatgttcatggtgtgggaaaagcttcagtcaaaatacaaatttacatacacaccaaagaactcatacaggagaaaagcccttcacatgtcatgaatgtggaaaaaaattcagtcagaactcccaccttattaaacaccggagaacccacacaggtgagcagccatatacttgtagcatatgcaggagaaacttcagcaggcggtcaagccttcttagacaccagaaactccacctgtgaagagaagcttgtccagtgtcctcattctgaagacattcaccaaatggagcttggcactaaaatttatgtaaaagaaaaatcacaaaccttgaaaaattttacatcagaaaatgggataaacatacatttcacagaaaataatcaagacttgctctgcagccactcagtagtcttctgtggtcacagaagtaaacattgttggctttgtattgatctctccagtcatttttgaacacatccaatagaaacattggcagcatggtcttccaaaacaaaaagcagtaacatgcatgtttaattgcataccattctcttcacagtagcaggcttaccaatttccatagtctcatgaggccgaaatgaattacaatgtaaagtgttccaggaaccaaattggattttctttcttttgtcattggacacggtttgcaaagttggacatcacttgagttccttcttaaacttttcggcaacttctcttggatcctgttatcacagttttttactgtgatgaaatcttgttaaccaccactagggaatctccagatgaactattaatgcactgtcttatgcctctcattggtgatgtttggaaaatagaagacatctctaatggaatcatgggggaaacgggttggaatttgtagccatggaatatatattagatgtaaagaattttctgcaataaaagaaactagacttgttaatccctgccttgcaatgtcagtaggataaagcagctataaaaattagtacttgcccaaggcctgaaagagaattagtgggaattaagatcaacttctcagttttgtttgtttactttttaattggcttttctttgttgttaagaatgagagacttaatttccatgggagttggagtgtgtgtgctgcaggcaggatcctgtggctcatttggcatggagacctggacatgtagtcagcaggagacggttccctaaataaaagatttgggcactggtg

SEQ ID NO: 737228 - DNA, 7283 bp, Homo sapiens
tttaaataaatttaaagaaacacaaatgtattattttcaaactgtaaattttataaccattatataaatgggcactgatatacaaaataatgtcagttgctaaaacaagacaattcacagctggcctacatcatataatggcagaaatctttaaacacaaaatctaatgattagaaccagaagttgaaggcccactgaaggagtccttaatattatgaggcctaggtttcaaaaagctaccaattctagaatggattttactctggaactgtttcttgactatttcttgttgcatctctttcagtgtgaagtggaatctctgaaactcaggtgtggcatcaacaaagtcaagaaggtagtccaaactctctcttacagcagataatttaaattcagcagtctgcttctcagcttctcctcctttttgaacaacttcctttgttattccacctttggtttttaggagacaacccttttcttcatctccatttaaccacaccctatcatcatccaacttagtttccaactccccacatttttcaagaatttctctataatccccatgttctaagccttgaaaatcatattcaggttcctttttgtaaagaagattttcccatgcatttgctatggttatttgttttacttcttcccaactttttgcccagttaaaaattgcactttttatattgtagattttaattttggaaactcctttatctcctttctcttgctcatcatcactttcttcaaatattacaagactctcttcaagttgcttccatctatacagccgtttgcagctcaagatcacaccttgattcattggttgaatcaaggttgaagtgttatgggggaagaacatacattttattcgaccatcctcactggttagggattcagaggaaggatgagccgggcaactgtccagaagtaacaatgccctgacgtcctcgtcatgaaatcttagaacattaagttgaaaatgtcggacctcaggaacaaagttttgaaaaaaccattctgaaaacaattctctggtgaaccaaacatctttactgggtttatatatcacaggcaatgtacttgtgtcctctttcacacttttgggcagttttgattttccaataatgattgactttaatttatgagttccgtctgcatttgcacataaaaaggcagacaacctttctttgtttattttcttccctggtaggcagatatctttcctacttgcctgagaattttctggcattgacttccaaaagaggtctgtttcatccccactgtatagctgagctagacacagtttctcctctttgattatcatggacagtttttgtcgaaatggctcaacattttcagaaactgaacttaggacttgttccccacatccttttcggttcccaattgcatgccgatttcgaaatctaaaaagccaaccagtgctagctttgaaatctgttcgcccaaaacaccgtgcaaatctctctgcagcagcctgaagctccacgcctcttaccggaacaccggctgagcgtttctgttggtaccacatgtagaccgcatcatctacatcaccatatttggctcccgttgtcctctttctcttctcagcccctactaatggcatgtcctgcttcagtacaaagtccagaattaacttcttattttttttaatgtcataaaatgttgacttactgattccaaattcatccattacacttttaagtgatcgtccagcttcaattctacttagaaccttcattttctcctccaaattcagtgttgtatatttccctctcttattcatactgaatttaactctgaaccaccaacaggagaaaacaaagggaaaagccttaatgaattggcaaaaaaaaaacccacattttttaaacaaaacttagctgaaagccccagaaggcatgggcattgtattggaggataatggactgaaggggctaaccatgactgaagagctagtctagaggtggaggtcttatgcactcagaaagctgccagttgcaaagtcctgtctggctcttgctcctgcaagccatgagtgatcatttttcagaatgccccctacctctcctctcttttgacagatacaacagcctcagtcaggaatgacaggaatacctgcatactttccctaactcaataccggaaaacggacaatatgaagagaggagggatggagcaagatgtgcccacaagacaggtgtgataagtttccataaaaactgatgcttcagaagaagggagcgtgaaagactcaaaggcaatgacagagtaatcttgtgtgtagcagagatgcaatgtggcttctccccttccaaaaagacctgattttacctcactgccagaaaagagaatggtgctcaaattgctttgtacatagtgttcactgggcagcagttcatctacctggataagggctccgagctacagggaccctgacattgggatgtatggagagttggaattcaggaacagttgtaccgaatcttgaagtgaagaagaaagtagtttgttgtacatatgaatgaaatccaacttttattgcattcaatatagtattgtcaagcaccgtgctttaacttgaatgtctcttgtgtttgccaaggtaatatgtaagtatgtaaataatttatttgtcagtggcactttaccattctcagatcttctttcttgggaacatctgatttattctcaagtgctatttttcactgaaactgttctctatttgagatattatcaaagtttcagaatcacagcaattctcagagatgagcccaaaagttttacaaatatttcaccatagttaaaaatttttaaagatctgtcctttcatttgttttcctaaatttacactataagtaacatactttttatatttgagattttgatttctcttcagtgtttattttacttaatttgaaccaagactcaacttttccacagaagaaatctaaaaggtttctctgctgctgtttctgatcaattgtttctcataaatcctactggcaaactcttctgtccctctaggccctcaaatactcttttcgggtcctcctggtgctccccaaagccattccaggtccttagaaatgtcttagtctagattaatttcctggttctcagtccagatacacaacctcatgggaagaaacaaaaactgccacttttatccattccaggtgcttagatgaactgccatagaaagcagctcagtccaaaacgctcaaatggtgctccaggatttacttttttgtattgttttgttttgttttttgcgacggagtctcgctctgtcgcccaggctggaatgcagtggcgtgaactcggctcactgcaagctccgcctcccgggttcacgccattctcctgcctcagcctcccgagtagctgggactacaggcgcccaccaccacgcccggctaatttttttttgtattttttagtagagacggggtttcaccatgttagccaggatggtctcgatctcctgacctcatgatccgcccgcctcggcctcccaaagtgctgggattacaggcgtaagccaccgcgcccggccaggatttactttcttaaatgcactcttttcattcccattcaaaggactccagtataagtgccacataaactcgttttctaacttttaaaactcttcctctaaatgcagcccaactcagtaaaaacgtacctaagatctcacagtctaatgtttccagcttttaaagcctttactcctacccttccctctgcctggaaagtgtctccattccctgctgtggacaaaatccctcaaggtcttttataatttcccccaaccccaaatcaacttggattttcttggagttctcacagcattcagtttatgtcctattcttacccttgtgttactgatattcacgaaattgctcagtcctttcaagagattgcttaaggacaaagacttcttactcaactctgcaatattggctacacatagctgacttaataaatagtcccttgactggtataagctgacgttacaaaaactggtaattccgaaaccactcatactggacttattaaataatccctcaactggtacagactgacattacaaaaacggattaattcagagatcactgaacacccaaaacactcagattcttataactatgattcagtaaatatgtgtggaatgcctatcttaccaggtgactatgttaggcgctgcatgagatataagatgaaaacaaggttcccattttccagggaagaatactggagtggaaaacgcagaggataccacaacaggagagctatttccgattagcggccgccactgctgagctatgtgaccctgagcaagtcacttcttaggtctccgtttctctgtcaaggagagatagaaaaagaacctatttcacaggttcaaacctacctcaagaaaaaatagttgtggggaatgcgtcacgagacctagaaaacggtacaaaaccctcggggggccgctgtttctgacctagcgagtggcccgacccggacaaaatgcctcttcctcgaggaggcggcgacgagcccagcaacagctcgagcacggccggccgggccgcgggaagcccgagaacgcggcgcgcgcagctgggaggcgacccttacccggcgaggctcccgggaccaaacgccgcccgacagccacgcagaacagacgtggcagtgcgacgcctcccccactggggacacgagacagcgacagccacgcggtgagccggtacaaggccctctaggcttcagcgggtctggatactcggtggcattaacccttccctaccgccggggaagacagcagtttctctggcgaggaagtaggccgggctcaggcgccttagccagagggcgggcctgcgccaccctcggaaagcgtcacttccacttccggccggcgctctggctctgtacctggacagggctgcggtaggccagcggtgggctggcggttgcgctcctcagatcggcggcctttcgggcggtggcttgcgtttgagcctcagaaagcgaggagcggcctccacggaagccaagctggccgaggttgcagtccatgagctgggaaaggaggcagtgctcttgggagaaacagcagaggcctcaagtttcgggctgaagccaacagagtcccaaccagtgggcgtatcccaagatgaagaattttggaatacatacgagggtctgcaagaacagctcagcaggaatactcataaagagactgagcctgtgtatgagagggctgtgcctactcaacagattctagcttttcctgagcaaacaaacaccaaagactggacagtgacacctgagcacgtcttgcctgagtcccagagcttgttgacatttgaagaagtggccatgtatttttcccaggaagaatgggagttattggatcccactcagaaggccctctacaatgatgtaatgcaggaaaactatgagactgtcatctctctagcattgtttgtgctccccaaacctaaagtgatctcctgtctagagcaaggggaagagccatgggttcaagtatccccggagtttaaggatagtgccggaaaatctcctacagggttaaagctcaaaaacgacactgaaaatcatcagcctgtgtctctttctgacttagaaatacaagcatcagcaggcgtcatatcaaaaaaggccaaagtaaaagttccccagaaaacagcaggcaaagaaaatcattttgatatgcacagagtgggaaaatggcaccaagattttccagtgaagaaaagaaagaaactttcaacctggaaacaagagctgctcaaacttatggatcgtcacaagaaagattgtgcaagagagaagccttttaaatgtcaggaatgtgggaaaaccttcagagttagctctgaccttattaagcaccaaagaattcacactgaagagaaaccctataaatgtcaacagtgtgataagaggtttagatggagttcagatcttaataagcacttaacaacacaccaaggaataaaaccatataaatgttcatggtgtgggaaaagcttcagtcaaaatacaaatttacatacacaccaaagaactcatacaggagaaaagcccttcacatgtcatgaatgtggaaaaaaattcagtcagaactcccaccttattaaacaccggagaacccacacaggtgagcagccatatacttgtagcatatgcaggagaaacttcagcaggcggtcaagccttcttagacaccagaaactccacctgtgaagagaagcttgtccagtgtcctcattctgaagacattcaccaaatggagcttggcactaaaatttatgtaaaagaaaaatcacaaaccttgaaaaattttacatcagaaaatgggataaacatacatttcacagaaaataatcaagacttgctctgcagccactcagtagtcttctgtggtcacagaagtaaacattgttggctttgtattgatctctccagtcatttttgaacacatccaatagaaacattggcagcatggtcttccaaaacaaaaagcagtaacatgcatgtttaattgcataccattctcttcacagtagcaggcttaccaatttccatagtctcatgaggccgaaatgaattacaatgtaaagtgttccaggaaccaaattggattttctttcttttgtcattggacacggtttgcaaagttggacatcacttgagttccttcttaaacttttcggcaacttctcttggatcctgttatcacagttttttactgtgatgaaatcttgttaaccaccactagggaatctccagatgaactattaatgcactgtcttatgcctctcattggtgatgtttggaaaatagaagacatctctaatggaatcatgggggaaacgggttggaatttgtagccatggaatatatattagatgtaaagaattttctgcaataaaagaaactagacttgttaatccctgccttgcaatgtcagtaggataaagcagctataaaaattagtacttgcccaaggcctgaaagagaattagtgggaattaagatcaacttctcagttttgtttgtttactttttaattggcttttctttgttgttaagaatgagagacttaatttccatgggagttggagtgtgtgtgctgcaggcaggatcctgtggctcatttggcatggagacctggacatgtagtcagcaggagacggttccctaaataaaagatttgggcactggtg

SEQ ID NO: 737229 - DNA, 2571 bp, Homo sapiens
tttaaataaatttaaagaaacacaaatgtattattttcaaactgtaaattttataaccattatataaatgggcactgatatacaaaataatgtcagttgctaaaacaagacaattcacagctggcctacatcatataatggcagaaatctttaaacacaaaatctaatgattagaaccagaagttgaaggcccactgaaggagtccttaatattatgaggcctaggtttcaaaaagctaccaattctagaatggattttactctggaactgtttcttgactatttcttgttgcatctctttcagtgtgaagtggaatctctgaaactcaggtgtggcatcaacaaagtcaagaaggtagtccaaactctctcttacagcagataatttaaattcagcagtctgcttctcagcttctcctcctttttgaacaacttcctttgttattccacctttggtttttaggagacaacccttttcttcatctccatttaaccacaccctatcatcatccaacttagtttccaactccccacatttttcaagaatttctctataatccccatgttctaagccttgaaaatcatattcaggttcctttttgtaaagaagattttcccatgcatttgctatggttatttgttttacttcttcccaactttttgcccagttaaaaattgcactttttatattgtagattttaattttggaaactcctttatctcctttctcttgctcatcatcactttcttcaaatattacaagactctcttcaagttgcttccatctatacagccgtttgcagctcaagatcacaccttgattcattggttgaatcaaggttgaagtgttatgggggaagaacatacattttattcgaccatcctcactggttagggattcagaggaaggatgagccgggcaactgtccagaagtaacaatgccctgacgtcctcgtcatgaaatcttagaacattaagttgaaaatgtcggacctcaggaacaaagttttgaaaaaaccattctgaaaacaattctctggtgaaccaaacatctttactgggtttatatatcacaggcaatgtacttgtgtcctctttcacacttttgggcagttttgattttccaataatgattgactttaatttatgagttccgtctgcatttgcacataaaaaggcagacaacctttctttgtttattttcttccctggtaggcagatatctttcctacttgcctgagaattttctggcattgacttccaaaagaggtctgtttcatccccactgtatagctgagctagacacagtttctcctctttgattatcatggacagtttttgtcgaaatggctcaacattttcagaaactgaacttaggacttgttccccacatccttttcggttcccaattgcatgccgatttcgaaatctaaaaagccaaccagtgctagctttgaaatctgttcgcccaaaacaccgtgcaaatctctctgcagcagcctgaagctccacgcctcttaccggaacaccggctgagcgtttctgttggtaccacatgtagaccgcatcatctacatcaccatatttggctcccgttgtcctctttctcttctcagcccctactaatggcatgtcctgcttcagtacaaagtccagaattaacttcttattttttttaatgtcataaaatgttgacttactgattccaaattcatccattacacttttaagtgatcgtccagcttcaattctacttagaaccttcattttctcctccaaattcagtgttgtatatttccctctcttattcatactgaatttaactctggacagggctgcggtaggccagcggtgggctggcggttgcgctcctcagatcggcggcctttcgggcggtggcttgcgtttgagcctcagaaagcgaggagcggcctccacggaagccaagctggccgaggtaaccgagaagcggcttcccctatggcttcgaccctggagccgctggagcggcggcggccgcagggaggcagccattttccgtaggcggtggccgcggcgcttccgggccgcgcggctggagcctgaggcggggccaccgtcgggcacgagaaaccattctctccccgcttttcgcagctgtatcccagaggcgcggctgaagctcgctgggacactgcccgcttgcccagtgcccacgggcacgcctgtcgcagacacaggctgtggcgaatccgagtgctggcgggcagcagtgcctgcagctgcgcccgcagactctttcccgcctccgccggcatttccgtgtccggccgatgtcatgcggtcggttgagcctcagggctagcagcttctactgatgcaaaaacataggaagtgtctctttgcttctggaaccggggtgggcagcaaggagctggccacttctttgaataccggtggcatcctgggcagaatttcggtgccgtttctgctggctcacttcaggaaaagtgaggctcacggctctcctcagccccccttagaagtctaaatgacctttggagaaatacaaagtcagcagaaagtttcac

SEQ ID NO: 737230 - DNA, 2864 bp, Homo sapiens
  misc_feature (820)..(820): n is a, c, g, or t
ccccgcccccccgcgcccgcggccccaagcggttcccgagcccaggcccgcgccgagcccaggtcctagagcagctccagcaggatggcggctccagcgtctctaaggcctgcagggggtccagccccatggggggcgccctaggcctccgacagctccccatctgtgctcctgcctgccggccatcctcaggccactcgccatgggcggctgcttctccaaacccaaaccagtggagctcaagatcgaggtggtgctgcctgagaaggagcgaggcaaggaggagctgtcggccagtgggaagggcagcccccgggcctaccagggcaatggcacggcccgccacttccacacggaggagcgcctgtccacccctcacccctaccccagccctcaggattgcgtggaggctgctgtctgccacgtcaaggacctcgagaatggccagatgcgggaagtggagctgggctgggggaaggtgttgctggtgaaggacaatggggagttccacgccctgggccataagtgtccgcactacggcgcacccctggtgaaaggcgttctgtcccgtggtcgggtgcgctgcccctggcacggcgcctgcttcaacatcagcactggggacctggaggacttccctggcctggacagtctacacaagttccaggtgaagattgagaaggagaaggtgtacgtccgggccagcaagcaggccctacagctgcagcgaaggaccaaggtgatggccaagtgtatctctccaagtgctgggtacagcagtagcaccaatgtgctcattgtgggtgcaggtgcagctggnctggtgtgtgcagagacactgcggcaggagggcttctccgaccggatcgtcctgtgcacgctagaccggcaccttccctacgaccgtcccaagctcagcaagtccctggacacacagcctgagcagctggccctgaggcccaaggagtttttccgagcctatggcatcgaggtgctcaccgaggctcaggtggtcacagtggacgtgagaactaagaaggtcgtgttcaaggatggcttcaagctggagtacagcaagctgctgctggcaccagggagcagccccaagactctgagctgcaaaggcaaagaagtggagaacgtgttcactatccggacgccagaggatgccaatcgcgtggtgaggctggcccgaggccgcaacgtggtcgtcgtgggagccggcttcctggggatggaggtggccgcttacctgacggagaaggcccactctgtgtctgtggtggagctggaggagacgcccttcaggaggttcctgggggagcgcgtgggtcgtgccctcatgaagatgtttgagaacaaccgggtgaagttctacatgcagacggaggtgtctgagctgcggggccaggagggaaagctgaaggaggttgtgctgaagagcagcaaggtcgtgcgggctgacgtctgcgtggtgggcattggtgcagtgcccgccacaggcttcctgaggcaaagcggcatcggtttggattcccgaggcttcatccctgtcaacaagatgatgcagaccaatgtcccaggcgtgtttgcagctggcgatgctgtcaccttcccccttgcctggaggaacaaccgcaaagtgaacattccacattggcagatggctcatgctcaggggcgcgtggcagcccagaacatgttggcgcaggaggcggagatgagcactgtgccctacctctggaccgccatgtttggcaagagcctgcgctacgcgggctacggagaaggcttcgacgacgtcatcatccagggggatctggaggagctgaagtttgtggctttttacactaaaggcgacgaggtgatcgccgtggccagcatgaactacgatcccattgtgtccaaggtcgctgaggtgctggcctcaggccgtgccatccggaagcgggaggtggagctgtttgtgctgcacagcaagactggcgacatgtcctggcttacggggaaaggatcctgagctcacatgcagtagacttgggcaggcaaagggggcaccaagggcacaggccaagccttgggggcaggtgccaatctccagtcccaggatcccccagggcagaacctgagccctcccagtgcttgccttcagccacctggctcccctcctgggaggcctctgctggatccagaagatgctcaaccctcaaggcctctgctgccactgacagctggcactggaggcaggacaagccctgcctcttctccctctattgggactggtcccctgaagaaccctgcaacatgttagacattaccgtaaaattaaaacgcacaaatttgcagaaaaaaaaaaaaaaaaaaaaaaaaaaaaaaaaaaaaaaaaaaaaaaaaaaaaaaagggggggcccctaaaattttccccgggggggccaaattcggacccgaagtttttttagtcataggggggcccccatattaggaggaggctgcttattatataaatacagccagtagtagcaccggggccggctggttaataacaactgttgtacgagggggaaacaacttggtaatacttgggagccacttttggggagaagagaaccccctataacttcgggggggggtggcaacaattaggggggggacaatatctacctctaagggaagaatattgaagcagcctccagaaggagaacaattataaaaattcttcaacgggtgtgtatttcagcggtgttcaaacaaaagggcgcatataatgatcgtgggcgggacttggaaaaaagtttgggcctcagcgggatttttaagtattgagaaagattttttatatcgagggattctattttaaaaatgag

SEQ ID NO: 737231 - DNA, 362 bp, Homo sapiens
tcttagcatggagatgagtgttactgggcagctggcctgggagcatcactgtgccaggcctgggctgagcccggtacataccttccccaacagctccgtaaagtgggggcggttgggggttcccatttgacagacggaggtgtctgagctgcggggccaggagggaaaggtgggcccttctcccttctccctgctgctttctgtcctctgtcccctgagcctgggagctgggtccacctgtttatccacccactccccacagctgaaggaggttgtgctgaagagcagcaaggtcgtgcgggctgacgtctgcgtggtgggcattggtgagttggtgtgtgggcaggcaggcacaaagcagc

SEQ ID NO: 737232 - DNA, 551 bp, Homo sapiens
cccaggcctggcacagtggatgctcccagtgcccgctgcccagtaacactcatctccatgccctacgagagttgacatagacgagactcgaactggctcctgctccagctgaggtgccaatttgggtaggggccaagatgggaggtggtagcacctgcaggggctgaggaggtatggcatgctgtccctccacttaagggcctcatggagcacttcttggagaaggtgatatctgaggtcttgcgggaggcaccgggtctgtgggagaccgggtagtggggaccagggtgcatgaaggcctcaggtagacagcccctggaggatcagtctggggctggcacatcaagcgcatggtgtagggtgtggagagtgactacgcagaagggagggacaggggagtggacacaggcttccgtcctgtcaggtgcagtgcccgccacaggcttcctgaggcaaagcggcatcggtttggattcccgaggcttcatccctgtcaacaaggtggggtggatggcactgggtggggaggacccggtgctgggctgggagtg

SEQ ID NO: 737233 - DNA, 1237 bp, Homo sapiens
gcaaaatcccagaacaagagcccagccctgagccccgctgaggagtgctggagcttccttaggaaagcccgaagcttgtgcacggtcaagccgcgatgtgcaaagcagggagggctgggtgctcaggccattcttgttgccctggggtaggtccttccctgggccccagatggacagcagtgcatcagggttttcaaaaaggggctgctgcctcgcagtcctcaggcttggccatcctctccttgcagaggcgacgaggtgatcgccgtggccagcatgaactacgatcccattgtgtccaaggtcgctgaggtgctggcctcaggccgtgccatccggaagcgggaggtggagactggcgacatgtcctggcttacggggaaaggatcctgagctcacatgcagtagacttgggcaggcaaagggggcaccaagggcacaggccaagccttgggggcaggtgccaatctccagtcccaggatcccccagggcagaacctgagccctcccagtgcttgccttcagccacctggctcccctcctgggaggcctctgctggatccagaagatgctcaaccctcaaggcctctgctgccactgacagctggcactggaggcaggacaagccctgcctcttctccctctattgggactggtcccctgaagaaccctgcaacatgttagacattaccgtaaaattaaaacgcacaaatttgcagaaaaaaaaaaaaaaaaaaaaaaaaaaaaaaaaaaaaaaaaaaaaaaaaaaaaaaagggggggcccctaaaattttccccgggggggccaaattcggacccgaagtttttttagtcataggggggcccccatattaggaggaggctgcttattatataaatacagccagtagtagcaccggggccggctggttaataacaactgttgtacgagggggaaacaacttggtaatacttgggagccacttttggggagaagagaaccccctataacttcgggggggggtggcaacaattaggggggggacaatatctacctctaagggaagaatattgaagcagcctccagaaggagaacaattataaaaattcttcaacgggtgtgtatttcagcggtgttcaaacaaaagggcgcatataatgatcgtgggcgggacttggaaaaaagtttgggcctcagcgggatttttaagtattgagaaagattttttatatcgagggattctattttaaaaatgag

SEQ ID NO: 737234 - DNA, 989 bp, Homo sapiens
cacagaacagaccccctgctgtcctcaagggccagctgttcagggtgcccagagtggagagcctgttttcttctgtcttgaccactcctcccctcactcctgcaggactggcgacatgtcctggcttacggggaaaggatcctgagctcacatgcagtagacttgggcaggcaaagggggcaccaagggcacaggccaagccttgggggcaggtgccaatctccagtcccaggatcccccagggcagaacctgagccctcccagtgcttgccttcagccacctggctcccctcctgggaggcctctgctggatccagaagatgctcaaccctcaaggcctctgctgccactgacagctggcactggaggcaggacaagccctgcctcttctccctctattgggactggtcccctgaagaaccctgcaacatgttagacattaccgtaaaattaaaacgcacaaatttgcagaaaaaaaaaaaaaaaaaaaaaaaaaaaaaaaaaaaaaaaaaaaaaaaaaaaaaaagggggggcccctaaaattttccccgggggggccaaattcggacccgaagtttttttagtcataggggggcccccatattaggaggaggctgcttattatataaatacagccagtagtagcaccggggccggctggttaataacaactgttgtacgagggggaaacaacttggtaatacttgggagccacttttggggagaagagaaccccctataacttcgggggggggtggcaacaattaggggggggacaatatctacctctaagggaagaatattgaagcagcctccagaaggagaacaattataaaaattcttcaacgggtgtgtatttcagcggtgttcaaacaaaagggcgcatataatgatcgtgggcgggacttggaaaaaagtttgggcctcagcgggatttttaagtattgagaaagattttttatatcgagggattctattttaaaaatgag

SEQ ID NO: 737235 - DNA, 2843 bp, Homo sapiens
  misc_feature (820)..(820): n is a, c, g, or t
ccccgcccccccgcgcccgcggccccaagcggttcccgagcccaggcccgcgccgagcccaggtcctagagcagctccagcaggatggcggctccagcgtctctaaggcctgcagggggtccagccccatggggggcgccctaggcctccgacagctccccatctgtgctcctgcctgccggccatcctcaggccactcgccatgggcggctgcttctccaaacccaaaccagtggagctcaagatcgaggtggtgctgcctgagaaggagcgaggcaaggaggagctgtcggccagtgggaagggcagcccccgggcctaccagggcaatggcacggcccgccacttccacacggaggagcgcctgtccacccctcacccctaccccagccctcaggattgcgtggaggctgctgtctgccacgtcaaggacctcgagaatggccagatgcgggaagtggagctgggctgggggaaggtgttgctggtgaaggacaatggggagttccacgccctgggccataagtgtccgcactacggcgcacccctggtgaaaggcgttctgtcccgtggtcgggtgcgctgcccctggcacggcgcctgcttcaacatcagcactggggacctggaggacttccctggcctggacagtctacacaagttccaggtgaagattgagaaggagaaggtgtacgtccgggccagcaagcaggccctacagctgcagcgaaggaccaaggtgatggccaagtgtatctctccaagtgctgggtacagcagtagcaccaatgtgctcattgtgggtgcaggtgcagctggnctggtgtgtgcagagacactgcggcaggagggcttctccgaccggatcgtcctgtgcacgctagaccggcaccttccctacgaccgtcccaagctcagcaagtccctggacacacagcctgagcagctggccctgaggcccaaggagtttttccgagcctatggcatcgaggtgctcaccgaggctcaggtggtcacagtggacgtgagaactaagaaggtcgtgttcaaggatggcttcaagctggagtacagcaagctgctgctggcaccagggagcagccccaagactctgagctgcaaaggcaaagaagtggagaacgtgttcactatccggacgccagaggatgccaatcgcgtggtgaggctggcccgaggccgcaacgtggtcgtcgtgggagccggcttcctggggatggaggtggccgcttacctgacggagaaggcccactctgtgtctgtggtggagctggaggagacgcccttcaggaggttcctgggggagcgcgtgggtcgtgccctcatgaagatgtttgagaacaaccgggtgaagttctacatgcagacggaggtgtctgagctgcggggccaggagggaaagctgaaggaggttgtgctgaagagcagcaaggtcgtgcgggctgacgtctgcgtggtgggcattggtgcagtgcccgccacaggcttcctgaggcaaagcggcatcggtttggattcccgaggcttcatccctgtcaacaagatgatgcagaccaatgtcccaggcgtgtttgcagctggcgatgctgtcaccttcccccttgcctggaggaacaaccgcaaagtgaacattccacattggcagatggctcatgctcaggggcgcgtggcagcccagaacatgttggcgcaggaggcggagatgagcactgtgccctacctctggaccgccatgtttggcaagagcctgcgctacgcgggctacggagaaggcttcgacgacgtcatcatccagggggatctggaggagctgaagtttgtggctttttacactaaaggcgacgaggtgatcgccgtggccagcatgaactacgatcccattgtgtccaaggtcgctgaggtgctggcctcaggccgtgccatccggaagcgggaggtggagactggcgacatgtcctggcttacggggaaaggatcctgagctcacatgcagtagacttgggcaggcaaagggggcaccaagggcacaggccaagccttgggggcaggtgccaatctccagtcccaggatcccccagggcagaacctgagccctcccagtgcttgccttcagccacctggctcccctcctgggaggcctctgctggatccagaagatgctcaaccctcaaggcctctgctgccactgacagctggcactggaggcaggacaagccctgcctcttctccctctattgggactggtcccctgaagaaccctgcaacatgttagacattaccgtaaaattaaaacgcacaaatttgcagaaaaaaaaaaaaaaaaaaaaaaaaaaaaaaaaaaaaaaaaaaaaaaaaaaaaaaagggggggcccctaaaattttccccgggggggccaaattcggacccgaagtttttttagtcataggggggcccccatattaggaggaggctgcttattatataaatacagccagtagtagcaccggggccggctggttaataacaactgttgtacgagggggaaacaacttggtaatacttgggagccacttttggggagaagagaaccccctataacttcgggggggggtggcaacaattaggggggggacaatatctacctctaagggaagaatattgaagcagcctccagaaggagaacaattataaaaattcttcaacgggtgtgtatttcagcggtgttcaaacaaaagggcgcatataatgatcgtgggcgggacttggaaaaaagtttgggcctcagcgggatttttaagtattgagaaagattttttatatcgagggattctattttaaaaatgag

SEQ ID NO: 737236 - DNA, 2000 bp, Homo sapiens
agggagagagaaagagagagagaaagaaaggaagacagaggaaagaaaggaagacagagagaggaaggcagagagagagagggagaaagaaagacaggaaggcagagagagagagagagagagaaaggaagacagagagagagagagaggaagagagagagagagaggaagagagagagagagctcatgagccaggatccctggggaatttgaagtcagtgtgaccagggttctgtggctctggggtcagagctgggacacaggacccagcaggagggccaccaccccttccttttggaaacagctctggttccaagcagcaatcaggtaggaggatcggggctttggctgatgatgcacacacaagatgctgatggtgtacggtgagatattgtgaacgcaacaactggagctgtagttggcgtgtgtgagtgtgtacctgcggttctgtttagtggcgagacaaggtatgtttcagtactgctttcacggcaactgtgtaatgcatatgctctttctacactagcggtttgctcagttttgtctgtccggttaagttggagaaagaaccaagttgtgttgttctctggagggggtgctgctgcctctccttgagtagttctgtgacccccaatccagctgttttgtagagaatccttctagcttctggtatgcctgctctccagcagctggaaacagatcttcctgcctgaccaaagctccttgtttcttgcgtggcatgtttgttcttcccgatccggtggctgtcgtagccgagggcctgcctgccaccttcctttatcatttgccctgttggggttcagggtgcatccttagcccaggacctgctcttccagcatcatgggttttttcctaaagatctcaacggctcccttgggctccataaaatatttcttttttaaaaaagcagactcctttcatgcattgggatgaacggccctcttgtctgggtgctgggctacagcaaacaaatgtgtttgaatcccagtattccagagattcctggcggtgggctgtctagaagaggcgaggctggatctcacggtttttaaactgtatttttacccctttgggacccatacctgtgccctggagtctttcatgaggcacgtgggtcctctgcatcctcactctcccccctagcccaggtgcagccccgggaggggtgccctgaccccgccttaaacaaccaactttcccaccgaatcccatcggcgggcgggggggggggtttgggtgccaagtgccctggaaacctattgtcttttggctcagccaaaagaaacattccctccttcctttccttccgggcttgggggaaccttcgtaaaaatcatagttagggttaagtccaagcagtgaggcctgacctgggctctgctctccttgttgagacactaacaggcagttgggaggaaaatctgcatttgactccaccctctttggggcaaaggagaaacaggtgacccgagggggggcaggccagaggagggcgactcgtgcacagggacccccacccttggaccccgctgtccttttctagttgtttacttggtggtggcagccagtctgaccttgtctgtggtctgactgttcctaagtgtgtaactttcagtattatctgtgacagatggttctgtggtgaaaaaggtttattatattccttatggctgccttgtacaaaatccgttagaaacgctaatgtaagatatcagatttctaacaagacaaaaacagcattatggagttaaaagatttttacaactgggtcttgattttgatgtgagctggtttttagctctcaaatgttgtcacttaaataaaaaccttctttgcctttacaatgtgttttggtctgaactaagttgagaaacctttccctttctacatgttctccctggggtgggattgggggcagactggctcggagcagaggtggatgagggccagaccccaaaccacaaattacaaatctatag

SEQ ID NO: 737237 - DNA, 1901 bp, Homo sapiens
agggagagagaaagagagagagaaagaaaggaagacagaggaaagaaaggaagacagagagaggaaggcagagagagagagggagaaagaaagacaggaaggcagagagagagagagagagagaaaggaagacagagagagagagagaggaagagagagagagagaggaagagagagagagagctcatgagccaggatccctggggaatttgaagtcagtgtgaccagggttctgtggctctggggtcagagctgggacacaggacccagcaggagggccaccaccccttccttttggaaacagctctggttccaagcagcaatcaggtaggaggatcggggctttggctgatgatgcacacacaagatgctgatggtgtacggtgagatattgtgaacgcaacaactggagctgtagttggcgtgtgtgagtgtgtacctgcggttctgtttagtggcgagacaaggtatgtttcagtactgctttcacggcaactgtgtaatgcatatgctctttctacactagcggtttgctcagttttgtctgtccggttaagttggagaaagaaccaagttgtgttgttctctggagggggtgctgctgcctctccttgagtagttctgtgacccccaatccagctgttttgtagagaatccttctagcttctggtatgcctgctctccagcagctggaaacagatcttcctgcctgaccaaagctccttgtttcttgcgtggcatgtttgttcttcccgatccggtggctgtcgtagccgagggcctgcctgccaccttcctttatcatttgccctgttggggttcagggtgcatccttagcccaggacctgctcttccagcatcatgggttttttcctaaagatctcaacggctcccttgggctccataaaatatttcttttttaaaaaagcagactcctttcatgcattgggatgaacggccctcttgtctgggtgctgggctacagcaaacaaatgtgtttgaatcccagtattccagagattcctggcggtgggctgtctagaagaggcgaggctggatctcacggtttttaaactgtatttttacccctttgggacccatacctgtgccctggagtctttcatgaggcacgtgggtcctctgcatcctcactctcccccctagcccaggtgcagccccgggaggggtgccctgaccccgccttaaacaaccaactttcccaccgaatcccatcggcgggcgggggggggggtttgggtgccaagtgccctggaaacctattgtcttttggctcagccaaaagaaacattccctccttcctttccttccgggcttgggggaaccttcgtaaaaatcatagttagggttaagtccaagcagtgaggcctgacctgggctctgctctccttgttgagacactaacaggcagttgggaggaaaatctgcatttgactccaccctctttggggcaaaggagaaacaggtgacccgagggggggcaggccagaggagggcgactcgtgcacagggacccccacccttggaccccgctgtccttttctagttgtttacttggtggtggcagccagtctgaccttgtctgtggtctgactgttcctaagtgtgtaactttcagtattatctgtgacagatggttctgtggtgaaaaaggtttattatattccttatggctgccttgtacaaaatccgttagaaacgctaatgtaagatatcagatttctaacaagacaaaaacagcattatggagttaaaagatttttacaactgggtcttgattttgatgtgagctggtttttagctctcaaatgttgtcacttaaataaaaaccttctttgcctttaaaaaaaaaagtcgacgcggccgcgaatttagtagtagta

SEQ ID NO: 737238 - DNA, 1348 bp, Homo sapiens
  misc_feature (10)..(10): n is a, c, g, or t
  misc_feature (20)..(20): n is a, c, g, or t
tcagttgtcncccgggttanggatagtcgaccagccccgggggtgctgctgcctctccttgagtagttctgtgacccccaatccagctgttttgtagagaatccttctagcttctggtatgcctgctctccagcagctggaaacagatcttcctgcctgaccaaagctccttgtttcttgcgtggcatgtttgttcttcccgatccggtggctgtcgtagccgagggcctgcctgccaccttcctttatcatttgccctgttggggttcagggtgcatccttagcccaggacctgctcttccagcatcatgggttttttcctaaagatctcaacggctcccttgggctccataaaatatttcttttttaaaaaagcagactcctttcatgcattgggatgaacggccctcttgtctgggtgctgggctacagcaaacaaatgtgtttgaatcccagtattccagagattcctggcggtgggctgtctagaagaggcgaggctggatctcacggtttttaaactgtatttttacccctttgggacccatacctgtgccctggagtctttcatgaggcacgtgggtcctctgcatcctcactctcccccctagcccaggtgcagccccgggaggggtgccctgaccccgccttaaacaaccaactttcccaccgaatcccatcggcgggcgggggggggggtttgggtgccaagtgccctggaaacctattgtcttttggctcagccaaaagaaacattccctccttcctttccttccgggcttgggggaaccttcgtaaaaatcatagttagggttaagtccaagcagtgaggcctgacctgggctctgctctccttgttgagacactaacaggcagttgggaggaaaatctgcatttgactccaccctctttggggcaaaggagaaacaggtgacccgagggggggcaggccagaggagggcgactcgtgcacagggacccccacccttggaccccgctgtccttttctagttgtttacttggtggtggcagccagtctgaccttgtctgtggtctgactgttcctaagtgtgtaactttcagtattatctgtgacagatggttctgtggtgaaaaaggtttattatattccttatggctgccttgtacaaaatccgttagaaacgctaatgtaagatatcagatttctaacaagacaaaaacagcattatggagttaaaagatttttacaactgggtcttgattttgatgtgagctggtttttagctctcaaatgttgtcacttaaataaaaaccttctttgcctttaaaaaaaaaagtcgacgcggccgcgaatttagtagtagta

SEQ ID NO: 737239 - DNA, 610 bp, Homo sapiens
gtgaggacagggctgctttgctctatcctccctgcaacttcagtgctgggcacaggactggctcttaatggatactgaatgaaccctgttatggactgaatgttcgcattctcccccacccccaaatgtatttgctgaagccctaatctccaatgtgatggtatcaggaggtggagccctcgaggggtaattagatttaggtgaggttgcgagggtggggccctcatgagtgcttttataagtagagaaagaagtaccagcgcttcctccctcatgcgaggatacggcaagaatgcatgtccataaggaagaaggcatgcaccagacatcaaatctgctggcgccttgatcttggtcttccagcctctagacctgtgagaaatgaatatctgttgttgaagcctcccagcctatgatggatttgttacagctggccaagctgacttagacaaatgagtgtgcctgatccatcccattgaatgtgacagaaccccaggaggcagatggtattcttgtcttgctaagtagggctgagtcactcaccaggcagcccagccaggcaagaggcaggctgactttctagcccaagcctccttctctagaacccaag

SEQ ID NO: 737240 - DNA, 1693 bp, Homo sapiens
  misc_feature (36)..(36): n is a, c, g, or t
aaattcgcggccgcgtcgactaacggctgcgagaanacgacagagagtcgagaaattcattttttggacaacattgttttgaaggcactactggggctctgggatcaggcagccagattgaaacctggctcctccttttcctaagttatttaacctccctgtgcctcactttttgtcaaccagataagataagaaatgagagcaggtctgttacctcacaaggtggctgtgagtgttgaagacgtttgttgggggtttgggtgaagcatgcaaactctggttggtatgtggcagccactcagcctgtatttatgatgagggaggcattctaggcaccccttccaggatgttgggttgttggctgggttttactttaaaaagctcagggcctagaacattctagaatccaagtacttgctcacatatataattatttctttaggataatctttgatatagacttacgagtcaaagggtatgtaaaatgtcagcccttttacctgtattgccaaattgccttcaaaagtttctgctgttttgccctcctacccatagtgataaccttaaattggagtcaacacaaatttgagtgtgactgtgttagacagaagggatatattaacaggtaaaactggccatggcccctgcccttgtggagtatatgctctgttggttcatttcctctgcattctaattttctagacttgggatcttattgtggagttaaacaaagcacccttaaagtagcaagcgagcaaaataaaagcaaggaaaatcagttggaacataacttatgtattttttaggattaagagtaatttaactgagtcaattcaatatgtttttaaaggtgtgattcttaaattctttatgattgtttagatttctatatcttggtaacatgaatacacacttaatgaaagatttcagtaatttttgatttgggaattaatcatagtgggaaaaactgtttaggaaaacatgtcagtggaaattaactcgccacagtatgtagtgttagggaatagcttctgttcggcatttgatttgagtgctgtattctgacatttttcaggaacaaatacatgtgattcatcttctataaatatttgcagtttcttcaagttgaaatgagaaaagctcgtaaattgagcaccaggtctaataaatcattcacttacccaagaacagaaagacaggaaaagctagcatgttaatctaatgaaaaaatcgaatgttaaaaaaccaagaaagtagaagatatttgacattaactttataatcattgataataatcctaataatccataacattattccttaaaacctgaaagaatggattccctgctccccaatgtgtttttaatatcaacttaaactaaaataatttttttacctatttttggaagcttggaaattgagatgtagttgtctaatgttaacctaattaagagagcttggtgtgatttctcatatacagcatctaaatatttaagttttaatgtcttctaaaatattattacattcttcatactatagttttttaacatcctttagaaaacttgtatcagcttcactttcaaaccatgctggcatcgaactcaggtgtagtggtatcagaatgttatgaaataattttttattttcattataaactccatttttacaataaacacttctcaaccaaaaaaaa

SEQ ID NO: 737241 - DNA, 2068 bp, Homo sapiens
catctcctgacctcaagtgattcacctgcttctgtctcccaaagtgctgggaatacaggcatgagccaccactcctggacaggccacagaaattttaaagaaaagaatcatgccaccacaagtaaacttcattttgtttatattatttaggacttcacatttgtcttccgaaaccatgaagtataattctgctaacagcaagtgttgtgaatgaggaattaggaattaggagaatggtagtacattgggaaaaacatattttagtaatttttatattttaaagataatcacagattttgctgtttgtgcatcaccaaaatcagtgagatctgccagctggtgggggtgtgcctatgagaatttttgattatgatcccctaggagggttatcaaaaaaggagatgggtgaaagatcaggagagtcgagaaattcattttttggacaacattgttttgaaggcactactggggctctgggatcaggcagccagattgaaacctggctcctccttttcctaagttatttaacctccctgtgcctcactttttgtcaaccagataagataagaaatgagagcaggtctgttacctcacaaggtggctgtgagtgttgaagacgtttgttgggggtttgggtgaagcatgcaaactctggttggtatgtggcagccactcagcctgtatttatgatgagggaggcattctaggcaccccttccaggatgttgggttgttggctgggttttactttaaaaagctcagggcctagaacattctagaatccaagtacttgctcacatatataattatttctttaggataatctttgatatagacttacgagtcaaagggtatgtaaaatgtcagcccttttacctgtattgccaaattgccttcaaaagtttctgctgttttgccctcctacccatagtgataaccttaaattggagtcaacacaaatttgagtgtgactgtgttagacagaagggatatattaacaggtaaaactggccatggcccctgcccttgtggagtatatgctctgttggttcatttcctctgcattctaattttctagacttgggatcttattgtggagttaaacaaagcacccttaaagtagcaagcgagcaaaataaaagcaaggaaaatcagttggaacataacttatgtattttttaggattaagagtaatttaactgagtcaattcaatatgtttttaaaggtgtgattcttaaattctttatgattgtttagatttctatatcttggtaacatgaatacacacttaatgaaagatttcagtaatttttgatttgggaattaatcatagtgggaaaaactgtttaggaaaacatgtcagtggaaattaactcgccacagtatgtagtgttagggaatagcttctgttcggcatttgatttgagtgctgtattctgacatttttcaggaacaaatacatgtgattcatcttctataaatatttgcagtttcttcaagttgaaatgagaaaagctcgtaaattgagcaccaggtctaataaatcattcacttacccaagaacagaaagacaggaaaagctagcatgttaatctaatgaaaaaatcgaatgttaaaaaaccaagaaagtagaagatatttgacattaactttataatcattgataataatcctaataatccataacattattccttaaaacctgaaagaatggattccctgctccccaatgtgtttttaatatcaacttaaactaaaataatttttttacctatttttggaagcttggaaattgagatgtagttgtctaatgttaacctaattaagagagcttggtgtgatttctcatatacagcatctaaatatttaagttttaatgtcttctaaaatattattacattcttcatactatagttttttaacatcctttagaaaacttgtatcagcttcactttcaaaccatgctggcatcgaactcaggtgtagtggtatcagaatgttatgaaataattttttattttcattataaactccatttttacaataaacacttctcaaccaaaaaaaa

SEQ ID NO: 737242 - DNA, 529 bp, Homo sapiens
actcctgtctagaattttaatttttaaccactgctgatggccagaaaagaacatttggattttacaaccagtctttgatggagaaagaaaaaaagtcagtgaacacccattttgtgcctgacattcaagtatgtttgttccctgtatttctccatttagtcctctcagaatctctggaggtggactggggcagattattagtctaccagaagtctcacctataccaaaccacacacctttcagttgaggggcgctgaggtccctgctgttgctgtgccatctgacctgtcccctctctctgacagagagccagctgctccccgggaacaacttcaccaatgagtgcaacataccaggcaacttcatgtgcagcaatggacggtgcatcccgggcgcctggcagtgtgacgggctgcctgactgcttcgacaagagtgatgagaaggagtgccgtgagtggcctggccctttgctggggtggggtggcagccatcctggggcagaggggagcaggtcctgagcaggctta

SEQ ID NO: 737243 - DNA, 1636 bp, Homo sapiens
gccgggcagcgggagcggcggccgcgccatgtggctgctggggccgctgtgcctgctgctgagcagcgccgcggagagccagctgctccccgggaacaacttcaccaatgagtgcaacataccaggcaacttcatgtgcagcaatggacggtgcatcccgggcgcctggcagtgtgacgggctgcctgactgcttcgacaagagtgatgagaaggagtgccccaaggctaagtcgaaatgtggcccaaccttcttcccctgtgccagcggcatccattgcatcattggtcgcttccggtgcaatgggtttgaggactgtcccgatggcagcgatgaagagaactgcacagcaaaccctctgctttgctccaccgcccgctaccactgcaagaacggcctctgtattgacaagagcttcatctgcgatggacagaataactgtcaagacaacagtgatgaggaaagctgtgaaagttctcaagaacccggcagtgggcaggtgtttgtgacttcagagaaccaacttgtgtattaccccagcatcacctatgccatcatcggcagctccgtcatttttgtgctggtggtggccctgctggcactggtcttgcaccaccagcggaagcggaacaacctcatgacgctgcccgtgcaccggctgcagcaccctgtgctgctgtcccgcctggtggtcctggaccacccccaccactgcaacgtcacctacaacgtcaataatggcatccagtatgtggccagccaggcggagcagaatgcgtcggaagtaggctccccaccctcctactccgaggccttgctggaccagaggcctgcgtggtatgaccttcctccaccgccctactcttctgacacggaatctctgaaccaagccgacctgcccccctaccgctcccggtccgggagtgccaacagtgccagctcccaggcagccagcagcctcctgagcgtggaagacaccagccacagcccggggcagcctggcccccaggagggcactgctgagcccagggactctgagcccagccagggcactgaagaagtataagtcccagttattccaaagtccatatgggttaatctgctctgacttgttgccattctaacaatttgtgctcatgggaagctctttaagcacctgtaagggtgtctcaagttacagtttgggatattaactatctctgcattcccctcctcccccagacttcagagatgtttttctggcgtctcagttgacatgatctgttgtgcgtcttttctgtcaggtcactcttcccttgggacccgagatcacaccctcatttttcacattattctgtttctgttggagagacagcatataaaacagtattgaaataggctgggagagagcaatgtttctgtgctatattggatgctcagaagtgcaggagacgctggacccaattctctctgctgggtagttacctatatagcatttggggatttgggttagatgatctaaccaggaggacatcactggatggtcacccccccaaaaaaattccatttgagcatcaaaacctgctttgcacaatcctatttgatgcccccagttcagcagagtcagtggccaaagaaaactttggacgtgagtaac

SEQ ID NO: 737244 - DNA, 1489 bp, Homo sapiens
gccgggcagcgggagcggcggccgcgccatgtggctgctggggccgctgtgcctgctgctgagcagcgccgcggccaaggctaagtcgaaatgtggcccaaccttcttcccctgtgccagcggcatccattgcatcattggtcgcttccggtgcaatgggtttgaggactgtcccgatggcagcgatgaagagaactgcacagcaaaccctctgctttgctccaccgcccgctaccactgcaagaacggcctctgtattgacaagagcttcatctgcgatggacagaataactgtcaagacaacagtgatgaggaaagctgtgaaagttctcaagaacccggcagtgggcaggtgtttgtgacttcagagaaccaacttgtgtattaccccagcatcacctatgccatcatcggcagctccgtcatttttgtgctggtggtggccctgctggcactggtcttgcaccaccagcggaagcggaacaacctcatgacgctgcccgtgcaccggctgcagcaccctgtgctgctgtcccgcctggtggtcctggaccacccccaccactgcaacgtcacctacaacgtcaataatggcatccagtatgtggccagccaggcggagcagaatgcgtcggaagtaggctccccaccctcctactccgaggccttgctggaccagaggcctgcgtggtatgaccttcctccaccgccctactcttctgacacggaatctctgaaccaagccgacctgcccccctaccgctcccggtccgggagtgccaacagtgccagctcccaggcagccagcagcctcctgagcgtggaagacaccagccacagcccggggcagcctggcccccaggagggcactgctgagcccagggactctgagcccagccagggcactgaagaagtataagtcccagttattccaaagtccatatgggttaatctgctctgacttgttgccattctaacaatttgtgctcatgggaagctctttaagcacctgtaagggtgtctcaagttacagtttgggatattaactatctctgcattcccctcctcccccagacttcagagatgtttttctggcgtctcagttgacatgatctgttgtgcgtcttttctgtcaggtcactcttcccttgggacccgagatcacaccctcatttttcacattattctgtttctgttggagagacagcatataaaacagtattgaaataggctgggagagagcaatgtttctgtgctatattggatgctcagaagtgcaggagacgctggacccaattctctctgctgggtagttacctatatagcatttggggatttgggttagatgatctaaccaggaggacatcactggatggtcacccccccaaaaaaattccatttgagcatcaaaacctgctttgcacaatcctatttgatgcccccagttcagcagagtcagtggccaaagaaaactttggacgtgagtaac

SEQ ID NO: 737245 - DNA, 527 bp, Homo sapiens; identical to SEQ ID NO: 437580

SEQ ID NO: 737246 - DNA, 1104 bp, Homo sapiens
agcggccgctcgcgatctagaactagtggacactgaggatggcagtgcctggaagcaagatcccttccaggagagcggcctccacctgagccccacggcggccgaggccaaggagaaggctcgagccatgcgagtcaacaagcgcgcgccacagatggactggaacaggaagcgtgaaatcttcagcaacttctgagccccttcctgcctgtctcgggaccctgggacccctcccgcacggaccttgggcctcagcctgccccgagctcccccagcctcagtggactggagggtggtcctgccattgcccagaaatcagccccagccccggtgagcccccatcctgcccctgcccaccaggtactgggggcctgtggcagcaagatagggggagagagacccagagatgtgagagagagtcagagacagagacagagagagagagagagagacacagagagagacagagagagagcgagcgagcgcgcggcagccgcggggcgagggcctttgctgctctgccggggcctgctgactgaaaggaatttgtgtttttgctttttttccaaaaagatctccagctccacacatgtttccacttaataccagagacccccccccttcccctcccccttgggacgcgctctaaataattgcaataaaacaaacctttctctgcaaaaaaaagaaaaaaacacagaaaaaagaaaaaaagggggcggcccgcaacaagagtattccccagggagggcggcccaggttaaagcgggatccccagggttaccgtggcacacaagggtggcccccaattgcggggcagccagcaatatatataaacggcacaaaggcgaccatgttgtgggcgcccgtgacttgtattaaacaacaccgtgttgatcggaacacttggggttggaaaaaaacttggggagcataatccgtgagggaaaaccatgtggaggggaaacgagggaaccctctatacaattattggtgtggtgtgttggggtgaccccataatcgttgggggccagcaagatataaccctaatcagggcgcagatttttgagaagcacgccctgtgagaggggcgaagacaatagt

SEQ ID NO: 737247 - DNA, 1617 bp, Homo sapiens
tggggtggcagcctgggtcggccagagagttcaggccaccccggccggacgcctgccacttgctgtcactgtgccgctgtcatggcacgctccgggagtgccacgccacgatgtcagtgggcccctgagggagctgcgccctcggctctgccacctgcgaaagggacctcagggctatgggttcaacctgcatagtgacaagtcccggcccggccagtacatccgctctgtggacccgggctcacctgccgcccgctctggcctccgcgcccaggaccggctcattgaggtgaacgggcagaatgtggagggactgcgccatgctgaggtggtggccagcatcaaggcacgggaggacgaggcccggctgctggtcgtggaccccgagacagatgaacacttcaagcggcttcgggtcacacccaccgaggagcacgtggaaggtcctctgccgtcacccgtcaccaatggaaccagccctgcccagctcaatggtggctctgcgtgctcgtcccgaagtgacctgcctggttccgacaaggacactgaggatggcagtgcctggaagcaagatcccttccaggagagcggcctccacctgagccccacggcggccgaggccaaggagaaggctcgagccatgcgagtcaacaagcgcgcgccacagatggactggaacaggaagcgtgaaatcttcagcaacttctgagccccttcctgcctgtctcgggaccctgggacccctcccgcacggaccttgggcctcagcctgccccgagctcccccagcctcagtggactggagggtggtcctgccattgcccagaaatcagccccagccccggtgagcccccatcctgcccctgcccaccaggtactgggggcctgtggcagcaagatagggggagagagacccagagatgtgagagagagtcagagacagagacagagagagagagagagagacacagagagagacagagagagagcgagcgagcgcgcggcagccgcggggcgagggcctttgctgctctgccggggcctgctgactgaaaggaatttgtgtttttgctttttttccaaaaagatctccagctccacacatgtttccacttaataccagagacccccccccttcccctcccccttgggacgcgctctaaataattgcaataaaacaaacctttctctgcaaaaaaaagaaaaaaacacagaaaaaagaaaaaaagggggcggcccgcaacaagagtattccccagggagggcggcccaggttaaagcgggatccccagggttaccgtggcacacaagggtggcccccaattgcggggcagccagcaatatatataaacggcacaaaggcgaccatgttgtgggcgcccgtgacttgtattaaacaacaccgtgttgatcggaacacttggggttggaaaaaaacttggggagcataatccgtgagggaaaaccatgtggaggggaaacgagggaaccctctatacaattattggtgtggtgtgttggggtgaccccataatcgttgggggccagcaagatataaccctaatcagggcgcagatttttgagaagcacgccctgtgagaggggcgaagacaatagt

SEQ ID NO: 737248 - DNA, 1191 bp, Homo sapiens
gcgggggcggccgggcggcgggggcggggaaggggcgggcgcggaggcggtgccgcagcccgagccggagcccgagccggatcccgaggcgacgggagccgaacaggagccgccgctgaagccaccgccgggtgcccagcgccgccgccgcccccgagctcccccgcgcccctgcccgcgggcggccggtgggcagcgggcgccatggccgcgccggagccgctgcggccgcgcctgtgccgcttggtgcgcggagagcagggctacggcttccacctgcacggcgagaagggccgccgcgggcagttcatccggcgcgtggaacccggttcccccgccgaggccgccgcgctgcgcgctggggaccgcctggtcgaggtcaacggcgtcaacgtggagggcgagacgcaccaccaggtggtgcaaaggatcaaggctgtggaggggcagactcggctgctggtggtggaccaggagacagatgaggagctccgccggcggcagctgacctgtaccgaggagatggcccagcgagggctcccacccgcccacgacccctgggagccgaagccagactgggcacacaccggcagccacagctccgaagctggcaagaagctgactgaaaggaatttgtgtttttgctttttttccaaaaagatctccagctccacacatgtttccacttaataccagagacccccccccttcccctcccccttgggacgcgctctaaataattgcaataaaacaaacctttctctgcaaaaaaaagaaaaaaacacagaaaaaagaaaaaaagggggcggcccgcaacaagagtattccccagggagggcggcccaggttaaagcgggatccccagggttaccgtggcacacaagggtggcccccaattgcggggcagccagcaatatatataaacggcacaaaggcgaccatgttgtgggcgcccgtgacttgtattaaacaacaccgtgttgatcggaacacttggggttggaaaaaaacttggggagcataatccgtgagggaaaaccatgtggaggggaaacgagggaaccctctatacaattattggtgtggtgtgttggggtgaccccataatcgttgggggccagcaagatataaccctaatcagggcgcagatttttgagaagcacgccctgtgagaggggcgaagacaatagt

SEQ ID NO: 737249 - DNA, 613 bp, Homo sapiens; identical to SEQ ID NO: 437587

SEQ ID NO: 737250 - DNA, 2126 bp, Homo sapiens
gcgggggcggccgggcggcgggggcggggaaggggcgggcgcggaggcggtgccgcagcccgagccggagcccgagccggatcccgaggcgacgggagccgaacaggagccgccgctgaagccaccgccgggtgcccagcgccgccgccgcccccgagctcccccgcgcccctgcccgcgggcggccggtgggcagcgggcgccatggccgcgccggagccgctgcggccgcgcctgtgccgcttggtgcgcggagagcagggctacggcttccacctgcacggcgagaagggccgccgcgggcagttcatccggcgcgtggaacccggttcccccgccgaggccgccgcgctgcgcgctggggaccgcctggtcgaggtcaacggcgtcaacgtggagggcgagacgcaccaccaggtggtgcaaaggatcaaggctgtggaggggcagactcggctgctggtggtggaccaggagacagatgaggagctccgccggcggcagctgacctgtaccgaggagatggcccagcgagggctcccacccgcccacgacccctgggagccgaagccagactgggcacacaccggcagccacagctccgaagctggcaagaaggatgtcagtgggcccctgagggagctgcgccctcggctctgccacctgcgaaagggacctcagggctatgggttcaacctgcatagtgacaagtcccggcccggccagtacatccgctctgtggacccgggctcacctgccgcccgctctggcctccgcgcccaggaccggctcattgaggtgaacgggcagaatgtggagggactgcgccatgctgaggtggtggccagcatcaaggcacgggaggacgaggcccggctgctggtcgtggaccccgagacagatgaacacttcaagcggcttcgggtcacacccaccgaggagcacgtggaaggtcctctgccgtcacccgtcaccaatggaaccagccctgcccagctcaatggtggctctgcgtgctcgtcccgaagtgacctgcctggttccgacaaggacactgaggatggcagtgcctggaagcaagatcccttccaggagagcggcctccacctgagccccacggcggccgaggccaaggagaaggctcgagccatgcgagtcaacaagcgcgcgccacagatggactggaacaggaagcgtgaaatcttcagcaacttctgagccccttcctgcctgtctcgggaccctgggacccctcccgcacggaccttgggcctcagcctgccccgagctcccccagcctcagtggactggagggtggtcctgccattgcccagaaatcagccccagccccggtgagcccccatcctgcccctgcccaccaggtactgggggcctgtggcagcaagatagggggagagagacccagagatgtgagagagagtcagagacagagacagagagagagagagagagacacagagagagacagagagagagcgagcgagcgcgcggcagccgcggggcgagggcctttgctgctctgccggggcctgctgactgaaaggaatttgtgtttttgctttttttccaaaaagatctccagctccacacatgtttccacttaataccagagacccccccccttcccctcccccttgggacgcgctctaaataattgcaataaaacaaacctttctctgcaaaaaaaagaaaaaaacacagaaaaaagaaaaaaagggggcggcccgcaacaagagtattccccagggagggcggcccaggttaaagcgggatccccagggttaccgtggcacacaagggtggcccccaattgcggggcagccagcaatatatataaacggcacaaaggcgaccatgttgtgggcgcccgtgacttgtattaaacaacaccgtgttgatcggaacacttggggttggaaaaaaacttggggagcataatccgtgagggaaaaccatgtggaggggaaacgagggaaccctctatacaattattggtgtggtgtgttggggtgaccccataatcgttgggggccagcaagatataaccctaatcagggcgcagatttttgagaagcacgccctgtgagaggggcgaagacaatagt

SEQ ID NO: 737251 - DNA, 2093 bp, Homo sapiens
gcgggggcggccgggcggcgggggcggggaaggggcgggcgcggaggcggtgccgcagcccgagccggagcccgagccggatcccgaggcgacgggagccgaacaggagccgccgctgaagccaccgccgggtgcccagcgccgccgccgcccccgagctcccccgcgcccctgcccgcgggcggccggtgggcagcgggcgccatggccgcgccggagccgctgcggccgcgcctgtgccgcttggtgcgcggagagcagggctacggcttccacctgcacggcgagaagggccgccgcgggcagttcatccggcgcgtggaacccggttcccccgccgaggccgccgcgctgcgcgctggggaccgcctggtcgaggtcaacggcgtcaacgtggagggcgagacgcaccaccaggtggtgcaaaggatcaaggctgtggaggggcagactcggctgctggtggtggaccaggagacagatgaggagctccgccggcggcagctgacctgtaccgaggagatggcccagcgagggctcccacccgcccacgacccctgggagccgaagccagactgggcacacaccggcagccacagctccgaagctggcaagaaggatgtcagtgggcccctgagggagctgcgccctcggctctgccacctgcgaaagggacctcagggctatgggttcaacctgcatagtgacaagtcccggcccggccagtacatccgctctgtggacccgggctcacctgccgcccgctctggcctccgcgcccaggaccggctcattgaggtgaacgggcagaatgtggagggactgcgccatgctgaggtggtggccagcatcaaggcacgggaggacgaggcccggctgctggtcgtggaccccgagacagatgaacacttcaagcggcttcgggtcacacccaccgaggagcacgtggaaggtcctctgccgtcacccgtcaccaatggaaccagccctgcccagctcaatggtggctctgcgtgctcgtcccgaagtgacctgcctggttccgacaaggacactgaggagagcggcctccacctgagccccacggcggccgaggccaaggagaaggctcgagccatgcgagtcaacaagcgcgcgccacagatggactggaacaggaagcgtgaaatcttcagcaacttctgagccccttcctgcctgtctcgggaccctgggacccctcccgcacggaccttgggcctcagcctgccccgagctcccccagcctcagtggactggagggtggtcctgccattgcccagaaatcagccccagccccggtgagcccccatcctgcccctgcccaccaggtactgggggcctgtggcagcaagatagggggagagagacccagagatgtgagagagagtcagagacagagacagagagagagagagagagacacagagagagacagagagagagcgagcgagcgcgcggcagccgcggggcgagggcctttgctgctctgccggggcctgctgactgaaaggaatttgtgtttttgctttttttccaaaaagatctccagctccacacatgtttccacttaataccagagacccccccccttcccctcccccttgggacgcgctctaaataattgcaataaaacaaacctttctctgcaaaaaaaagaaaaaaacacagaaaaaagaaaaaaagggggcggcccgcaacaagagtattccccagggagggcggcccaggttaaagcgggatccccagggttaccgtggcacacaagggtggcccccaattgcggggcagccagcaatatatataaacggcacaaaggcgaccatgttgtgggcgcccgtgacttgtattaaacaacaccgtgttgatcggaacacttggggttggaaaaaaacttggggagcataatccgtgagggaaaaccatgtggaggggaaacgagggaaccctctatacaattattggtgtggtgtgttggggtgaccccataatcgttgggggccagcaagatataaccctaatcagggcgcagatttttgagaagcacgccctgtgagaggggcgaagacaatagt

SEQ ID NO: 737252 - DNA, 997 bp, Homo sapiens
gcgggggcggccgggcggcgggggcggggaaggggcgggcgcggaggcggtgccgcagcccgagccggagcccgagccggatcccgaggcgacgggagccgaacaggagccgccgctgaagccaccgccgggtgcccagcgccgccgccgcccccgaagctcccccagcctcagtggactggagggtggtcctgccattgcccagaaatcagccccagccccggtgagcccccatcctgcccctgcccaccaggtactgggggcctgtggcagcaagatagggggagagagacccagagatgtgagagagagtcagagacagagacagagagagagagagagagacacagagagagacagagagagagcgagcgagcgcgcggcagccgcggggcgagggcctttgctgctctgccggggcctgctgactgaaaggaatttgtgtttttgctttttttccaaaaagatctccagctccacacatgtttccacttaataccagagacccccccccttcccctcccccttgggacgcgctctaaataattgcaataaaacaaacctttctctgcaaaaaaaagaaaaaaacacagaaaaaagaaaaaaagggggcggcccgcaacaagagtattccccagggagggcggcccaggttaaagcgggatccccagggttaccgtggcacacaagggtggcccccaattgcggggcagccagcaatatatataaacggcacaaaggcgaccatgttgtgggcgcccgtgacttgtattaaacaacaccgtgttgatcggaacacttggggttggaaaaaaacttggggagcataatccgtgagggaaaaccatgtggaggggaaacgagggaaccctctatacaattattggtgtggtgtgttggggtgaccccataatcgttgggggccagcaagatataaccctaatcagggcgcagatttttgagaagcacgccctgtgagaggggcgaagacaatagt

SEQ ID NO: 737253 - DNA, 956 bp, Homo sapiens; identical to SEQ ID NO: 437586

SEQ ID NO: 737254 - DNA, 2068 bp, Homo sapiens
gcgggggcggccgggcggcgggggcggggaaggggcgggcgcggaggcggtgccgcagcccgagccggagcccgagccggatcccgaggcgacgggagccgaacaggagccgccgctgaagccaccgccgggtgcccagcgccgccgccgcccccgagctcccccgcgcccctgcccgcgggcggccggtgggcagcgggcgccatggccgcgccggagccgctgcggccgcgcctgtgccgcttggtgcgcggagagcagggctacggcttccacctgcacggcgagaagggccgccgcgggcagttcatccggcgcgtggaacccggttcccccgccgaggccgccgcgctgcgcgctggggaccgcctggtcgaggtcaacggcgtcaacgtggagggcgagacgcaccaccaggtggtgcaaaggatcaaggctgtggagggctgacctgtaccgaggagatggcccagcgagggctcccacccgcccacgacccctgggagccgaagccagactgggcacacaccggcagccacagctccgaagctggcaagaaggatgtcagtgggcccctgagggagctgcgccctcggctctgccacctgcgaaagggacctcagggctatgggttcaacctgcatagtgacaagtcccggcccggccagtacatccgctctgtggacccgggctcacctgccgcccgctctggcctccgcgcccaggaccggctcattgaggtgaacgggcagaatgtggagggactgcgccatgctgaggtggtggccagcatcaaggcacgggaggacgaggcccggctgctggtcgtggaccccgagacagatgaacacttcaagcggcttcgggtcacacccaccgaggagcacgtggaaggtcctctgccgtcacccgtcaccaatggaaccagccctgcccagctcaatggtggctctgcgtgctcgtcccgaagtgacctgcctggttccgacaaggacactgaggatggcagtgcctggaagcaagatcccttccaggagagcggcctccacctgagccccacggcggccgaggccaaggagaaggctcgagccatgcgagtcaacaagcgcgcgccacagatggactggaacaggaagcgtgaaatcttcagcaacttctgagccccttcctgcctgtctcgggaccctgggacccctcccgcacggaccttgggcctcagcctgccccgagctcccccagcctcagtggactggagggtggtcctgccattgcccagaaatcagccccagccccggtgagcccccatcctgcccctgcccaccaggtactgggggcctgtggcagcaagatagggggagagagacccagagatgtgagagagagtcagagacagagacagagagagagagagagagacacagagagagacagagagagagcgagcgagcgcgcggcagccgcggggcgagggcctttgctgctctgccggggcctgctgactgaaaggaatttgtgtttttgctttttttccaaaaagatctccagctccacacatgtttccacttaataccagagacccccccccttcccctcccccttgggacgcgctctaaataattgcaataaaacaaacctttctctgcaaaaaaaagaaaaaaacacagaaaaaagaaaaaaagggggcggcccgcaacaagagtattccccagggagggcggcccaggttaaagcgggatccccagggttaccgtggcacacaagggtggcccccaattgcggggcagccagcaatatatataaacggcacaaaggcgaccatgttgtgggcgcccgtgacttgtattaaacaacaccgtgttgatcggaacacttggggttggaaaaaaacttggggagcataatccgtgagggaaaaccatgtggaggggaaacgagggaaccctctatacaattattggtgtggtgtgttggggtgaccccataatcgttgggggccagcaagatataaccctaatcagggcgcagatttttgagaagcacgccctgtgagaggggcgaagacaatagt

SEQ ID NO: 737255 - DNA, 1801 bp, Homo sapiens
cgcacgcctgggccagcccagagtggtgccactgcccatgtgctgcccggaatgtgggccactgacccgctcctatcgcccattcgccccaggtggtgcaaaggatcaaggctgtggaggggcagactcggctgctggtggtggaccaggagacagatgaggagctccgccggcggcagctgacctgtaccgaggagatggcccagcgagggctcccacccgcccacgacccctgggagccgaagccagactgggcacacaccggcagccacagctccgaagctggcaagaaggatgtcagtgggcccctgagggagctgcgccctcggctctgccacctgcgaaagggacctcagggctatgggttcaacctgcatagtgacaagtcccggcccggccagtacatccgctctgtggacccgggctcacctgccgcccgctctggcctccgcgcccaggaccggctcattgaggtgaacgggcagaatgtggagggactgcgccatgctgaggtggtggccagcatcaaggcacgggaggacgaggcccggctgctggtcgtggaccccgagacagatgaacacttcaagcggcttcgggtcacacccaccgaggagcacgtggaaggtcctctgccgtcacccgtcaccaatggaaccagccctgcccagctcaatggtggctctgcgtgctcgtcccgaagtgacctgcctggttccgacaaggacactgaggatggcagtgcctggaagcaagatcccttccaggagagcggcctccacctgagccccacggcggccgaggccaaggagaaggctcgagccatgcgagtcaacaagcgcgcgccacagatggactggaacaggaagcgtgaaatcttcagcaacttctgagccccttcctgcctgtctcgggaccctgggacccctcccgcacggaccttgggcctcagcctgccccgagctcccccagcctcagtggactggagggtggtcctgccattgcccagaaatcagccccagccccggtgagcccccatcctgcccctgcccaccaggtactgggggcctgtggcagcaagatagggggagagagacccagagatgtgagagagagtcagagacagagacagagagagagagagagagacacagagagagacagagagagagcgagcgagcgcgcggcagccgcggggcgagggcctttgctgctctgccggggcctgctgactgaaaggaatttgtgtttttgctttttttccaaaaagatctccagctccacacatgtttccacttaataccagagacccccccccttcccctcccccttgggacgcgctctaaataattgcaataaaacaaacctttctctgcaaaaaaaagaaaaaaacacagaaaaaagaaaaaaagggggcggcccgcaacaagagtattccccagggagggcggcccaggttaaagcgggatccccagggttaccgtggcacacaagggtggcccccaattgcggggcagccagcaatatatataaacggcacaaaggcgaccatgttgtgggcgcccgtgacttgtattaaacaacaccgtgttgatcggaacacttggggttggaaaaaaacttggggagcataatccgtgagggaaaaccatgtggaggggaaacgagggaaccctctatacaattattggtgtggtgtgttggggtgaccccataatcgttgggggccagcaagatataaccctaatcagggcgcagatttttgagaagcacgccctgtgagaggggcgaagacaatagt

SEQ ID NO: 737256 - DNA, 1918 bp, Homo sapiens
cagcggtgccaggccctggaggtggtggcagaccctgagccctctgccccctgcccctagcccatgtctccacccccatctggagggccttgggggctaagagcagccctggcctggcctggcctgtggtccctcagggacacacagggaggtaggaggtgagggaagggccctggcagcccccagcccgcctgcacagtctcccctgcgcacgccctcaagcttggcgctccctggaaacctgagctgcctcctgcctgctccggccaccgccatgtttaactgagcacgggcagccgctggccaccgccgccgcaccctggcccaccccctggctgggaggtggtcattgggcctggccttgcctgcatggtcccctggcccagagccctacctgcaggatgccagaggatgtcagtgggcccctgagggagctgcgccctcggctctgccacctgcgaaagggacctcagggctatgggttcaacctgcatagtgacaagtcccggcccggccagtacatccgctctgtggacccgggctcacctgccgcccgctctggcctccgcgcccaggaccggctcattgaggtgaacgggcagaatgtggagggactgcgccatgctgaggtggtggccagcatcaaggcacgggaggacgaggcccggctgctggtcgtggaccccgagacagatgaacacttcaagcggcttcgggtcacacccaccgaggagcacgtggaaggtcctctgccgtcacccgtcaccaatggaaccagccctgcccagctcaatggtggctctgcgtgctcgtcccgaagtgacctgcctggttccgacaaggacactgaggatggcagtgcctggaagcaagatcccttccaggagagcggcctccacctgagccccacggcggccgaggccaaggagaaggctcgagccatgcgagtcaacaagcgcgcgccacagatggactggaacaggaagcgtgaaatcttcagcaacttctgagccccttcctgcctgtctcgggaccctgggacccctcccgcacggaccttgggcctcagcctgccccgagctcccccagcctcagtggactggagggtggtcctgccattgcccagaaatcagccccagccccggtgagcccccatcctgcccctgcccaccaggtactgggggcctgtggcagcaagatagggggagagagacccagagatgtgagagagagtcagagacagagacagagagagagagagagagacacagagagagacagagagagagcgagcgagcgcgcggcagccgcggggcgagggcctttgctgctctgccggggcctgctgactgaaaggaatttgtgtttttgctttttttccaaaaagatctccagctccacacatgtttccacttaataccagagacccccccccttcccctcccccttgggacgcgctctaaataattgcaataaaacaaacctttctctgcaaaaaaaagaaaaaaacacagaaaaaagaaaaaaagggggcggcccgcaacaagagtattccccagggagggcggcccaggttaaagcgggatccccagggttaccgtggcacacaagggtggcccccaattgcggggcagccagcaatatatataaacggcacaaaggcgaccatgttgtgggcgcccgtgacttgtattaaacaacaccgtgttgatcggaacacttggggttggaaaaaaacttggggagcataatccgtgagggaaaaccatgtggaggggaaacgagggaaccctctatacaattattggtgtggtgtgttggggtgaccccataatcgttgggggccagcaagatataaccctaatcagggcgcagatttttgagaagcacgccctgtgagaggggcgaagacaatagt

SEQ ID NO: 737257 - DNA, 1670 bp, Homo sapiens
tggggtggcagcctgggtcggccagagagttcaggccaccccggccggacgcctgccacttgctgtcactgtgccgctgtcatggcacgctccgggagtgccacgccacctgcccgggctccgggagcccctccacggagcccaccccagaggctggtacaggatgtcagtgggcccctgagggagctgcgccctcggctctgccacctgcgaaagggacctcagggctatgggttcaacctgcatagtgacaagtcccggcccggccagtacatccgctctgtggacccgggctcacctgccgcccgctctggcctccgcgcccaggaccggctcattgaggtgaacgggcagaatgtggagggactgcgccatgctgaggtggtggccagcatcaaggcacgggaggacgaggcccggctgctggtcgtggaccccgagacagatgaacacttcaagcggcttcgggtcacacccaccgaggagcacgtggaaggtcctctgccgtcacccgtcaccaatggaaccagccctgcccagctcaatggtggctctgcgtgctcgtcccgaagtgacctgcctggttccgacaaggacactgaggatggcagtgcctggaagcaagatcccttccaggagagcggcctccacctgagccccacggcggccgaggccaaggagaaggctcgagccatgcgagtcaacaagcgcgcgccacagatggactggaacaggaagcgtgaaatcttcagcaacttctgagccccttcctgcctgtctcgggaccctgggacccctcccgcacggaccttgggcctcagcctgccccgagctcccccagcctcagtggactggagggtggtcctgccattgcccagaaatcagccccagccccggtgagcccccatcctgcccctgcccaccaggtactgggggcctgtggcagcaagatagggggagagagacccagagatgtgagagagagtcagagacagagacagagagagagagagagagacacagagagagacagagagagagcgagcgagcgcgcggcagccgcggggcgagggcctttgctgctctgccggggcctgctgactgaaaggaatttgtgtttttgctttttttccaaaaagatctccagctccacacatgtttccacttaataccagagacccccccccttcccctcccccttgggacgcgctctaaataattgcaataaaacaaacctttctctgcaaaaaaaagaaaaaaacacagaaaaaagaaaaaaagggggcggcccgcaacaagagtattccccagggagggcggcccaggttaaagcgggatccccagggttaccgtggcacacaagggtggcccccaattgcggggcagccagcaatatatataaacggcacaaaggcgaccatgttgtgggcgcccgtgacttgtattaaacaacaccgtgttgatcggaacacttggggttggaaaaaaacttggggagcataatccgtgagggaaaaccatgtggaggggaaacgagggaaccctctatacaattattggtgtggtgtgttggggtgaccccataatcgttgggggccagcaagatataaccctaatcagggcgcagatttttgagaagcacgccctgtgagaggggcgaagacaatagt

SEQ ID NO: 737258 - DNA, 1614 bp, Homo sapiens
tggggtggcagcctgggtcggccagagagttcaggccaccccggccggacgcctgccacttgctgtcactgtgccgctgtcatggcacgctccgggagtgccacgccacctgcccgggctccgggagcccctccacggagcccaccccagaggctggtacaggatgtcagtgggcccctgagggagctgcgccctcggctctgccacctgcgaaagggacctcagggctatgggttcaacctgcatagtgacaagtcccggcccggccagtacatccgctctgtggacccgggctcacctgccgcccgctctggcctccgcgcccaggaccggctcattgaggtgaacgggcagaatgtggagggactgcgccatgctgaggtggtggccagcatcaaggcacgggaggacgaggcccggctgctggtcgtggaccccgagacagatgaacacttcaagcggcttcgggtcacacccaccgaggagcacgtggaaggtcctctgccgtcacccgtcaccaatggaaccagccctgcccagctcaatggtggctctgcgtgctcgtcccgaagtgacctgcctggttccgacaaggacactgaggatggcagtgcctggaagcaagatcccttccaggagagcggcctccacctgagccccacggcggccgaggccaaggagaaggctcgagccatgcgagtcaacaagcgcgcgccacagatggactggaacaggaagcgtgaaatcttcagcaacttctgagccccttcctgcctgtctcgggaccctgggacccctcccgcacggaccttgggcctcagcctgccccgagctcccccagcctcagtggactggagggtggtcctgccattgcccagaaatcagccccagccccggtgagcccccatcctgcccctgcccaccaggtactgggggcctgtggcagcaagatagggggagagagacccagagatgtgagagagagtcagagacagagacagagccgcggggcgagggcctttgctgctctgccggggcctgctgactgaaaggaatttgtgtttttgctttttttccaaaaagatctccagctccacacatgtttccacttaataccagagacccccccccttcccctcccccttgggacgcgctctaaataattgcaataaaacaaacctttctctgcaaaaaaaagaaaaaaacacagaaaaaagaaaaaaagggggcggcccgcaacaagagtattccccagggagggcggcccaggttaaagcgggatccccagggttaccgtggcacacaagggtggcccccaattgcggggcagccagcaatatatataaacggcacaaaggcgaccatgttgtgggcgcccgtgacttgtattaaacaacaccgtgttgatcggaacacttggggttggaaaaaaacttggggagcataatccgtgagggaaaaccatgtggaggggaaacgagggaaccctctatacaattattggtgtggtgtgttggggtgaccccataatcgttgggggccagcaagatataaccctaatcagggcgcagatttttgagaagcacgccctgtgagaggggcgaagacaatagt

SEQ ID NO: 737259 - DNA, 1637 bp, Homo sapiens
tggggtggcagcctgggtcggccagagagttcaggccaccccggccggacgcctgccacttgctgtcactgtgccgctgtcatggcacgctccgggagtgccacgccacctgcccgggctccgggagcccctccacggagcccaccccagaggctggtacaggatgtcagtgggcccctgagggagctgcgccctcggctctgccacctgcgaaagggacctcagggctatgggttcaacctgcatagtgacaagtcccggcccggccagtacatccgctctgtggacccgggctcacctgccgcccgctctggcctccgcgcccaggaccggctcattgaggtgaacgggcagaatgtggagggactgcgccatgctgaggtggtggccagcatcaaggcacgggaggacgaggcccggctgctggtcgtggaccccgagacagatgaacacttcaagcggcttcgggtcacacccaccgaggagcacgtggaaggtcctctgccgtcacccgtcaccaatggaaccagccctgcccagctcaatggtggctctgcgtgctcgtcccgaagtgacctgcctggttccgacaaggacactgaggagagcggcctccacctgagccccacggcggccgaggccaaggagaaggctcgagccatgcgagtcaacaagcgcgcgccacagatggactggaacaggaagcgtgaaatcttcagcaacttctgagccccttcctgcctgtctcgggaccctgggacccctcccgcacggaccttgggcctcagcctgccccgagctcccccagcctcagtggactggagggtggtcctgccattgcccagaaatcagccccagccccggtgagcccccatcctgcccctgcccaccaggtactgggggcctgtggcagcaagatagggggagagagacccagagatgtgagagagagtcagagacagagacagagagagagagagagagacacagagagagacagagagagagcgagcgagcgcgcggcagccgcggggcgagggcctttgctgctctgccggggcctgctgactgaaaggaatttgtgtttttgctttttttccaaaaagatctccagctccacacatgtttccacttaataccagagacccccccccttcccctcccccttgggacgcgctctaaataattgcaataaaacaaacctttctctgcaaaaaaaagaaaaaaacacagaaaaaagaaaaaaagggggcggcccgcaacaagagtattccccagggagggcggcccaggttaaagcgggatccccagggttaccgtggcacacaagggtggcccccaattgcggggcagccagcaatatatataaacggcacaaaggcgaccatgttgtgggcgcccgtgacttgtattaaacaacaccgtgttgatcggaacacttggggttggaaaaaaacttggggagcataatccgtgagggaaaaccatgtggaggggaaacgagggaaccctctatacaattattggtgtggtgtgttggggtgaccccataatcgttgggggccagcaagatataaccctaatcagggcgcagatttttgagaagcacgccctgtgagaggggcgaagacaatagt

SEQ ID NO: 737260 - DNA, 2129 bp, Homo sapiens
ggcagggcctgggatggtagcggggggtccttccgggcaccaggaggccctctgtgccctgtccacactaagctcctgccccagcccctgcttgctgggcccacgggggtggggcggctcattttcctggaatgtgaaagcaaacagagccgccaccgcagccagccccacggaggcctctggagagaaaacaaaactgctggcctaggagcgcctgccccacgctctggaggagagcccggggcagggggacgcacaggcagagccctcagggacaaccgccccaggaggccgacggcgacagttcatcccacctggtgcttcctcccaccctgcctgtgcgccacgctggcctcgagccaaaggaattctcccagcaacccgggaaggcggctgggcccgtcggggaggcttctgggtttgaaaacaggctttgcccaagttcccacagctaaagctctgtcacaggcagcctgggtgcccggagtgtttgccactgagacctgggcctgcccgtggggggcacggtaccgagtttgggcagtggcggcaccaccggggagtggcctctggaggcgggaggctggagcaagagactgaccctgtccgttgggcctgcaggatgtcagtgggcccctgagggagctgcgccctcggctctgccacctgcgaaagggacctcagggctatgggttcaacctgcatagtgacaagtcccggcccggccagtacatccgctctgtggacccgggctcacctgccgcccgctctggcctccgcgcccaggaccggctcattgaggtgaacgggcagaatgtggagggactgcgccatgctgaggtggtggccagcatcaaggcacgggaggacgaggcccggctgctggtcgtggaccccgagacagatgaacacttcaagcggcttcgggtcacacccaccgaggagcacgtggaaggtcctctgccgtcacccgtcaccaatggaaccagccctgcccagctcaatggtggctctgcgtgctcgtcccgaagtgacctgcctggttccgacaaggacactgaggatggcagtgcctggaagcaagatcccttccaggagagcggcctccacctgagccccacggcggccgaggccaaggagaaggctcgagccatgcgagtcaacaagcgcgcgccacagatggactggaacaggaagcgtgaaatcttcagcaacttctgagccccttcctgcctgtctcgggaccctgggacccctcccgcacggaccttgggcctcagcctgccccgagctcccccagcctcagtggactggagggtggtcctgccattgcccagaaatcagccccagccccggtgagcccccatcctgcccctgcccaccaggtactgggggcctgtggcagcaagatagggggagagagacccagagatgtgagagagagtcagagacagagacagagagagagagagagagacacagagagagacagagagagagcgagcgagcgcgcggcagccgcggggcgagggcctttgctgctctgccggggcctgctgactgaaaggaatttgtgtttttgctttttttccaaaaagatctccagctccacacatgtttccacttaataccagagacccccccccttcccctcccccttgggacgcgctctaaataattgcaataaaacaaacctttctctgcaaaaaaaagaaaaaaacacagaaaaaagaaaaaaagggggcggcccgcaacaagagtattccccagggagggcggcccaggttaaagcgggatccccagggttaccgtggcacacaagggtggcccccaattgcggggcagccagcaatatatataaacggcacaaaggcgaccatgttgtgggcgcccgtgacttgtattaaacaacaccgtgttgatcggaacacttggggttggaaaaaaacttggggagcataatccgtgagggaaaaccatgtggaggggaaacgagggaaccctctatacaattattggtgtggtgtgttggggtgaccccataatcgttgggggccagcaagatataaccctaatcagggcgcagatttttgagaagcacgccctgtgagaggggcgaagacaatagt

SEQ ID NO: 737261 - DNA, 1394 bp, Homo sapiens
tcgcggaaatctctgacacgccgcagacatcctaggaccctccgcgcccaggaccggctcattgaggtgaacgggcagaatgtggagggactgcgccatgctgaggtggtggccagcatcaaggcacgggaggacgaggcccggctgctggtcgtggaccccgagacagatgaacacttcaagcggcttcgggtcacacccaccgaggagcacgtggaaggtcctctgccgtcacccgtcaccaatggaaccagccctgcccagctcaatggtggctctgcgtgctcgtcccgaagtgacctgcctggttccgacaaggacactgaggatggcagtgcctggaagcaagatcccttccaggagagcggcctccacctgagccccacggcggccgaggccaaggagaaggctcgagccatgcgagtcaacaagcgcgcgccacagatggactggaacaggaagcgtgaaatcttcagcaacttctgagccccttcctgcctgtctcgggaccctgggacccctcccgcacggaccttgggcctcagcctgccccgagctcccccagcctcagtggactggagggtggtcctgccattgcccagaaatcagccccagccccggtgagcccccatcctgcccctgcccaccaggtactgggggcctgtggcagcaagatagggggagagagacccagagatgtgagagagagtcagagacagagacagagagagagagagagagacacagagagagacagagagagagcgagcgagcgcgcggcagccgcggggcgagggcctttgctgctctgccggggcctgctgactgaaaggaatttgtgtttttgctttttttccaaaaagatctccagctccacacatgtttccacttaataccagagacccccccccttcccctcccccttgggacgcgctctaaataattgcaataaaacaaacctttctctgcaaaaaaaagaaaaaaacacagaaaaaagaaaaaaagggggcggcccgcaacaagagtattccccagggagggcggcccaggttaaagcgggatccccagggttaccgtggcacacaagggtggcccccaattgcggggcagccagcaatatatataaacggcacaaaggcgaccatgttgtgggcgcccgtgacttgtattaaacaacaccgtgttgatcggaacacttggggttggaaaaaaacttggggagcataatccgtgagggaaaaccatgtggaggggaaacgagggaaccctctatacaattattggtgtggtgtgttggggtgaccccataatcgttgggggccagcaagatataaccctaatcagggcgcagatttttgagaagcacgccctgtgagaggggcgaagacaatagt

SEQ ID NO: 737262 - DNA, 1965 bp, Homo sapiens
aaaaacaacatcaaacagaacatagtaaatatatctgtaatgtatacttttttctagtttgggactgcatcatccacatagcttcttttctgtcctctagacaagggctccaggagtaagtggcagatttggttctgagagctaagctcaccaacttgtctccccctcaacagatgagggaagggcagggagcccgttcagtgactcctggcgctgcagaatcactcatctttggaggtgagcagagagagctctgaggagtttccttcttgcaactcaggcggagctttctttaactcaggagcagcctccattgctcccgccaacccctcaccatggccccttgtccccttgtcccaaccatagcatagagatgacaagagagaggcagtcctatttctgagactggaccaattaaaatgactgcactggctcaaaggactctgaacctgtcttgtcctgggtcctccagttgttggaagccactcttttccccaaccatgctgaaatgccacctttaccacacactgatgtcttacatagacttagatctatttctggaacttctcttctcttcgcttacttgggtgtctcatctggcaccagccatacaattttaactattgtcaatttctaatgtcttattatgtggtgggatgagtcccttcactcttcttttacaaaatttcctagttattctctcacatctattcttccacataaactttaaattgtgcccagtcctccaccccctgtcccattcccacccccaaattctgggctctgtcattccctgtgccatcatcttccccccattgtaattactgtccactcagggctgtgaaatagactatgttctataaagagggacaaaaagggcatcctgatcttgagagaagcctgctgttcctcccatcatttcacctgccccctaagcccaggagttgtcatgagaggtcaccaggcccccactcaatctcagcttgggaaccaaagtcacccaccttggttgtgttggggtggacccgccatctgtccctggtccagacgagaaagaggagtctctcctaggcctggagctgggaaagaatgtgtggcccagttgtctgcacttctaattctcatcatggagaaacctttattcctatctccctttcctgaactggttttttgttgtttttgtttcattttgttttggggggatagtttcttgctctttaatttggagtctccagtacctttgggatgcaggcagttcttgcctgggccttctcggaaccctcactcccctagcccactcttgcgctacctgcaggaggctgccaacctggtgcattctgacaagcctcccacccaaatctctctcctgccattgtgtccaaaatcccaccattagaggctcttgtagggaagagcgtttcttgaaggcttttaggccttccagagccaggagggaagtcagacaatagcaggaagtccccaggccttttcaaagttccaaaccaagctctcctgattttaatgtagagatcataccaacccaggtgggggaggagggtccccagccccaggcagcagccatcaccccctccactgaaaacaatattggaggctgctttgggactgcccttctcagccccctaagtctgttttgtaatgcctgtggtgctctccctcctggacctttcctctcgggggtcaccacactttgctaactcttgtgtgcacatattttataatagagtagcgagggaatggtgccgcctccagcttccgtaagctgcccgggctctggggggctctgggacaatcggggctgggaagtgactgtgctcttattgtacactctttatttctctgtatctttggcttgtgctctttgtaattaatgggatttgtctgccttttcaacactatactgagcaataacaataaatgcacacgtggaaatgcagacacggtaca

SEQ ID NO: 737263 - DNA, 487 bp, Homo sapiens; identical to SEQ ID NO: 43319

SEQ ID NO: 737264 - DNA, 1869 bp, Homo sapiens
  misc_feature (1800)..(1800): n is a, c, g, or t
  misc_feature (1839)..(1839): n is a, c, g, or t
  misc_feature (1843)..(1843): n is a, c, g, or t
  misc_feature (1853)..(1853): n is a, c, g, or t
  misc_feature (1866)..(1866): n is a, c, g, or t
gtgcccgcccgacggggccgccctgagcatgggtgtgcagacgtatcctcgagaccctgttcagtgttttgggtgtacgcccaggagacgaattgctggatgctgtggcaattctatgtttacttgtttgaggagcttccatggtagctgcaccatttcacattcccgccaacagtgcacgagggttccaagcgctccacgacgctcgctcgttgcctttgtgttttgtttctatagcagccatcccaacgggtgaggtgagcaccgcttcgtggatttatcagctacttgtgtgtcttctttggataaatgttgattcaagtcctttggccatttttgaatcagggttttttttgtttgttttttttttttttttttgagttttaggagttctctatagattctggtttttaaccccttactagatgcatgatttgtaaatattttccccattgtgtgctctgccgttttactcttaatgtcatttgatggacgaaatgtttttgtttccacgcagtcccgctgtctgctttttctgttgtcgcctgggcctttggtgtcaccttcaagaagtcactgccaaatccaacatcgtggcagttttccctgtgtttccttatgagaggtttaggtctcacatttaggtctttgatgtactttgcactgatttttgtcagctgtaaagtaggggccaatttcattcctttgcgtgtggatgtcctgtttcccagcaccatcggtggaagcggctgtcttttcccattgaggagtcctgccatcctggcacctgtgccaaagcccattcgaccttgagtttgagggtttatttctgggtcctcgcctctgttcccttggtccatacaccacctttatatcaggacggtgatgctttcattcctgtggcttggcagtaaaattttgaatcaggaaatgtgagtctccagcttcgttctttttaggattgttttgggtaatcaggaacccttgagattccatgtgaatttagggtgggtttttctgtttctctgagaaatatccttgagattctcccaggaagatatattgttttgagggctttaaaactccctataaatattgctgtactttgggggcccttttcttcccacactgtgtttttgagatttacccatgctgttgtgagtacctcgctgaatgcagcacatactgcatcatacaagtgcatcctgatccatttcccctgacggacgtgttcattttttgttatggcaatgctgcaatacacgtttttagctgtgcctctttgtgcttgaatgtgaggggttttctaaggtgtgaacctcagaacagagtcgccaggccatagggtgtgcacagcctccgtctgtcctgggcggccccacgcgggctccacactggtttccgtctgtcctgggcagcaccacggtggctccacactggtttccacactggtttccgtctgtcctgggcggccccgcgcgggccccacactggttgtgcgtttctcaggccaccagcagcgtccaagagctctggccgatctgcctccctccctgcgtctcggcatctttgtctggcactgctgatggttttgcctaaacggctctttgctgtggggcatcctgtgcaccgtgggacgtcttgtgcactgtggggtgttgagccgcatccgtggtctccacccacagatgacaacgacacccccagctatgaaaccagaaatgactccacacattgccaaatgtcccccagggcaaagtcacccacttgggcgttatgttacccactgatgatctgatnttcattgaggagtcactcccagctacaacctgtcacttncagnataagaaagngaagtacacatcncgt

SEQ ID NO: 737265 - DNA, 2087 bp, Homo sapiens
gtgcccgcccgacggggccgccctgagcatgggtgtgcagacgtatcctcgagaccctgttcagtgttttgggtgtacgcccaggagacgaattgctggatgctgtggcaattctatgtttacttgtttgaggagcttccatggtagctgcaccatttcacattcccgccaacagtgcacgagggttccaagcgctccacgacgctcgctcgttgcctttgtgttttgtttctatagcagccatcccaacgggtgaggtgagcaccgcttcgtggatttatcagctacttgtgtgtcttctttggataaatgttgattcaagtcctttggccatttttgaatcagggttttttttgtttgttttttttttttttttttgagttttaggagttctctatagattctggtttttaaccccttactagatgcatgatttgtaaatattttccccattgtgtgctctgccgttttactcttaatgtcatttgatggacgaaatgtttttgtttccacgcagtcccgctgtctgctttttctgttgtcgcctgggcctttggtgtcaccttcaagaagtcactgccaaatccaacatcgtggcagttttccctgtgtttccttatgagaggtttaggtctcacatttaggtctttgatgtactttgcactgatttttgtcagctgtaaagtaggggccaatttcattcctttgcgtgtggatgtcctgtttcccagcaccatcggtggaagcggctgtcttttcccattgaggagtcctgccatcctggcacctgtgccaaagcccattcgaccttgagtttgagggtttatttctgggtcctcgcctctgttcccttggtccatacaccacctttatatcaggacggtgatgctttcattcctgtggcttggcagtaaaattttgaatcaggaaatgtgagtctccagcttcgttctttttaggattgttttgggtaatcaggaacccttgagattccatgtgaatttagggtgggtttttctgtttctctgagaaatatccttgagattctcccaggaagatatattgttttgagggctttaaaactccctataaatattgctgtactttgggggcccttttcttcccacactgtgtttttgagatttacccatgctgttgtgagtacctcgctgaatgcagcacatactgcatcatacaagtgcatcctgatccatttcccctgacggacgtgttcattttttgttatggcaatgctgcaatacacgtttttagctgtgcctctttgtgcttgaatgtgaggggttttctaaggtgtgaacctcagaacagagtcgccaggccatagggtgtgcacagcctccgtctgtcctgggcggccccacgcgggctccacactggtttccgtctgtcctgggcagcaccacggtggctccacactggtttccacactggtttccgtctgtcctgggcggccccgcgcgggccccacactggttgtgcgtttctcaggccaccagcagcgtccaagagctctggccgatctgcctccctccctgcgtctcggcatctttgtctggcactgctgatggttttgcctaaacggctctttgctgtggggcatcctgtgcaccgtgggacgtcttgtgcactgtggggtgttgagccgcatccgtggtctccacccacagatgacaacgacacccccagctatgaaaccagaaatgactccacacattgccaaatgtcccccagggcaaagtcacccacttgggcgttatgttacccactgatgatctgaatttttgtccatttcacctgtctgagtttgtgtgtctctgagcactggtgggactgagcgtgtccgtggcttgtggccactcctgcttcctgtttgtgaattttatgttcataacgtctgcccctttctttgggtttttcactttattcttattattttgtaaattccttaagtattctggatacttaccttttgttattctattctagtagtcactgtccccaaaacaatgttcataaatttgttcttataaagatgagaaataaaaaacattgaattttaaactgca

SEQ ID NO: 737266 - DNA, 735 bp, Homo sapiens
gtggtgttcggttttctgttcctgtgttagtttgctgggaatgatggtttccagcttcatccatgtccctgcaaaggacatgaacacattcttttttatggctgtgcagtattatttgtccctagctggcccctttccttggcaatttctttaacctctaatccatcccacaagcatccttcactctcagaagttgattttgactctttctggtttctcttggcctatatccagtactaagacatttaaaaaatcttcttaaatcccgtgctttccattctctctgcagttgctctacttcaggtcttcatcatttaacttggctattatatggtcttccagttgttctcctgtctctaagctccatccacaccctcaccctgccactacatacacacttgctgaaaccaacatacccatcttctaaaaactatagacttcaattaattgctcccctacttaaaaatctttagtgattcatgactcccttcaaaataaagcttagtgtccttagtatgtcttaaaaggtccatcacaaagcctcgatctgtttctcaaacattgactccactgcttcactggttatcaccaacacttcaatcacatacaatggctgcctccacaatatgccgtatactattttagctctgtgctagtctacctttccccaccgccccccgcccccccagaatgcctattgcttctctcctttgtgggaaaaccccacttttcctt

SEQ ID NO: 737267 - DNA, 497 bp, Homo sapiens
tttttttttttaccaaatgtgatgtataacttgattgtgacaacaagagagtagaaatttaagtatggtgagtcagctgtttattatcagagagattcataatcaaaagagtcatagagtgggaaaactgacatatttcaacaaatctagtccagaatgttaaatagcacaatgggaaaatgtcaatgaggcacaactaaatgaaaattatctcattgcatacaacctcaatttcaaccattagaaaacactgggttgttttcaaatcacagtgtggtgctacaaagaaagcagttgagtgtttatgtaatacaatattgtgaaagcttgtggaaaacttttcttaaaatttttaaggccttggccaggcgcattggttcacgcctgtaattgagcactttgggaggccgagacgggtggatcacgaggtcaggagattgagaccatcctggctaacacggtgaaaccccatctctactaaaaatacaaaaaaaaat

SEQ ID NO: 737268 - DNA, 915 bp, Homo sapiens
cctgcccacccctagctctggggccttgagagaggcaagcacacgctcttctcgcctccagagagcggcgtgggggtgtggatactgctcaggccctggcatctcgcacgcctaggaccagcctctgccattcacaggaccgtgcaggcggccccaacagaggacggggacagctctctccttctgtaagtgaggcagcctcatccttccctggatcctcagcatctcttaaccagcagtggcagaggttgaattagaatggcaccagcttcggataaaaatccagatctcgcttttcaaaatgtgtctagagctggtggctgtaaggaaccagtcaagcctcagctgtgactctaatcctgccaagtccacctgagagccgactcattcatccaaagagagaacggtttggatggagctcaaggtgcctggctcgctggcatagcccagacaacctcttaaaggccgggccacagagctagaaggtctgtcactactcagttggggaaatcgtctgagaagttcaagtccactgcctcgcaactcaaatgagtcagcctcaccaaccaagaatcgcgttcataaacagactcagagcctgcgtgccgtggggtttccccgtctgcaactctctcacctggccctcctgcagggcccggcggggactggggagggtcagtgctccctggggcggggactgggtctgtttccaggctcagtgcctctgagtcatacagatgccaggtggtcctgctgcttaccctcgctgaacctcaggcttctcgtgtaaacagggcgcttttgaggaattattattaacatctccctgtgagtcaaagcacctactgagataatgtatgtgatgcttgtaataaatgcagctacatgccaggcactctgaaaaactgcctttgt

SEQ ID NO: 737269 - DNA, 830 bp, Homo sapiens
ctgacaggcaagtttcaagacagtggctaagcccaggtcctgaagagaggaggaccgtgcaggcggccccaacagaggacggggacagctctctccttctgtaagtgaggcagcctcatccttccctggatcctcagcatctcttaaccagcagtggcagaggttgaattagaatggcaccagcttcggataaaaatccagatctcgcttttcaaaatgtgtctagagctggtggctgtaaggaaccagtcaagcctcagctgtgactctaatcctgccaagtccacctgagagccgactcattcatccaaagagagaacggtttggatggagctcaaggtgcctggctcgctggcatagcccagacaacctcttaaaggccgggccacagagctagaaggtctgtcactactcagttggggaaatcgtctgagaagttcaagtccactgcctcgcaactcaaatgagtcagcctcaccaaccaagaatcgcgttcataaacagactcagagcctgcgtgccgtggggtttccccgtctgcaactctctcacctggccctcctgcagggcccggcggggactggggagggtcagtgctccctggggcggggactgggtctgtttccaggctcagtgcctctgagtcatacagatgccaggtggtcctgctgcttaccctcgctgaacctcaggcttctcgtgtaaacagggcgcttttgaggaattattattaacatctccctgtgagtcaaagcacctactgagataatgtatgtgatgcttgtaataaatgcagctacatgccaggcactctgaaaaactgcctttgt

SEQ ID NO: 737270 - DNA, 643 bp, Homo sapiens
  misc_feature (545)..(545): n is a, c, g, or t
  misc_feature (590)..(590): n is a, c, g, or t
  misc_feature (622)..(622): n is a, c, g, or t
  misc_feature (641)..(641): n is a, c, g, or t
tctagggcacttggaggtcctaaaactgctggtggcacggggagcagacctcggctgcaaggaccgcaagggctatgggctgctccatacagctgctgccagtggccagattgaagtggtgaagtacctgcttcggatgggagcggagatcgatgaacccaatgcttttggaaacacagctttgcacatcgcctgctacctgggccaggatgctgtggctattgagctggtgaatgccggagccaatgtcaaccagccgaatgacaagggcttcacgccactgcatgtggctgcagtctcgaccaatggcgctctctgcttggagctactggttaataatggggctgacgtcaactaccagagcaaagaagggaaaagtcctctgcacatggctgcaatccatggccgtttcacacgctcccagatcctcatccagaatggcagcgagattgattgtgccgacaaatttgggaacacgccactgcatgtggctgctcgatatggacacgagctgctcatcagcaccctcatgaccaatggcgcanataccgcccggcgtggcatccatgacatgttccccctgcacttanctgttctctttggattctctgactgttgtcgnaagcttctttcctcaggtntg

SEQ ID NO: 737271 - DNA, 790 bp, Homo sapiens
aatgctaaggacacactgtggctgacccctcttcatcgtgctgctgcctcccgaaacgagaaggtgctggggctgctgctggcacattcagcagatgtgaatgcccgggacaagctgtggcagacaccactgcatgtggctgctgccaaccgggccaccaagtgtgctgaggctctggcacccctgttgagcagcctcaacgtggctgacaggagcgggcgcagtgccctgcaccatgcagtgcatagtgggcatcttgagacggtgaacctgctcctcaacaagggagccagcctgaatgtctgtgacaaaaaggagcggcagcctctgcattgggcagcttttctagatcgatgaacccaatgcttttggaaacacagctttgcacatcgcctgctacctgggccaggatgctgtggctattgagctggtgaatgccggagccaatgtcaaccagccgaatgacaagggcttcacgccactgcatgtggctgcagtctcgaccaatggcgctctctgcttggagctactggttaataatggggctgacgtcaactaccaggtgcctgaagggataaggcttagaccagtggggagcgaaacttggatctaggggtcctgactgtatctggatagctctcttggggaattatccacttgcttcctagggtaatcagaccttgccagggactcaggaaagagtgggctaagaaggtgccatatgacccttttgtccttagagatatgtccttggaagggaggtagggcattctctgtgctttgcactgga

SEQ ID NO: 737272 - DNA, 739 bp, Homo sapiens
ctattcctccttccatttcctgttgttttacctcctgctcccactctctcttttgtcccctgcccctcaacagaaggtgctggggctgctgctggcacattcagcagatgtgaatgcccgggacaagctgtggcagacaccactgcatgtggctgctgccaaccgggccaccaagtgtgctgaggctctggcacccctgttgagcagcctcaacgtggctgacaggagcgggcgcagtgccctgcaccatgcagtgcatagtgggcatcttgaggtgaggactgttcccatccaggcccagctggggctttcccttttcttaccttcctactcacgtttccctgcttctgggccctcaagcctgaaggagaagcagcccggatggttatataaacacttaagctgaagcactaaatgaatggtcagactagattaaaattcttaacttggacttcaggaggttgataaaaccttggattttgcgtggaaaatatttgcatacacgcctttctgaagagagtccatgtctttcagcacatttgcaaagacttacaagagtttaagaaccggccgggcacggcggctcacgcctgtaatcccagcactttgggaggcgaaggcgggtggatcatgagatcaggagatcgagatcatcctggctaacatggtgaaaccctgtctctactaaaaatacaaaaaattagccgggtgtggtggcggccgcctgtagtcccagcta

SEQ ID NO: 737273 - DNA, 737 bp, Homo sapiens
ctattcctccttccatttcctgttgttttacctcctgctcccactctctcttttgtcccctgcccctcaacagaaggtgctggggctgctgctggcacattcagcagatgtgaatgcccgggacaagctgtggcagacaccactgcatgtggctgctgccaaccgggccaccaagtgtgctgaggctctggcacccctgttgagcagcctcaacgtggctgacaggagcgggcgcagtgccctgcaccatgcagtgcatagtgggcatcttgaggtgaggactgttcccatccaggcccagctggggctttcccttttcttaccttcctactcacgtttccctgcttctgggccctcaagcctgaaggagaagcagcccggatggttatataaacacttaagctgaagcactaaatgaatggtcagactagattaaaattcttaacttggacttcaggaggttgataaaaccttggattttgcgtggaaaatatttgcatacacgcctttctgaagagagtccatgtctttcagcacatttgcaaagacttacaggcgtgagccaccgtgcccagccacatctttttttctaacagaaaaacaaacaaaacaaacaaaaacaaaccttgagtaccatattcttagttctctgtttggctactggaaattctgcgctttgcccatcttgacctctaatagctaaaggaaatgtggttgagaaccactgatagaggaga

SEQ ID NO: 737274 - DNA, 390 bp, Homo sapiens
ctattcctccttccatttcctgttgttttacctcctgctcccactctctcttttgtcccctgcccctcaacagaaggtgctggggctgctgctggcacattcagcagatgtgaatgcccgggacaagctgtggcagacaccactgcatgtggctgctgccaaccgggccaccaagtgtgctgaggctctggcacccctgttgagcagcctcaacgtggctgacaggagcgggcgcagtgccctgcaccatgcagtgcatagtgggcatcttgagacggtgaacctgctcctcaacaagggagccagcctgaatgtctgtgacaaaaaggagcggcagcctctgcattgggcagcttttctagacctccaagtgccctagttctagatcgc

SEQ ID NO: 737275 - DNA, 732 bp, Homo sapiens
aggatctttaagtagtggtgttgagctgaacgctttctattttgtgactggtttctttcacttagcataatgtttttaaggatcatttgtgttgtgtgtatcagtatttcatttctttttatggctgaatgttgtatgcatacatcaccttttgtttatccattcatcagctgatggacgtttggattgtttctgtcttttgactattagaaacaaggatatgaatatatataagttttgtatagatatatattttcacttttcttacaaatatatcaaggaacagaattgttggagcatatggttactactccgtgtttaattttttgaggaacctccctactggtttccaaagtggctgcaccattatacatcccactatcagtctatgagcatttcagtttttccacacactccttaaaactcatctgactttttgtatttagccatcatactggatgttaagtggtatcttattgtgatttcgatttacatttgcctaatggccaatgatgttgaacatttcatgttcttcttaggtcattggtatgtcttctttggagaaatgtctgtttaagtacttcaaaattgagctatttttcttcttattagtgagttgtaatagttatttatatgtactagatagaagacctgtgtcagatatatgatttacaaatatttggcttgtcttttactttctaatagccgcatccaaccgggtcctcagaacac

SEQ ID NO: 737276 - DNA, 2421 bp, Homo sapiens
  misc_feature (771)..(771): n is a, c, g, or t
  misc_feature (848)..(848): n is a, c, g, or t
  misc_feature (2199)..(2199): n is a, c, g, or t
gtgacagttgatgacttagatgatggagcgaatggagagatcgaatctgtttccattgtggctggggatcctttagatcagttcttcctggctaaggaaggaaagtggttgaatgagtacaagattaaggagaggaagcagattgactgggagagctttccctatggctacaatctcactcttcaagcaaaagacaagggatctcctcaaaaatgttcagcattaaaggcagtctacattggcaaccccacaagagacactgtccccattagatttgaaaaagaagtgtacgatgtgagcataagtgaattttcccctcctggtgtcgtggttgctatagtaaaattaagtcctgaaccgatagatgtggaatacaaattatctcctggtgaggatgcagtgtactttaaaattaatcctcggtcgggtctgattgttacagcacggccactgaatactgttaagaaggaggtttataaactggaggtgacaaacaaggaaggagatttaaaagcacaggtcaccatcagcatagaagatgcaaatgaccacaccccagaatttcagcaaccactgtatgatgcttatgtgaatgaaagtgtcccagtgggaaccagcgttctaacagtttcagcttctgataaggataaaggagaaaatgggtacatcacctatagtatcgctagcctgaatttgttaccatttgtcattaatcagtttacaggtgttattagcacaactgaagaactggattttgaatcctccccaganatttacagattcattgttagagcctctgactggggttcaccataccgccatgaaagtgaggtcaatgtgactattcnaataggaaatgtcaacgacaacagccctctctttgaaaaagtggcttgccagggagttatttcatatgactttccagttggtggtcacatcacagcagtctcagcgatcgatatcgatgaacttgaacttgtaaagtacaaaatcatttctggaaatgaacttggcttcttttatttaaacccagattctggtgttttacagcttaaaaaatcactgacaaattctggcattaaaaatggcaattttgccctcagaattacagcaactgatggagagaatcttgcagaccccatgtctattaacatttcagtcctacatgggaaagtgtcttcaaagagcttcagttgcagagaaactcgtgtggctcaaaagctggcagagaaactactcattaaggcaaaagcaaatgggaaactgaatctggaagatggatttcttgacttttattcaattaatagacagggaccatattttgacaagtcttttccttctgatgtggctgtaaaggaggatctgccagttggtgctaacattctgaagattaaagcctatgatgccgactctggcttcaatggaaaagtgctatttacaatatcagatggaaatacggatagttgctttaatattgatatggagactgggcagcttaaagtccttatgcccatggatcgagaacacacagacctctatctccttaatatcaccatctatgacttaggtaatccacagaaatcgtcatggagactgctgaccatcaatgtggaggatgctaatgacaatagcccagtttttattcaagacagttactcagttaacattcttgaaagttcaggcattggtactgaaatcattcaagtggaagccagagacaaagacttaggttctaatggtgaagtgacttactcagtcttgacagatacacagcagtttgccatcaatagctcaactggaatcgtttatgtagccgaccagttggaccgggaatccaaagccaattattctttgaaaatagaagccagggacaaggcagagagtggtcagcagctgttttcagttgtcactcttaaagtttttttagatgatgtcaatgactgctccccagctttcattcccagtagctatagtgtgaaggttcttgaagatctccctgttggcactgtcattgcttggcttgagacccatgatccagattgcgctattctttggtcaatgactataatgggagatttgaaatagataaagcaagtggtgccatccgcttgagcaaagagctttccctatgggtacaatttcactcttcaagcaaaagacaagggatctcctcaaaaatgttcagcattaaaggcagtntacattggcaaccccacaagagacactgtccccattagatttgaaaaagaagtgtacgatgtgagcataagtgaattttcccctcctggtgtcgtggttgctatagtaaaattaagtcctgaaccgatagatgtggaatacaaattatttcctggtgaggatgcagtgtagagtgctgtagctgtgtgttccaataaattattttgtagggaaaaaaaaaaa

SEQ ID NO: 737277 - DNA, 3119 bp, Homo sapiens
  misc_feature (771)..(771): n is a, c, g, or t
  misc_feature (848)..(848): n is a, c, g, or t
  misc_feature (2749)..(2749): n is a, c, g, or t
  misc_feature (2839)..(2839): n is a, c, g, or t
gtgacagttgatgacttagatgatggagcgaatggagagatcgaatctgtttccattgtggctggggatcctttagatcagttcttcctggctaaggaaggaaagtggttgaatgagtacaagattaaggagaggaagcagattgactgggagagctttccctatggctacaatctcactcttcaagcaaaagacaagggatctcctcaaaaatgttcagcattaaaggcagtctacattggcaaccccacaagagacactgtccccattagatttgaaaaagaagtgtacgatgtgagcataagtgaattttcccctcctggtgtcgtggttgctatagtaaaattaagtcctgaaccgatagatgtggaatacaaattatctcctggtgaggatgcagtgtactttaaaattaatcctcggtcgggtctgattgttacagcacggccactgaatactgttaagaaggaggtttataaactggaggtgacaaacaaggaaggagatttaaaagcacaggtcaccatcagcatagaagatgcaaatgaccacaccccagaatttcagcaaccactgtatgatgcttatgtgaatgaaagtgtcccagtgggaaccagcgttctaacagtttcagcttctgataaggataaaggagaaaatgggtacatcacctatagtatcgctagcctgaatttgttaccatttgtcattaatcagtttacaggtgttattagcacaactgaagaactggattttgaatcctccccaganatttacagattcattgttagagcctctgactggggttcaccataccgccatgaaagtgaggtcaatgtgactattcnaataggaaatgtcaacgacaacagccctctctttgaaaaagtggcttgccagggagttatttcatatgactttccagttggtggtcacatcacagcagtctcagcgatcgatatcgatgaacttgaacttgtaaagtacaaaatcatttctggaaatgaacttggcttcttttatttaaacccagattctggtgttttacagcttaaaaaatcactgacaaattctggcattaaaaatggcaattttgccctcagaattacagcaactgatggagagaatcttgcagaccccatgtctattaacatttcagtcctacatgggaaagtgtcttcaaagagcttcagttgcagagaaactcgtgtggctcaaaagctggcagagaaactactcattaaggcaaaagcaaatgggaaactgaatctggaagatggatttcttgacttttattcaattaatagacagggaccatattttgacaagtcttttccttctgatgtggctgtaaaggaggatctgccagttggtgctaacattctgaagattaaagcctatgatgccgactctggcttcaatggaaaagtgctatttacaatatcagatggaaatacggatagttgctttaatattgatatggagactgggcagcttaaagtccttatgcccatggatcgagaacacacagacctctatctccttaatatcaccatctatgacttaggtaatccacagaaatcgtcatggagactgctgaccatcaatgtggaggatgctaatgacaatagcccagtttttattcaagacagttactcagttaacattcttgaaagttcaggcattggtactgaaatcattcaagtggaagccagagacaaagacttaggttctaatggtgaagtgacttactcagtcttgacagatacacagcagtttgccatcaatagctcaactggaatcgtttatgtagccgaccagttggaccgggaatccaaagccaattattctttgaaaatagaagccagggacaaggcagagagtggtcagcagctgttttcagttgtcactcttaaagtttttttagatgatgtcaatgactgctccccagctttcattcccagtagctatagtgtgaaggttcttgaagatctccctgttggcactgtcattgcttggcttgagacccatgatccagatcttggactggggggtcaagtgcgctattctttggtcaatgactataatgggagatttgaaatagataaagcaagtggtgccatccgcttgagcaaagagcttgattatgagaaacagcagttctataaccttactgtgcgggccaaagacaaagggcggcctgtctctctgtcatctgtttcctttgttgaggtggaagtggtggatgtcaatgaaaacctccacactccctatttcccagactttgctgttgttggatctgtaaaggaaaactcacgcattggaacaagcgtgctgcaggtgactgctcgagatgaagactccggaagggatggagagatccagtactccatcagggatggcagtggtcttggaaggttcagtatagacgacgagagtggtaagtgtaatattttgtgccaagagtgttgtttcacctcttttaaatggtcaacagtggaaaagtaaagggatgttaggacactaaaatagaatgacaaatgaggttgcatttggtgcagagacgacgcacatagatgctttttcttaggatgttctggtttgttagaagatctgtttataaactaacagctgtggtttccagtgggagtcctggtttgttttgttttgttattttcttgctcagcactattgctaccaggtcatcttttgataagcctaagtaattgtcacttctgttgattgtacncctgaccctctctaaatgaaggactctgataaagtaaattacatttgaattggctttaagttagaagtgtgaaatggattttcaaatggntcttatataggaatctttccctttacagtaaggctttgcagaagtgatattgcattagttgcttggtcttttatctttcatgggttcatctggtccttgaatgatgggcatttgcactctgtagctccattaatataaggaggtgtgcttctacaaatgttttcttaatggaataaatgagtcttgctatgaattttatttataaaaattgattttaagaatttatttgtaaggagatatttacaaaacattaaaaaatatggggcaacattgttccagt

SEQ ID NO: 737278 - DNA, 3804 bp, Homo sapiens
  misc_feature (771)..(771): n is a, c, g, or t
  misc_feature (848)..(848): n is a, c, g, or t
  misc_feature (3804)..(3804): n is a, c, g, or t
gtgacagttgatgacttagatgatggagcgaatggagagatcgaatctgtttccattgtggctggggatcctttagatcagttcttcctggctaaggaaggaaagtggttgaatgagtacaagattaaggagaggaagcagattgactgggagagctttccctatggctacaatctcactcttcaagcaaaagacaagggatctcctcaaaaatgttcagcattaaaggcagtctacattggcaaccccacaagagacactgtccccattagatttgaaaaagaagtgtacgatgtgagcataagtgaattttcccctcctggtgtcgtggttgctatagtaaaattaagtcctgaaccgatagatgtggaatacaaattatctcctggtgaggatgcagtgtactttaaaattaatcctcggtcgggtctgattgttacagcacggccactgaatactgttaagaaggaggtttataaactggaggtgacaaacaaggaaggagatttaaaagcacaggtcaccatcagcatagaagatgcaaatgaccacaccccagaatttcagcaaccactgtatgatgcttatgtgaatgaaagtgtcccagtgggaaccagcgttctaacagtttcagcttctgataaggataaaggagaaaatgggtacatcacctatagtatcgctagcctgaatttgttaccatttgtcattaatcagtttacaggtgttattagcacaactgaagaactggattttgaatcctccccaganatttacagattcattgttagagcctctgactggggttcaccataccgccatgaaagtgaggtcaatgtgactattcnaataggaaatgtcaacgacaacagccctctctttgaaaaagtggcttgccagggagttatttcatatgactttccagttggtggtcacatcacagcagtctcagcgatcgatatcgatgaacttgaacttgtaaagtacaaaatcatttctggaaatgaacttggcttcttttatttaaacccagattctggtgttttacagcttaaaaaatcactgacaaattctggcattaaaaatggcaattttgccctcagaattacagcaactgatggagagaatcttgcagaccccatgtctattaacatttcagtcctacatgggaaagtgtcttcaaagagcttcagttgcagagaaactcgtgtggctcaaaagctggcagagaaactactcattaaggcaaaagcaaatgggaaactgaatctggaagatggatttcttgacttttattcaattaatagacagggaccatattttgacaagtcttttccttctgatgtggctgtaaaggaggatctgccagttggtgctaacattctgaagattaaagcctatgatgccgactctggcttcaatggaaaagtgctatttacaatatcagatggaaatacggatagttgctttaatattgatatggagactgggcagcttaaagtccttatgcccatggatcgagaacacacagacctctatctccttaatatcaccatctatgacttaggtaatccacagaaatcgtcatggagactgctgaccatcaatgtggaggatgctaatgacaatagcccagtttttattcaagacagttactcagttaacattcttgaaagttcaggcattggtactgaaatcattcaagtggaagccagagacaaagacttaggttctaatggtgaagtgacttactcagtcttgacagatacacagcagtttgccatcaatagctcaactggaatcgtttatgtagccgaccagttggaccgggaatccaaagccaattattctttgaaaatagaagccagggacaaggcagagagtggtcagcagctgttttcagttgtcactcttaaagtttttttagatgatgtcaatgactgctccccagctttcattcccagtagctatagtgtgaaggttcttgaagatctccctgttggcactgtcattgcttggcttgagacccatgatccagatcttggactggggggtcaagtgcgctattctttggtcaatgactataatgggagatttgaaatagataaagcaagtggtgccatccgcttgagcaaagagcttgattatgagaaacagcagttctataaccttactgtgcgggccaaagacaaagggcggcctgtctctctgtcatctgtttcctttgttgaggtggaagtggtggatgtcaatgaaaacctccacactccctatttcccagactttgctgttgttggatctgtaaaggaaaactcacgcattggaacaagcgtgctgcaggtgactgctcgagatgaagactccggaagggatggagagatccagtactccatcagggatggcagtggtcttggaaggttcagtatagacgacgagagtggggtcatcactgccgcagacattcttgatcgggagacaatggggtcatactggctaacagtgtatgccacagacaggggcgttgttccactctactccaccattgaggtctacattgaagttgaagatgtgaatgacaatgccccgctgacctcagaacctatatattatcctgttgtcatggaaaactctccaaaggacgtatctgtcattcagatccaggctgaagatcctgactccagttccaatgaaaaactgacatacaggattacaagtggaaatcctcagaatttttttgccatcaatatcaaaacagggtcttgctctgttgcccaggctggaatgcagtggcatgatcgtagctcactgcaatctcgaactcctggattcaagggatacccctgcctcagcctcttgagtagctgggactataggcatgcaccgccatgcccagctacttttttaaatagttgagagtctcactatgttgcccaagctggtcttgatctcctggtcccaaatgatcctcttcctctgcctcccaagcactggaattacaggcatgagccactgtgcccagcccttatgctggacatttcatatgaatttcatgtaagtggaatcacgtaacatatagtattttgtgactggtttctttcacttagcataatgtttttaaggatcatttgtgttgtgtgtatcagtatttcatttctttttatggctgaatgttgtatgcatacatcaccttttgtttatccattcatcagctgatggacgtttggattgtttctgtcttttgactattagaaacaaggatatgaatatatataagttttgtatagatatatattttcacttttcttacaaatatatcaaggaacagaattgttggagcatatggttactactccgtgtttaattttttgaggaacctccctactggtttccaaagtggctgcaccattatacatcccactatcagtctatgagcatttcagtttttccacacactccttaaaactcatctgactttttgtatttagccatcatactggatgttaagtggtatcttattgtgatttcgatttacatttgcctaatggccaatgatgttgaacatttcatgttcttcttaggtcattggtatgtcttctttggagaaatgtctgtttaagtacttcaaaattgagctatttttcttcttattagtgagttgtaatagttatttatatgtactagatagaagacctgtgtcagatatatgatttacaaatatttggcttgtcttttactttcttgataggggcatttgaagaacaatgggttttcattttaattttaataaagtctagtttttttttn

SEQ ID NO: 737279 - DNA, 769 bp, Homo sapiens; identical to SEQ ID NO: 408059

SEQ ID NO: 737280 - DNA, 832 bp, Homo sapiens
  misc_feature (812)..(812): n is a, c, g, or t
tttgcttttctctctgatctgactaacctctttcattctttgccctatgttatatggcttagaccaaagcctgagacatttaaccaatttataaatattaaatgcagaaggcatactttatcagttcctggaaacatcaaagaagctggaaggggaatggaaattggatggcactttgtggaggtcactttgctgacagtcaagtattcaaaggatgaaggctcagatcagtttcatctatatgctatgcctgcctgacctggagaacttggtgttaaaggaaatgtgtttatcaaatgtgtcatgttatccttggagggcaactgaggatcagagcacagctgccttgaattgttccatcgagttattccactgcagttaagtggaacatcaaaaaacgtcaagaagcctaaaacatggaaacttgtttaattttctcaaacaatggcactaaccaaagcaaacgaaactttgacaagaaagaagcaattgtttagccttgtcatgtcctcacagttaataatacaaagggtatattcacagtgcaaagatactttccctttctctcaaaatagaagactacgtattgtaagatattttacagatgtccttcctcatagaactctgtaaactttactagctcaagaacaaaatcaaagtttcaattcacgggactgattcatcttgcattttaggtattctaatggtatatttgtactgtgtgttgcaacctatagaataaatgtacttcttcttcatgtttcctgtttgctgatgacagataccagtggctcacctttcggcctatgaancaatgattcttttcaaattg

SEQ ID NO: 737281 - DNA, 962 bp, Homo sapiens
cctggccttggttggtgtcctcatccttttcatgttcagaaggcttagacaatttcgacaagcacagcccactcctcagtaccggttccggaagagagacaaagtgatgttttacggccggaagatcatgaggaaggtgaccacactccccaacacccttgtggagaacactgccctgccccggcagcgggccaggaagaggaccaaggtgctgtctttggccaagaggattctgcgtttcaagaaggaatacccggccctgcagcccaaggagcccccgccctccctgctggaggccgacctcacggagtttgacgtgaagaattctcacctgccatcggaagttctgtacatgctgaaaaacgttcgggtcctgggccactttgagaagccgctgttcctggagctttgcaaacacatcgtctttgtgcagctgcaggaaggggagcacgtcttccagcccagggagccggaccccagcatctgtgtggtgcaggacgggcggctggaggtctgcatccaggacactgacggcaccgaggtggtggtgaaagaggttctggcgggagacagcgtccacagcctgctcagcatcctggacatcatcaccggccatgctgcaccttacaaaacggtctccgtccgcgcggccatcccgtccaccatcctccggcttccagctgcggcttttcatggagtttttgagaaatatccggaaactctggtgagggtggtgcagatcatcatggtgcggctgcagagggtgacctttctggctctgcacaactacctcggcctgaccacagagctcttcaacgctgagagccaggccatccctctcgtgtctgtagccagtgtggctgccgggaaggccaagaagcaggtgttctatggcgaagaagagcggcttaaaaagccaccgcggctccaggagtcctgtgactcaggtactgtcctgcacc

SEQ ID NO: 737282 - DNA, 941 bp, Homo sapiens
cagtcttttcatctcagaggttacttagacaatacgacaagcacagcccactcctcagtaccggttccggaagagagacaaagtgatgttttacggccggaagatcatgaggaaggtgaccacactccccaacacccttgtggagaacactgccctgccccggcagcgggccaggaagaggaccaaggtgctgtctttggccaagaggattctgcgtttcaagaaggaatacccggccctgcagcccaaggagcccccgccctccctgctggaggccgacctcacggagtttgacgtgaagaattctcacctgccatcggaagttctgtacatgctgaaaaacgttcgggtcctgggccactttgagaagccgctgttcctggagctttgcaaacacatcgtctttgtgcagctgcaggaaggggagcacgtcttccagcccagggagccggaccccagcatctgtgtggtgcaggacgggcggctggaggtctgcatccaggacactgacggcaccgaggtggtggtgaaagaggttctggcgggagacagcgtccacagcctgctcagcatcctggacatcatcaccggccatgctgcaccttacaaaacggtctccgtccgcgcggccatcccgtccaccatcctccggcttccagctgcggcttttcatggagtttttgagaaatatccggaaactctggtgagggtggtgcagatcatcatggtgcggctgcagagggtgacctttctggctctgcacaactacctcggcctgaccacagagctcttcaacgctgagagccaggccatccctctcgtgtctgtagccagtgtggctgccgggaaggccaagaagcaggtgttctatggcgaagaagagcggcttaaaaagccaccgcggctccaggagtcctgtgactcaggtactgtcctgcacc

SEQ ID NO: 737283 - DNA, 2412 bp, Homo sapiens
ggtggaggctatcaccgagggtgtggaggaggacgagggctgttgctgctgtgaacctggccacctgccacgggtcctgtccttcaatgctgcctttgggcagcgctggctggcttgggaggtaacagccagcaagtacgtgctggagggctatagcattagtgacaataatgctgcctccatgctgcaggttttcgacctccgcaagatcctcatcacctactatgtcaagagcatcatctactacgtgagccgctcaccaaagctggaggtgtggctcagccatgagggcatcacggcagccctgaggcctgtgcgggtgcccggctatgccgactcggatcccaccttctcgctgagtgtggatgaggactatgacctccgcctgtctggcctctcgctgccctccttttgtgctgtgcacctcgagtggatccagtactgcgcctcccggcgcagccagcccgtggaccaggattggaactccccgctggtcacgctgtgttttggcctgtgtgtgctgggccgccgggccctggggacagcctctcacagcatgtctgcaagcctggagcccttcctctacggcctgcacgccctgttcaagggggattttcgcatcacctccccacgtgacgagtgggtctttgccgacatggacctgcttcaccgcgttgtggcgcctggggttcgcatggccctcaagcttcaccaggaccacttcacgtccccagatgaatatgaggagccagcagccctatacgatgccattgcggccaacgaggagcggctggtcatctcacatgagggtgacccagcatggcgcagcgccatcctcagcaacacgccctccctgctggcgctgcgccatgtcctggatgatgcctccgacgagtacaagatcatcatgctcaaccggcgccacctcagcttccgagtcatcaaggtgaaccgggagtgcgtgcgcggcctgtgggccgggcagcagcaggagctggtgttcctgcgcaaccgcaaccccgagcgtggcagcatccagaacgccaagcaggcgcttcgcaacatgatcaactcctcctgtgaccagccgctgggctaccccatctacgtgtcgcctctcaccacctcgctggctggcagccacccccagctacgggcactgtggggtggccccatcagcctgggtgccattgcccactggctcctgcgcacctgggagaggcttcacaagggctgtggcgccggctgcaatagtggcgggaacgtggatgattcagactgtagtgggggcggtggcctgacctccctcagcaataacccccccgtggcacaccccacacctgagaacacggcaggcaatggtgaccaacccctcccaccaggccctggctgggggccgcggtcctccctgagtggctctggtgatgggcggcccccacctctgctgcagtggcctccccctcggctccctggaccaccccctgcatcgcctatccccacagagggtccccggacctcacggccccctggcccgggtctcctcagttctgagggccccagtggaaagtggagcctggggggccggaaggggctgggaggatctgacggggagccagcctcagggagccccaaaggaggtacccccaaatctcaggtaaggcacctgtgggagggttgggtcccagaaggctaaggcctgctcacccgccaacctctcccccctcccccaggcgcctctagacctcagcctcagcctcagcctcagcctcagccccgatgtcagcactgaggcctcaccccccagagcttcccaggacattccttgcttggacagcagtgcccctgagagtggcacacctatgggtgccctgggcgactggcctgcccctattgaggagcgtgagagcccggcagcccagcccctgctggaacaccagtactgagctacctggcgcccactggaccacctcctaggattcagtaacggacctgctctgctgcctctctgctggaccacagaactgagtggctttggcctacatgtctgaaccctgacctttggctgccttggccagagtaccaaaactgagtgacccagacctctgaccttgacccctgatctctctcatccccagtccagggcctgggctccccagatggaggcagtcagcctcccagccaggccctaagagccaaaccatgggctggtcccacttggagcctgtggccaggaccacctcagcccctgggcctgcactgcctgcaggtgtggcccccttggcctggacctggggcctgaattgtgggaagggtggtttctttctttccttttttttcttttcttttttttttttttttttgtgcttcggagacatcagaattaataacactatttttgattttgaaaaaaaa

SEQ ID NO: 737284 - DNA, 2336 bp, Homo sapiens
ggtggaggctatcaccgagggtgtggaggaggacgagggctgttgctgctgtgaacctggccacctgccacgggtcctgtccttcaatgctgcctttgggcagcgctggctggcttgggaggtaacagccagcaagtacgtgctggagggctatagcattagtgacaataatgctgcctccatgctgcaggttttcgacctccgcaagatcctcatcacctactatgtcaagagcatcatctactacgtgagccgctcaccaaagctggaggtgtggctcagccatgagggcatcacggcagccctgaggcctgtgcgggtgcccggctatgccgactcggatcccaccttctcgctgagtgtggatgaggactatgacctccgcctgtctggcctctcgctgccctccttttgtgctgtgcacctcgagtggatccagtactgcgcctcccggcgcagccagcccgtggaccaggattggaactccccgctggtcacgctgtgttttggcctgtgtgtgctgggccgccgggccctggggacagcctctcacagcatgtctgcaagcctggagcccttcctctacggcctgcacgccctgttcaagggggattttcgcatcacctccccacgtgacgagtgggtctttgccgacatggacctgcttcaccgcgttgtggcgcctggggttcgcatggccctcaagcttcaccaggaccacttcacgtccccagatgaatatgaggagccagcagccctatacgatgccattgcggccaacgaggagcggctggtcatctcacatgagggtgacccagcatggcgcagcgccatcctcagcaacacgccctccctgctggcgctgcgccatgtcctggatgatgcctccgacgagtacaagatcatcatgctcaaccggcgccacctcagcttccgagtcatcaaggtgaaccgggagtgcgtgcgcggcctgtgggccgggcagcagcaggagctggtgttcctgcgcaaccgcaaccccgagcgtggcagcatccagaacgccaagcaggcgcttcgcaacatgatcaactcctcctgtgaccagccgctgggctaccccatctacgtgtcgcctctcaccacctcgctggctggcagccacccccagctacgggcactgtggggtggccccatcagcctgggtgccattgcccactggctcctgcgcacctgggagaggcttcacaagggctgtggcgccggctgcaatagtggcgggaacgtggatgattcagactgtagtgggggcggtggcctgacctccctcagcaataacccccccgtggcacaccccacacctgagaacacggcaggcaatggtgaccaacccctcccaccaggccctggctgggggccgcggtcctccctgagtggctctggtgatgggcggcccccacctctgctgcagtggcctccccctcggctccctggaccaccccctgcatcgcctatccccacagagggtccccggacctcacggccccctggcccgggtctcctcagttctgagggccccagtggaaagtggagcctggggggccggaaggggctgggaggatctgacggggagccagcctcagggagccccaaaggaggtacccccaaatctcaggcgcctctagacctcagcctcagcctcagcctcagcctcagccccgatgtcagcactgaggcctcaccccccagagcttcccaggacattccttgcttggacagcagtgcccctgagagtggcacacctatgggtgccctgggcgactggcctgcccctattgaggagcgtgagagcccggcagcccagcccctgctggaacaccagtactgagctacctggcgcccactggaccacctcctaggattcagtaacggacctgctctgctgcctctctgctggaccacagaactgagtggctttggcctacatgtctgaaccctgacctttggctgccttggccagagtaccaaaactgagtgacccagacctctgaccttgacccctgatctctctcatccccagtccagggcctgggctccccagatggaggcagtcagcctcccagccaggccctaagagccaaaccatgggctggtcccacttggagcctgtggccaggaccacctcagcccctgggcctgcactgcctgcaggtgtggcccccttggcctggacctggggcctgaattgtgggaagggtggtttctttctttccttttttttcttttcttttttttttttttttttgtgcttcggagacatcagaattaataacactatttttgattttgaaaaaaaa

SEQ ID NO: 737285 - DNA, 1753 bp, Homo sapiens
ggtggaggctatcaccgagggtgtggaggaggacgagggctgttgctgctgtgaacctggccacctgccacgggtcctgtccttcaatgctgcctttgggcagcgctggctggcttgggaggtaacagccagcaagtacgtgctggagggctatagcattagtgacaataatgctgcctccatgctgcaggttttcgacctccgcaagatcctcatcacctactatgtcaagagcatcatctactacgtgagccgctcaccaaagctggaggtgtggctcagccatgagggcatcacggcagccctgaggcctgtgcgggtgcccggctatgccgactcggatcccaccttctcgctgagtgtggatgaggactatgacctccgcctgtctggcctctcgctgccctccttttgtgctgtgcacctcgagtggatccagtactgcgcctcccggcgcagccagcccgtggaccaggattggaactccccgctggtcacgctgtgttttggcctgtgtgtgctgggccgccgggccctggggacagcctctcacagcatgtctgcaagcctggagcccttcctctacggcctgcacgccctgttcaagggggattttcgcatcacctccccacgtgacgagtgggtctttgccgacatggacctgcttcaccgcgttgtggcgcctggggttcgcatggccctcaagcttcaccaggaccacttcacgtccccagatgaatatgaggagccagcagccctatacgatgccattgcggccaacgaggagcggctggtcatctcacatgagggtgacccagcatggcgcagcgccatcctcagcaacacgccctccctgctggcgctgcgccatgtcctggatgatgcctccgacgagtacaagatcatcatgctcaaccggcgccacctcagcttccgagtcatcaaggtgaaccgggagtgcgtgcgcggcctgtgggccgggcagcagcaggagctggtgttcctgcgcaaccgcaaccccgagcgtggcagcatccagaacgccaagcaggcgcttcgcaacatgatcaactcctcctgtgaccagccgctgggctaccccatctacgtgtcgcctctcaccacctcgctggctggcagccacccccagctacgggcactgtggggtggccccatcagcctgggtgccattgcccactggctcctgcgcacctgggagaggcttcacaagggctgtggcgccggctgcaatagtggcgggaacgtggatgattcagactgtagtgggggcggtggcctgacctccctcagcaataacccccccgtggcacaccccacacctgagaacacggcaggcaatggtgaccaacccctcccaccaggccctggctgggggccgcggtcctccctgagtggctctggtgatgggcggccccacttgtgagtggctgccactaggtcctgacaccctggatgtatccaagagggtaccgacgctcacggccgccagacggatgtcacaatatgagggcccaacggaagtgagccgcgggcggaggcatggagaccgacggagacagcacagagcccaagaagaacccaaagacggccaaaacaaaaagagccacacagaaagcacgagaaagagcaacgcagagccgcaaccggggaccagcctaaggaccacagagggacagggcccaagagaaccgcgcgagagaagagagcacacagaaaccacaagacggacaca

SEQ ID NO: 737286 - DNA, 1908 bp, Homo sapiens
ggaccggtccggaattctcgggatggcgcagccagcccgtggaccaggattggaactccccgctggtcacgctgtgttttggcctgtgtgtgctgggccgccgggccctggggacagcctctcacagcatgtctgcaagcctggagcccttcctctacggcctgcacgccctgttcaagggggattttcgcatcacctccccacgtgacgagtgggtctttgccgacatggacctgcttcaccgcgttgtggcgcctggggttcgcatggccctcaagcttcaccaggaccacttcacgtccccagatgaatatgaggagccagcagccctatacgatgccattgcggccaacgaggagcggctggtcatctcacatgagggtgacccagcatggcgcagcgccatcctcagcaacacgccctccctgctggcgctgcgccatgtcctggatgatgcctccgacgagtacaagatcatcatgctcaaccggcgccacctcagcttccgagtcatcaaggtgaaccgggagtgcgtgcgcggcctgtgggccgggcagcagcaggagctggtgttcctgcgcaaccgcaaccccgagcgtggcagcatccagaacgccaagcaggcgcttcgcaacatgatcaactcctcctgtgaccagccgctgggctaccccatctacgtgtcgcctctcaccacctcgctggctggcagccacccccagctacgggcactgtggggtggccccatcagcctgggtgccattgcccactggctcctgcgcacctgggagaggcttcacaagggctgtggcgccggctgcaatagtggcgggaacgtggatgattcagactgtagtgggggcggtggcctgacctccctcagcaataacccccccgtggcacaccccacacctgagaacacggcaggcaatggtgaccaacccctcccaccaggccctggctgggggccgcggtcctccctgagtggctctggtgatgggcggcccccacctctgctgcagtggcctccccctcggctccctggaccaccccctgcatcgcctatccccacagagggtccccggacctcacggccccctggcccgggtctcctcagttctgagggccccagtggaaagtggagcctggggggccggaaggggctgggaggatctgacggggagccagcctcagggagccccaaaggaggtacccccaaatctcaggcgcctctagacctcagcctcagcctcagcctcagcctcagccccgatgtcagcactgaggcctcaccccccagagcttcccaggacattccttgcttggacagcagtgcccctgagagtggcacacctatgggtgccctgggcgactggcctgcccctattgaggagcgtgagagcccggcagcccagcccctgctggaacaccagtactgagctacctggcgcccactggaccacctcctaggattcagtaacggacctgctctgctgcctctctgctggaccacagaactgagtggctttggcctacatgtctgaaccctgacctttggctgccttggccagagtaccaaaactgagtgacccagacctctgaccttgacccctgatctctctcatccccagtccagggcctgggctccccagatggaggcagtcagcctcccagccaggccctaagagccaaaccatgggctggtcccacttggagcctgtggccaggaccacctcagcccctgggcctgcactgcctgcaggtgtggcccccttggcctggacctggggcctgaattgtgggaagggtggtttctttctttccttttttttcttttcttttttttttttttttttgtgcttcggagacatcagaattaataacactatttttgattttgaaaaaaaa

SEQ ID NO: 737287 - DNA, 1542 bp, Homo sapiens
ttttttttttaatttaatcagtaactttattataacaaaacctgtatattacccatttaaactcatgtgtaacattcagtgatgtgagctgtattaaacccaggtattagtgaaaatttgcattgtaaaacctggtaacagtagtcatcaaggtgaaccgggagtgcgtgcgcggcctgtgggccgggcagcagcaggagctggtgttcctgcgcaaccgcaaccccgagcgtggcagcatccagaacgccaagcaggcgcttcgcaacatgatcaactcctcctgtgaccagccgctgggctaccccatctacgtgtcgcctctcaccacctcgctggctggcagccacccccagctacgggcactgtggggtggccccatcagcctgggtgccattgcccactggctcctgcgcacctgggagaggcttcacaagggctgtggcgccggctgcaatagtggcgggaacgtggatgattcagactgtagtgggggcggtggcctgacctccctcagcaataacccccccgtggcacaccccacacctgagaacacggcaggcaatggtgaccaacccctcccaccaggccctggctgggggccgcggtcctccctgagtggctctggtgatgggcggcccccacctctgctgcagtggcctccccctcggctccctggaccaccccctgcatcgcctatccccacagagggtccccggacctcacggccccctggcccgggtctcctcagttctgagggccccagtggaaagtggagcctggggggccggaaggggctgggaggatctgacggggagccagcctcagggagccccaaaggaggtacccccaaatctcaggcgcctctagacctcagcctcagcctcagcctcagcctcagccccgatgtcagcactgaggcctcaccccccagagcttcccaggacattccttgcttggacagcagtgcccctgagagtggcacacctatgggtgccctgggcgactggcctgcccctattgaggagcgtgagagcccggcagcccagcccctgctggaacaccagtactgagctacctggcgcccactggaccacctcctaggattcagtaacggacctgctctgctgcctctctgctggaccacagaactgagtggctttggcctacatgtctgaaccctgacctttggctgccttggccagagtaccaaaactgagtgacccagacctctgaccttgacccctgatctctctcatccccagtccagggcctgggctccccagatggaggcagtcagcctcccagccaggccctaagagccaaaccatgggctggtcccacttggagcctgtggccaggaccacctcagcccctgggcctgcactgcctgcaggtgtggcccccttggcctggacctggggcctgaattgtgggaagggtggtttctttctttccttttttttcttttcttttttttttttttttttgtgcttcggagacatcagaattaataacactatttttgattttgaaaaaaaa

SEQ ID NO: 737288 - DNA, 1351 bp, Homo sapiens
ggcggtggacccaaaaagtgtaggcatgagacggtcagagctctttggggtcctgctcagagtcccccaggcagggcagagtctgtatcctgctgccatcttgcaagggaaaaccgcctctccttccaagtattgggtcttggaaaggtgtgtgtttggtgaaagccacttaatggtggtggggtgcagcttttctctaagtgcagttactcactcaggacaaaggaggaaaaggaaggcagaggtcagccagggtagagggtgatgtctgttttccttgggaaacatctgctgatgaactgggtccagggccgtgctaggtctgggaacaatcctctccaggtcttcacacagagtatcaccaatccacaaacagacccgaagtgaactagtttactctgcctacctgtcctttcaatagagcagtctttcccgctcttctgttctgagaatgcacccggaatgggggaaacccagcaagcagcagagagaaaggctcttcccgggagacctgccgcctctagggtggtcagagaatagcagctgggattttggagagggagaggataggtaaagcagcgtattgaagcatttgcggaggggtgtattagtcctcccaccctgagcacaccaggacggggatgcatccttgccttgtgtgcttgtaaaggcttctttcccttggtatagcaacttcaactgcacctgaacctccaacctctgcccagcctctggtgcagggtggatagaggtctagccagcccttacttcctgaagagagctctgtgggaaactcgaggctacagtagcttcccggctcccagctcctaccctacccccaccaaagcagaaacgggagacggcaacgttctggctgccattagacttacgtctccctcccctacgtcccctagcttcccaagacaggaagaaatgtgcaaaaggcccctccggagaaaactattttgccgttcagctgttctttacagaggatgttattttagtgagacccaggtcctagaccttctgattcctatttatttttttaacagactagtctcaaagtacagcacaaaatctcttctctgccttctcttgtgatgttccagagagcatctgtggttgtgatttggaataagtcatatttatttggtttactgtgcctattcagatctctgtatgttgtgtgtgtttctgtgtcctggaattggatgcgtgggactcgttctgtccgcggagtgcactctttttttcagtgtggcccacatatcttgtaaatgtttgctgaagagttgtgtctatatatagagaaaatatatataaacagagaaatatgtgaatctgttttttt

SEQ ID NO: 737289 - DNA, 782 bp, Homo sapiens
ttctatggagaactggcatattgaagttccctgtctcaaaggcagtgattggcacatgtcatctccaaagaaaagatcagtgaaaatcgtgcaagaaacttgctttctctcttcttgtttgctgaactccctaagatgtggaatctgttttgtctatagagcatcttgcaggtagactgttctccaaataacatttgagaaatgctggcttaaattattcttgggttttcattagtaagtagaagtaccataaagtatctaaaactccagtggtgattactggaatgggtgaagagtgaatagggcagggtggtgaagtaggaggaagacaatccttggcattagactctcctggctcctcacttcttagccgagcatcctttggaggttacttcatttctctaaaggtggctttctcaactgcaaaatagcactgcttacgcctaccccgtgaggtgctgtagatcctcagcctgttgaagggttgatatgggcctggcacagagtgagccctgtggatgctctgtatccctgtctctcttcacctgcacatgtaggcttatccaaaatgaggactagaggtaataaaattgcaccatgttgggattcctgctcaatgagtaaattttagccgctcttgtcccaaaaacagcaaaatgggtaattatgtgagataatggatatgttaatttgctttttcatagtaactattttactatctatatgtatcccataacgtcatattgtgtaccttaatatacacaatacactttatttaaaaa

SEQ ID NO: 737290 - DNA, 254 bp, Homo sapiens
tatcctcttcattgtattccttctcatctatgtgacctccataatgggtaatagtggaataatcttactcatcaacacagattccagatttcaaacactcacgtacttttttctacaacatttggcttttgttgatatctgttacacttctgctatcactcccaagatgctccaaagcttcacagaagaaaagaatttgatgttatttcagggctgtgtgatacaattcttagtttatgcaacatttgcaacca

SEQ ID NO: 737291 - DNA, 131 bp, Homo sapiens
cagaaagcccagagtagtccctgaagaagctgaggggcgcatacctctggggtttgggttcccttcagggaagcgaagggagatgacctctttccaggctggggaccaagagggctccctagaagatatta

SEQ ID NO: 737292 - DNA, 557 bp, Homo sapiens
ccaattgtcttgctttggttacctgtatgaatgaagagcacaagttatcatttcttaagaagatatttaatagtgatgaattgatccatttcaggttgaggttattagaagaggcccagttgcaggacttggagaaggccttggttttggccaatccagaagtctccctttggcgtaagcagaaggagctgcagtacttacagggacatcttgtttcgtctgacctctcccctagggtgacagctgtttgtggtgtggtgctgcctgggcagctgccagcccctggagagctgggtggtaataggagttcttcacgtgaacaggagctggcccttaggtcttatgtgctggttgagtctgtctgcaaaagtcttcagaccctggctatggcggttgcttctcagaatgctgtgttgttggaaggaccaataggatgtggcaaaacttccttagttgaatatttagctgcagtgacaggtagaacaaagcctcctcagcttctcaaagtccagcttggagatcagactgacagtaagatgcttttggggatgtatcgc

SEQ ID NO: 737293 - DNA, 883 bp, Homo sapiens; identical to SEQ ID NO: 2992

SEQ ID NO: 737294 - DNA, 1887 bp, Homo sapiens
acccctgagggtgatgggagagacgccccaggggcccagaacccggttccggttctggcttgtgcatatgttgacacagggagcagcatgttggtgtgagtttaacaaatatgctttctcctccccagcattggaggggatgggaacttggagactcacaccacactgcccagtaagtagcagcccagagaggcaccatcactgtggccgtcctccctggggccagggccttcctgctggaggaggggaagaggaggttatctgcaagaagggaagtcagccagccctgaaaagccccagaactcctgtgtcccacccatgtccccaccctgcatgctcatctcagttactgtgagggtcctgcaggctctcacctgtgctcttctcctcctcctcctcctctaaagacattctgaagaagttcaacccttacctccttggcttctctaccagcacctgggaggggacagcaggactaaatgtggcagcggaaggggccagagctagggacatgccagcccaggcctgggacctggtagagcgaatgaaaaacagccccgacatcaacctggagaaagactggaagctggtcacactcttcattggggtcaacgacttgtgtcattactgtgagaatccggaggcccacttggccacggaatatgttcagcacatccaacaggccctggacatcctctctgaggagctcccaagggctttcgtcaacgtggtggaggtcatggagctggctagcctgtaccagggccaaggcgggaaatgtgccatgctggcagctcagaacaactgcacttgcctcagacactcgcaaagctccctggagaagcaagaactgaagaaagtgaactggaacctccagcatggcatctccagtttctcctactggcaccaatacacacagcgtgaggactttgcggttgtggtgcagcctttcttccaaaacacactcaccccactgaacgagagaggggacactgacctcaccttcttctccgaggactgttttcacttctcagaccgcgggcatgccgagatggccatcgcactctggaacaacatgctggaaccagtgggccgcaagactacctccaacaacttcacccacagccgagccaaactcaagtgcccctctcctgagagcccttacctctacaccctgcggaacagccgactgctcccagaccaggctgaagaagcccccgaggtgctctactgggctgtcccagtggcagcgggagtcggccttgtggtgggcatcatcgggacagtggtctggaggtgcaggagaggtggccggagggaagatcctccaatgagcctgcgcactgtggccctctaggcccgggggtgggtcctcaccctaaactccctatagccaccctcttcaccgccctctgccccagccactcccggccaccaggacatgcttcaatgcctggtgccataggaagcccaggggacagtcacaacttcttggggcctgggcttcttccaggcctatgctcctggaatggatacatttaaataaagtccaaagctattttattcctgggtttgcctgcgtgaagcactcaccttccatctcttgtgcagcccaggtgtgggagctgccactttttgtggcctgcctccagcagggctgcccaagccacgaccaaccagagcccaaactgcctgccaccacgagcatatcctcaagtcaccaaacccactatttcaaaggcagaaaaaatgctggtcaccaggtggtggctggaattttggagctggctggttgccattcagtccaatccaacacatacctattaagcaactgttttgtatccaggacaatgcgaagcactgaggtgcctcctaggctgtgcatgt

SEQ ID NO: 737295 - DNA, 2318 bp, Homo sapiens
ttcctggtctctttctagaatctgtattctgcagccaactttgttcaccatctccgcaatgccttggacgtcctgcatagagaggtgcccagagtcctggtcaacctcgtggacttcctgaaccccactatcatgcggcaggtgttcctgggaaacccagacaagtgcccagtgcagcaggccagcgttttgtgtaactgcgttctgaccctgcgggagaactcccaagagctagccaggctggaggccttcagccgagcctaccggagcagcatgcgcgagctggtggggtcaggccgctatgacacgcaggaggacttctctgtggtgctgcagcccttcttccagaacatccagctccctgtcctggcggatgggctcccagatacgtccttctttgccccagactgcatccacccaaatcagaaattccactcccagctggccagagccctttggaccaatatgcttgaaccacttggaagcaaaacagagaccctggacctgagagcagagatgcccatcacctgtcccactcagaatgagcccttcctgagaacccctcggaatagtaactacacgtaccccatcaagccagccattgagaactggggcagtgacttcctgtgtacagagtggaaggcttccaatagtgttccaacctctgtccaccagctccgaccagcagacatcaaagtggtggccgccctgggtgactctctgactacagcagtgggagctcgaccaaacaactccagtgacctacccacatcttggaggggactctcttggagcattggaggggatgggaacttggagactcacaccacactgcccaacattctgaagaagttcaacccttacctccttggcttctctaccagcacctgggaggggacagcaggactaaatgtggcagcggaaggggccagagctagggacatgccagcccaggcctgggacctggtagagcgaatgaaaaacagccccgacatcaacctggagaaagactggaagctggtcacactcttcattggggtcaacgacttgtgtcattactgtgagaatccggaggcccacttggccacggaatatgttcagcacatccaacaggccctggacatcctctctgaggagctcccaagggctttcgtcaacgtggtggaggtcatggagctggctagcctgtaccagggccaaggcgggaaatgtgccatgctggcagctcagaacaactgcacttgcctcagacactcgcaaagctccctggagaagcaagaactgaagaaagtgaactggaacctccagcatggcatctccagtttctcctactggcaccaatacacacagcgtgaggactttgcggttgtggtgcagcctttcttccaaaacacactcaccccactgaacgagagaggggacactgacctcaccttcttctccgaggactgttttcacttctcagaccgcgggcatgccgagatggccatcgcactctggaacaacatgctggaaccagtgggccgcaagactacctccaacaacttcacccacagccgagccaaactcaagtgcccctctcctgagagcccttacctctacaccctgcggaacagccgactgctcccagaccaggctgaagaagcccccgaggtgctctactgggctgtcccagtggcagcgggagtcggccttgtggtgggcatcatcgggacagtggtctggaggtgcaggagaggtggccggagggaagatcctccaatgagcctgcgcactgtggccctctaggcccgggggtgggtcctcaccctaaactccctatagccaccctcttcaccgccctctgccccagccactcccggccaccaggacatgcttcaatgcctggtgccataggaagcccaggggacagtcacaacttcttggggcctgggcttcttccaggcctatgctcctggaatggatacatttaaataaagtccaaagctattttattcctgggtttgcctgcgtgaagcactcaccttccatctcttgtgcagcccaggtgtgggagctgccactttttgtggcctgcctccagcagggctgcccaagccacgaccaaccagagcccaaactgcctgccaccacgagcatatcctcaagtcaccaaacccactatttcaaaggcagaaaaaatgctggtcaccaggtggtggctggaattttggagctggctggttgccattcagtccaatccaacacatacctattaagcaactgttttgtatccaggacaatgcgaagcactgaggtgcctcctaggctgtgcatgt

SEQ ID NO: 737296 - DNA, 2035 bp, Homo sapiens
ttcctggtctctttctagaatctgtattctgcagccaactttgttcaccatctccgcaatgccttggacgtcctgcatagagaggtgcccagagtcctggtcaacctcgtggacttcctgaaccccactatcatgcggcaggtgttcctgggaaacccagacaagtgcccagtgcagcaggccagcttgaaccacttggaagcaaaacagagaccctggacctgagagcagagatgcccatcacctgtcccactcagaatgagcccttcctgagaacccctcggaatagtaactacacgtaccccatcaagccagccattgagaactggggcagtgacttcctgtgtacagagtggaaggcttccaatagtgttccaacctctgtccaccagctccgaccagcagacatcaaagtggtggccgccctgggtgactctctgactacagcagtgggagctcgaccaaacaactccagtgacctacccacatcttggaggggactctcttggagcattggaggggatgggaacttggagactcacaccacactgcccaacattctgaagaagttcaacccttacctccttggcttctctaccagcacctgggaggggacagcaggactaaatgtggcagcggaaggggccagagctagggacatgccagcccaggcctgggacctggtagagcgaatgaaaaacagccccgacatcaacctggagaaagactggaagctggtcacactcttcattggggtcaacgacttgtgtcattactgtgagaatccggaggcccacttggccacggaatatgttcagcacatccaacaggccctggacatcctctctgaggagctcccaagggctttcgtcaacgtggtggaggtcatggagctggctagcctgtaccagggccaaggcgggaaatgtgccatgctggcagctcagaacaactgcacttgcctcagacactcgcaaagctccctggagaagcaagaactgaagaaagtgaactggaacctccagcatggcatctccagtttctcctactggcaccaatacacacagcgtgaggactttgcggttgtggtgcagcctttcttccaaaacacactcaccccactgaacgagagaggggacactgacctcaccttcttctccgaggactgttttcacttctcagaccgcgggcatgccgagatggccatcgcactctggaacaacatgctggaaccagtgggccgcaagactacctccaacaacttcacccacagccgagccaaactcaagtgcccctctcctgagagcccttacctctacaccctgcggaacagccgactgctcccagaccaggctgaagaagcccccgaggtgctctactgggctgtcccagtggcagcgggagtcggccttgtggtgggcatcatcgggacagtggtctggaggtgcaggagaggtggccggagggaagatcctccaatgagcctgcgcactgtggccctctaggcccgggggtgggtcctcaccctaaactccctatagccaccctcttcaccgccctctgccccagccactcccggccaccaggacatgcttcaatgcctggtgccataggaagcccaggggacagtcacaacttcttggggcctgggcttcttccaggcctatgctcctggaatggatacatttaaataaagtccaaagctattttattcctgggtttgcctgcgtgaagcactcaccttccatctcttgtgcagcccaggtgtgggagctgccactttttgtggcctgcctccagcagggctgcccaagccacgaccaaccagagcccaaactgcctgccaccacgagcatatcctcaagtcaccaaacccactatttcaaaggcagaaaaaatgctggtcaccaggtggtggctggaattttggagctggctggttgccattcagtccaatccaacacatacctattaagcaactgttttgtatccaggacaatgcgaagcactgaggtgcctcctaggctgtgcatgt

SEQ ID NO: 737297 - DNA, 496 bp, Homo sapiens
ttcctggtctctttctagaatctgtattctgcagccaactttgttcaccatctccgcaatgccttggacgtcctgcatagagaggtgcccagagtcctggtcaacctcgtggacttcctgaaccccactatcatgcggcaggtgttcctgggaaacccagacaagtgcccagtgcagcaggccagcttgaaccacttggaagcaaaacagagaccctggacctgagagcagagatgcccatcacctgtcccactcagaatgagcccttcctgagaacccctcggaatagtaactacacgtaccccatcaagccagccattgagaactggggcagtgacttcctgtgtacagagtggaaggcttccaatagtgttccaacctctgtccaccagctccgaccagcagacatcaaagtggtggccgccctgggtgactctctgactgtgagtagtgagccatgaaccaggatgggcagctcagagtccagccaggccct

SEQ ID NO: 737298 - DNA, 2471 bp, Homo sapiens
ttcctggtctctttctagaatctgtattctgcagccaactttgttcaccatctccgcaatgccttggacgtcctgcatagagaggtgcccagagtcctggtcaacctcgtggacttcctgaaccccactatcatgcggcaggtgttcctgggaaacccagacaagtgcccagtgcagcaggccagagcagcatgcgcgagctggtggggtcaggccgctatgacacgcaggaggacttctctgtggtgctgcagcccttcttccagaacatccagctccctgtcctggcggatgggctcccagatacgtccttctttgccccagactgcatccacccaaatcagaaattccactcccagctggccagagccctttggaccaatatgcttgaaccacttggaagcaaaacagagaccctggacctgagagcagagatgcccatcacctgtcccactcagaatgagcccttcctgagaacccctcggaatagtaactacacgtaccccatcaagccagccattgagaactggggcagtgacttcctgtgtacagagtggaaggcttccaatagtgttccaacctctgtccaccagctccgaccagcagacatcaaagtggtggccgccctgggtgactctctgactacagcagtgggagctcgaccaaacaactccagtgacctacccacatcttggaggggactctcttggagcattggaggggatgggaacttggagactcacaccacactgcccagtaagtagcagcccagagaggcaccatcactgtggccgtcctccctggggccagggccttcctgctggaggaggggaagaggaggttatctgcaagaagggaagtcagccagccctgaaaagccccagaactcctgtgtcccacccatgtccccaccctgcatgctcatctcagttactgtgagggtcctgcaggctctcacctgtgctcttctcctcctcctcctcctctaaagacattctgaagaagttcaacccttacctccttggcttctctaccagcacctgggaggggacagcaggactaaatgtggcagcggaaggggccagagctagggacatgccagcccaggcctgggacctggtagagcgaatgaaaaacagccccgacatcaacctggagaaagactggaagctggtcacactcttcattggggtcaacgacttgtgtcattactgtgagaatccggaggcccacttggccacggaatatgttcagcacatccaacaggccctggacatcctctctgaggagctcccaagggctttcgtcaacgtggtggaggtcatggagctggctagcctgtaccagggccaaggcgggaaatgtgccatgctggcagctcagaacaactgcacttgcctcagacactcgcaaagctccctggagaagcaagaactgaagaaagtgaactggaacctccagcatggcatctccagtttctcctactggcaccaatacacacagcgtgaggactttgcggttgtggtgcagcctttcttccaaaacacactcaccccactgaacgagagaggggacactgacctcaccttcttctccgaggactgttttcacttctcagaccgcgggcatgccgagatggccatcgcactctggaacaacatgctggaaccagtgggccgcaagactacctccaacaacttcacccacagccgagccaaactcaagtgcccctctcctgagagcccttacctctacaccctgcggaacagccgactgctcccagaccaggctgaagaagcccccgaggtgctctactgggctgtcccagtggcagcgggagtcggccttgtggtgggcatcatcgggacagtggtctggaggtgcaggagaggtggccggagggaagatcctccaatgagcctgcgcactgtggccctctaggcccgggggtgggtcctcaccctaaactccctatagccaccctcttcaccgccctctgccccagccactcccggccaccaggacatgcttcaatgcctggtgccataggaagcccaggggacagtcacaacttcttggggcctgggcttcttccaggcctatgctcctggaatggatacatttaaataaagtccaaagctattttattcctgggtttgcctgcgtgaagcactcaccttccatctcttgtgcagcccaggtgtgggagctgccactttttgtggcctgcctccagcagggctgcccaagccacgaccaaccagagcccaaactgcctgccaccacgagcatatcctcaagtcaccaaacccactatttcaaaggcagaaaaaatgctggtcaccaggtggtggctggaattttggagctggctggttgccattcagtccaatccaacacatacctattaagcaactgttttgtatccaggacaatgcgaagcactgaggtgcctcctaggctgtgcatgt

SEQ ID NO: 737299 - DNA, 2499 bp, Homo sapiens
gtcccctgtcttgatgggctgcatagagaggtgcccagagtcctggtcaacctcgtggacttcctgaaccccactatcatgcggcaggtgttcctgggaaacccagacaagtgcccagtgcagcaggccagcgttttgtgtaactgcgttctgaccctgcgggagaactcccaagagctagccaggctggaggccttcagccgagcctaccggagcagcatgcgcgagctggtggggtcaggccgctatgacacgcaggaggacttctctgtggtgctgcagcccttcttccagaacatccagctccctgtcctggcggatgggctcccagatacgtccttctttgccccagactgcatccacccaaatcagaaattccactcccagctggccagagccctttggaccaatatgcttgaaccacttggaagcaaaacagagaccctggacctgagagcagagatgcccatcacctgtcccactcagaatgagcccttcctgagaacccctcggaatagtaactacacgtaccccatcaagccagccattgagaactggggcagtgacttcctgtgtacagagtggaaggcttccaatagtgttccaacctctgtccaccagctccgaccagcagacatcaaagtggtggccgccctgggtgactctctgactacagcagtgggagctcgaccaaacaactccagtgacctacccacatcttggaggggactctcttggagcattggaggggatgggaacttggagactcacaccacactgcccagtaagtagcagcccagagaggcaccatcactgtggccgtcctccctggggccagggccttcctgctggaggaggggaagaggaggttatctgcaagaagggaagtcagccagccctgaaaagccccagaactcctgtgtcccacccatgtccccaccctgcatgctcatctcagttactgtgagggtcctgcaggctctcacctgtgctcttctcctcctcctcctcctctaaagacattctgaagaagttcaacccttacctccttggcttctctaccagcacctgggaggggacagcaggactaaatgtggcagcggaaggggccagagctagggacatgccagcccaggcctgggacctggtagagcgaatgaaaaacagccccgacatcaacctggagaaagactggaagctggtcacactcttcattggggtcaacgacttgtgtcattactgtgagaatccggaggcccacttggccacggaatatgttcagcacatccaacaggccctggacatcctctctgaggagctcccaagggctttcgtcaacgtggtggaggtcatggagctggctagcctgtaccagggccaaggcgggaaatgtgccatgctggcagctcagaacaactgcacttgcctcagacactcgcaaagctccctggagaagcaagaactgaagaaagtgaactggaacctccagcatggcatctccagtttctcctactggcaccaatacacacagcgtgaggactttgcggttgtggtgcagcctttcttccaaaacacactcaccccactgaacgagagaggggacactgacctcaccttcttctccgaggactgttttcacttctcagaccgcgggcatgccgagatggccatcgcactctggaacaacatgctggaaccagtgggccgcaagactacctccaacaacttcacccacagccgagccaaactcaagtgcccctctcctgagagcccttacctctacaccctgcggaacagccgactgctcccagaccaggctgaagaagcccccgaggtgctctactgggctgtcccagtggcagcgggagtcggccttgtggtgggcatcatcgggacagtggtctggaggtgcaggagaggtggccggagggaagatcctccaatgagcctgcgcactgtggccctctaggcccgggggtgggtcctcaccctaaactccctatagccaccctcttcaccgccctctgccccagccactcccggccaccaggacatgcttcaatgcctggtgccataggaagcccaggggacagtcacaacttcttggggcctgggcttcttccaggcctatgctcctggaatggatacatttaaataaagtccaaagctattttattcctgggtttgcctgcgtgaagcactcaccttccatctcttgtgcagcccaggtgtgggagctgccactttttgtggcctgcctccagcagggctgcccaagccacgaccaaccagagcccaaactgcctgccaccacgagcatatcctcaagtcaccaaacccactatttcaaaggcagaaaaaatgctggtcaccaggtggtggctggaattttggagctggctggttgccattcagtccaatccaacacatacctattaagcaactgttttgtatccaggacaatgcgaagcactgaggtgcctcctaggctgtgcatgt

SEQ ID NO: 737300 - DNA, 820 bp, Homo sapiens; identical to SEQ ID NO: 44448

SEQ ID NO: 737301 - DNA, 1039 bp, Homo sapiens
tcagggtcaccgaaaagacagtgataagtcccggagccgcaaagatgatgacagcttgtctgaggcctctcattcaaaaaagactgttaaaaaggtggtggtagtggaacaaaatggttcttttcaagtaaagattcccaaaaattttgtttgtgaacactgctttggagcctttcggagcagttaccacctaaagaggcacatccttattcacactggtgagaagccatttgaatgcgatatatgtgatatgcgtttcatccagaagtaccacctggaacgccacaagcgtgtgcacagtggtgaaaagccttaccagtgtgaacggtgtcatcaggtaaggctcatccctgctacaataccccacacacacttttccttccccaagaatcagggccaccctccactcctgcctgacaaaagagccaccagcgttactcgccataatagttaacacatcggggtgaagtgcatctgtctggccttatgcagctgatcatggggagcagcaattagaacattgtaataataataataatagcattccatatcacttactctatgccaggcactgtgagagcatactttacatagatgattttatttaatcctcacattgactccctaaggtagctgtattgtccttatttcacgtatgggaaaattgagattcagagaagttaagtttcccagggacaccgcagatcacgaacagagctgggattcagtccaacttcagagctaatgcactttggaggaagagatacaatctttgccctgggggtcagtatctgatctgatgagaatgtaagagctggggccaaaacaagacaagaacaagagatgagaaatgataatagctaacacttcctggatgcattgctaggtcccaagctttgctctgcactcttacactgaatcttcagacgctagaataaaagctccatgagggcagagactttgttcctctggttctctactctgtatctgccttgagatagatactcaataaatctttgatgaataaagcagctgtgct

SEQ ID NO: 737302 - DNA, 3707 bp, Homo sapiens
tcagggtcaccgaaaagacagtgataagtcccggagccgcaaagatgatgacagcttgtctgaggcctctcattcaaaaaagactgttaaaaaggtggtggtagtggaacaaaatggttcttttcaagtaaagattcccaaaaattttgtttgtgaacactgctttggagcctttcggagcagttaccacctaaagaggcacatccttattcacactggtgagaagccatttgaatgcgatatatgtgatatgcgtttcatccagaagtaccacctggaacgccacaagcgtgtgcacagtggtgaaaagccttaccagtgtgaacggtgtcatcagtgtttttctcggacagatcgattactcagacacaaacggatgtgccaagggtgccagtccaagacttccgacgggcagttttctctataggcgcaaggggccccgggtggtgggagtgatcagaagaacctgccgaagagcacaccccctctggtctgatggtcccaccaccgccccatgtgaacctgtcccactcctggaggagtggacccaggagaccagaagagtgcatcaggggacagtggccccagaacctcagctctgtaaataatctgagactatgagtatctcggggaagttcttacagcattcctgggtaggggagctagtccctggacccttggctgaggtcataggtggggactcaaggtacaggaccaagactgaagtgtggctcccacaaccttggactccagctggcagctgaaatggaaaagattggggaaggggatttgtttgttctgttcttgtttttgtttatccaaaagcaacttcagcgggtaaactgtggatacaggtaatccagaggcataagagtcctggtccaaagtagggactatagctggtccagctctccccaaaaattgggtttttagttgcagtagctcctcagtgtttcacaatcctgcacttcgcctcctttttgaggaagaataaggtcaggaatggcagctgagcttactttggcttccttatacactgtagggacaaaaggaaaaacggggtggagcagacaagggctggatccaaaaagtggatggcacctcttccttcctcaagggaaaaggaagagttgtgccagtgggtgttgtcatggcccatgtcacattggcacctgatggcatcagctcaaatgcctttaggaggaaacttgggtgagagtggcccatgaagcccttttcttctttttttggggagtcggtcttggagatggtatgtggctacctcgctgccattgactcctaaagtgagacagatgtgttgagcaaggagtcatggaagtcaaagtgggttctctctccttgtgccctcttaggaacaacccaagactggtcccaagttggctaacagctgctcaagaaacaaaggaatctggggtcttctgacatgcctgttgagcagtaggagctgttctccctccccaagtcctatcactgtattcaggtagaggaggtagggaggggtctgtcctttggtcccaaaaaacaagatctcggcttgcttcctgatggccatccctacccaacagagtgtgggggatgggggtgggggtgctgcagagaaaagactaaagaagaaacctaatgtaggttccattcttaaccatattctttgctcctctctgctccaataccaccaccttgtccactcccaaaaaagtaatcgggtgtgtgtgtgtgtgtgagagagagtgtgtgtgagatatgaatgcatgtatttgtatgcttgcaggagatggcatattattgagccaaacccttctctggccctcaccttcagggaggatgagtggaaaatagcctcctcttgcccaaacatgaagggtgcttgaggtctcagcaggagctgaagaacacaatttggggaacagaagggcttttgttttggagggtttttttttttaagatgaattcaacagcctggtggttaggatgtttctaacccaagccagggcttgtgaacatgaattttctaaggtgaaataaaccttttctttctgctaaagaaagaatccttatgggaagttttggggtttggttgacccccactgtaacctgacctgacctgtggcgggtacgggaactgtcttagtaatcatggagactggctgaacctgagtgccaagctgtcagtagggtctgagatgggaaactcctgaaagtatgatttcatttcccagaaaatgtaaagaatggataccagcaatgattcctggctgttacctattctggaggggtggggttggggagggggttgtccatacctctgtggtatgagtatttcagggaaaaagaaagcaggcatggcacccattcgattttccctgacagcatctgagatccttttggggagacgctgaggagtgtttgctgccatgtactcttacagctctatgctgacactcccatttgatgtggtccagaacttagacctcagtccttggatcagccctgtggtccctgcaagcaggggcatctttctgcatgtgagccagcccccttcctgttcaagggttctgctggatctgggcttttcctgtccttcacttctgggatgattcaccccacatcttccagtaccctgtaaaccattttaaaatatttagaaaactatcctcccaaaaatgcttttgaaaatgagagccctctgtccctgccacttacagctagtctctttgggataggggtgtatgtggagagattcatgtaagtctcacatgagtgacctgtgcccctatgtgtactaatgtgtgtactgggtcagaaggtgccctgggttcccacagaccttggtttcctgcctgggtgggtgggagggagggaacttcagagagtatgtgcgaacagccatagcagagccacccctgccaaggacccagtgagggaaactcaggagcaggtggttggttcagttcccgcgctgatgtctggggcagtgcatgtgtgagaagagaggcgcaaagcagtgaaaggagtgatttggcatccagagggcccgggagccccacggataccccagggaagccactgactcacaccgctgcagaggctcctgggcccaatgcccgacccctgctggccagcatggggcctagcactggaagatgcctcaggtgtgtttggagtgggggaaacggaagtagggcacgctctcagagaccaggatagagagtcagggaacctgggaaagagtagtgccagttccgggtaggctgctgcaccaggccctaccagctcaggctataaacagtctgctttgccccaagtcttttccgtccacccccaacagccttgtcatcacttagctactgatcacgcccatggcttgacattggagggttacattagtggagtccgccacagcttcgaaccctctccccagatgccctttgcctctgctgtggccctggggttttatcaactgtccccttcctatcctcctctccaccctgttttttgttttttttttttttaaataatattttgctatgggggaggggaatatcaaatggacaagatcacttttaaatggtagtttttataagatgttataaacttgtatctttttaccattaaagtgcagtgtatgttccttcgtgatatatttaggatatttaaataaaaggaaaatggggcttttctacatacta

SEQ ID NO: 737303 - DNA, 2772 bp, Homo sapiens
tcagggtcaccgaaaagacagtgataagtcccggagccgcaaagatgatgacagcttgtctgaggcctctcattcaaaaaagactgttaaaaaggtggtggtagtggaacaaaatggttcttttcaagtaaagattcccaaaaattttgtttgtgaacactgctttggagcctttcggagcagttaccacctaaagaggcacatccttattcacactggtgagaagccatttgaatgcgatatatgtgatatgcgtttcatccagaagtaccacctggaacgccacaagcgtgtgcacagtggtgaaaagccttaccagtgtgaacggtgtcatcagtgtttttctcggacagatcgattactcagacacaaacggatgtgccaagggtgccagtccaagacttccgacgggcagttttctctataggcgcaaggggccccgggtggtgggagtgatcagaagaacctgccgaagagcacaccccctctggtctgatggtcccaccaccgccccatgtgaacctgtcccactcctggaggagtggacccaggagaccagaagagtgcatcaggggacagtggccccagaacctcagctctgtaaataatctgagactatgagtatctcggggaagttcttacagcattcctgggtaggggagctagtccctggacccttggctgaggtcataggtggggactcaaggtacaggaccaagactgaagtgtggctcccacaaccttggactccagctggcagctgaaatggaaaagattggggaaggggatttgtttgttctgttcttgtttttgtttatccaaaagcaacttcagcgggtaaactgtggatacaggtaatccagaggcataagagtcctggtccaaagtagggactatagctggtccagctctccccaaaaattgggtttttagttgcagtagctcctcagtgtttcacaatcctgcacttcgcctcctttttgaggaagaataaggtcaggaatggcagctgagcttactttggcttccttatacactgtagggacaaaaggaaaaacggggtggagcagacaagggctggatccaaaaagtggatggcacctcttccttcctcaagggaaaaggaagagttgtgccagtgggtgttgtcatggcccatgtcacattggcacctgatggcatcagctcaaatgcctttaggaggaaacttgggtgagagtggcccatgaagcccttttcttctttttttggggagtcggtcttggagatggtatgtggctacctcgctgccattgactcctaaagtgagacagatgtgttgagcaaggagtcatggaagtcaaagtgggttctctctccttgtgccctcttaggaacaacccaagactggtcccaagttggctaacagctgctcaagaaacaaaggaatctggggtcttctgacatgcctgttgagcagtaggagctgttctccctccccaagtcctatcactgtattcaggtagaggaggtagggaggggtctgtcctttggtcccaaaaaacaagatctcggcttgcttcctgatggccatccctacccaacagagtgtgggggatgggggtgggggtgctgcagagaaaagactaaagaagaaacctaatgtaggttccattcttaaccatattctttgctcctctctgctccaataccaccaccttgtccactcccaaaaaagtaatcgggtgtgtgtgtgtgtgtgagagagagtgtgtgtgagatatgaatgcatgtatttgtatgcttgcaggagatggcatattattgagccaaacccttctctggccctcaccttcagggaggatgagtggaaaatagcctcctcttgcccaaacatgaagggtgcttgaggtctcagcaggagctgaagaacacaatttggggaacagaagggcttttgttttggagggtttttttttttaagatgaattcaacagcctggtggttaggatgtttctaacccaagccagggcttgtgaacatgaattttctaaggtgaaataaaccttttctttctgctaaagaaagaatccttatgggaagttttggggtttggttgacccccactgtaacctgacctgacctgtggcgggtacgggaactgtcttagtaatcatggagactggctgaacctgagtgccaagctgtcagtagggtctgagatgggaaactcctgaaagtatgatttcatttcccagaaaatgtaaagaatggataccagcaatgattcctggctgttacctattctggaggggtggggttggggagggggttgtccatacctctgtggtatgagtatttcagggaaaaagaaagcaggcatggcacccattcgattttccctgacagcatctgagatccttttggggagacgctgaggagtgtttgctgccatgtactcttacagctctatgctgacactcccatttgatgtggtccagaacttagacctcagtccttggatcagcccctttgcctctgctgtggccctggggttttatcaactgtccccttcctatcctcctctccaccctgttttttgttttttttttttttaaataatattttgctatgggggaggggaatatcaaatggacaagatcacttttaaatggtagtttttataagatgttataaacttgtatctttttaccattaaagtgcagtgtatgttccttcgtgatatatttaggatatttaaataaaaggaaaatggggcttttctacatacta

SEQ ID NO: 737304 - DNA, 1595 bp, Homo sapiens
tcagggtcaccgaaaagacagtgataagtcccggagccgcaaagatgatgacagcttgtctgaggcctctcattcaaaaaagactgttaaaaaggtggtggtagtggaacaaaatggttcttttcaagtaaagattcccaaaaattttgtttgtgaacactgctttggagcctttcggagcagttaccacctaaagaggcacatccttattcacactggtgagaagccatttgaatgcgatatatgtgatatgcgtttcatccagaagtaccacctggaacgccacaagcgtgtgcacagtggtgaaaagccttaccagtgtgaacggtgtcatcagtgtttttctcggacagatcgattactcagacacaaacggatgtgccaagggtgccagtccaagacttccgacgggcagttttctctataggcgcaaggggccccgggtggtgggagtgatcagaagaacctgccgaagagcacaccccctctggtctgatggtcccaccaccgccccatgtgaacctgtcccactcctggaggagtggacccaggagaccagaagagtgcatcaggggacagtggccccagaacctcagctctgtaaataatctgagactatgagtatctcggggaagttcttacagcattcctgggtaggggagctagtccctggacccttggctgaggtcataggtggggactcaaggtacaggaccaagactgaagtgtggctcccacaaccttggactccagctggcagctgaaatggaaaagattggggaaggggatttgtttgttctgttcttgtttttgtttatccaaaagcaacttcagcgggtaaactgtggatacaggtaatccagaggcataagagtcctggtccaaagtagggactatagctggtccagctctccccaaaaattgggtttttagttgcagtagctcctcagtgtttcacaatcctgcacttcgcctcctttttgaggaagaataaggtcaggaatggcagctgagcttactttggcttccttatacactgtagggacaaaaggaaaaacggggtggagcagacaagggctggatccaaaaagtggatggcacctcttccttcctcaagggaaaaggaagagttgtgccagtgggtgttgtcatggcccatgtcacattggcacctgatggcatcagctcaaatgcctttaggaggaaacttgggtgagagtggcccatgaagcccttttcttctttttttggggagtcggtcttggagatggtatgtggctacctcgctgccattgactcctaaagtgagacagatgtgttgagcaaggagtcatggaagtcaaagtgggttctctctccttgtgccctcttaggaacaacccaagactggtcccaagttggctaacagctgctcaagaaacaaaggaatctggggtcttctgacatgcctgttgagcagtaggagctgttctccctccccaagtcctatcactgtattcaggtagaggaggtagggaggggtctgtcctttggtcccaaaaaacaagatctcggcttgcttcctttattggacgttttttccaaaaatacatgtt

SEQ ID NO: 737305 - DNA, 2934 bp, Homo sapiens
tcagggtcaccgaaaagacagtgataagtcccggagccgcaaagatgatgacagcttgtctgaggcctctcattcaaaaaagactgttaaaaaggtggtggtagtggaacaaaatggttcttttcaagtaaagattcccaaaaattttgtttgtgaacactgctttggagcctttcggagcagttaccacctaaagaggcacatccttattcacactggtgagaagccatttgaatgcgatatatgtgatatgcgtttcatccagaagtaccacctggaacgccacaagcgtgtgcacagtggtgaaaagccttaccagtgtgaacggtgtcatcagtgtttttctcggacagatcgattactcagacacaaacggatgtgccaagggtgccagtccaagacttccgacgggcagttttctctataggcgcaaggggccccgggtggtgggagtgatcagaagaacctgccgaagagcacaccccctctggtctgatggtcccaccaccgccccatgtgaacctgtcccactcctggaggagtggacccaggagaccagaagagtgcatcaggggacagtggccccagaacctcagctctgaacaacccaagactggtcccaagttggctaacagctgctcaagaaacaaaggaatctggggtcttctgacatgcctgttgagcagtaggagctgttctccctccccaagtcctatcactgtattcaggtagaggaggtagggaggggtctgtcctttggtcccaaaaaacaagatctcggcttgcttcctgatggccatccctacccaacagagtgtgggggatgggggtgggggtgctgcagagaaaagactaaagaagaaacctaatgtaggttccattcttaaccatattctttgctcctctctgctccaataccaccaccttgtccactcccaaaaaagtaatcgggtgtgtgtgtgtgtgtgagagagagtgtgtgtgagatatgaatgcatgtatttgtatgcttgcaggagatggcatattattgagccaaacccttctctggccctcaccttcagggaggatgagtggaaaatagcctcctcttgcccaaacatgaagggtgcttgaggtctcagcaggagctgaagaacacaatttggggaacagaagggcttttgttttggagggtttttttttttaagatgaattcaacagcctggtggttaggatgtttctaacccaagccagggcttgtgaacatgaattttctaaggtgaaataaaccttttctttctgctaaagaaagaatccttatgggaagttttggggtttggttgacccccactgtaacctgacctgacctgtggcgggtacgggaactgtcttagtaatcatggagactggctgaacctgagtgccaagctgtcagtagggtctgagatgggaaactcctgaaagtatgatttcatttcccagaaaatgtaaagaatggataccagcaatgattcctggctgttacctattctggaggggtggggttggggagggggttgtccatacctctgtggtatgagtatttcagggaaaaagaaagcaggcatggcacccattcgattttccctgacagcatctgagatccttttggggagacgctgaggagtgtttgctgccatgtactcttacagctctatgctgacactcccatttgatgtggtccagaacttagacctcagtccttggatcagccctgtggtccctgcaagcaggggcatctttctgcatgtgagccagcccccttcctgttcaagggttctgctggatctgggcttttcctgtccttcacttctgggatgattcaccccacatcttccagtaccctgtaaaccattttaaaatatttagaaaactatcctcccaaaaatgcttttgaaaatgagagccctctgtccctgccacttacagctagtctctttgggataggggtgtatgtggagagattcatgtaagtctcacatgagtgacctgtgcccctatgtgtactaatgtgtgtactgggtcagaaggtgccctgggttcccacagaccttggtttcctgcctgggtgggtgggagggagggaacttcagagagtatgtgcgaacagccatagcagagccacccctgccaaggacccagtgagggaaactcaggagcaggtggttggttcagttcccgcgctgatgtctggggcagtgcatgtgtgagaagagaggcgcaaagcagtgaaaggagtgatttggcatccagagggcccgggagccccacggataccccagggaagccactgactcacaccgctgcagaggctcctgggcccaatgcccgacccctgctggccagcatggggcctagcactggaagatgcctcaggtgtgtttggagtgggggaaacggaagtagggcacgctctcagagaccaggatagagagtcagggaacctgggaaagagtagtgccagttccgggtaggctgctgcaccaggccctaccagctcaggctataaacagtctgctttgccccaagtcttttccgtccacccccaacagccttgtcatcacttagctactgatcacgcccatggcttgacattggagggttacattagtggagtccgccacagcttcgaaccctctccccagatgccctttgcctctgctgtggccctggggttttatcaactgtccccttcctatcctcctctccaccctgttttttgttttttttttttttaaataatattttgctatgggggaggggaatatcaaatggacaagatcacttttaaatggtagtttttataagatgttataaacttgtatctttttaccattaaagtgcagtgtatgttccttcgtgatatatttaggatatttaaataaaaggaaaatggggcttttctacatacta

SEQ ID NO: 737306 - DNA, 1424 bp, Homo sapiens
  misc_feature (1424)..(1424): n is a, c, g, or t
cacacactgagccctgtgctctttcctctgcccaaatggcccttccctcagacatctagatgtccatcctccttccctcagtctgcctctcggagcagtcttcccgaccactacaacgatgcctccccaaccccggcctgcgtcactccccacgcccaccctgctttgcagcatcgctccctggctgacattacatcatgcatttatttctttgcttattgtctccctcccctccatgagggcaggaaccttcatctgtcttgttgacagtagcatccctagaacctagctcaggcctgactcacagtgtgtgctcagtccacatttgggaaaccaatggagagatgaatggcacagagatgcgctcaggaacccagttccctgacctcccatccaggctgcacccctcaggagtctaggttcctgctgattggtagagttcaggacccagggctggaaagtgtccacccacagggcagatgggccaaggccacgtgctcaaggtgtgcagggctaggagagggggtcagccccagctcccatatgaggggcatgtgcctcgccttgcccctgctttggctagagggtaccctgttcaccagagatgagcccaggctctccccgggcccggctctggctttaccccagagccctccaactcgcagacctccaggcaaggagggctggggacccacccgtaccagccatttgccttttctccagtaacagagcccagaggggtccctgcctgggcccaaaatcacacagcagattggggtagagccggagaggacccgagactcctgtgccagcctgggcatcccctccactgccagggaaggactgcatccaagtcgcatccgtacccaggccgaggtgtccgaggcccaggctgaaatccggttgctgctgcagagaccaagtttccaaggccttgtcaagtgggctgtgccagacgatccccaggcctgtcattggctgctcttcggctcggacacaccaaacctcaccaagcacttccatttcagctgggagactccgggaacctccaaccctgctgagcctccacttcgacatccgtgaaacagccatgaataagcaggtctcaaaggtcgactcctgtatgcagggacacagcatgcagtaggtgcccaatcataacagcagcacccacctggagccccttatagcagcccttctcctctgcacttccacatggcatctcatttaaccttcaccacaacccaactaggaaggcaccatcattatcccattttactgatgaagaaactgaggcccaggaaggtgaatttaccagccagctcacaaatggactagtagatggcagtttgtggattggagcccagaggctgtgctcctgcccacaccctctcaaatgagggctataaaataacactctaagn

SEQ ID NO: 737307 - DNA, 795 bp, Homo sapiens
cacacactgagccctgtgctctttcctctgcccaaatggcccttccctcagacatctagatgtccatcctccttccctcagtctgcctctcggagcagtcttcccgaccactacaacgatgcctccccaaccccggcctgcgtcactccccacgcccaccctgctttgcagcatcgctccctggctgacattacatcatgcatttatttctttgcttattgtctccctcccctccatgagggcaggaaccttcatctgtcttgttgacagtagcatccctagaacctagctcaggcctgactcacagtgtgtgctcagtccacatttgggaaaccaatggagagatgaatggcacagagatgcgctcaggaacccagttccctgacctcccatccaggctgcacccctcaggagtctaggttcctgctgattggtagagttcaggacccagggctggaaagtgtccacccacagggcagatgggccaaggccacgtgctcaaggtgtgcagggctaggagagggggtcagccccagctcccatatgaggggcatgtgcctcgccttgcccctgctttggctagagggtaccctgttcaccagagatgagcccaggctctccccgggcccggctctggctttaccccagagccctccaactcgcagacctccaggcaaggagggctggggacccacccggtggaaggatctgttaagcccaggaagttgaggctgcagtgagttatcatcccaccactgcacttcagcctgggcaatggagcaacaccctgtctca

SEQ ID NO: 737308 - DNA, 542 bp, Homo sapiens
cagtgcgagcccctggcagaccagggccaggtcttgtttatttctgtatccctggtttccagggaggtggctggcatgggggtggctggcatgggggtggggtggagatcaagaaatgtgggagaggaaggaagagtatgagtggaaagctctaaactcagccttaagggcaggccaaggccaagtccctccggactctaaagggctcccagagaaagcaaacctcctacagtacgccagacctcctgccgcgcctgagcccgccagtccaatgaagaggccagagccctcgctgctggcgaagagggaggctccaatcggccaccacgtcatgtcccggcctgccaggaagtagccattcaccgtgttcctactggcccgacaagaggaccatatgcccacggccacattcagagcaaaatacacagtgatgacgatgatgtcagccacgctcagctgcgtcccgggagtgtggaggtcgctggtggagttggcggccatggctgtcctgccgcaggcactaggtatgagcccgagggact

SEQ ID NO: 737309 - DNA, 671 bp, Homo sapiens
cagtgcgagcccctggcagaccagggccaggtcttgtttatttctgtatccctggtttccagggaggtggctggcatgggggtggctggcatgggggtggggtggagatcaagaaatgtgggagaggaaggaagagtatgagtggaaagctctaaactcagccttaagggcaggccaaggccaagtccctccggactctaaagggctcccagagaaagcaaacctcctacagtacgccaagggcatctggcgaagactgcggtactcaggtaaggtgacgatctctgaggagatgtagatgggcacgaacacccatgccagtgccagcagcacgtacgtggcattccactcgaagcctgccacggccagacctcctgccgcgcctgagcccgccagtccaatgaagaggccagagccctcgctgctggcgaagagggaggctccaatcggccaccacgtcatgtcccggcctgccaggaagtagccattcaccgtgttcctactggcccgacaagaggaccatatgcccacggccacattcagagcaaaatacacagtgatgacgatgatgtcagccacgctcagctgcgtcccgggagtgtggaggtcgctggtggagttggcggccatggctgtcctgccgcaggcactaggtatgagcccgagggact

SEQ ID NO: 737310 - DNA, 456 bp, Homo sapiens
cagtgcgagcccctggcagaccagggccaggtcttgtttatttctgtatccctggtttccagggaggtggctggcatgggggtggctggcatgggggtggggtggagatcaagaaatgtgggagaggaaggaagagtatgagtggaaagctctaaactcagccttaagggcaggccaaggccaagtccctccggactctaaagggctcccagagaaagcaaacctcctacagtacgccaagggcatctggcgaagactgcggtacggggtttgctgctggccactcctgagacctgcccacacgaaggatgagacactctgggaatcccctcagagtcacctagcaacaccagtgcagatagaggccaggctgaggctgccgaggggatgccccaggagaggagagggcgggtcagatgctgcatgagacccccaccggggccccgtgggggctct

SEQ ID NO: 737311 - DNA, 584 bp, Homo sapiens
attatgtgaattatatatctcctgcaaatatcgaatacttgagtcatgtgttaaactcgatgcttcatatttcataatctcttctaacattctcctggacttcaaagtagcagcgtctatcatatttggttttgatgattcatcaggattataagtgagttggattgcttttatcagctgtttgacttctgatgttttgttttcaacttgatgtaagatgtcttccaaagactgtagatccttgtctactttggtttgataagtagacaggaaatctgcaatgccacaggtagttggacaataactaccgaatctttcatctaagatgcagcagttgtctctggtagcaacatatgctacacatgttgaagagagaaataaaagagcatagaagtagagaattaaattccgggggtgcaaggaccaactcatgatgtctgagtgcccggagctccgagccttgcggggccattgtgaggttgggggaagacctggccgtggagctacaagcttgtgcggatgtcaggggacattactgttgctaataaagtccaaagtggccaatgcctttcccaaaaaaaaaa

SEQ ID NO: 737312 - DNA, 699 bp, Homo sapiens
gaacttagggaagttgctcgctgtgtgaccttggggaagttgctgcacctctccagggtcacacagcgaggaacttagagctggtgcccaccgacctctgtgccctgacagacctggtctgtcctccacccaccctccctgagctccaaagacccagcaggagtctgtctgcaccagtgtcctgcccctcccaagctcagcttgactctggttcctgtctgctgccgaacaggttgttccacccctccttttcacagatgggcaaactgaggccagagaggggccatgcctgatggagatcgcccagcgggcagttagcacccaggtgggtccacacgtccacaagccctggttggggtggtggagggggtgtcctagggctcctgcccccaccccagccttgtttttcctctctgggctgacactgttacctttgctgctgctgctgctgctgctgctgctgctgctgccgccaccaggccagaaaaactcgctgggcaggactggctgctgccagcattaggcctgacttggtccttggggcttttctgacagcccaggggtcagcctagccccttgttcccctgggtaggtggatgtaggggtcacacagagagacaaagatactcatgattgctcagtgagagactcacacataacagtcactccacacagtgggagacacacacagacacacac

SEQ ID NO: 737313 - DNA, 5697 bp, Homo sapiens
  misc_feature (2195)..(2195): n is a, c, g, or t
  misc_feature (2578)..(2578): n is a, c, g, or t
gtctcagaccaaaggcccccttatctgctccccagagcctgacgtccccccactgaattgtcacccctgagctgtctaaatgcgagggaccctaggtgaccactggtggctgtgctcaggccgggtcccccgaccttcaccccaaggctcagtgcgtggcatatcctgaacatggaggatgaccagaactggtacaaggccgagctccggggtgtcgagggatttattcccaagaactacatccgcgtcaagccccatccgtggtactcgggcaggatttcccggcagctggccgaagagattctgatgaagcggaaccatctgggagccttcctgatccgggagagtgagagctccccaggggagttctctgtgtctgtgaactatggagaccaggtgcagcacttcaaggtgctgcgtgaggcctcggggaagtacttcctgtgggaggagaagttcaactccctcaacgagctggtcgacttctaccgcaccaccaccatcgccaagaagcggcagatcttcctgcgcgacgaggagcccttgctcaagtcacctggggcctgctttgcccaggcccagtttgacttctcagcccaggacccctcgcagctcagcttccgccgtggcgacatcattgaggtcctggagcgcccagacccccactggtggcggggccggtcctgcgggcgcgttggcttcttcccacggagttacgtgcagcccgtgcacctgtgagcagcccggcggccgatctggccaacgggcctttttacaggaactgaggtccagagaggacatggacacccccagctctgtcagagtcacacggggctcagtggacggccttggactgaacgtgggctcctaactgcctccggccgctctgcacaaactgggatggcccaggtcccccagcaagggtacccagcaagggtagctccggggcttcctggctggttgctttccattggctgccagctgtgtgacaccacagggcggagtctgtggaggccccgcccacctcctcttgtcaatggccccatctgccaggaaggttgaggactcccaggtttcacccactggaggctcaacctaaggaaccctggccatggtgggtgggttcaccttgggctgaccacccactgggcctgcctgcccctccctcaaaaggcccctggagttgttcaggctgttgggaggtggctcagcctcgaaggacagactgcacacctgttgacctaaactcactggacagactccaggtggacaccaactcctcaacagccccatgactttcagctccccctggggcacccagcaccccaccacagggctagaaggccctaagacccctgaaaaaggggcgggcagtagggaaggtggaggcacactcctcttctgttggacaggtgagctctgagggcaagccctgggcccagccacgcagagaccctggctgccctggctcttgtttgtttaggcccaggttctgcccagaccggggcccagcagagctctcaggaggctgagaaacctccagggcagacagaaagttggggccagagctaggttttagagatcctacaggatcccacatgggacggctacctaggtggggcacggcccctacccgagaacaggagggtcctccagagaatgtgccatgatcagggatatgagcagggcctgcccagagcctgggcacctttgggagagggaaaagtgaggtgggacttggaaaggctttgaacgccaggctgatggttgagggatggtgggcagggagggagggcgaagaggctccctctggcatttgggagccggtgggtggagggaggagcccttggaggtggctgcagtcccttaatggggggccttgctctgggcatgtggggctcttcctccatccagagctggcccaagacccttagaaccctgagtgctggcaaatctcactgctcctgacccagcctgtgtattcaaaacgaaaacagtaaaaccaacatcaggatgtccgtcagaaatctaattttccttccaatgctgactgctttggtgctgtttttgaaatgtcacattattttctcccatttcccccctaatttttcagggctcccgctttgctggcttggccagttcttgggcaccgagctgctgtgcagctgtgaggggaatctgcccctcttggggcntcgggatccccatgagggaaatgggtggacctgaggactcagagctcctgcctttctgtccaggatggcagtgtcaggcgaagtaggcataaaagaatatgttgacacacatgaggaggatggcattgaagccacagacacgggcccagaaggcgtgtttctggggtgtttggccatcacctgctttagttcccaagggcacatcctgagccagggtccaccaggtaaggttctcaatctggacactctgtgggggtggggtcagcaggcttccagccaccacaacagcaccactgagtgcaaagagggcgacagcgaagtgcaggtagtggatgctccccaggacggctggccgcgtgtctggctctccgcacggtggggcngggttcaggaattccaggaccagcctcgtggcccccaccaccagccctgctatcaggccccagaaggccccctgctcgttggcacgtcgccagaagacgcccaggacaaagactgcagtcactggtggggccagggagctggtcactgactgcatgtagatgaagagttgcccgctgttggagtcctgcaggacggggatccaggccacactcacgccgatgagtgccactatgaccagccgtcccaccagcaggagctcccgctcgccggagcggggacgcagccgcctccagatgtccatagtgaagagggtgctgctgctgttgaagatggaggtcagcgacgacatgagcgccgccagcatcactgcgatcatcagcccccgcagaccgatgggcatcagttccatgaccagcttggggtaggcgatgttggagcagccgacctcggccccgcaggcccgcaggcactcggacggcaccacgcagcccacatcatctgttcgagagacggacacttggtgtctctcctcatagacatgagcacctgggaacaatgcgcggctgatcatgcccggcatgatgatcaggcccatggggagcatcttgaggtagctggccaggatggagcccgccttggcatggttcaggtcccgggctgacagtgatcgctgcacgatgacctggtcggtgcaccagtaccaggtggccatgatggtcaggccaaaggtcatcccggtccacggcaggtcccctgtgtgggggtctcgaaacatgtgcatggcgtctgtacgtggcaggtggcaggtggtgttggcaatggtcctggagggaatggcctgggcgtaggctgcctccagctgcccgtaaccaccgatctggtcaaaagctggaggggtcagggtggaacagggacagtttggtggttgcggggccctgactccctgggctcccccctgccttcatctcacaagaaacttcctgatgcatcaaacttgagttttttccacctcatctttcccagtgtttggaaaggtgtgagggtagagggttgtttttttttttaaggtgtatttgaatgactattttattcgtatttaaaataatactattaagtaagcattttgcacatgggcaccccagtgtcccgctggcccagcaggagtcactgttggcctctggacactcatcggccttgggcaagtggttctcagccaggtttccgattgtcgattcaaggaagcaaaagtaatttttcttgacatttgaggaccttcctgaggcttctaaagtgttcatcctgatcacctgaagggtgtgattttagcagagctgagagtggctggtggtgatgtggccccaccccctgaggcacagagaagagggagacaggtccagagagggatggggcctccaccaagaccatatagaccatctggcgggctcaagccggggctttttcctctccagtccaaaacacctcactgttcctgtctacctcggggtcagggcccggcatggccaagccctggcccatctgtgtctgtgtcactcccctcccttccagactgggcctggctgctgggatccctctcatgcggtgggtcccagggacactagagcccctggtctgagagggagaagcctggatgtaggaaaacccgtttccaccccaggccctactccctagccttttccaagtgggacatggaagaggcagcctgctgcctggatgctggtctccccagcatcactgttcccatggagctcaggtcaggctctgtattcagaccgagggtttgtgtgaggctcagagcaaatgaacaagtgccattcaagggttagaaactgctcagccacagggtcccagtgtctgagtctggaagagtctttagagatttgttcactctctgagggatcctcctggctctgcttacatacttccagggacggtgagctcacgctctctccgggcagccctgtgagtttcctatctgttccagactagtatcgccaatctctcccagctctcttctttcctccctggcctttgtcctgcaggaggtagcatcacctcttggcattttgtacatgcttttaaacaattggaggagctgcccaggcagttttatggcctcctggttgtgtgccttcacacccgcctacagccccacctcaccatcaagcgctgagccaatgcgggtgtggctggccctgagttcctgagtcagctccttgccagggccagagctggtaacagcggggcagcagggtgggtagcctctaccagccagggcagtccctgaggggccagcaggggggctgactgcctagtggctcaacctcctgaacccacccactcccagcgatgctacccagaaccccaacggcatgaatcctgcacagtgccgggcagtgccagactccaaagggctcgctgtggggacagccccgccatggccacagactctgtcctcacctttgattgtcaggatgacagcccccaccaccatgatgagcgtctgcagggcgtccgtgtagattacagcagccaggccccctgccagtggaagcaaggttgctggagggggccctggccccagggaggagggacacggggaggaacttctggggctcctgctggggccacttcctgggctgctccctcgggcctgtagggggaggtggccttctgacccctttacacgtcccctgggtggacctccctgctgcaggcaccatacctgcgatggtgtacagggctgtgatgccgagcgtgaggatggtggagaggtagaagttccagcccaggcagatgtgcacaaacagagcccccgcgtacaggtccagctgcggagggagagagccttgtgtgggactgttattcccagggctccagcaagccactccctgggtgacctcgggcaaggccctctctgggcctcggtggcctgtggataaggaggggagacccccactcgcctgcctgcctgcatcacggggccattgtgaggttgggggaagacctggccgtggagctacaagcttgtgcggatgtcaggggacattactgttgctaataaagtccaaagtggccaatgcctttcccaaaaaaaaaa

SEQ ID NO: 737314 - DNA, 5565 bp, Homo sapiens
  misc_feature (2195)..(2195): n is a, c, g, or t
  misc_feature (2578)..(2578): n is a, c, g, or t
gtctcagaccaaaggcccccttatctgctccccagagcctgacgtccccccactgaattgtcacccctgagctgtctaaatgcgagggaccctaggtgaccactggtggctgtgctcaggccgggtcccccgaccttcaccccaaggctcagtgcgtggcatatcctgaacatggaggatgaccagaactggtacaaggccgagctccggggtgtcgagggatttattcccaagaactacatccgcgtcaagccccatccgtggtactcgggcaggatttcccggcagctggccgaagagattctgatgaagcggaaccatctgggagccttcctgatccgggagagtgagagctccccaggggagttctctgtgtctgtgaactatggagaccaggtgcagcacttcaaggtgctgcgtgaggcctcggggaagtacttcctgtgggaggagaagttcaactccctcaacgagctggtcgacttctaccgcaccaccaccatcgccaagaagcggcagatcttcctgcgcgacgaggagcccttgctcaagtcacctggggcctgctttgcccaggcccagtttgacttctcagcccaggacccctcgcagctcagcttccgccgtggcgacatcattgaggtcctggagcgcccagacccccactggtggcggggccggtcctgcgggcgcgttggcttcttcccacggagttacgtgcagcccgtgcacctgtgagcagcccggcggccgatctggccaacgggcctttttacaggaactgaggtccagagaggacatggacacccccagctctgtcagagtcacacggggctcagtggacggccttggactgaacgtgggctcctaactgcctccggccgctctgcacaaactgggatggcccaggtcccccagcaagggtacccagcaagggtagctccggggcttcctggctggttgctttccattggctgccagctgtgtgacaccacagggcggagtctgtggaggccccgcccacctcctcttgtcaatggccccatctgccaggaaggttgaggactcccaggtttcacccactggaggctcaacctaaggaaccctggccatggtgggtgggttcaccttgggctgaccacccactgggcctgcctgcccctccctcaaaaggcccctggagttgttcaggctgttgggaggtggctcagcctcgaaggacagactgcacacctgttgacctaaactcactggacagactccaggtggacaccaactcctcaacagccccatgactttcagctccccctggggcacccagcaccccaccacagggctagaaggccctaagacccctgaaaaaggggcgggcagtagggaaggtggaggcacactcctcttctgttggacaggtgagctctgagggcaagccctgggcccagccacgcagagaccctggctgccctggctcttgtttgtttaggcccaggttctgcccagaccggggcccagcagagctctcaggaggctgagaaacctccagggcagacagaaagttggggccagagctaggttttagagatcctacaggatcccacatgggacggctacctaggtggggcacggcccctacccgagaacaggagggtcctccagagaatgtgccatgatcagggatatgagcagggcctgcccagagcctgggcacctttgggagagggaaaagtgaggtgggacttggaaaggctttgaacgccaggctgatggttgagggatggtgggcagggagggagggcgaagaggctccctctggcatttgggagccggtgggtggagggaggagcccttggaggtggctgcagtcccttaatggggggccttgctctgggcatgtggggctcttcctccatccagagctggcccaagacccttagaaccctgagtgctggcaaatctcactgctcctgacccagcctgtgtattcaaaacgaaaacagtaaaaccaacatcaggatgtccgtcagaaatctaattttccttccaatgctgactgctttggtgctgtttttgaaatgtcacattattttctcccatttcccccctaatttttcagggctcccgctttgctggcttggccagttcttgggcaccgagctgctgtgcagctgtgaggggaatctgcccctcttggggcntcgggatccccatgagggaaatgggtggacctgaggactcagagctcctgcctttctgtccaggatggcagtgtcaggcgaagtaggcataaaagaatatgttgacacacatgaggaggatggcattgaagccacagacacgggcccagaaggcgtgtttctggggtgtttggccatcacctgctttagttcccaagggcacatcctgagccagggtccaccaggtaaggttctcaatctggacactctgtgggggtggggtcagcaggcttccagccaccacaacagcaccactgagtgcaaagagggcgacagcgaagtgcaggtagtggatgctccccaggacggctggccgcgtgtctggctctccgcacggtggggcngggttcaggaattccaggaccagcctcgtggcccccaccaccagccctgctatcaggccccagaaggccccctgctcgttggcacgtcgccagaagacgcccaggacaaagactgcagtcactggtggggccagggagctggtcactgactgcatgtagatgaagagttgcccgctgttggagtcctgcaggacggggatccaggccacactcacgccgatgagtgccactatgaccagccgtcccaccagcaggagctcccgctcgccggagcggggacgcagccgcctccagatgtccatagtgaagagggtgctgctgctgttgaagatggaggtcagcgacgacatgagcgccgccagcatcactgcgatcatcagcccccgcagaccgatgggcatcagttccatgaccagcttggggtaggcgatgttggagcagccgacctcggccccgcaggcccgcaggcactcggacggcaccacgcagcccacatcatctgttcgagagacggacacttggtgtctctcctcatagacatgagcacctgggaacaatgcgcggctgatcatgcccggcatgatgatcaggcccatggggagcatcttgaggtagctggccaggatggagcccgccttggcatggttcaggtcccgggctgacagtgatcgctgcacgatgacctggtcggtgcaccagtaccaggtggccatgatggtcaggccaaaggtcatcccggtccacggcaggtcccctgtgtgggggtctcgaaacatgtgcatggcgtctgtacgtggcaggtggcaggtggtgttggcaatggtcctggagggaatggcctgggcgtaggctgcctccagctgcccgtaaccaccgatctggtcaaaagctggaggggtcagggtggaacagggacagtttggtggttgcggggccctgactccctgggctcccccctgccttcatctcacaagaaacttcctgatgcatcaaacttgagttttttccacctcatctttcccagtgtttggaaaggtgtgagggtagagggttgtttttttttttaaggtgtatttgaatgactattttattcgtatttaaaataatactattaagtaagcattttgcacatgggcaccccagtgtcccgctggcccagcaggagtcactgttggcctctggacactcatcggccttgggcaagtggttctcagccaggtttccgattgtcgattcaaggaagcaaaagtaatttttcttgacatttgaggaccttcctgaggcttctaaagtgttcatcctgatcacctgaagggtgtgattttagcagagctgagagtggctggtggtgatgtggccccaccccctgaggcacagagaagagggagacaggtccagagagggatggggcctccaccaagaccatatagaccatctggcgggctcaagccggggctttttcctctccagtccaaaacacctcactgttcctgtctacctcggggtcagggcccggcatggccaagccctggcccatctgtgtctgtgtcactcccctcccttccagactgggcctggctgctgggatccctctcatgcggtgggtcccagggacactagagcccctggtctgagagggagaagcctggatgtaggaaaacccgtttccaccccaggccctactccctagccttttccaagtgggacatggaagaggcagcctgctgcctggatgctggtctccccagcatcactgttcccatggagctcaggtcaggctctgtattcagaccgagggtttgtgtgaggctcagagcaaatgaacaagtgccattcaagggttagaaactgctcagccacagggtcccagtgtctgagtctggaagagtctttagagatttgttcactctctgagggatcctcctggctctgcttacatacttccagggacggtgagctcacgctctctccgggcagccctgtgagtttcctatctgttccagactagtatcgccaatctctcccagctctcttctttcctccctggcctttgtcctgcaggaggtagcatcacctcttggcattttgtacatgcttttaaacaattggaggagctgcccaggcagttttatggcctcctggttgtgtgccttcacacccgcctacagccccacctcaccatcaagcgctgagccaatgcgggtgtggctggccctgagttcctgagtcagctccttgccagggccagagctggtaacagcggggcagcagggtgggtagcctctaccagccagggcagtccctgaggggccagcaggggggctgactgcctagtggctcaacctcctgaacccacccactcccagcgatgctacccagaaccccaacggcatgaatcctgcacagtgccgggcagtgccagactccaaagggctcgctgtggggacagccccgccatggccacagactctgtcctcacctttgattgtcaggatgacagcccccaccaccatgatgagcgtctgcagggcgtccgtgtagattacagcagccaggccccctgccagtggaagcaaggttgctggagggggccctggccccagggaggagggacacggggaggaacttctggggctcctgctggggccacttcctgggctgctccctcgggcctgtagggggaggtggccttctgacccctttacacgtcccctgggtggacctccctgctgcaggcaccatacctgcgatggtgtacagggctgtgatgccgagcgtgaggatggtggagaggtagaagttccagcccaggcagatgtgcacaaacagagcccccgcgtacaggttcgcctgcctgcctgcatcacggggccattgtgaggttgggggaagacctggccgtggagctacaagcttgtgcggatgtcaggggacattactgttgctaataaagtccaaagtggccaatgcctttcccaaaaaaaaaa

SEQ ID NO: 737315 - DNA, 4781 bp, Homo sapiens
  misc_feature (2195)..(2195): n is a, c, g, or t
  misc_feature (2578)..(2578): n is a, c, g, or t
gtctcagaccaaaggcccccttatctgctccccagagcctgacgtccccccactgaattgtcacccctgagctgtctaaatgcgagggaccctaggtgaccactggtggctgtgctcaggccgggtcccccgaccttcaccccaaggctcagtgcgtggcatatcctgaacatggaggatgaccagaactggtacaaggccgagctccggggtgtcgagggatttattcccaagaactacatccgcgtcaagccccatccgtggtactcgggcaggatttcccggcagctggccgaagagattctgatgaagcggaaccatctgggagccttcctgatccgggagagtgagagctccccaggggagttctctgtgtctgtgaactatggagaccaggtgcagcacttcaaggtgctgcgtgaggcctcggggaagtacttcctgtgggaggagaagttcaactccctcaacgagctggtcgacttctaccgcaccaccaccatcgccaagaagcggcagatcttcctgcgcgacgaggagcccttgctcaagtcacctggggcctgctttgcccaggcccagtttgacttctcagcccaggacccctcgcagctcagcttccgccgtggcgacatcattgaggtcctggagcgcccagacccccactggtggcggggccggtcctgcgggcgcgttggcttcttcccacggagttacgtgcagcccgtgcacctgtgagcagcccggcggccgatctggccaacgggcctttttacaggaactgaggtccagagaggacatggacacccccagctctgtcagagtcacacggggctcagtggacggccttggactgaacgtgggctcctaactgcctccggccgctctgcacaaactgggatggcccaggtcccccagcaagggtacccagcaagggtagctccggggcttcctggctggttgctttccattggctgccagctgtgtgacaccacagggcggagtctgtggaggccccgcccacctcctcttgtcaatggccccatctgccaggaaggttgaggactcccaggtttcacccactggaggctcaacctaaggaaccctggccatggtgggtgggttcaccttgggctgaccacccactgggcctgcctgcccctccctcaaaaggcccctggagttgttcaggctgttgggaggtggctcagcctcgaaggacagactgcacacctgttgacctaaactcactggacagactccaggtggacaccaactcctcaacagccccatgactttcagctccccctggggcacccagcaccccaccacagggctagaaggccctaagacccctgaaaaaggggcgggcagtagggaaggtggaggcacactcctcttctgttggacaggtgagctctgagggcaagccctgggcccagccacgcagagaccctggctgccctggctcttgtttgtttaggcccaggttctgcccagaccggggcccagcagagctctcaggaggctgagaaacctccagggcagacagaaagttggggccagagctaggttttagagatcctacaggatcccacatgggacggctacctaggtggggcacggcccctacccgagaacaggagggtcctccagagaatgtgccatgatcagggatatgagcagggcctgcccagagcctgggcacctttgggagagggaaaagtgaggtgggacttggaaaggctttgaacgccaggctgatggttgagggatggtgggcagggagggagggcgaagaggctccctctggcatttgggagccggtgggtggagggaggagcccttggaggtggctgcagtcccttaatggggggccttgctctgggcatgtggggctcttcctccatccagagctggcccaagacccttagaaccctgagtgctggcaaatctcactgctcctgacccagcctgtgtattcaaaacgaaaacagtaaaaccaacatcaggatgtccgtcagaaatctaattttccttccaatgctgactgctttggtgctgtttttgaaatgtcacattattttctcccatttcccccctaatttttcagggctcccgctttgctggcttggccagttcttgggcaccgagctgctgtgcagctgtgaggggaatctgcccctcttggggcntcgggatccccatgagggaaatgggtggacctgaggactcagagctcctgcctttctgtccaggatggcagtgtcaggcgaagtaggcataaaagaatatgttgacacacatgaggaggatggcattgaagccacagacacgggcccagaaggcgtgtttctggggtgtttggccatcacctgctttagttcccaagggcacatcctgagccagggtccaccaggtaaggttctcaatctggacactctgtgggggtggggtcagcaggcttccagccaccacaacagcaccactgagtgcaaagagggcgacagcgaagtgcaggtagtggatgctccccaggacggctggccgcgtgtctggctctccgcacggtggggcngggttcaggaattccaggaccagcctcgtggcccccaccaccagccctgctatcaggccccagaaggccccctgctcgttggcacgtcgccagaagacgcccaggacaaagactgcagtcactggtggggccagggagctggtcactgactgcatgtagatgaagagttgcccgctgttggagtcctgcaggacggggatccaggccacactcacgccgatgagtgccactatgaccagccgtcccaccagcaggagctcccgctcgccggagcggggacgcagccgcctccagatgtccatagtgaagagggtgctgctgctgttgaagatggaggtcagcgacgacatgagcgccgccagcatcactgcgatcatcagcccccgcagaccgatgggcatcagttccatgaccagcttggggtaggcgatgttggagcagccgacctcggccccgcaggcccgcaggcactcggacggcaccacgcagcccacatcatctgttcgagagacggacacttggtgtctctcctcatagacatgagcacctgggaacaatgcgcggctgatcatgcccggcatgatgatcaggcccatggggagcatcttgaggtagctggccaggatggagcccgccttggcatggttcaggtcccgggctgacagtgatcgctgcacgatgacctggtcggtgcaccagtaccaggtggccatgatggtcaggccaaaggtcatcccggtccacggcaggtcccctgtgtgggggtctcgaaacatgtgcatggcgtctgtacgtggcaggtggcaggtggtgttggcaatggtcctggagggaatggcctgggcgtaggctgcctccagctgcccgtaaccaccgatctggtcaaaagctggaggggtcagggtggaacagggacagtttggtggttgcggggccctgactccctgggctcccccctgccttcatctcacaagaaacttcctgatgcatcaaacttgagttttttccacctcatctttcccagtgtttggaaaggtgtgagggtagagggttgtttttttttttaaggtgtatttgaatgactattttattcgtatttaaaataatactattaagtaagcattttgcacatgggcaccccagtgtcccgctggcccagcaggagtcactgttggcctctggacactcatcggccttgggcaagtggttctcagccaggtttccgattgtcgattcaaggaagcaaaagtaatttttcttgacatttgaggaccttcctgaggcttctaaagtgttcatcctgatcacctgaagggtgtgattttagcagagctgagagtggctggtggtgatgtggccccaccccctgaggcacagagaagagggagacaggtccagagagggatggggcctccaccaagaccatatagaccatctggcgggctcaagccggggctttttcctctccagtccaaaacacctcactgttcctgtctacctcggggtcagggcccggcatggccaagccctggcccatctgtgtctgtgtcactcccctcccttccagactgggcctggctgctgggatccctctcatgcggtgggtcccagggacactagagcccctggtctgagagggagaagcctggatgtaggaaaacccgtttccaccccaggccctactccctagccttttccaagtgggacatggaagaggcagcctgctgcctggatgctggtctccccagcatcactgttcccatggagctcaggtcaggctctgtattcagaccgagggtttgtgtgaggctcagagcaaatgaacaagtgccattcaagggttagaaactgctcagccacagggtcccagtgtctgagtctggaagagtctttagagatttgttcactctctgagggatcctcctggctctgcttacatacttccagggacggtgagctcacgctctctccgggcagccctgtgagtttcctatctgttccagactagtatcgccaatctctcccagctctcttctttcctccctggcctttgtcctgcaggaggtagcatcacctcttggcattttgtacatgcttttaaacaattggaggagctgcccaggcagttttatggcctcctggttgtgtgccttcacacccgcctgtcgacgcggccgcgaatttagtagtagtaggcggccgc

SEQ ID NO: 737316 - DNA, 4836 bp, Homo sapiens
  misc_feature (2195)..(2195): n is a, c, g, or t
  misc_feature (2578)..(2578): n is a, c, g, or t
  misc_feature (4661)..(4661): n is a, c, g, or t
  misc_feature (4684)..(4684): n is a, c, g, or t
  misc_feature (4731)..(4731): n is a, c, g, or t
  misc_feature (4742)..(4742): n is a, c, g, or t
  misc_feature (4760)..(4760): n is a, c, g, or t
  misc_feature (4763)..(4763): n is a, c, g, or t
  misc_feature (4774)..(4774): n is a, c, g, or t
  misc_feature (4779)..(4779): n is a, c, g, or t
  misc_feature (4782)..(4782): n is a, c, g, or t
  misc_feature (4792)..(4792): n is a, c, g, or t
  misc_feature (4798)..(4798): n is a, c, g, or t
  misc_feature (4815)..(4816): n is a, c, g, or t
  misc_feature (4822)..(4825): n is a, c, g, or t
  misc_feature (4834)..(4834): n is a, c, g, or t
gtctcagaccaaaggcccccttatctgctccccagagcctgacgtccccccactgaattgtcacccctgagctgtctaaatgcgagggaccctaggtgaccactggtggctgtgctcaggccgggtcccccgaccttcaccccaaggctcagtgcgtggcatatcctgaacatggaggatgaccagaactggtacaaggccgagctccggggtgtcgagggatttattcccaagaactacatccgcgtcaagccccatccgtggtactcgggcaggatttcccggcagctggccgaagagattctgatgaagcggaaccatctgggagccttcctgatccgggagagtgagagctccccaggggagttctctgtgtctgtgaactatggagaccaggtgcagcacttcaaggtgctgcgtgaggcctcggggaagtacttcctgtgggaggagaagttcaactccctcaacgagctggtcgacttctaccgcaccaccaccatcgccaagaagcggcagatcttcctgcgcgacgaggagcccttgctcaagtcacctggggcctgctttgcccaggcccagtttgacttctcagcccaggacccctcgcagctcagcttccgccgtggcgacatcattgaggtcctggagcgcccagacccccactggtggcggggccggtcctgcgggcgcgttggcttcttcccacggagttacgtgcagcccgtgcacctgtgagcagcccggcggccgatctggccaacgggcctttttacaggaactgaggtccagagaggacatggacacccccagctctgtcagagtcacacggggctcagtggacggccttggactgaacgtgggctcctaactgcctccggccgctctgcacaaactgggatggcccaggtcccccagcaagggtacccagcaagggtagctccggggcttcctggctggttgctttccattggctgccagctgtgtgacaccacagggcggagtctgtggaggccccgcccacctcctcttgtcaatggccccatctgccaggaaggttgaggactcccaggtttcacccactggaggctcaacctaaggaaccctggccatggtgggtgggttcaccttgggctgaccacccactgggcctgcctgcccctccctcaaaaggcccctggagttgttcaggctgttgggaggtggctcagcctcgaaggacagactgcacacctgttgacctaaactcactggacagactccaggtggacaccaactcctcaacagccccatgactttcagctccccctggggcacccagcaccccaccacagggctagaaggccctaagacccctgaaaaaggggcgggcagtagggaaggtggaggcacactcctcttctgttggacaggtgagctctgagggcaagccctgggcccagccacgcagagaccctggctgccctggctcttgtttgtttaggcccaggttctgcccagaccggggcccagcagagctctcaggaggctgagaaacctccagggcagacagaaagttggggccagagctaggttttagagatcctacaggatcccacatgggacggctacctaggtggggcacggcccctacccgagaacaggagggtcctccagagaatgtgccatgatcagggatatgagcagggcctgcccagagcctgggcacctttgggagagggaaaagtgaggtgggacttggaaaggctttgaacgccaggctgatggttgagggatggtgggcagggagggagggcgaagaggctccctctggcatttgggagccggtgggtggagggaggagcccttggaggtggctgcagtcccttaatggggggccttgctctgggcatgtggggctcttcctccatccagagctggcccaagacccttagaaccctgagtgctggcaaatctcactgctcctgacccagcctgtgtattcaaaacgaaaacagtaaaaccaacatcaggatgtccgtcagaaatctaattttccttccaatgctgactgctttggtgctgtttttgaaatgtcacattattttctcccatttcccccctaatttttcagggctcccgctttgctggcttggccagttcttgggcaccgagctgctgtgcagctgtgaggggaatctgcccctcttggggcntcgggatccccatgagggaaatgggtggacctgaggactcagagctcctgcctttctgtccaggatggcagtgtcaggcgaagtaggcataaaagaatatgttgacacacatgaggaggatggcattgaagccacagacacgggcccagaaggcgtgtttctggggtgtttggccatcacctgctttagttcccaagggcacatcctgagccagggtccaccaggtaaggttctcaatctggacactctgtgggggtggggtcagcaggcttccagccaccacaacagcaccactgagtgcaaagagggcgacagcgaagtgcaggtagtggatgctccccaggacggctggccgcgtgtctggctctccgcacggtggggcngggttcaggaattccaggaccagcctcgtggcccccaccaccagccctgctatcaggccccagaaggccccctgctcgttggcacgtcgccagaagacgcccaggacaaagactgcagtcactggtggggccagggagctggtcactgactgcatgtagatgaagagttgcccgctgttggagtcctgcaggacggggatccaggccacactcacgccgatgagtgccactatgaccagccgtcccaccagcaggagctcccgctcgccggagcggggacgcagccgcctccagatgtccatagtgaagagggtgctgctgctgttgaagatggaggtcagcgacgacatgagcgccgccagcatcactgcgatcatcagcccccgcagaccgatgggcatcagttccatgaccagcttggggtaggcgatgttggagcagccgacctcggccccgcaggcccgcaggcactcggacggcaccacgcagcccacatcatctgttcgagagacggacacttggtgtctctcctcatagacatgagcacctgggaacaatgcgcggctgatcatgcccggcatgatgatcaggcccatggggagcatcttgaggtagctggccaggatggagcccgccttggcatggttcaggtcccgggctgacagtgatcgctgcacgatgacctggtcggtgcaccagtaccaggtggccatgatggtcaggccaaaggtcatcccggtccacggcaggtcccctgtgtgggggtctcgaaacatgtgcatggcgtctgtacgtggcaggtggcaggtggtgttggcaatggtcctggagggaatggcctgggcgtaggctgcctccagctgcccgtaaccaccgatctggtcaaaagctggaggggtcagggtggaacagggacagtttggtggttgcggggccctgactccctgggctcccccctgccttcatctcacaagaaacttcctgatgcatcaaacttgagttttttccacctcatctttcccagtgtttggaaaggtgtgagggtagagggttgtttttttttttaaggtgtatttgaatgactattttattcgtatttaaaataatactattaagtaagcattttgcacatgggcaccccagtgtcccgctggcccagcaggagtcactgttggcctctggacactcatcggccttgggcaagtggttctcagccaggtttccgattgtcgattcaaggaagcaaaagtaatttttcttgacatttgaggaccttcctgaggcttctaaagtgttcatcctgatcacctgaagggtgtgattttagcagagctgagagtggctggtggtgatgtggccccaccccctgaggcacagagaagagggagacaggtccagagagggatggggcctccaccaagaccatatagaccatctggcgggctcaagccggggctttttcctctccagtccaaaacacctcactgttcctgtctacctcggggtcagggcccggcatggccaagccctggcccatctgtgtctgtgtcactcccctcccttccagactgggcctggctgctgggatccctctcatgcggtgggtcccagggacactagagcccctggtctgagagggagaagcctggatgtaggaaaacccgtttccaccccaggccctactccctagccttttccaagtgggacatggaagaggcagcctgctgcctggatgctggtctccccagcatcactgttcccatggagctcaggtcaggctctgtattcagaccgagggtttgtgtgaggctcagagcaaatgaacaagtgccattcaagggttagaaactgctcagccacagggtcccagtgtctgagtctggaagagtctttagagatttgttcactctctgagggatcctcctggctctgcttacatacttccagggacggtgagctcacgctctctccgggcagccctgtgagtttcctatctgttccagactagtatcgccaatctcctcgtgccgaattcggcacgaggtgtattaagcttttcaaacaatggaggggatgggccctngtgtcctgacgggagccaggtcngcctgagagctgtgccgctcctctgtcttgtcagtggaggtgcctgngtggtgagcangtctcaggcctcttgtcnctncccagtggctncaggnctnatagtggcangggcangatgaggctgcacccgnntggagnnnntttgttctngg

SEQ ID NO: 737317 - DNA, 4144 bp, Homo sapiens
  misc_feature (2195)..(2195): n is a, c, g, or t
  misc_feature (2578)..(2578): n is a, c, g, or t
gtctcagaccaaaggcccccttatctgctccccagagcctgacgtccccccactgaattgtcacccctgagctgtctaaatgcgagggaccctaggtgaccactggtggctgtgctcaggccgggtcccccgaccttcaccccaaggctcagtgcgtggcatatcctgaacatggaggatgaccagaactggtacaaggccgagctccggggtgtcgagggatttattcccaagaactacatccgcgtcaagccccatccgtggtactcgggcaggatttcccggcagctggccgaagagattctgatgaagcggaaccatctgggagccttcctgatccgggagagtgagagctccccaggggagttctctgtgtctgtgaactatggagaccaggtgcagcacttcaaggtgctgcgtgaggcctcggggaagtacttcctgtgggaggagaagttcaactccctcaacgagctggtcgacttctaccgcaccaccaccatcgccaagaagcggcagatcttcctgcgcgacgaggagcccttgctcaagtcacctggggcctgctttgcccaggcccagtttgacttctcagcccaggacccctcgcagctcagcttccgccgtggcgacatcattgaggtcctggagcgcccagacccccactggtggcggggccggtcctgcgggcgcgttggcttcttcccacggagttacgtgcagcccgtgcacctgtgagcagcccggcggccgatctggccaacgggcctttttacaggaactgaggtccagagaggacatggacacccccagctctgtcagagtcacacggggctcagtggacggccttggactgaacgtgggctcctaactgcctccggccgctctgcacaaactgggatggcccaggtcccccagcaagggtacccagcaagggtagctccggggcttcctggctggttgctttccattggctgccagctgtgtgacaccacagggcggagtctgtggaggccccgcccacctcctcttgtcaatggccccatctgccaggaaggttgaggactcccaggtttcacccactggaggctcaacctaaggaaccctggccatggtgggtgggttcaccttgggctgaccacccactgggcctgcctgcccctccctcaaaaggcccctggagttgttcaggctgttgggaggtggctcagcctcgaaggacagactgcacacctgttgacctaaactcactggacagactccaggtggacaccaactcctcaacagccccatgactttcagctccccctggggcacccagcaccccaccacagggctagaaggccctaagacccctgaaaaaggggcgggcagtagggaaggtggaggcacactcctcttctgttggacaggtgagctctgagggcaagccctgggcccagccacgcagagaccctggctgccctggctcttgtttgtttaggcccaggttctgcccagaccggggcccagcagagctctcaggaggctgagaaacctccagggcagacagaaagttggggccagagctaggttttagagatcctacaggatcccacatgggacggctacctaggtggggcacggcccctacccgagaacaggagggtcctccagagaatgtgccatgatcagggatatgagcagggcctgcccagagcctgggcacctttgggagagggaaaagtgaggtgggacttggaaaggctttgaacgccaggctgatggttgagggatggtgggcagggagggagggcgaagaggctccctctggcatttgggagccggtgggtggagggaggagcccttggaggtggctgcagtcccttaatggggggccttgctctgggcatgtggggctcttcctccatccagagctggcccaagacccttagaaccctgagtgctggcaaatctcactgctcctgacccagcctgtgtattcaaaacgaaaacagtaaaaccaacatcaggatgtccgtcagaaatctaattttccttccaatgctgactgctttggtgctgtttttgaaatgtcacattattttctcccatttcccccctaatttttcagggctcccgctttgctggcttggccagttcttgggcaccgagctgctgtgcagctgtgaggggaatctgcccctcttggggcntcgggatccccatgagggaaatgggtggacctgaggactcagagctcctgcctttctgtccaggatggcagtgtcaggcgaagtaggcataaaagaatatgttgacacacatgaggaggatggcattgaagccacagacacgggcccagaaggcgtgtttctggggtgtttggccatcacctgctttagttcccaagggcacatcctgagccagggtccaccaggtaaggttctcaatctggacactctgtgggggtggggtcagcaggcttccagccaccacaacagcaccactgagtgcaaagagggcgacagcgaagtgcaggtagtggatgctccccaggacggctggccgcgtgtctggctctccgcacggtggggcngggttcaggaattccaggaccagcctcgtggcccccaccaccagccctgctatcaggccccagaaggccccctgctcgttggcacgtcgccagaagacgcccaggacaaagactgcagtcactggtggggccagggagctggtcactgactgcatgtagatgaagagttgcccgctgttggagtcctgcaggacggggatccaggccacactcacgccgatgagtgccactatgaccagccgtcccaccagcaggagctcccgctcgccggagcggggacgcagccgcctccagatgtccatagtgaagagggtgctgctgctgttgaagatggaggtcagcgacgacatgagcgccgccagcatcactgcgatcatcagcccccgcagaccgatgggcatcagttccatgaccagcttggggtaggcgatgttggagcagccgacctcggccccgcaggcccgcaggcactcggacggcaccacgcagcccacatcatctgttcgagagacggacacttggtgtctctcctcatagacatgagcacctgggaacaatgcgcggctgatcatgcccggcatgatgatcaggcccatggggagcatcttgaggtagctggccaggatggagcccgccttggcatggttcaggtcccgggctgacagtgatcgctgcacgatgacctggtcggtgcaccagtaccaggtggccatgatggtcaggccaaaggtcatcccggtccacggcaggtcccctgtgtgggggtctcgaaacatgtgcatggcgtctgtacgtggcaggtggcaggtggtgttggcaatggtcctggagggaatggcctgggcgtaggctgcctccagctgcccgtaaccaccgatctggtcaaaagctttgattgtcaggatgacagcccccaccaccatgatgagcgtctgcagggcgtccgtgtagattacagcagccaggccccctgcgatggtgtacagggctgtgatgccgagcgtgaggatggtggagaggtagaagttccagcccaggcagatgtgcacaaacagagcccccgcgtacaggtcgatatcttggtgaagacagacagtagcagggacaggacagacaggtacatgcggatccgctggcccccgtagcgcttctgaatgtactcaggtaaggtgacgatctctgaggagatgtagatgggcacgaacacccatgccagtgccagcagcacgtacgtggcattccactcgaagcctgccacggccagacctcctgccgcgcctgagcccgccagtccaatgaagaggccagagccctcgctgctggcgaagagggaggctccaatcggccaccacgtcatgtcccggcctgccaggaagtagccattcaccgtgttcctactggcccgacaagaggaccatatgcccacggccacattcagagcaaaatacacagtgatgacgatgatgtcagccacgctcagctgcgtcccgggagtgtggaggtcgctggtggagttggcggccatggctgtcctgccgcaggcactaggtatgagcccgagggact

SEQ ID NO: 737318 - DNA, 4063 bp, Homo sapiens
  misc_feature (2195)..(2195): n is a, c, g, or t
  misc_feature (2578)..(2578): n is a, c, g, or t
gtctcagaccaaaggcccccttatctgctccccagagcctgacgtccccccactgaattgtcacccctgagctgtctaaatgcgagggaccctaggtgaccactggtggctgtgctcaggccgggtcccccgaccttcaccccaaggctcagtgcgtggcatatcctgaacatggaggatgaccagaactggtacaaggccgagctccggggtgtcgagggatttattcccaagaactacatccgcgtcaagccccatccgtggtactcgggcaggatttcccggcagctggccgaagagattctgatgaagcggaaccatctgggagccttcctgatccgggagagtgagagctccccaggggagttctctgtgtctgtgaactatggagaccaggtgcagcacttcaaggtgctgcgtgaggcctcggggaagtacttcctgtgggaggagaagttcaactccctcaacgagctggtcgacttctaccgcaccaccaccatcgccaagaagcggcagatcttcctgcgcgacgaggagcccttgctcaagtcacctggggcctgctttgcccaggcccagtttgacttctcagcccaggacccctcgcagctcagcttccgccgtggcgacatcattgaggtcctggagcgcccagacccccactggtggcggggccggtcctgcgggcgcgttggcttcttcccacggagttacgtgcagcccgtgcacctgtgagcagcccggcggccgatctggccaacgggcctttttacaggaactgaggtccagagaggacatggacacccccagctctgtcagagtcacacggggctcagtggacggccttggactgaacgtgggctcctaactgcctccggccgctctgcacaaactgggatggcccaggtcccccagcaagggtacccagcaagggtagctccggggcttcctggctggttgctttccattggctgccagctgtgtgacaccacagggcggagtctgtggaggccccgcccacctcctcttgtcaatggccccatctgccaggaaggttgaggactcccaggtttcacccactggaggctcaacctaaggaaccctggccatggtgggtgggttcaccttgggctgaccacccactgggcctgcctgcccctccctcaaaaggcccctggagttgttcaggctgttgggaggtggctcagcctcgaaggacagactgcacacctgttgacctaaactcactggacagactccaggtggacaccaactcctcaacagccccatgactttcagctccccctggggcacccagcaccccaccacagggctagaaggccctaagacccctgaaaaaggggcgggcagtagggaaggtggaggcacactcctcttctgttggacaggtgagctctgagggcaagccctgggcccagccacgcagagaccctggctgccctggctcttgtttgtttaggcccaggttctgcccagaccggggcccagcagagctctcaggaggctgagaaacctccagggcagacagaaagttggggccagagctaggttttagagatcctacaggatcccacatgggacggctacctaggtggggcacggcccctacccgagaacaggagggtcctccagagaatgtgccatgatcagggatatgagcagggcctgcccagagcctgggcacctttgggagagggaaaagtgaggtgggacttggaaaggctttgaacgccaggctgatggttgagggatggtgggcagggagggagggcgaagaggctccctctggcatttgggagccggtgggtggagggaggagcccttggaggtggctgcagtcccttaatggggggccttgctctgggcatgtggggctcttcctccatccagagctggcccaagacccttagaaccctgagtgctggcaaatctcactgctcctgacccagcctgtgtattcaaaacgaaaacagtaaaaccaacatcaggatgtccgtcagaaatctaattttccttccaatgctgactgctttggtgctgtttttgaaatgtcacattattttctcccatttcccccctaatttttcagggctcccgctttgctggcttggccagttcttgggcaccgagctgctgtgcagctgtgaggggaatctgcccctcttggggcntcgggatccccatgagggaaatgggtggacctgaggactcagagctcctgcctttctgtccaggatggcagtgtcaggcgaagtaggcataaaagaatatgttgacacacatgaggaggatggcattgaagccacagacacgggcccagaaggcgtgtttctggggtgtttggccatcacctgctttagttcccaagggcacatcctgagccagggtccaccaggtaaggttctcaatctggacactctgtgggggtggggtcagcaggcttccagccaccacaacagcaccactgagtgcaaagagggcgacagcgaagtgcaggtagtggatgctccccaggacggctggccgcgtgtctggctctccgcacggtggggcngggttcaggaattccaggaccagcctcgtggcccccaccaccagccctgctatcaggccccagaaggccccctgctcgttggcacgtcgccagaagacgcccaggacaaagactgcagtcactggtggggccagggagctggtcactgactgcatgtagatgaagagttgcccgctgttggagtcctgcaggacggggatccaggccacactcacgccgatgagtgccactatgaccagccgtcccaccagcaggagctcccgctcgccggagcggggacgcagccgcctccagatgtccatagtgaagagggtgctgctgctgttgaagatggaggtcagcgacgacatgagcgccgccagcatcactgcgatcatcagcccccgcagaccgatgggcatcagttccatgaccagcttggggtaggcgatgttggagcagccgacctcggccccgcaggcccgcaggcactcggacggcaccacgcagcccacatcatctgttcgagagacggacacttggtgtctctcctcatagacatgagcacctgggaacaatgcgcggctgatcatgcccggcatgatgatcaggcccatggggagcatcttgaggtagctggccaggatggagcccgccttggcatggttcaggtcccgggctgacagtgatcgctgcacgatgacctggtcggtgcaccagtaccaggtggccatgatggtcaggccaaaggtcatcccggtccacggcaggtcccctgtgtgggggtctcgaaacatgtgcatggcgtctgtacgtggcaggtggcaggtggtgttggcaatggtcctggagggaatggcctgggcgtaggctgcctccagctgcccgtaaccaccgatctggtcaaaagctgcgatggtgtacagggctgtgatgccgagcgtgaggatggtggagaggtagaagttccagcccaggcagatgtgcacaaacagagcccccgcgtacaggtcgatatcttggtgaagacagacagtagcagggacaggacagacaggtacatgcggatccgctggcccccgtagcgcttctgaatgtactcaggtaaggtgacgatctctgaggagatgtagatgggcacgaacacccatgccagtgccagcagcacgtacgtggcattccactcgaagcctgccacggccagacctcctgccgcgcctgagcccgccagtccaatgaagaggccagagccctcgctgctggcgaagagggaggctccaatcggccaccacgtcatgtcccggcctgccaggaagtagccattcaccgtgttcctactggcccgacaagaggaccatatgcccacggccacattcagagcaaaatacacagtgatgacgatgatgtcagccacgctcagctgcgtcccgggagtgtggaggtcgctggtggagttggcggccatggctgtcctgccgcaggcactaggtatgagcccgagggact

SEQ ID NO: 737319 - DNA, 1236 bp, Homo sapiens
  misc_feature (1236)..(1236): n is a, c, g, or t
gtctcagaccaaaggcccccttatctgctccccagagcctgacgtccccccactgaattgtcacccctgagctgtctaaatgcgagggaccctaggtgaccactggtggctgtgctcaggccgggtcccccgaccttcaccccaaggctcagtgcgtggcatatcctgaacatggaggatgaccagaactggtacaaggccgagctccggggtgtcgagggatttattcccaagaactacatccgcgtcaagccccatccgtggtactcgggcaggatttcccggcagctggccgaagagattctgatgaagcggaaccatctgggagccttcctgatccgggagagtgagagctccccaggggagttctctgtgtctgtgaaagcccagaggggtccctgcctgggcccaaaatcacacagcagattggggtagagccggagaggacccgagactcctgtgccagcctgggcatcccctccactgccagggaaggactgcatccaagtcgcatccgtacccaggccgaggtgtccgaggcccaggctgaaatccggttgctgctgcagagaccaagtttccaaggccttgtcaagtgggctgtgccagacgatccccaggcctgtcattggctgctcttcggctcggacacaccaaacctcaccaagcacttccatttctgagggaatagaggttgtggcttccgtcaagcacccatttaccccaccctcctcctcctcttcctgcaaacttgagtcacagctgccctgctgggctcaggccccagggatgtctgagtcagcctggctggggttccagtcctgacaccgcccttaccagctgggagactccgggaacctccaaccctgctgagcctccacttcgacatccgtgaaacagccatgaataagcaggtctcaaaggtcgactcctgtatgcagggacacagcatgcagtaggtgcccaatcataacagcagcacccacctggagccccttatagcagcccttctcctctgcacttccacatggcatctcatttaaccttcaccacaacccaactaggaaggcaccatcattatcccattttactgatgaagaaactgaggcccaggaaggtgaatttaccagccagctcacaaatggactagtagatggcagtttgtggattggagcccagaggctgtgctcctgcccacaccctctcaaatgagggctataaaataacactctaagn

SEQ ID NO: 737320 - DNA, 5598 bp, Homo sapiens
  misc_feature (2096)..(2096): n is a, c, g, or t
  misc_feature (2479)..(2479): n is a, c, g, or t
caagggcaagagcaataaacacgactcttagctgcacgtcactttacagtttataaggcccattctcatggctttgtggcctggagtcaaaagctaccatggctgctgcagagtcgggtaaataagatcccaagagaagcagggacctaaccaaaatcccaccctaaggaccaggactcaggtcccctgacccaccagccctattgtcccagctgggcggctgggaaagccgtgttctatgtagatgcagcatctgcacagcagacaggcaggggtgtgggcagcaggaggcccagtggtggcactaccattgatctggacttaaagttcaactccggtgctgcccgagacccctcctcacctgtggcaaatcacttctcttgggtgcctctgagggagggtgggttgcagggcttctgaaggcaccctactaaccacctcctcttcttgcagtcacctggggcctgctttgcccaggcccagtttgacttctcagcccaggacccctcgcagctcagcttccgccgtggcgacatcattgaggtcctggagcgcccagacccccactggtggcggggccggtcctgcgggcgcgttggcttcttcccacggagttacgtgcagcccgtgcacctgtgagcagcccggcggccgatctggccaacgggcctttttacaggaactgaggtccagagaggacatggacacccccagctctgtcagagtcacacggggctcagtggacggccttggactgaacgtgggctcctaactgcctccggccgctctgcacaaactgggatggcccaggtcccccagcaagggtacccagcaagggtagctccggggcttcctggctggttgctttccattggctgccagctgtgtgacaccacagggcggagtctgtggaggccccgcccacctcctcttgtcaatggccccatctgccaggaaggttgaggactcccaggtttcacccactggaggctcaacctaaggaaccctggccatggtgggtgggttcaccttgggctgaccacccactgggcctgcctgcccctccctcaaaaggcccctggagttgttcaggctgttgggaggtggctcagcctcgaaggacagactgcacacctgttgacctaaactcactggacagactccaggtggacaccaactcctcaacagccccatgactttcagctccccctggggcacccagcaccccaccacagggctagaaggccctaagacccctgaaaaaggggcgggcagtagggaaggtggaggcacactcctcttctgttggacaggtgagctctgagggcaagccctgggcccagccacgcagagaccctggctgccctggctcttgtttgtttaggcccaggttctgcccagaccggggcccagcagagctctcaggaggctgagaaacctccagggcagacagaaagttggggccagagctaggttttagagatcctacaggatcccacatgggacggctacctaggtggggcacggcccctacccgagaacaggagggtcctccagagaatgtgccatgatcagggatatgagcagggcctgcccagagcctgggcacctttgggagagggaaaagtgaggtgggacttggaaaggctttgaacgccaggctgatggttgagggatggtgggcagggagggagggcgaagaggctccctctggcatttgggagccggtgggtggagggaggagcccttggaggtggctgcagtcccttaatggggggccttgctctgggcatgtggggctcttcctccatccagagctggcccaagacccttagaaccctgagtgctggcaaatctcactgctcctgacccagcctgtgtattcaaaacgaaaacagtaaaaccaacatcaggatgtccgtcagaaatctaattttccttccaatgctgactgctttggtgctgtttttgaaatgtcacattattttctcccatttcccccctaatttttcagggctcccgctttgctggcttggccagttcttgggcaccgagctgctgtgcagctgtgaggggaatctgcccctcttggggcntcgggatccccatgagggaaatgggtggacctgaggactcagagctcctgcctttctgtccaggatggcagtgtcaggcgaagtaggcataaaagaatatgttgacacacatgaggaggatggcattgaagccacagacacgggcccagaaggcgtgtttctggggtgtttggccatcacctgctttagttcccaagggcacatcctgagccagggtccaccaggtaaggttctcaatctggacactctgtgggggtggggtcagcaggcttccagccaccacaacagcaccactgagtgcaaagagggcgacagcgaagtgcaggtagtggatgctccccaggacggctggccgcgtgtctggctctccgcacggtggggcngggttcaggaattccaggaccagcctcgtggcccccaccaccagccctgctatcaggccccagaaggccccctgctcgttggcacgtcgccagaagacgcccaggacaaagactgcagtcactggtggggccagggagctggtcactgactgcatgtagatgaagagttgcccgctgttggagtcctgcaggacggggatccaggccacactcacgccgatgagtgccactatgaccagccgtcccaccagcaggagctcccgctcgccggagcggggacgcagccgcctccagatgtccatagtgaagagggtgctgctgctgttgaagatggaggtcagcgacgacatgagcgccgccagcatcactgcgatcatcagcccccgcagaccgatgggcatcagttccatgaccagcttggggtaggcgatgttggagcagccgacctcggccccgcaggcccgcaggcactcggacggcaccacgcagcccacatcatctgttcgagagacggacacttggtgtctctcctcatagacatgagcacctgggaacaatgcgcggctgatcatgcccggcatgatgatcaggcccatggggagcatcttgaggtagctggccaggatggagcccgccttggcatggttcaggtcccgggctgacagtgatcgctgcacgatgacctggtcggtgcaccagtaccaggtggccatgatggtcaggccaaaggtcatcccggtccacggcaggtcccctgtgtgggggtctcgaaacatgtgcatggcgtctgtacgtggcaggtggcaggtggtgttggcaatggtcctggagggaatggcctgggcgtaggctgcctccagctgcccgtaaccaccgatctggtcaaaagctggaggggtcagggtggaacagggacagtttggtggttgcggggccctgactccctgggctcccccctgccttcatctcacaagaaacttcctgatgcatcaaacttgagttttttccacctcatctttcccagtgtttggaaaggtgtgagggtagagggttgtttttttttttaaggtgtatttgaatgactattttattcgtatttaaaataatactattaagtaagcattttgcacatgggcaccccagtgtcccgctggcccagcaggagtcactgttggcctctggacactcatcggccttgggcaagtggttctcagccaggtttccgattgtcgattcaaggaagcaaaagtaatttttcttgacatttgaggaccttcctgaggcttctaaagtgttcatcctgatcacctgaagggtgtgattttagcagagctgagagtggctggtggtgatgtggccccaccccctgaggcacagagaagagggagacaggtccagagagggatggggcctccaccaagaccatatagaccatctggcgggctcaagccggggctttttcctctccagtccaaaacacctcactgttcctgtctacctcggggtcagggcccggcatggccaagccctggcccatctgtgtctgtgtcactcccctcccttccagactgggcctggctgctgggatccctctcatgcggtgggtcccagggacactagagcccctggtctgagagggagaagcctggatgtaggaaaacccgtttccaccccaggccctactccctagccttttccaagtgggacatggaagaggcagcctgctgcctggatgctggtctccccagcatcactgttcccatggagctcaggtcaggctctgtattcagaccgagggtttgtgtgaggctcagagcaaatgaacaagtgccattcaagggttagaaactgctcagccacagggtcccagtgtctgagtctggaagagtctttagagatttgttcactctctgagggatcctcctggctctgcttacatacttccagggacggtgagctcacgctctctccgggcagccctgtgagtttcctatctgttccagactagtatcgccaatctctcccagctctcttctttcctccctggcctttgtcctgcaggaggtagcatcacctcttggcattttgtacatgcttttaaacaattggaggagctgcccaggcagttttatggcctcctggttgtgtgccttcacacccgcctacagccccacctcaccatcaagcgctgagccaatgcgggtgtggctggccctgagttcctgagtcagctccttgccagggccagagctggtaacagcggggcagcagggtgggtagcctctaccagccagggcagtccctgaggggccagcaggggggctgactgcctagtggctcaacctcctgaacccacccactcccagcgatgctacccagaaccccaacggcatgaatcctgcacagtgccgggcagtgccagactccaaagggctcgctgtggggacagccccgccatggccacagactctgtcctcacctttgattgtcaggatgacagcccccaccaccatgatgagcgtctgcagggcgtccgtgtagattacagcagccaggccccctgccagtggaagcaaggttgctggagggggccctggccccagggaggagggacacggggaggaacttctggggctcctgctggggccacttcctgggctgctccctcgggcctgtagggggaggtggccttctgacccctttacacgtcccctgggtggacctccctgctgcaggcaccatacctgcgatggtgtacagggctgtgatgccgagcgtgaggatggtggagaggtagaagttccagcccaggcagatgtgcacaaacagagcccccgcgtacaggtccagctgcggagggagagagccttgtgtgggactgttattcccagggctccagcaagccactccctgggtgacctcgggcaaggccctctctgggcctcggtggcctgtggataaggaggggagacccccactcgcctgcctgcctgcatcacggggccattgtgaggttgggggaagacctggccgtggagctacaagcttgtgcggatgtcaggggacattactgttgctaataaagtccaaagtggccaatgcctttcccaaaaaaaaaa

SEQ ID NO: 737321 - DNA, 3740 bp, Homo sapiens
ctggaacccccagcccagccagatgaaccgcatcaagatccgtgacacctcccaggccagcgcccagcaccagctgtggaagcagagccaggacagcaggccccgtccagagccttgccctcccccagagcccagtgccccccaggacggtgtcccagctgagaacggcctcccccagggggaccctgagccattgccccccgtgcccaagccccggacagtccctgtggcagatgtactagcccgggacagcagtgatattggctgggtcctggagctccccaaagaggaagctccccagaatgggacagaccataggctacccaggatggcaggcccaggccacgccccactccagcggcagctatctgtgacccaggatgaccccgagagcctcggggtggggctccccaatgggctggatggggtggaagaagaagatgatgacgactacgtaaccctcagtgaccaggacagccactcaggcagctccggccgtggccctggcccccgacggccctcagtggcttcctctgtgtcagaggagtacttcgaggtgagagagcactcagtccctctccggaggcgccactcagagcaagtggccaacgggccaaccccaccaccgcgccggcagctgagtgccccccatataacccgagggacctttgttggaccccaggtggctccccatgggcccagagtcggggaagagaagaagcagatgcgttgaagaggatgcaggcccagcgctccacagacaaggaggcacagggccagcagtttcatcatcacagggtccctgcctcagggactagggataaagacggcttcccaggaccccctaggtaccgctctgctgctgacagcgtccagagctctaccagaaacgctggcccagccatggctggcccccaccactggcaggccaagggaggtcaggtaccccgcctgcttccggatcccggcagcccaagactggcccaaaatgcccgccccatgaccgatggcagggccaccgaggagcatccgagtcccttcggaatcccatactccaaactgtctcagtcgaagcacctaaaggccaggacgggcggtagccagtgggcctcatcggattctaaacggagggctcaagccccccgggaccgcaaagacccctagcagcatgtcccagcctggagccacaccttctgaggccccagcccagactcatgacgcggagggcagacaggccgcctgggcctaccagagcccactgggacggcaggaaggtgggatgggcgggagacgttggcactcacctggtcggtgcaccagtaccaggtggccatgatggtcaggccaaaggtcatcccggtccacggcaggtcccctgtgtgggggtctcgaaacatgtgcatggcgtctgtacgtggcaggtggcaggtggtgttggcaatggtcctggagggaatggcctgggcgtaggctgcctccagctgcccgtaaccaccgatctggtcaaaagctggaggggtcagggtggaacagggacagtttggtggttgcggggccctgactccctgggctcccccctgccttcatctcacaagaaacttcctgatgcatcaaacttgagttttttccacctcatctttcccagtgtttggaaaggtgtgagggtagagggttgtttttttttttaaggtgtatttgaatgactattttattcgtatttaaaataatactattaagtaagcattttgcacatgggcaccccagtgtcccgctggcccagcaggagtcactgttggcctctggacactcatcggccttgggcaagtggttctcagccaggtttccgattgtcgattcaaggaagcaaaagtaatttttcttgacatttgaggaccttcctgaggcttctaaagtgttcatcctgatcacctgaagggtgtgattttagcagagctgagagtggctggtggtgatgtggccccaccccctgaggcacagagaagagggagacaggtccagagagggatggggcctccaccaagaccatatagaccatctggcgggctcaagccggggctttttcctctccagtccaaaacacctcactgttcctgtctacctcggggtcagggcccggcatggccaagccctggcccatctgtgtctgtgtcactcccctcccttccagactgggcctggctgctgggatccctctcatgcggtgggtcccagggacactagagcccctggtctgagagggagaagcctggatgtaggaaaacccgtttccaccccaggccctactccctagccttttccaagtgggacatggaagaggcagcctgctgcctggatgctggtctccccagcatcactgttcccatggagctcaggtcaggctctgtattcagaccgagggtttgtgtgaggctcagagcaaatgaacaagtgccattcaagggttagaaactgctcagccacagggtcccagtgtctgagtctggaagagtctttagagatttgttcactctctgagggatcctcctggctctgcttacatacttccagggacggtgagctcacgctctctccgggcagccctgtgagtttcctatctgttccagactagtatcgccaatctctcccagctctcttctttcctccctggcctttgtcctgcaggaggtagcatcacctcttggcattttgtacatgcttttaaacaattggaggagctgcccaggcagttttatggcctcctggttgtgtgccttcacacccgcctacagccccacctcaccatcaagcgctgagccaatgcgggtgtggctggccctgagttcctgagtcagctccttgccagggccagagctggtaacagcggggcagcagggtgggtagcctctaccagccagggcagtccctgaggggccagcaggggggctgactgcctagtggctcaacctcctgaacccacccactcccagcgatgctacccagaaccccaacggcatgaatcctgcacagtgccgggcagtgccagactccaaagggctcgctgtggggacagccccgccatggccacagactctgtcctcacctttgattgtcaggatgacagcccccaccaccatgatgagcgtctgcagggcgtccgtgtagattacagcagccaggccccctgccagtggaagcaaggttgctggagggggccctggccccagggaggagggacacggggaggaacttctggggctcctgctggggccacttcctgggctgctccctcgggcctgtagggggaggtggccttctgacccctttacacgtcccctgggtggacctccctgctgcaggcaccatacctgcgatggtgtacagggctgtgatgccgagcgtgaggatggtggagaggtagaagttccagcccaggcagatgtgcacaaacagagcccccgcgtacaggtccagctgcggagggagagagccttgtgtgggactgttattcccagggctccagcaagccactccctgggtgacctcgggcaaggccctctctgggcctcggtggcctgtggataaggaggggagacccccactcgcctgcctgcctgcatcacggggccattgtgaggttgggggaagacctggccgtggagctacaagcttgtgcggatgtcaggggacattactgttgctaataaagtccaaagtggccaatgcctttcccaaaaaaaaaa

SEQ ID NO: 737322 - DNA, 214 bp, Homo sapiens; identical to SEQ ID NO: 385373

SEQ ID NO: 737323 - DNA, 4169 bp, Homo sapiens
ggaatacaatttctagaagcagtcccaaattcattggtcattcccctcaacctctaggctatgacaggtcatcccgctcttcctatgtggatgaggactgtgactccctggccctctgtgatcctctgcagaggacaaattgtgaagttgacagcctgcctgaaagctgcttcgacagcggcttgtctaccttgagagatcccaatgagtatgactcagaagtggaatacaagcaccagaggggatttcagaggtcacacggggtgcaggagagctttggaggtgatgcttcagacacagatgttcctgacataagggatgaagagacatttggtttagaagatgtggcttccgtcttagactggaagccccaagggtctgttagtgaaggcagcattgttagttcatcaagaaagcccatctcagcactctcgccccagacagacctggtagatgacaacgctaaatcttttagctcacagaaggcttacaagattgtacttgctggggacgctgcagtggggaagtctagtttcctcatgagactttgcaagaatgaatttcgagaaaatataagcgccaccctgggagttgatttccaaatgaaaaccctcattgtggatggagaacgaacagttctgcagctctgggatacagctggtcaggagagattcagaagtattgccaagtcttacttcagaaaggcagatggtgttttgctgctgtatgatgttacatgtgagaaaagctttcttaacatacgagaatgggtagatatgattgaggatgcagcccatgagactgttcccattatgctggtaggaaacaaggctgacattcgtgacactgctgctacagagggacaaaaatgtgtcccagggcactttggagagaaactggccatgacgtatggggcattattctgtgaaacaagtgccaaagatggttctaacatagtggaggctgttctgcaccttgctcgagaagtgaaaaagagaactgacaaggatgacagcagatccattaccaatctaaccgggaccaattccaaaaagtcaccacagatgaagaattgttgcaatggctaaatcccaaacatccttggcctgtgaagtcttcatttccagaatactgaatttgtgtgacttatttggctcttaacagagtggcacatcctactgacactgtcctatggagagttacagtgcaggaaacctgaacccagctctcaggtccctctggaactttggctcttctttgttttgtctcagtgagtgatttgggccctctggctaaatagactagtcatgtccttacaggtcttaaaagataacatgtaaatgtttttaaaatggtaaaaaaaaagaaaagaaaagaaatcacatgctcagatcaaagctgtagaggaaactgacataattagattcatgtggtagctgaattaggttacccacaaagtcagcatttaaatatttgatactaaagttctagtaagaagggattctcatcctagctttgctgttaactggccttgtgaccttggacatgtcacaagcccatgtcggatctgtttcttcatctgtaaaatgtgcagcttgccctcaaaggccttgcagcccttggcacctcagattctgtgggaagcagtaggacagagagtgtggtggcccacagttaataatagaactatggttattcctgctttttaatattggagtattgatttttctcacttctgaaataaggacagaatttgattaaaaaatggaaacagaaatatctattttttatgtataaagaaacatgtttgagacaaaaatagttgtatataaaaggatatttcataatctcagaatagttacaaagctcactgcttgaatttggtgttaaaaattctaatggaaacatgtaaagccacatactactgaaagcacaatgcccaggaaagttgtcactcttcacttaagggagtggttgccaggggctgagaaagggaggatggggagtgactgctaataggtatgtggtttctttgggcgatgatgagaatgttctggaattggaatagtggtgatagttgtataactgtttgaatgtactaggaaccactgaattgtatactttgaaagggtgaattttatggttgtgaattatctcactaaaaaaaatgctagtacttagagtgatgtaacattttgcaaaattttcattttcgtatccctgctgatttcaaaccttcccatggtttagaagcataacctgtaatgtaatgcaagtcccctaactccctggttgctaacattaacttccttaagtaataatcaatgaaagaaattctatgcatggttttgaaataatatccttgaaagaggaatcaccattaggaaaggtgagtcagggtcctttgtttaatgtgactagtggctcatcatcaccagtgacctggttgggcctactctccttccagaacctgcattgcttcccagacctccccactgagatgcctctaagagccaaaggagtcaacacttgagcctagggtgggctacaacaaaagattctaatttaccttgcttcatctaggtccaggccccaagtagcttgctgaaggaacttaaaaagtagctgttatttattgtattgtataagctaaaaacatttatttttgttgaatcgaaacaattccatgtagcaatcttttttctgttcacggtgtttgtgatagaaccttaaattccgcaagcatcagttttttgaaaaaatgggaattgaccggatagttacaggcaaagattataaatagctacaacatcatttaacttttataaacatgccttctctctattgaagacatctgatatttttgctggaaagttggatctatcctcagtaactctgccatgaattcctgtttcctggttccagaaaaagaaaagattacatttctgatcataaagaatgtcttgcatatgggaaatttttcaaaataaggggggtattatttatgtggcatgggaaaacttttgccatggctgtttgtcttagtggcatcttttgatgacattggatcagatatatgtagatgctgatatatgggacacatgtttaggttttggtgcagttgcacaaaactgtgttagtttatatgttactgtgttgcctttatttattctctccaaagtgtctctttatatttgttttacaatctgtgaaagagtataccataatacagaagtattttcatagtctttacctctggattgtcctgtcagtatagccacgttgatgagattacaccagtgcctttgatcatctttaagtatttgagccctgataaatattttggtaacataatccaaattagagacttagagctctggttagcaatcatgtttaaagagaagcttcttaaagctctgtatgctgggagattcatgattattaccaacgttttgatttcatgaaggtgttctcaaatttaaagcacattttcagtaagaacaaaaatatttaatgtttttatcttagacttaacttgatacatttgcatattactatggaagttattcaccttgtccctgtttttctttaagatattttaaaatcatagttatactacagtccttttttaaatgtatcctgatacattgtaaaatattttaatttcattgtggaaaataatgttggataaggagatatttttcactgttaacttttagcccatgcattttcataatttatttttttcacttgctgctttatatgacatatgtgacatttgattatttaacacttgatgtgatctgcataaacccaagttgcacaaccctcctgctgaagataaaattgaggttaaagataaagatttattttcatatttgtacagtgatcggcttcagtgatggtttttgtgggcatttattgtgtgtgtgtaagaaatttcatatgtatatattaagtaggcctctgagtattgaataattgttttatgattttgatttatatggtttacattttcattgtgtgggccatatttcgtttatactgtttatttctcttcaaaccttaataattataccataaagtgtaatttttatagcaatgcaaatgtctaaggaactacaaatattttctacgttgtaaattcaataaagcttgcttcctttggc

SEQ ID NO: 737324 - DNA, 1998 bp, Homo sapiens
ggaatacaatttctagaagcagtcccaaattcattggtcattcccctcaacctctaggctatgacaggtcatcccgctcttcctatgtggatgaggactgtgactccctggccctctgtgatcctctgcagaggacaaattgtgaagttgacagcctgcctgaaagctgcttcgacagcggcttgtctaccttgagagatcccaatgagtatgactcagaagtggaatacaagcaccagaggggatttcagaggtcacacggggtgcaggagagctttggaggtgatgcttcagacacagatgttcctgacataagggatgaagagacatttggtttagaagatgtggcttccgtcttagactggaagccccaagggtctgttagtgaaggcagcattgttagttcatcaagaaagcccatctcagcactctcgccccagacagacctggtagatgacaacgctaaatcttttagctcacagaaggcttacaagattgtacttgctggggacgctgcagtggggaagtctagtttcctcatgagactttgcaagaatgaatttcgagaaaatataagcgccaccctgggagttgatttccaaatgaaaaccctcattgtggatggagaacgaacagttctgcagctctgggatacagctggtcaggagagattcagaagtattgccaagtcttacttcagaaaggcagatggtgttttgctgctgtatgatgttacatgtgagaaaagctttcttaacatacgagaatgggtagatatgattgaggatgcagcccatgagactgttcccattatgctggtaggaaacaaggctgacattcgtgacactgctgctacagagggacaaaaatgtgtcccagggcactttggagagaaactggccatgacgtatggggcattattctgtgaaacaagtgccaaagatggttctaacatagtggaggctgttctgcaccttgctcgagaagtgaaaaagagaactgacaaggatgacagcagatccattaccaatctaaccgggaccaattccaaaaagtcaccacagatgaagaattgttgcaatggctaaatcccaaacatccttggcctgtgaagtcttcatttccagaatactgaatttgtgtgacttatttggctcttaacagagtggcacatcctactgacactgtcctatggagagttacagtgcaggaaacctgaacccagctctcaggtccctctggaactttggctcttctttgttttgtctcagtgagtgatttgggccctctggctaaatagactagtcatgtccttacaggtcttaaaagataacatgtaaatgtttttaaaatggtaaaaaaaaagaaaagaaaagaaatcacatgctcagatcaaagctgtagaggaaactgacataattagattcatgtggtagctgaattaggttacccacaaagtcagcatttaaatatttgatactaaagttctagtaagaagggattctcatcctagctttgctgttaactggccttgtgaccttggacatgtcacaagcccatgtcggatctgtttcttcatctgtaaaatgtgcagcttgccctcaaaggccttgcagcccttggcacctcagattctgtgggaagcagtaggacagagagtgtggtggcccacagttaataatagaactatggttattcctgctttttaatattggagtattgatttttctcacttctgaaataaggacagaatttgattaaaaaatggaaacagaaatatctattttttatgtataaagaaacatgtttgagacaaaaatagttgtatataaaaggatatttcataatctcagaatagtttatgctgtggaggagctaattaaactcatttctgggcattttacagtctatgaggagcttagagttttctcctttctgctagctctcttagaacaatacagacagtttctgtctcctccctgcaatagtttatgctgt

SEQ ID NO: 737325 - DNA, 1405 bp, Homo sapiens
ggaatacaatttctagaagcagtcccaaattcattggtcattcccctcaacctctaggctatgacaggtcatcccgctcttcctatgtggatgaggactgtgactccctggccctctgtgatcctctgcagaggacaaattgtgaagttgacagcctgcctgaaagctgcttcgacagcggcttgtctaccttgagagatcccaatgagtatgactcagaagtggaatacaagcaccagaggggatttcagaggtcacacggggtgcaggagagctttggaggtgatgcttcagacacagatgttcctgacataagggatgaagagacatttggtttagaagatgtggcttccgtcttagactggaagccccaagggtctgttagtgaaggcagcattgttagttcatcaagaaagcccatctcagcactctcgccccagacagacctggtagatgacaacgctaaatcttttagctcacagaaggcttacaagattgtacttgctggggacgctgcagtggggaagtctagtttcctcatgagactttgcaagaatgaatttcgagaaaatataagcgccaccctgggagttgatttccaaatgaaaaccctcattgtggatggagaacgaacagttctgcagctctgggatacagctggtcaggagagattcagaagtattgccaagtcttacttcagaaaggcagatggtgttttgctgctgtatgatgttacatgtgagaaaagctttcttaacatacgagaatgggtagatatgattgaggatgcagcccatgagactgttcccattatgctggtaggaaacaaggctgacattcgtgacactgctgctacagagggacaaaaatgtgtcccagggcactttggagagaaactggccatgacgtatggggcattattctgtgaaacaagtgccaaagatggttctaacatagtggaggctgttctgcaccttgctcgagaagtgaaaaagagaactgacaaggatgacagcagatccattaccaatctaaccgggaccaattccaaaaagtcaccacagatgaagaattgttgcaatggctaaatcccaaacatccttggcctgtgaagtcttcatttccagaatactgaatttgtgtgacttatttggctcttaacagagtggcacatcctactgacactgtcctatggagagttacagtgcaggaaacctgaacccagctctcaggtccctctggaactttggctcttctttgttttgtctcagtgagtgatttgggccctctggctaaatagactagtcatgtccttacaggtcttaaaagataacatgtaaatgtttttaaaatggtaaaaaaaaaagtcgacgcggccgcgaatttagtagtagtaggcggccgc

SEQ ID NO: 737326 - DNA, 3246 bp, Homo sapiens
cagtaatcctctctctctctctctctctctctctctgtctctctctatctctgtctcagagaagtgaaaaagagaactgacaaggatgacagcagatccattaccaatctaaccgggaccaattccaaaaagtcaccacagatgaagaattgttgcaatggctaaatcccaaacatccttggcctgtgaagtcttcatttccagaatactgaatttgtgtgacttatttggctcttaacagagtggcacatcctactgacactgtcctatggagagttacagtgcaggaaacctgaacccagctctcaggtccctctggaactttggctcttctttgttttgtctcagtgagtgatttgggccctctggctaaatagactagtcatgtccttacaggtcttaaaagataacatgtaaatgtttttaaaatggtaaaaaaaaagaaaagaaaagaaatcacatgctcagatcaaagctgtagaggaaactgacataattagattcatgtggtagctgaattaggttacccacaaagtcagcatttaaatatttgatactaaagttctagtaagaagggattctcatcctagctttgctgttaactggccttgtgaccttggacatgtcacaagcccatgtcggatctgtttcttcatctgtaaaatgtgcagcttgccctcaaaggccttgcagcccttggcacctcagattctgtgggaagcagtaggacagagagtgtggtggcccacagttaataatagaactatggttattcctgctttttaatattggagtattgatttttctcacttctgaaataaggacagaatttgattaaaaaatggaaacagaaatatctattttttatgtataaagaaacatgtttgagacaaaaatagttgtatataaaaggatatttcataatctcagaatagttacaaagctcactgcttgaatttggtgttaaaaattctaatggaaacatgtaaagccacatactactgaaagcacaatgcccaggaaagttgtcactcttcacttaagggagtggttgccaggggctgagaaagggaggatggggagtgactgctaataggtatgtggtttctttgggcgatgatgagaatgttctggaattggaatagtggtgatagttgtataactgtttgaatgtactaggaaccactgaattgtatactttgaaagggtgaattttatggttgtgaattatctcactaaaaaaaatgctagtacttagagtgatgtaacattttgcaaaattttcattttcgtatccctgctgatttcaaaccttcccatggtttagaagcataacctgtaatgtaatgcaagtcccctaactccctggttgctaacattaacttccttaagtaataatcaatgaaagaaattctatgcatggttttgaaataatatccttgaaagaggaatcaccattaggaaaggtgagtcagggtcctttgtttaatgtgactagtggctcatcatcaccagtgacctggttgggcctactctccttccagaacctgcattgcttcccagacctccccactgagatgcctctaagagccaaaggagtcaacacttgagcctagggtgggctacaacaaaagattctaatttaccttgcttcatctaggtccaggccccaagtagcttgctgaaggaacttaaaaagtagctgttatttattgtattgtataagctaaaaacatttatttttgttgaatcgaaacaattccatgtagcaatcttttttctgttcacggtgtttgtgatagaaccttaaattccgcaagcatcagttttttgaaaaaatgggaattgaccggatagttacaggcaaagattataaatagctacaacatcatttaacttttataaacatgccttctctctattgaagacatctgatatttttgctggaaagttggatctatcctcagtaactctgccatgaattcctgtttcctggttccagaaaaagaaaagattacatttctgatcataaagaatgtcttgcatatgggaaatttttcaaaataaggggggtattatttatgtggcatgggaaaacttttgccatggctgtttgtcttagtggcatcttttgatgacattggatcagatatatgtagatgctgatatatgggacacatgtttaggttttggtgcagttgcacaaaactgtgttagtttatatgttactgtgttgcctttatttattctctccaaagtgtctctttatatttgttttacaatctgtgaaagagtataccataatacagaagtattttcatagtctttacctctggattgtcctgtcagtatagccacgttgatgagattacaccagtgcctttgatcatctttaagtatttgagccctgataaatattttggtaacataatccaaattagagacttagagctctggttagcaatcatgtttaaagagaagcttcttaaagctctgtatgctgggagattcatgattattaccaacgttttgatttcatgaaggtgttctcaaatttaaagcacattttcagtaagaacaaaaatatttaatgtttttatcttagacttaacttgatacatttgcatattactatggaagttattcaccttgtccctgtttttctttaagatattttaaaatcatagttatactacagtccttttttaaatgtatcctgatacattgtaaaatattttaatttcattgtggaaaataatgttggataaggagatatttttcactgttaacttttagcccatgcattttcataatttatttttttcacttgctgctttatatgacatatgtgacatttgattatttaacacttgatgtgatctgcataaacccaagttgcacaaccctcctgctgaagataaaattgaggttaaagataaagatttattttcatatttgtacagtgatcggcttcagtgatggtttttgtgggcatttattgtgtgtgtgtaagaaatttcatatgtatatattaagtaggcctctgagtattgaataattgttttatgattttgatttatatggtttacattttcattgtgtgggccatatttcgtttatactgtttatttctcttcaaaccttaataattataccataaagtgtaatttttatagcaatgcaaatgtctaaggaactacaaatattttctacgttgtaaattcaataaagcttgcttcctttggc

SEQ ID NO: 737327 - DNA, 454 bp, Homo sapiens
tccaacatgacaccccccgaagccccaacaccaggtggctggctgtccctgcccaggaaacagggctccctggatttgtccccagcaggaaccagtgagccaggaacagactgacaactgccacaacaccctcctcagccctcgacatgtgcctcgcaaggactcagacccctatccacccccagtccccagggccccctgccagcccctgtcctacaggggcaagacggcaggaccaggcatgggggagctggaggcagggactagaacagagggagccacctggagagacggaggctgtcagtgcctgcctcgatacctctctctgcagagagcttctgggtgggggcttatctcctcccccaggagggtggatctctgtccctctatccccagggactctctcccctcttgtatagaataaaaaaacaaaatcatcgcctaaaaaaagtct

SEQ ID NO: 737328 - DNA, 1682 bp, Homo sapiens
ggagctcacccgcgagttgcaagacagcatccggaggtgcctgagccaaggggccgtgctccaacaacatcatgtgaagttggagacaaagcccaagaagtttgaggaccgagtgctggccctgacctcctggcgcctccacctcttcctccttaaagtcccggccaaggtggagagctccttcaatgtcctggagatccgtgccttcaacacgctcagtcagaatcagatcctggtggagacggagcgtggcatggtgagcatgcgactgccatcagctgaaagtgtggaccaggtgacacgacatgtgagctctgccctgtccaaggtctgccctggccctgggtgtttgatccggcgtggaaacgcagacaccccagaggggccccgagatacatcccccaactctgagacttccacatctaccacccacagtgtctgcggtggcttctctgagacctacgctgctctgtgtgactacaatgggctacactgccgtgaggaggttcaatgggatgtggacaccatctaccatgctgaagataaccgggagttcaatcttttggatttcagccacttggagagccgagacttggccctaatggtagcagccctggcctacaaccagtggttcaccaaactctactgcaaggacttgcggctgggctctgaagtgctagaacaggtgctacataccctaagcaagtcggggagcctcgaagagctggtgctggacaacgccgggcttaagacggactttgtccagaagctggccggggtgtttggggagaacgggagctgtgtgctgcatgccctcactctgtcccacaaccccatcgaggacaagggttttctcagtctgagccagcagctcctctgcttcccctctggcctcaccaaactgtgcctggccaagactgccatttcccctcgagggctccaggcactcggccagaccttcggggcaaacccagcatttgccagctcccttcgatacctggacctgagcaagaatcctgggctcctcgccacggatgaggccaatgccctctacagtttcctggcccaacccaacgccctggtgcacctggacctgtcaggaactgactgcgtcatcgacttgcttctcggtgccctgctccacggctgctgctcccacctcacctacctcaacctggctcgcaacagctgctcccacaggggtctctccacaggaagggtcgagaggccccgccggccttcaagcagttcttcagcagcgcctacacactgagccacgtcaatctgtcggccacaaagctgcccctggaggccctcagggcgctgcttcagggcctctccctcaacagtcacctcagtgacctgcacctggatctcagcagctgcgagctccgttcagcgggagcccaagccttgcaggagcagctgggagctgtcacctgtgtaggcagcctggatctgtcagacaatgggttcgactcggacctcctgacactggtgcctgcacttggcaagaacaagtccctcaagcacctgtttttgggcaagaacttcaatgtcaaggccaagtgaggccccctttccatgcccacagaccctcatcccatcattcacccatcctcttggctcaccgtattacctctggccacctctctcctcctccaatagcatgaccccagccc

SEQ ID NO: 737329 - DNA, 4059 bp, Homo sapiens
  misc_feature (2112)..(2112): n is a, c, g, or t
ggagctcacccgcgagttgcaagacagcatccggaggtgcctgagccaaggggccgtgctccaacaacatcatgtgaagttggagacaaagcccaagaagtttgaggaccgagtgctggccctgacctcctggcgcctccacctcttcctccttaaagtcccggccaaggtggagagctccttcaatgtcctggagatccgtgccttcaacacgctcagtcagaatcagatcctggtggagacggagcgtggcatggtgagcatgcgactgccatcagctgaaagtgtggaccaggtgacacgacatgtgagctctgccctgtccaaggtctgccctggccctgggtgtttgatccggcgtggaaacgcagacaccccagaggggccccgagatacatcccccaactctgagacttccacatctaccacccacagtgtctgcggtggcttctctgagacctacgctgctctgtgtgactacaatgggctacactgccgtgaggaggttcaatgggatgtggacaccatctaccatgctgaagataaccgggagttcaatcttttggatttcagccacttggagagccgagacttggccctaatggtagcagccctggcctacaaccagtggttcaccaaactctactgcaaggacttgcggctgggctctgaagtgctagaacaggtgctacataccctaagcaagtcggggagcctcgaagagctggtgctggacaacgccgggcttaagacggactttgtccagaagctggccggggtgtttggggagaacgggagctgtgtgctgcatgccctcactctgtcccacaaccccatcgaggacaagggttttctcagtctgagccagcagctcctctgcttcccctctggcctcaccaaactgtgcctggccaagactgccatttcccctcgagggctccaggcactcggccagaccttcggggcaaacccagcatttgccagctcccttcgatacctggacctgagcaagaatcctgggctcctcgccacggatgaggccaatgccctctacagtttcctggcccaacccaacgccctggtgcacctggacctgtcaggaactgactgcgtcatcgacttgcttctcggtgccctgctccacggctgctgctcccacctcacctacctcaacctggctcgcaacagctgctcccacaggggtctctccacaggaagggtcgagaggccccgccggccttcaagcagttcttcagcagcgcctacacactgagccacgtcaatctgtcggccacaaagctgcccctggaggccctcagggcgctgcttcagggcctctccctcaacagtcacctcagtgacctgcacctggatctcagcagctgcgagctccgttcagcgggagcccaagccttgcaggagcagctgggagctgtcacctgtgtaggcagcctggatctgtcagacaatgggttcgactcggacctcctgacactggtgcctgcacttggcaagaacaagtccctcaagcacctgtttttgggcaagaacttcaatgtcaaggccaagaccctggaggagatcctccacaagctggtgcagctgatccaggaagaggactgttccctgcagtcactgtcggtggcagactcccggctgaagcttcgcaccagcatcctcatcaatgccctgggcagcaacacctgcctggccaaggtggatctgagcggcaatggcatggaggacatcggggccaagatgctgtctaaggccctgcagataaactcctccctcagaactatcctatgggatcggaacaatacatctgccctgggcttcctggacatcgcaagggccctggagagcaaccacacgctgcgcttcatgtccttccccgtgagcgacatctcccaagcctatcgcagcgcgcctgagcgcaccgaggacgtctggcagaagatccaatggtgcttagtgaggaacaaccactcccagacgtgcccccaggagcaggccttcaggttgcagcagggcctggtgaccagcagcgccgagcaaatgctgcagcggctgtgtggacgagtgcaggaggaggtgcgggccctgagactntgccccctggagcctgtgcaggatgagctactctacgctcgggacctcatcaaagatgccaagaactcccgggcggtgagccctccacaggctacccttcccctgaagtctggagaacccaagaaggccgaccatgctaagccatgacagccctgccctgtgcatctgccttcctagcccagggaccccagagacctagcaagtcctggttctggcctgctaatcataaccccttccttctccagctgtttcccagcctctatgagctgggccacgtgctggccaatgatgggcctgtgcggcagaggctggaatcagtagcaagtgaggtgtccaaagctgtggacaaggagctgcaggcaagtcctggaggagggaggaatccatggtgggaacctagtgttgactgaggccctaagcccagagctaaagtcagagctgggagacttctggagggccaggaggacatgcagagttgagaccacccacgctcccactgtaccaaggcattgctgcaatatcaggcttggatttttttctgctagctttgatgttggtccctgaactctgacctccctgctctggatttggatccttggactgactgcccctgtctgtatggtagggtggaaggagcactgaccagaaagtggggaagccttagtgtccaaggctctgccactaacagttttgtgacttaggcaggtccctcagtctcagcaggaggggctggaatagataaagtctcttctgctgtggtgccagccctgatcctgtcccccttgggcctctggcctccctttcccccatactaggtgatcctggagtccatggtcagcctgacacaggagttatgccctgtggccatgcgggtggccgagggacacaacaagatgctgagcaatgtggcggagcgtgtcactgtgccccggaacttcatccgaggggcactgctggagcaagcaggacaggacattcagaacaagctggatgaagtgaagctctcagtcgtcacctacctaaccagctccatagtggatgagatcctgcaagagctctaccattcccacaagagcctggcccggcacctgacccagctaaggacgctgtcagatccaccagggtgcccaggccaagggcaggatctgtcctcccggggccgaggccggaaccatgaccatgaggagaccacagatgatgaacttgggaccaacattgacaccatggccatcaaaaagcagaaacgctgccgcaagattcggccggtgtctgccttcatcagcgggagccctcaggacatggaaagccaactggggaatctggggatcccccctggctggttctcaggacttgggggcagccagcccacagctagtggctcctgggaaggtctatctgagctgcccactcatggttacaaactaaggcatcaaacacaagggaggccccgcccccccaggaccacacctccaggacctggtcgacccagtatgccagcacctgggactcgtcaggagaatgggatggccacccgcctggatgaagggctggaggacttcttcagccgaagggtcctggaggaaagttctaggtgtgatgcctaaacacactcccattttcagcaggccccaaggccctagaagggctgctgtgtcctcccagctcccatgggagtctccataacagcagtgcccaaagccagtctctgtgagaaatttccccacattctcatccttccccacccagccctcagggcccatgacctctgcgtcttcccaggacagctgggaagaatggggccagagtgaaccaccacagtggggttggagagcaggtgtggatgagagggaggtggggggcagccctgggacaggatacccattagtggtgagaggcccggggggtagtgttccctgtcactgtcctgcagactgcccagggtctgtc

SEQ ID NO: 737330 - DNA, 4609 bp, Homo sapiens
  misc_feature (2112)..(2112): n is a, c, g, or t
  misc_feature (4318)..(4318): n is a, c, g, or t
ggagctcacccgcgagttgcaagacagcatccggaggtgcctgagccaaggggccgtgctccaacaacatcatgtgaagttggagacaaagcccaagaagtttgaggaccgagtgctggccctgacctcctggcgcctccacctcttcctccttaaagtcccggccaaggtggagagctccttcaatgtcctggagatccgtgccttcaacacgctcagtcagaatcagatcctggtggagacggagcgtggcatggtgagcatgcgactgccatcagctgaaagtgtggaccaggtgacacgacatgtgagctctgccctgtccaaggtctgccctggccctgggtgtttgatccggcgtggaaacgcagacaccccagaggggccccgagatacatcccccaactctgagacttccacatctaccacccacagtgtctgcggtggcttctctgagacctacgctgctctgtgtgactacaatgggctacactgccgtgaggaggttcaatgggatgtggacaccatctaccatgctgaagataaccgggagttcaatcttttggatttcagccacttggagagccgagacttggccctaatggtagcagccctggcctacaaccagtggttcaccaaactctactgcaaggacttgcggctgggctctgaagtgctagaacaggtgctacataccctaagcaagtcggggagcctcgaagagctggtgctggacaacgccgggcttaagacggactttgtccagaagctggccggggtgtttggggagaacgggagctgtgtgctgcatgccctcactctgtcccacaaccccatcgaggacaagggttttctcagtctgagccagcagctcctctgcttcccctctggcctcaccaaactgtgcctggccaagactgccatttcccctcgagggctccaggcactcggccagaccttcggggcaaacccagcatttgccagctcccttcgatacctggacctgagcaagaatcctgggctcctcgccacggatgaggccaatgccctctacagtttcctggcccaacccaacgccctggtgcacctggacctgtcaggaactgactgcgtcatcgacttgcttctcggtgccctgctccacggctgctgctcccacctcacctacctcaacctggctcgcaacagctgctcccacaggggtctctccacaggaagggtcgagaggccccgccggccttcaagcagttcttcagcagcgcctacacactgagccacgtcaatctgtcggccacaaagctgcccctggaggccctcagggcgctgcttcagggcctctccctcaacagtcacctcagtgacctgcacctggatctcagcagctgcgagctccgttcagcgggagcccaagccttgcaggagcagctgggagctgtcacctgtgtaggcagcctggatctgtcagacaatgggttcgactcggacctcctgacactggtgcctgcacttggcaagaacaagtccctcaagcacctgtttttgggcaagaacttcaatgtcaaggccaagaccctggaggagatcctccacaagctggtgcagctgatccaggaagaggactgttccctgcagtcactgtcggtggcagactcccggctgaagcttcgcaccagcatcctcatcaatgccctgggcagcaacacctgcctggccaaggtggatctgagcggcaatggcatggaggacatcggggccaagatgctgtctaaggccctgcagataaactcctccctcagaactatcctatgggatcggaacaatacatctgccctgggcttcctggacatcgcaagggccctggagagcaaccacacgctgcgcttcatgtccttccccgtgagcgacatctcccaagcctatcgcagcgcgcctgagcgcaccgaggacgtctggcagaagatccaatggtgcttagtgaggaacaaccactcccagacgtgcccccaggagcaggccttcaggttgcagcagggcctggtgaccagcagcgccgagcaaatgctgcagcggctgtgtggacgagtgcaggaggaggtgcgggccctgagactntgccccctggagcctgtgcaggatgagctactctacgctcgggacctcatcaaagatgccaagaactcccgggcggtgagccctccacaggctacccttcccctgaagtctggagaacccaagaaggccgaccatgctaagccatgacagccctgccctgtgcatctgccttcctagcccagggaccccagagacctagcaagtcctggttctggcctgctaatcataaccccttccttctccagctgtttcccagcctctatgagctgggccacgtgctggccaatgatgggcctgtgcggcagaggctggaatcagtagcaagtgaggtgtccaaagctgtggacaaggagctgcaggcaagtcctggaggagggaggaatccatggtgggaacctagtgttgactgaggccctaagcccagagctaaagtcagagctgggagacttctggagggccaggaggacatgcagagttgagaccacccacgctcccactgtaccaaggcattgctgcaatatcaggcttggatttttttctgctagctttgatgttggtccctgaactctgacctccctgctctggatttggatccttggactgactgcccctgtctgtatggtagggtggaaggagcactgaccagaaagtggggaagccttagtgtccaaggctctgccactaacagttttgtgacttaggcaggtccctcagtctcagcaggaggggctggaatagataaagtctcttctgctgtggtgccagccctgatcctgtcccccttgggcctctggcctccctttcccccatactaggtgatcctggagtccatggtcagcctgacacaggagttatgccctgtggccatgcgggtggccgagggacacaacaagatgctgagcaatgtggcggagcgtgtcactgtgccccggaacttcatccgaggggcactgctggagcaagcaggacaggacattcagaacaagctggatgaagtgaagctctcagtcgtcacctacctaaccagctccatagtggatgagatcctgcaagagctctaccattcccacaagagcctggcccggcacctgacccagctaaggacgctgtcagatccaccagggtgcccaggccaagggcaggatctgtcctcccggggccgaggccggaaccatgaccatgaggagaccacagatgatgaacttgggaccaacattgacaccatggccatcaaaaagcagaaacgctgccgcaagattcggccggtgtctgccttcatcagcgggagccctcaggacatggaaagccaactggggaatctggggatcccccctggctggttctcaggacttgggggcagccagcccacagctagtggctcctgggaaggtctatctgagctgcccactcatggttacaaactaaggcatcaaacacaagggaggccccgcccccccaggaccacacctccaggacctggtcgacccagtatgccagcacctgggactcgtcaggagaatgggatggccacccgcctggatgaagggctggaggacttcttcagccgaagggtcctggaggaaagttctagctacccccggactctgaggaccgtgcggccaggactctcggaggcaccgctgcctccactccagaagaagaggcgccggggcctgtttcactttcgccggccccggagcttcaagggggacagggggccggggtcccctaccactggactcctcctccctccacccccaccccctcccccgactcaggagagcccccctagcccagaccccccaagcctcggcaataactcctctccctgctggagcccagaggaggagagcagcctcctccctggatttggtgggggccggggaccttccttccgccggaagatggtaagtgaggcagggggtgctgtgtcttccccttttcctgccccacacttaacccagtctcctaccccaccccaagcttaatgggagaatgctaggacccagggttcttgggaacattggtcatttcaattctcctctccttgagagtggactaagacccagtggccaagagcatgctgggagtgctatatgcgaatgcaggcgttggaaggactcttcagagggtctctgcagggcttccccgtggctagggactcagtgaggcaggggtcctcctgacaactccctcacagcctggngagcccccttcgactgggaactgctaataaataagagaccttgttctagggcactgaggggtcagagccaggggaggggggcccagcccctgggacagcacagcagccaagggttcacggtgttgcccttcccgggttggaaagagccaagggttggagcttcgatgggaaacgagaggtgagtggagcctgggacaacaaactgtgggtcctgagggtatctgtccaccaccctctccttcccactccctcatccctggtggttcagtagagaaagcagatgctttggca

SEQ ID NO: 737331 - DNA, 5430 bp, Homo sapiens
  misc_feature (2112)..(2112): n is a, c, g, or t
  misc_feature (4318)..(4318): n is a, c, g, or t
ggagctcacccgcgagttgcaagacagcatccggaggtgcctgagccaaggggccgtgctccaacaacatcatgtgaagttggagacaaagcccaagaagtttgaggaccgagtgctggccctgacctcctggcgcctccacctcttcctccttaaagtcccggccaaggtggagagctccttcaatgtcctggagatccgtgccttcaacacgctcagtcagaatcagatcctggtggagacggagcgtggcatggtgagcatgcgactgccatcagctgaaagtgtggaccaggtgacacgacatgtgagctctgccctgtccaaggtctgccctggccctgggtgtttgatccggcgtggaaacgcagacaccccagaggggccccgagatacatcccccaactctgagacttccacatctaccacccacagtgtctgcggtggcttctctgagacctacgctgctctgtgtgactacaatgggctacactgccgtgaggaggttcaatgggatgtggacaccatctaccatgctgaagataaccgggagttcaatcttttggatttcagccacttggagagccgagacttggccctaatggtagcagccctggcctacaaccagtggttcaccaaactctactgcaaggacttgcggctgggctctgaagtgctagaacaggtgctacataccctaagcaagtcggggagcctcgaagagctggtgctggacaacgccgggcttaagacggactttgtccagaagctggccggggtgtttggggagaacgggagctgtgtgctgcatgccctcactctgtcccacaaccccatcgaggacaagggttttctcagtctgagccagcagctcctctgcttcccctctggcctcaccaaactgtgcctggccaagactgccatttcccctcgagggctccaggcactcggccagaccttcggggcaaacccagcatttgccagctcccttcgatacctggacctgagcaagaatcctgggctcctcgccacggatgaggccaatgccctctacagtttcctggcccaacccaacgccctggtgcacctggacctgtcaggaactgactgcgtcatcgacttgcttctcggtgccctgctccacggctgctgctcccacctcacctacctcaacctggctcgcaacagctgctcccacaggggtctctccacaggaagggtcgagaggccccgccggccttcaagcagttcttcagcagcgcctacacactgagccacgtcaatctgtcggccacaaagctgcccctggaggccctcagggcgctgcttcagggcctctccctcaacagtcacctcagtgacctgcacctggatctcagcagctgcgagctccgttcagcgggagcccaagccttgcaggagcagctgggagctgtcacctgtgtaggcagcctggatctgtcagacaatgggttcgactcggacctcctgacactggtgcctgcacttggcaagaacaagtccctcaagcacctgtttttgggcaagaacttcaatgtcaaggccaagaccctggaggagatcctccacaagctggtgcagctgatccaggaagaggactgttccctgcagtcactgtcggtggcagactcccggctgaagcttcgcaccagcatcctcatcaatgccctgggcagcaacacctgcctggccaaggtggatctgagcggcaatggcatggaggacatcggggccaagatgctgtctaaggccctgcagataaactcctccctcagaactatcctatgggatcggaacaatacatctgccctgggcttcctggacatcgcaagggccctggagagcaaccacacgctgcgcttcatgtccttccccgtgagcgacatctcccaagcctatcgcagcgcgcctgagcgcaccgaggacgtctggcagaagatccaatggtgcttagtgaggaacaaccactcccagacgtgcccccaggagcaggccttcaggttgcagcagggcctggtgaccagcagcgccgagcaaatgctgcagcggctgtgtggacgagtgcaggaggaggtgcgggccctgagactntgccccctggagcctgtgcaggatgagctactctacgctcgggacctcatcaaagatgccaagaactcccgggcggtgagccctccacaggctacccttcccctgaagtctggagaacccaagaaggccgaccatgctaagccatgacagccctgccctgtgcatctgccttcctagcccagggaccccagagacctagcaagtcctggttctggcctgctaatcataaccccttccttctccagctgtttcccagcctctatgagctgggccacgtgctggccaatgatgggcctgtgcggcagaggctggaatcagtagcaagtgaggtgtccaaagctgtggacaaggagctgcaggcaagtcctggaggagggaggaatccatggtgggaacctagtgttgactgaggccctaagcccagagctaaagtcagagctgggagacttctggagggccaggaggacatgcagagttgagaccacccacgctcccactgtaccaaggcattgctgcaatatcaggcttggatttttttctgctagctttgatgttggtccctgaactctgacctccctgctctggatttggatccttggactgactgcccctgtctgtatggtagggtggaaggagcactgaccagaaagtggggaagccttagtgtccaaggctctgccactaacagttttgtgacttaggcaggtccctcagtctcagcaggaggggctggaatagataaagtctcttctgctgtggtgccagccctgatcctgtcccccttgggcctctggcctccctttcccccatactaggtgatcctggagtccatggtcagcctgacacaggagttatgccctgtggccatgcgggtggccgagggacacaacaagatgctgagcaatgtggcggagcgtgtcactgtgccccggaacttcatccgaggggcactgctggagcaagcaggacaggacattcagaacaagctggatgaagtgaagctctcagtcgtcacctacctaaccagctccatagtggatgagatcctgcaagagctctaccattcccacaagagcctggcccggcacctgacccagctaaggacgctgtcagatccaccagggtgcccaggccaagggcaggatctgtcctcccggggccgaggccggaaccatgaccatgaggagaccacagatgatgaacttgggaccaacattgacaccatggccatcaaaaagcagaaacgctgccgcaagattcggccggtgtctgccttcatcagcgggagccctcaggacatggaaagccaactggggaatctggggatcccccctggctggttctcaggacttgggggcagccagcccacagctagtggctcctgggaaggtctatctgagctgcccactcatggttacaaactaaggcatcaaacacaagggaggccccgcccccccaggaccacacctccaggacctggtcgacccagtatgccagcacctgggactcgtcaggagaatgggatggccacccgcctggatgaagggctggaggacttcttcagccgaagggtcctggaggaaagttctagctacccccggactctgaggaccgtgcggccaggactctcggaggcaccgctgcctccactccagaagaagaggcgccggggcctgtttcactttcgccggccccggagcttcaagggggacagggggccggggtcccctaccactggactcctcctccctccacccccaccccctcccccgactcaggagagcccccctagcccagaccccccaagcctcggcaataactcctctccctgctggagcccagaggaggagagcagcctcctccctggatttggtgggggccggggaccttccttccgccggaagatggtaagtgaggcagggggtgctgtgtcttccccttttcctgccccacacttaacccagtctcctaccccaccccaagcttaatgggagaatgctaggacccagggttcttgggaacattggtcatttcaattctcctctccttgagagtggactaagacccagtggccaagagcatgctgggagtgctatatgcgaatgcaggcgttggaaggactcttcagagggtctctgcagggcttccccgtggctagggactcagtgaggcaggggtcctcctgacaactccctcacagcctggngagcccccttcgactgggaactgctaataaataagagaccttgttctagggcactgaggggtcagagccaggggaggggggcccagcccctgggacagcacagcagccaagggttcacggtgttgcccttcccgggttggaaagagccaagggttggagcttcgatgggaaacgagagggcccaggcccagaccaggagggcagcacccaggcctggcagaaacggcgctcttcagacgacgcagggcctggatcctggaagcccccaccaccgccccaaagcaccaaaccaagcttcagcgccatgcgcagagcagaggccacatggcacatagctgaagagagtgcccccaaccacagctgccagagtcccagcccagcctcccaagatggggaagaggagaaggaggggaccctcttcccagagaggacacttccagctaggaatgccaagctacaggaccccgctctagctccatggcctcccaagccagtggctgtgcccaggggccgccagcctccccaggagccaggggtcagggaggaggctgaggctggagatgcagctccaggagtcaacaaaccccggctgaggctgagctcacagcaagaccaagaggagcccgaagtccaagggccccctgatccaggccggcggactgcccccctgaagcccaagaggacacggcgggcacagtcctgtgacaagctggaacctgatagaagacggcctcctgaccccacaggaaccagtgagccaggaacagactgacaactgccacaacaccctcctcagccctcgacatgtgcctcgcaaggactcagacccctatccacccccagtccccagggccccctgccagcccctgtcctacaggggcaagacggcaggaccaggcatgggggagctggaggcagggactagaacagagggagccacctggagagacggaggctgtcagtgcctgcctcgatacctctctctgcagagagcttctgggtgggggcttatctcctcccccaggagggtggatctctgtccctctatccccagggactctctcccctcttgtatagaataaaaaaacaaaatcatcgcctaaaaaaagtct

SEQ ID NO: 737332 - DNA, 5082 bp, Homo sapiens
  misc_feature (2112)..(2112): n is a, c, g, or t
ggagctcacccgcgagttgcaagacagcatccggaggtgcctgagccaaggggccgtgctccaacaacatcatgtgaagttggagacaaagcccaagaagtttgaggaccgagtgctggccctgacctcctggcgcctccacctcttcctccttaaagtcccggccaaggtggagagctccttcaatgtcctggagatccgtgccttcaacacgctcagtcagaatcagatcctggtggagacggagcgtggcatggtgagcatgcgactgccatcagctgaaagtgtggaccaggtgacacgacatgtgagctctgccctgtccaaggtctgccctggccctgggtgtttgatccggcgtggaaacgcagacaccccagaggggccccgagatacatcccccaactctgagacttccacatctaccacccacagtgtctgcggtggcttctctgagacctacgctgctctgtgtgactacaatgggctacactgccgtgaggaggttcaatgggatgtggacaccatctaccatgctgaagataaccgggagttcaatcttttggatttcagccacttggagagccgagacttggccctaatggtagcagccctggcctacaaccagtggttcaccaaactctactgcaaggacttgcggctgggctctgaagtgctagaacaggtgctacataccctaagcaagtcggggagcctcgaagagctggtgctggacaacgccgggcttaagacggactttgtccagaagctggccggggtgtttggggagaacgggagctgtgtgctgcatgccctcactctgtcccacaaccccatcgaggacaagggttttctcagtctgagccagcagctcctctgcttcccctctggcctcaccaaactgtgcctggccaagactgccatttcccctcgagggctccaggcactcggccagaccttcggggcaaacccagcatttgccagctcccttcgatacctggacctgagcaagaatcctgggctcctcgccacggatgaggccaatgccctctacagtttcctggcccaacccaacgccctggtgcacctggacctgtcaggaactgactgcgtcatcgacttgcttctcggtgccctgctccacggctgctgctcccacctcacctacctcaacctggctcgcaacagctgctcccacaggggtctctccacaggaagggtcgagaggccccgccggccttcaagcagttcttcagcagcgcctacacactgagccacgtcaatctgtcggccacaaagctgcccctggaggccctcagggcgctgcttcagggcctctccctcaacagtcacctcagtgacctgcacctggatctcagcagctgcgagctccgttcagcgggagcccaagccttgcaggagcagctgggagctgtcacctgtgtaggcagcctggatctgtcagacaatgggttcgactcggacctcctgacactggtgcctgcacttggcaagaacaagtccctcaagcacctgtttttgggcaagaacttcaatgtcaaggccaagaccctggaggagatcctccacaagctggtgcagctgatccaggaagaggactgttccctgcagtcactgtcggtggcagactcccggctgaagcttcgcaccagcatcctcatcaatgccctgggcagcaacacctgcctggccaaggtggatctgagcggcaatggcatggaggacatcggggccaagatgctgtctaaggccctgcagataaactcctccctcagaactatcctatgggatcggaacaatacatctgccctgggcttcctggacatcgcaagggccctggagagcaaccacacgctgcgcttcatgtccttccccgtgagcgacatctcccaagcctatcgcagcgcgcctgagcgcaccgaggacgtctggcagaagatccaatggtgcttagtgaggaacaaccactcccagacgtgcccccaggagcaggccttcaggttgcagcagggcctggtgaccagcagcgccgagcaaatgctgcagcggctgtgtggacgagtgcaggaggaggtgcgggccctgagactntgccccctggagcctgtgcaggatgagctactctacgctcgggacctcatcaaagatgccaagaactcccgggcggtgagccctccacaggctacccttcccctgaagtctggagaacccaagaaggccgaccatgctaagccatgacagccctgccctgtgcatctgccttcctagcccagggaccccagagacctagcaagtcctggttctggcctgctaatcataaccccttccttctccagctgtttcccagcctctatgagctgggccacgtgctggccaatgatgggcctgtgcggcagaggctggaatcagtagcaagtgaggtgtccaaagctgtggacaaggagctgcaggcaagtcctggaggagggaggaatccatggtgggaacctagtgttgactgaggccctaagcccagagctaaagtcagagctgggagacttctggagggccaggaggacatgcagagttgagaccacccacgctcccactgtaccaaggcattgctgcaatatcaggcttggatttttttctgctagctttgatgttggtccctgaactctgacctccctgctctggatttggatccttggactgactgcccctgtctgtatggtagggtggaaggagcactgaccagaaagtggggaagccttagtgtccaaggctctgccactaacagttttgtgacttaggcaggtccctcagtctcagcaggaggggctggaatagataaagtctcttctgctgtggtgccagccctgatcctgtcccccttgggcctctggcctccctttcccccatactaggtgatcctggagtccatggtcagcctgacacaggagttatgccctgtggccatgcgggtggccgagggacacaacaagatgctgagcaatgtggcggagcgtgtcactgtgccccggaacttcatccgaggggcactgctggagcaagcaggacaggacattcagaacaagctggatgaagtgaagctctcagtcgtcacctacctaaccagctccatagtggatgagatcctgcaagagctctaccattcccacaagagcctggcccggcacctgacccagctaaggacgctgtcagatccaccagggtgcccaggccaagggcaggatctgtcctcccggggccgaggccggaaccatgaccatgaggagaccacagatgatgaacttgggaccaacattgacaccatggccatcaaaaagcagaaacgctgccgcaagattcggccggtgtctgccttcatcagcgggagccctcaggacatggaaagccaactggggaatctggggatcccccctggctggttctcaggacttgggggcagccagcccacagctagtggctcctgggaaggtctatctgagctgcccactcatggttacaaactaaggcatcaaacacaagggaggccccgcccccccaggaccacacctccaggacctggtcgacccagtatgccagcacctgggactcgtcaggagaatgggatggccacccgcctggatgaagggctggaggacttcttcagccgaagggtcctggaggaaagttctagctacccccggactctgaggaccgtgcggccaggactctcggaggcaccgctgcctccactccagaagaagaggcgccggggcctgtttcactttcgccggccccggagcttcaagggggacagggggccggggtcccctaccactggactcctcctccctccacccccaccccctcccccgactcaggagagcccccctagcccagaccccccaagcctcggcaataactcctctccctgctggagcccagaggaggagagcagcctcctccctggatttggtgggggccggggaccttccttccgccggaagatgggcactgaggggtcagagccaggggaggggggcccagcccctgggacagcacagcagccaagggttcacggtgttgcccttcccgggttggaaagagccaagggttggagcttcgatgggaaacgagagggcccaggcccagaccaggagggcagcacccaggcctggcagaaacggcgctcttcagacgacgcagggcctggatcctggaagcccccaccaccgccccaaagcaccaaaccaagcttcagcgccatgcgcagagcagaggccacatggcacatagctgaagagagtgcccccaaccacagctgccagagtcccagcccagcctcccaagatggggaagaggagaaggaggggaccctcttcccagagaggacacttccagctaggaatgccaagctacaggaccccgctctagctccatggcctcccaagccagtggctgtgcccaggggccgccagcctccccaggagccaggggtcagggaggaggctgaggctggagatgcagctccaggagtcaacaaaccccggctgaggctgagctcacagcaagaccaagaggagcccgaagtccaagggccccctgatccaggccggcggactgcccccctgaagcccaagaggacacggcgggcacagtcctgtgacaagctggaacctgatagaagacggcctcctgaccccacaggaaccagtgagccaggaacagactgacaactgccacaacaccctcctcagccctcgacatgtgcctcgcaaggactcagacccctatccacccccagtccccagggccccctgccagcccctgtcctacaggggcaagacggcaggaccaggcatgggggagctggaggcagggactagaacagagggagccacctggagagacggaggctgtcagtgcctgcctcgatacctctctctgcagagagcttctgggtgggggcttatctcctcccccaggagggtggatctctgtccctctatccccagggactctctcccctcttgtatagaataaaaaaacaaaatcatcgcctaaaaaaagtct

SEQ ID NO: 737333 - DNA, 4817 bp, Homo sapiens
  misc_feature (40)..(40): n is a, c, g, or t
  misc_feature (1499)..(1499): n is a, c, g, or t
  misc_feature (3705)..(3705): n is a, c, g, or t
gaggtcactctagagcgatccctagctggtcgcagtccangacttgcggtgggctctgaagtgctagaacaggtgctacataccctaagcaagtcggggagcctcgaagagctggtgctggacaacgccgggcttaagacggactttgtccagaagctggccggggtgtttggggagaacgggagctgtgtgctgcatgccctcactctgtcccacaaccccatcgaggacaagggttttctcagtctgagccagcagctcctctgcttcccctctggcctcaccaaactgtgcctggccaagactgccatttcccctcgagggctccaggcactcggccagaccttcggggcaaacccagcatttgccagctcccttcgatacctggacctgagcaagaatcctgggctcctcgccacggatgaggccaatgccctctacagtttcctggcccaacccaacgccctggtgcacctggacctgtcaggaactgactgcgtcatcgacttgcttctcggtgccctgctccacggctgctgctcccacctcacctacctcaacctggctcgcaacagctgctcccacaggggtctctccacaggaagggtcgagaggccccgccggccttcaagcagttcttcagcagcgcctacacactgagccacgtcaatctgtcggccacaaagctgcccctggaggccctcagggcgctgcttcagggcctctccctcaacagtcacctcagtgacctgcacctggatctcagcagctgcgagctccgttcagcgggagcccaagccttgcaggagcagctgggagctgtcacctgtgtaggcagcctggatctgtcagacaatgggttcgactcggacctcctgacactggtgcctgcacttggcaagaacaagtccctcaagcacctgtttttgggcaagaacttcaatgtcaaggccaagaccctggaggagatcctccacaagctggtgcagctgatccaggaagaggactgttccctgcagtcactgtcggtggcagactcccggctgaagcttcgcaccagcatcctcatcaatgccctgggcagcaacacctgcctggccaaggtggatctgagcggcaatggcatggaggacatcggggccaagatgctgtctaaggccctgcagataaactcctccctcagaactatcctatgggatcggaacaatacatctgccctgggcttcctggacatcgcaagggccctggagagcaaccacacgctgcgcttcatgtccttccccgtgagcgacatctcccaagcctatcgcagcgcgcctgagcgcaccgaggacgtctggcagaagatccaatggtgcttagtgaggaacaaccactcccagacgtgcccccaggagcaggccttcaggttgcagcagggcctggtgaccagcagcgccgagcaaatgctgcagcggctgtgtggacgagtgcaggaggaggtgcgggccctgagactntgccccctggagcctgtgcaggatgagctactctacgctcgggacctcatcaaagatgccaagaactcccgggcggtgagccctccacaggctacccttcccctgaagtctggagaacccaagaaggccgaccatgctaagccatgacagccctgccctgtgcatctgccttcctagcccagggaccccagagacctagcaagtcctggttctggcctgctaatcataaccccttccttctccagctgtttcccagcctctatgagctgggccacgtgctggccaatgatgggcctgtgcggcagaggctggaatcagtagcaagtgaggtgtccaaagctgtggacaaggagctgcaggcaagtcctggaggagggaggaatccatggtgggaacctagtgttgactgaggccctaagcccagagctaaagtcagagctgggagacttctggagggccaggaggacatgcagagttgagaccacccacgctcccactgtaccaaggcattgctgcaatatcaggcttggatttttttctgctagctttgatgttggtccctgaactctgacctccctgctctggatttggatccttggactgactgcccctgtctgtatggtagggtggaaggagcactgaccagaaagtggggaagccttagtgtccaaggctctgccactaacagttttgtgacttaggcaggtccctcagtctcagcaggaggggctggaatagataaagtctcttctgctgtggtgccagccctgatcctgtcccccttgggcctctggcctccctttcccccatactaggtgatcctggagtccatggtcagcctgacacaggagttatgccctgtggccatgcgggtggccgagggacacaacaagatgctgagcaatgtggcggagcgtgtcactgtgccccggaacttcatccgaggggcactgctggagcaagcaggacaggacattcagaacaagctggatgaagtgaagctctcagtcgtcacctacctaaccagctccatagtggatgagatcctgcaagagctctaccattcccacaagagcctggcccggcacctgacccagctaaggacgctgtcagatccaccagggtgcccaggccaagggcaggatctgtcctcccggggccgaggccggaaccatgaccatgaggagaccacagatgatgaacttgggaccaacattgacaccatggccatcaaaaagcagaaacgctgccgcaagattcggccggtgtctgccttcatcagcgggagccctcaggacatggaaagccaactggggaatctggggatcccccctggctggttctcaggacttgggggcagccagcccacagctagtggctcctgggaaggtctatctgagctgcccactcatggttacaaactaaggcatcaaacacaagggaggccccgcccccccaggaccacacctccaggacctggtcgacccagtatgccagcacctgggactcgtcaggagaatgggatggccacccgcctggatgaagggctggaggacttcttcagccgaagggtcctggaggaaagttctagctacccccggactctgaggaccgtgcggccaggactctcggaggcaccgctgcctccactccagaagaagaggcgccggggcctgtttcactttcgccggccccggagcttcaagggggacagggggccggggtcccctaccactggactcctcctccctccacccccaccccctcccccgactcaggagagcccccctagcccagaccccccaagcctcggcaataactcctctccctgctggagcccagaggaggagagcagcctcctccctggatttggtgggggccggggaccttccttccgccggaagatggtaagtgaggcagggggtgctgtgtcttccccttttcctgccccacacttaacccagtctcctaccccaccccaagcttaatgggagaatgctaggacccagggttcttgggaacattggtcatttcaattctcctctccttgagagtggactaagacccagtggccaagagcatgctgggagtgctatatgcgaatgcaggcgttggaaggactcttcagagggtctctgcagggcttccccgtggctagggactcagtgaggcaggggtcctcctgacaactccctcacagcctggngagcccccttcgactgggaactgctaataaataagagaccttgttctagggcactgaggggtcagagccaggggaggggggcccagcccctgggacagcacagcagccaagggttcacggtgttgcccttcccgggttggaaagagccaagggttggagcttcgatgggaaacgagagggcccaggcccagaccaggagggcagcacccaggcctggcagaaacggcgctcttcagacgacgcagggcctggatcctggaagcccccaccaccgccccaaagcaccaaaccaagcttcagcgccatgcgcagagcagaggccacatggcacatagctgaagagagtgcccccaaccacagctgccagagtcccagcccagcctcccaagatggggaagaggagaaggaggggaccctcttcccagagaggacacttccagctaggaatgccaagctacaggaccccgctctagctccatggcctcccaagccagtggctgtgcccaggggccgccagcctccccaggagccaggggtcagggaggaggctgaggctggagatgcagctccaggagtcaacaaaccccggctgaggctgagctcacagcaagaccaagaggagcccgaagtccaagggccccctgatccaggccggcggactgcccccctgaagcccaagaggacacggcgggcacagtcctgtgacaagctggaacctgatagaagacggcctcctgaccccacaggaaccagtgagccaggaacagactgacaactgccacaacaccctcctcagccctcgacatgtgcctcgcaaggactcagacccctatccacccccagtccccagggccccctgccagcccctgtcctacaggggcaagacggcaggaccaggcatgggggagctggaggcagggactagaacagagggagccacctggagagacggaggctgtcagtgcctgcctcgatacctctctctgcagagagcttctgggtgggggcttatctcctcccccaggagggtggatctctgtccctctatccccagggactctctcccctcttgtatagaataaaaaaacaaaatcatcgcctaaaaaaagtct

SEQ ID NO: 737334 - DNA, 903 bp, Homo sapiens
taatgtatatagtatagaggctagagactccttttctttgttacattgtgaactttatccccaaatggcaggcgtgcactggggctatgaagaaaccaagacttttcttgatatcctccgtgagactcggttttatgaagcgcttcaagcctgtcatcggaagagcaaattgtatggggctgtagctgaacagcttcgagagtgcggcttcctccggacaccagaacagtgccgaaccaagttcaaaagccttcagaagagttaccgcaaggtgaaaaatggccacgtgctagagtcctgcgcgttctacaaggagatggatgccctgattaactctcgggcatctgctccttcccccagcaccccagaggaagtcccatcaccttcaaggcaagaaagagggggtattgaggttgaaccccaggaacctacaggctgggaacctgaagagacctcacaggaggcagtaatagaagactcttgcagtgagagaatgagcgaggaggaaattgtgcaagagccagagttccagggacctccaggtctactgcagagcccaaatgattttgaaatcggaagtagcatcaaggaggatccaacacagatagtatataaggacatggaacagcatagggcattaatagaaaagtctaaaagagttgtttcccagagtaccgaccccagcaaatatcgcaaaagggaatgcatctcaggaagacaatgggaaaatcttcaaggaattagacagggaaagccgatgtctcagcctagagatttagggaaagccgttgtgcatcagaggccttttgtggggaagagaccctacagacttctcaaatatggagaaagctttggaaggagcactcgtctgatgtgccggatgacccaccacaaggagaatcc

SEQ ID NO: 737335 - DNA, 888 bp, Homo sapiens
cctggcctgtggccaaacaagatggagtggggaggaaggaaaggacagctggggaggggctggaggagaaggaagagaggccaggaaactcactgctccatcccttttgtgccttcttttctgtggatggtgttgtctctgccctgcccctctctcctgtctctcctctctgtgtcttggttctcaggttttcttctggaggcaaaaaattaaaccaaccatctcaggacaccctgactccaagaaacactcattgaagaagatggagaagactctccaggtggttgagactttgaggttggtcgagctcccaaaagaggctaagcccaagttgggtgagtcccccgagctggcagatccctgcgtgttggccaagactacagaggagaccgaggtggagctgggccaacagggccaatccctactgcagctgccgaggacggccgtcaagtctgtctccacgctcatggtctctgccctgcagagcggctggcagatgtgcagctggaagtcatcagtgagttctgcctcagtcagctcccaagtgaggacgcagtcacctttgaagactccggaggctgagttgctgtgggaggtgtacctggtgctgtgggccgttcggaaacacctgcgccggctgtaccgcaggcaggagaggcacagacggcaccacgtccgatgccatgctgccccccgacccaacccggctcagtccctgaaactggatgcccaaagtcccctctagggggaaccccagacccttagagagtcctgacctcactcttacctggggtcccatatcagccccttcattccatgtattccagttgtaaaacaagtatcaaaatattgggaaataaatatcagatagttctgaaaaaaaaaaaa

SEQ ID NO: 737336 - DNA, 1013 bp, Homo sapiens
actgtaggttctcacctacttcgactcctctccctgtcccagggaggggagaaaaggtctgggattcattgccaggaggggcttcccccaggatttcctacttctttctttactgctgtgcttgaagctcacaggagacccctcaagaggtggtcaccggcccacagcccaccccatcccccacccgccacccccaccgtaccaaatgctagctctgccctttcttctgtgtttttcccatcaagagagatggttgtggtcatgaagttcttccgatgggttagacgggcttggcaaaggattatttcctgggttttcttctggaggcaaaaaattaaaccaaccatctcaggacaccctgactccaagaaacactcattgaagaagatggagaagactctccaggtggttgagactttgaggttggtcgagctcccaaaagaggctaagcccaagttgggtgagtcccccgagctggcagatccctgcgtgttggccaagactacagaggagaccgaggtggagctgggccaacagggccaatccctactgcagctgccgaggacggccgtcaagtctgtctccacgctcatggtctctgccctgcagagcggctggcagatgtgcagctggaagtcatcagtgagttctgcctcagtcagctcccaagtgaggacgcagtcacctttgaagactccggaggctgagttgctgtgggaggtgtacctggtgctgtgggccgttcggaaacacctgcgccggctgtaccgcaggcaggagaggcacagacggcaccacgtccgatgccatgctgccccccgacccaacccggctcagtccctgaaactggatgcccaaagtcccctctagggggaaccccagacccttagagagtcctgacctcactcttacctggggtcccatatcagccccttcattccatgtattccagttgtaaaacaagtatcaaaatattgggaaataaatatcagatagttctgaaaaaaaaaaaa

SEQ ID NO: 737337 - DNA, 392 bp, Homo sapiens
  misc_feature (14)..(14): n is a, c, g, or t
cccacgcgtccgcngacgcgtgggtcgcccacgcgtcgggctcagtaatggcctggtcccccggcccctgccccatctcctcatcatccccagccttgatggaggagggagggcttcaggacggggcgtcagagggagccccctctgggagggaaccaacccccaccctccctcctgggaccccccagcagtagacggcttgggggagtcggaggctccccggcagacaccccacccccatcttgttcccttgaggtgcctcctctcctctgcccaggggagggagtgtggacagtatctggaagttctgggattcaggttgttattaaaataataataataattaaaaactctgaagaaacttgaaataaccaccttccccaaaccaaata

SEQ ID NO: 737338 - DNA, 699 bp, Homo sapiens
ctagttctagatcgcgagcggatggacttggtgaagtcccacctcatgtttgcggtccgggaggaggtggaggtgctgaaggagcagatccgggaactggcggagcggaacgctgcgctggagcaggagaatgggctgctgcgcgccctggccagcccggagcagctggctcagctgccctcctcgggggtcccacggcttgggccccctgcgcccaatgggccctccgtctgagcctcccttcccttacaatgtgcctttggggctgcccggccttgcgtcagccgcctgccccctcttcctatgcagctttaatgtccccgtgtccccggggtgggagttcaaggctcagtaatggcctggtcccccggcccctgccccatctcctcatcatccccagccttgatggaggagggagggcttcaggacggggcgtcagagggagccccctctgggagggaaccaacccccaccctccctcctgggaccccccagcagtagacggcttgggggagtcggaggctccccggcagacaccccacccccatcttgttcccttgaggtgcctcctctcctctgcccaggggagggagtgtggacagtatctggaagttctgggattcaggttgttattaaaataataataataattaaaaactctgaagaaacttgaaataaccaccttccccaaaccaaata

SEQ ID NO: 737339 - DNA, 1221 bp, Homo sapiens
cgtggtcaaagaggctggtacggtccggattcctgcctagctgcctggcaccagccagaccctgctctgcccggggggctctgagccccccaggcattcccttcactgcatccctctccattgggggggtgtctaaggaccctttccccttgggcatggcccagccaggggtctctgtcaagtccctggtgtcgtcttatgagacccgagtggtggggatggctccggggctgccccgaaaaaggggctgtgcctcttccccttgctctccccggggtgcatcccccatccgagggacatctgggcccccgccccaccggggcctgggaggccctgggcagcggccttcaacccgcagggggatggacaaaaccctcctctccctcattctctactgtcacaggtacaggggggtgtgggcgggaggctgtggtccaagaaaccagcacctgggaaggcttctcctctcctcccctcaccttcctgtgtctctccagtggctccggaagcctggttggcattgacaacaaaatcgagcaagccatggacttggtgaagtcccacctcatgtttgcggtccgggaggaggtggaggtgctgaaggagcagatccgggaactggcggagcggaacgctgcgctggagcaggagaatgggctgctgcgcgccctggccagcccggagcagctggctcagctgccctcctcgggggtcccacggcttgggccccctgcgcccaatgggccctccgtctgagcctcccttcccttacaatgtgcctttggggctgcccggccttgcgtcagccgcctgccccctcttcctatgcagctttaatgtccccgtgtccccggggtgggagttcaaggctcagtaatggcctggtcccccggcccctgccccatctcctcatcatccccagccttgatggaggagggagggcttcaggacggggcgtcagagggagccccctctgggagggaaccaacccccaccctccctcctgggaccccccagcagtagacggcttgggggagtcggaggctccccggcagacaccccacccccatcttgttcccttgaggtgcctcctctcctctgcccaggggagggagtgtggacagtatctggaagttctgggattcaggttgttattaaaataataataataattaaaaactctgaagaaacttgaaataaccaccttccccaaaccaaata

SEQ ID NO: 737340 - DNA, 1127 bp, Homo sapiens
cgtggtcaaagaggctggtacggtccggattcctgcctagctgcctggcaccagccagaccctgctctgcccggggggctctgagccccccaggcattcccttcactgcatccctctccattgggggggtgtctaaggaccctttccccttgggcatggcccagccaggggtctctgtcaagtccctggtgtcgtcttatgagacccgagtggtggggatggctccggggctgccccgaaaaaggggctgtgcctcttccccttgctctccccggggtgcatcccccatccgagggacatctgggcccccgccccaccggggcctgggaggccctgggcagcggccttcaacccgcagggggatggacaaaaccctcctctccctcattctctactgtcacagtggctccggaagcctggttggcattgacaacaaaatcgagcaagccatggacttggtgaagtcccacctcatgtttgcggtccgggaggaggtggaggtgctgaaggagcagatccgggaactggcggagcggaacgctgcgctggagcaggagaatgggctgctgcgcgccctggccagcccggagcagctggctcagctgccctcctcgggggtcccacggcttgggccccctgcgcccaatgggccctccgtctgagcctcccttcccttacaatgtgcctttggggctgcccggccttgcgtcagccgcctgccccctcttcctatgcagctttaatgtccccgtgtccccggggtgggagttcaaggctcagtaatggcctggtcccccggcccctgccccatctcctcatcatccccagccttgatggaggagggagggcttcaggacggggcgtcagagggagccccctctgggagggaaccaacccccaccctccctcctgggaccccccagcagtagacggcttgggggagtcggaggctccccggcagacaccccacccccatcttgttcccttgaggtgcctcctctcctctgcccaggggagggagtgtggacagtatctggaagttctgggattcaggttgttattaaaataataataataattaaaaactctgaagaaacttgaaataaccaccttccccaaaccaaata

SEQ ID NO: 737341 - DNA, 975 bp, Homo sapiens
  misc_feature (14)..(14): n is a, c, g, or t
cccacgcgtccgcngacgcgtgggtcgcccacgcgtcggatgcggctgcggatggagttgggtgctccagaagagatggggcaggtgcccccacttgactctcgccccagctccccagccctctacttcacccacgatgccagcctggttcacaaatctccagaccccttcggagcagtagcagctcagaagttcagcctggcccactccatgttggccatcagtggtcacctagacagcgacgatgatagtggctccggaagcctggttggcattgacaacaaaatcgagcaagccatggacttggtgaagtcccacctcatgtttgcggtccgggaggaggtggaggtgctgaaggagcagatccgggaactggcggagcggaacgctgcgctggagcaggagaatgggctgctgcgcgccctggccagcccggagcagctggctcagctgccctcctcgggggtcccacggcttgggccccctgcgcccaatgggccctccgtctgagcctcccttcccttacaatgtgcctttggggctgcccggccttgcgtcagccgcctgccccctcttcctatgcagctttaatgtccccgtgtccccggggtgggagttcaaggctcagtaatggcctggtcccccggcccctgccccatctcctcatcatccccagccttgatggaggagggagggcttcaggacggggcgtcagagggagccccctctgggagggaaccaacccccaccctccctcctgggaccccccagcagtagacggcttgggggagtcggaggctccccggcagacaccccacccccatcttgttcccttgaggtgcctcctctcctctgcccaggggagggagtgtggacagtatctggaagttctgggattcaggttgttattaaaataataataataattaaaaactctgaagaaacttgaaataaccaccttccccaaaccaaata

SEQ ID NO: 737342 - DNA, 988 bp, Homo sapiens
agcctaagcagtggctgcagcaactgcaacagcagcggctgtggcaggcctggccccgggccagctggcgggaagccccaggagggagggagggaggaggaaggggaggaagaggggaaggaggaggaggaggaggagaggagcagtcagcaggcccgaggaggcaggacttcctggtgtgggggttgtcaacagcccagaaagagaaagacggagaggcagagacccaggggagccgaggagcggagacacggacccagcagggtcacgcgggaggagactcgggacacccactcgctggctgccaccgggagcagaggggggctcggccgccccctcccacatcagtctccagacccttggggcttcagaggccgctcctaggctcctcggaggaggcgcgggtttcttcttttccggagagcaaactttcctcggagatgcctggcaggatgagccgcggcccccggagaggacgggacagcctctgatcgccgcctgcgtgccccgccactgcccatggccaggaggccccagggaacggacagcccgacctcttaggcgccgggaccctcaggctcagatcagtggccgaggccccagagcgccccccagagcctgagaccggtgagagtgcgggcacatcccgggctgccacgcccctgccctctctgagggtggaagcggaggctgggggctcaggggccaggacccctccactgtcccggaggaaagctgtagacatgcggctgcggatggagttgggtgctccagaagagatggggcaggtgcccccacttgactctcgccccagctccccagccctctacttcacccacgatgccagcctggttcacaaatctccagaccccttcggagcagtagcagctcagaagttcagcctggcccactccatgttggccatcagtggtcacctagacagcgacgatgatagtggctcccgttagtctaaactggggggatcctc

SEQ ID NO: 737343 - DNA, 2527 bp, Homo sapiens
agcctaagcagtggctgcagcaactgcaacagcagcggctgtggcaggcctggccccgggccagctggcgggaagccccaggagggagggagggaggaggaaggggaggaagaggggaaggaggaggaggaggaggagaggagcagtcagcaggcccgaggaggcaggacttcctggtgtgggggttgtcaacagcccagaaagagaaagacggagaggcagagacccaggggagccgaggagcggagacacggacccagcagggtcacgcgggaggagactcgggacacccactcgctggctgccaccgggagcagaggggggctcggccgccccctcccacatcagtctccagacccttggggcttcagaggccgctcctaggctcctcggaggaggcgcgggtttcttcttttccggagagcaaactttcctcggagatgcctggcaggatgagccgcggcccccggagaggacgggacagcctctgatcgccgcctgcgtgccccgccactgcccatggccaggaggccccagggaacggacagcccgacctcttaggcgccgggaccctcaggctcagatcagtggccgaggccccagagtttgcaaactcagctctggagttcagcagcaacagcagcaggaaaaacctgcccctgctcccccctcccgccacctcccctctcctcttctcccctcacccagcaggcacccccggttcccgccaggccctcctgccatgtcggacccagacgtccccaggggctcggatgtccccgccatgtggcccccttgttccaggggtgcctgagccccttcaaggagccccaacccacccccaaccttggcccagccctgagccccagggaccatgagcgggggcaagaagaagagtagtttccaaatcaccagcgtcaccacggactatgagggccctgggagcccaggggcttcggatccccctaccccacagcccccaaccgggcccccgccccgcctgcccaatggggagcccagccccgatccggggggcaagggcaccccccggaatggctccccaccacctggggccccttcctcccgtttccgggtggtgaagctgccccacggcctgggagagccttatcgccgcggtcgctggacgtgtgtggatgtttatgagcgagacctggagccccacagcttcggcggactcctggagggaattcgaggggcctcagggggcgccgggggcagatctttggattccaggttggagctggccagcctcggcctgggcgcccccaccccaccgtcaggcctgtctcagggccccacctcctggctccgtccaccccccacctctcctggacctcaggcccgctccttcactgggggactgggccagctggtggtgcccagcaaagccaaggcagagaaacccccactgtcggcctcctcaccccagcagcgccccccagagcctgagaccggtgagagtgcgggcacatcccgggctgccacgcccctgccctctctgagggtggaagcggaggctgggggctcaggggccaggacccctccactgtcccggaggaaagctgtagacatgcggctgcggatggagttgggtgctccagaagagatggggcaggtgcccccacttgactctcgccccagctccccagccctctacttcacccacgatgccagcctggttcacaaatctccagaccccttcggagcagtagcagctcagaagttcagcctggcccactccatgttggccatcagtggtcacctagacagcgacgatgatagtggctccggaagcctggttggcattgacaacaaaatcgagcaagccatggacttggtgaagtcccacctcatgtttgcggtccgggaggaggtggaggtgctgaaggagcagatccgggaactggcggagcggaacgctgcgctggagcaggagaatgggctgctgcgcgccctggccagcccggagcagctggctcagctgccctcctcgggggtcccacggcttgggccccctgcgcccaatgggccctccgtctgagcctcccttcccttacaatgtgcctttggggctgcccggccttgcgtcagccgcctgccccctcttcctatgcagctttaatgtccccgtgtccccggggtgggagttcaaggctcagtaatggcctggtcccccggcccctgccccatctcctcatcatccccagccttgatggaggagggagggcttcaggacggggcgtcagagggagccccctctgggagggaaccaacccccaccctccctcctgggaccccccagcagtagacggcttgggggagtcggaggctccccggcagacaccccacccccatcttgttcccttgaggtgcctcctctcctctgcccaggggagggagtgtggacagtatctggaagttctgggattcaggttgttattaaaataataataataattaaaaactctgaagaaacttgaaataaccaccttccccaaaccaaata

SEQ ID NO: 737344 - DNA, 2291 bp, Homo sapiens; identical to SEQ ID NO: 342672

SEQ ID NO: 737345 - DNA, 2078 bp, Homo sapiens; identical to SEQ ID NO: 342673

SEQ ID NO: 737346 - DNA, 2910 bp, Homo sapiens
agcctaagcagtggctgcagcaactgcaacagcagcggctgtggcaggcctggccccgggccagctggcgggaagccccaggagggagggagggaggaggaaggggaggaagaggggaaggaggaggaggaggaggagaggagcagtcagcaggcccgaggaggcaggacttcctggtgtgggggttgtcaacagcccagaaagagaaagacggagaggcagagacccaggggagccgaggagcggagacacggacccagcagggtcacgcgggaggagactcgggacacccactcgctggctgccaccgggagcagaggggggctcggccgccccctcccacatcagtctccagacccttggggcttcagaggccgctcctaggctcctcggaggaggcgcgggtttcttcttttccggagagcaaactttcctcggagatgcctggcaggatgagccgcggcccccggagaggacgggacagcctctgatcgccgcctgcgtgccccgccactgcccatggccaggaggccccagggaacggacagcccgacctcttaggcgccgggaccctcaggctcagatcagtggccgaggccccagagtttgcaaactcagctctggagttcagcagcaacagcagcaggaaaaacctgcccctgctcccccctcccgccacctcccctctcctcttctcccctcacccagcaggcacccccggttcccgccaggccctcctgccatgtcggacccagacgtccccaggggctcggatgtccccgccatgtggcccccttgttccaggggtgcctgagccccttcaaggagccccaacccacccccaaccttggcccagccctgagccccagggaccatgagcgggggcaagaagaagagtagtttccaaatcaccagcgtcaccacggactatgagggccctgggagcccaggggcttcggatccccctaccccacagcccccaaccgggcccccgccccgcctgcccaatggggagcccagccccgatccggggggcaagggcaccccccggaatggctccccaccacctggggccccttcctcccgtttccgggtggtgaagctgccccacggcctgggagagccttatcgccgcggtcgctggacgtgtgtggatgtttatgagcgagacctggagccccacagcttcggcggactcctggagggaattcgaggggcctcagggggcgccgggggcagatctttggattccaggttggagctggccagcctcggcctgggcgcccccaccccaccgtcaggcctgtctcagggccccacctcctggctccgtccaccccccacctctcctggacctcaggcccgctccttcactgggggactgggccagctggtggtgcccagcaaagccaaggcagagaaacccccactgtcggcctcctcaccccagcagcgccccccagagcctgagaccggtgagagtgcgggcacatcccgggctgccacgcccctgccctctctgagggtggaagcggaggctgggggctcaggggccaggacccctccactgtcccggaggaaagctgtagacatgcggctgcggatggagttgggtgctccagaagagatggggcaggtgcccccacttgactctcgccccagctccccagccctctacttcacccacgatgccagcctggttcacaaatctccagaccccttcggagcagtagcagctcagaagttcagcctggcccactccatgttggccatcagtggtcacctagacagcgacgatgatagtggctccggaagcctggttggcattgacaacaaaatcgagcaagccatggtaagagaagccatcttggtcccaggaggtcctggcccccttaagccatccctctgccccagccctgtcctcttccttaccagggaacaccaactcccagctcctccgtccctctccctgctgggctgctgggcatcctctgccccctcctgccaccacctccacccttgactttgcccagcctctagtctggctactggtccccatctctgtctttgagccctgactctgcctctgtccctcgtccttttcccctgtcccttccctgctttgtccctcatcctctggacactggggactgtctcccaccccagccctcaaggcactgggcaggggatgaggcacccaccccgttgacgctgtgcctgtcccggggcccccaggacttggtgaagtcccacctcatgtttgcggtccgggaggaggtggaggtgctgaaggagcagatccgggaactggcggagcggaacgctgcgctggagcaggagaatgggctgctgcgcgccctggccagcccggagcagctggctcagctgccctcctcgggggtcccacggcttgggccccctgcgcccaatgggccctccgtctgagcctcccttcccttacaatgtgcctttggggctgcccggccttgcgtcagccgcctgccccctcttcctatgcagctttaatgtccccgtgtccccggggtgggagttcaaggctcagtaatggcctggtcccccggcccctgccccatctcctcatcatccccagccttgatggaggagggagggcttcaggacggggcgtcagagggagccccctctgggagggaaccaacccccaccctccctcctgggaccccccagcagtagacggcttgggggagtcggaggctccccggcagacaccccacccccatcttgttcccttgaggtgcctcctctcctctgcccaggggagggagtgtggacagtatctggaagttctgggattcaggttgttattaaaataataataataattaaaaactctgaagaaacttgaaataaccaccttccccaaaccaaata

SEQ ID NO: 737347 - DNA, 2264 bp, Homo sapiens; identical to SEQ ID NO: 342671

SEQ ID NO: 737348 - DNA, 2620 bp, Homo sapiens
agcctaagcagtggctgcagcaactgcaacagcagcggctgtggcaggcctggccccgggccagctggcgggaagccccaggagggagggagggaggaggaaggggaggaagaggggaaggaggaggaggaggaggagaggagcagtcagcaggcccgaggaggcaggacttcctggtgtgggggttgtcaacagcccagaaagagaaagacggagaggcagagacccaggggagccgaggagcggagacacggacccagcagggtcacgcgggaggagactcgggacacccactcgctggctgccaccgggagcagaggggggctcggccgccccctcccacatcagtctccagacccttggggcttcagaggccgctcctaggctcctcggaggaggcgcgggtttcttcttttccggagagcaaactttcctcggagatgcctggcaggatgagccgcggcccccggagaggacgggacagcctctgatcgccgcctgcgtgccccgccactgcccatggccaggaggccccagggaacggacagcccgacctcttaggcgccgggaccctcaggctcagatcagtggccgaggccccagagtttgcaaactcagctctggagttcagcagcaacagcagcaggaaaaacctgcccctgctcccccctcccgccacctcccctctcctcttctcccctcacccagcaggcacccccggttcccgccaggccctcctgccatgtcggacccagacgtccccaggggctcggatgtccccgccatgtggcccccttgttccaggggtgcctgagccccttcaaggagccccaacccacccccaaccttggcccagccctgagccccagggaccatgagcgggggcaagaagaagagtagtttccaaatcaccagcgtcaccacggactatgagggccctgggagcccaggggcttcggatccccctaccccacagcccccaaccgggcccccgccccgcctgcccaatggggagcccagccccgatccggggggcaagggcaccccccggaatggctccccaccacctggggccccttcctcccgtttccgggtggtgaagctgccccacggcctgggagagccttatcgccgcggtcgctggacgtgtgtggatgtttatgagcgagacctggagccccacagcttcggcggactcctggagggaattcgaggggcctcagggggcgccgggggcagatctttggattccaggttggagctggccagcctcggcctgggcgcccccaccccaccgtcaggcctgtctcagggccccacctcctggctccgtccaccccccacctctcctggacctcaggcccgctccttcactgggggactgggccagctggtggtgcccagcaaagccaaggcagagaaacccccactgtcggcctcctcaccccagcagcgccccccagagcctgagaccggtgagagtgcgggcacatcccgggctgccacgcccctgccctctctgagggtggaagcggaggctgggggctcaggggccaggacccctccactgtcccggaggaaagctgtagacatgcggctgcggatggagttgggtgctccagaagagatggggcaggtgcccccacttgactctcgccccagctccccagccctctacttcacccacgatgccagcctggttcacaaatctccagaccccttcggagcagtagcagctcagaagttcagcctggcccactccatgttggccatcagtggtcacctagacagcgacgatgatagtggctccggaagcctggttggcattgacaacaaaatcgagcaagccatgagagatggttgtggtcatgaagttcttccgatgggttagacgggcttggcaaaggattatttcctgggttttcttctggaggcaaaaaattaaaccaaccatctcaggacaccctgactccaagaaacactcattgaagaagatggagaagactctccaggtggttgagactttgaggttggtcgagctcccaaaagaggctaagcccaagttgggtgagtcccccgagctggcagatccctgcgtgttggccaagactacagaggagaccgaggtggagctgggccaacagggccaatccctactgcagctgccgaggacggccgtcaagtctgtctccacgctcatggtctctgccctgcagagcggctggcagatgtgcagctggaagtcatcagtgagttctgcctcagtcagctcccaagtgaggacgcagtcacctttgaagactccggaggctgagttgctgtgggaggtgtacctggtgctgtgggccgttcggaaacacctgcgccggctgtaccgcaggcaggagaggcacagacggcaccacgtccgatgccatgctgccccccgacccaacccggctcagtccctgaaactggatgcccaaagtcccctctagggggaaccccagacccttagagagtcctgacctcactcttacctggggtcccatatcagccccttcattccatgtattccagttgtaaaacaagtatcaaaatattgggaaataaatatcagatagttctgaaaaaaaaaaaa

SEQ ID NO: 737349 - DNA, 2503 bp, Homo sapiens
agcctaagcagtggctgcagcaactgcaacagcagcggctgtggcaggcctggccccgggccagctggcgggaagccccaggagggagggagggaggaggaaggggaggaagaggggaaggaggaggaggaggaggagaggagcagtcagcaggcccgaggaggcaggacttcctggtgtgggggttgtcaacagcccagaaagagaaagacggagaggcagagacccaggggagccgaggagcggagacacggacccagcagggtcacgcgggaggagactcgggacacccactcgctggctgccaccgggagcagaggggggctcggccgccccctcccacatcagtctccagacccttggggcttcagaggccgctcctaggctcctcggaggaggcgcgggtttcttcttttccggagagcaaactttcctcggagatgcctggcaggatgagccgcggcccccggagaggacgggacagcctctgatcgccgcctgcgtgccccgccactgcccatggccaggaggccccagggaacggacagcccgacctcttaggcgccgggaccctcaggctcagatcagtggccgaggccccagagtttgcaaactcagctctggagttcagcagcaacagcagcaggaaaaacctgcccctgctcccccctcccgccacctcccctctcctcttctcccctcacccagcaggcacccccggttcccgccaggccctcctgccatgtcggacccagacgtccccaggggctcggatgtccccgccatgtggcccccttgttccaggggtgcctgagccccttcaaggagccccaacccacccccaaccttggcccagccctgagccccagggaccatgagcgggggcaagaagaagagtagtttccaaatcaccagcgtcaccacggactatgagggccctgggagcccaggggcttcggatccccctaccccacagcccccaaccgggcccccgccccgcctgcccaatggggagcccagccccgatccggggggcaagggcaccccccggaatggctcccgtttccgggtggtgaagctgccccacggcctgggagagccttatcgccgcggtcgctggacgtgtgtggatgtttatgagcgagacctggagccccacagcttcggcggactcctggagggaattcgaggggcctcagggggcgccgggggcagatctttggattccaggttggagctggccagcctcggcctgggcgcccccaccccaccgtcaggcctgtctcagggccccacctcctggctccgtccaccccccacctctcctggacctcaggcccgctccttcactgggggactgggccagctggtggtgcccagcaaagccaaggcagagaaacccccactgtcggcctcctcaccccagcagcgccccccagagcctgagaccggtgagagtgcgggcacatcccgggctgccacgcccctgccctctctgagggtggaagcggaggctgggggctcaggggccaggacccctccactgtcccggaggaaagctgtagacatgcggctgcggatggagttgggtgctccagaagagatggggcaggtgcccccacttgactctcgccccagctccccagccctctacttcacccacgatgccagcctggttcacaaatctccagaccccttcggagcagtagcagctcagaagttcagcctggcccactccatgttggccatcagtggtcacctagacagcgacgatgatagtggctccggaagcctggttggcattgacaacaaaatcgagcaagccatggacttggtgaagtcccacctcatgtttgcggtccgggaggaggtggaggtgctgaaggagcagatccgggaactggcggagcggaacgctgcgctggagcaggagaatgggctgctgcgcgccctggccagcccggagcagctggctcagctgccctcctcgggggtcccacggcttgggccccctgcgcccaatgggccctccgtctgagcctcccttcccttacaatgtgcctttggggctgcccggccttgcgtcagccgcctgccccctcttcctatgcagctttaatgtccccgtgtccccggggtgggagttcaaggctcagtaatggcctggtcccccggcccctgccccatctcctcatcatccccagccttgatggaggagggagggcttcaggacggggcgtcagagggagccccctctgggagggaaccaacccccaccctccctcctgggaccccccagcagtagacggcttgggggagtcggaggctccccggcagacaccccacccccatcttgttcccttgaggtgcctcctctcctctgcccaggggagggagtgtggacagtatctggaagttctgggattcaggttgttattaaaataataataataattaaaaactctgaagaaacttgaaataaccaccttccccaaaccaaata

SEQ ID NO: 737350 - DNA, 2424 bp, Homo sapiens
agcctaagcagtggctgcagcaactgcaacagcagcggctgtggcaggcctggccccgggccagctggcgggaagccccaggagggagggagggaggaggaaggggaggaagaggggaaggaggaggaggaggaggagaggagcagtcagcaggcccgaggaggcaggacttcctggtgtgggggttgtcaacagcccagaaagagaaagacggagaggcagagacccaggggagccgaggagcggagacacggacccagcagggtcacgcgggaggagactcgggacacccactcgctggctgccaccgggagcagaggggggctcggccgccccctcccacatcagtctccagacccttggggcttcagaggccgctcctaggctcctcggaggaggcgcgggtttcttcttttccggagagcaaactttcctcggagatgcctggcaggatgagccgcggcccccggagaggacgggacagcctctgatcgccgcctgcgtgccccgccactgcccatggccaggaggccccagggaacggacagcccgacctcttaggcgccgggaccctcaggctcagatcagtggccgaggccccagagcaggcacccccggttcccgccaggccctcctgccatgtcggacccagacgtccccaggggctcggatgtccccgccatgtggcccccttgttccaggggtgcctgagccccttcaaggagccccaacccacccccaaccttggcccagccctgagccccagggaccatgagcgggggcaagaagaagagtagtttccaaatcaccagcgtcaccacggactatgagggccctgggagcccaggggcttcggatccccctaccccacagcccccaaccgggcccccgccccgcctgcccaatggggagcccagccccgatccggggggcaagggcaccccccggaatggctccccaccacctggggccccttcctcccgtttccgggtggtgaagctgccccacggcctgggagagccttatcgccgcggtcgctggacgtgtgtggatgtttatgagcgagacctggagccccacagcttcggcggactcctggagggaattcgaggggcctcagggggcgccgggggcagatctttggattccaggttggagctggccagcctcggcctgggcgcccccaccccaccgtcaggcctgtctcagggccccacctcctggctccgtccaccccccacctctcctggacctcaggcccgctccttcactgggggactgggccagctggtggtgcccagcaaagccaaggcagagaaacccccactgtcggcctcctcaccccagcagcgccccccagagcctgagaccggtgagagtgcgggcacatcccgggctgccacgcccctgccctctctgagggtggaagcggaggctgggggctcaggggccaggacccctccactgtcccggaggaaagctgtagacatgcggctgcggatggagttgggtgctccagaagagatggggcaggtgcccccacttgactctcgccccagctccccagccctctacttcacccacgatgccagcctggttcacaaatctccagaccccttcggagcagtagcagctcagaagttcagcctggcccactccatgttggccatcagtggtcacctagacagcgacgatgatagtggctccggaagcctggttggcattgacaacaaaatcgagcaagccatggacttggtgaagtcccacctcatgtttgcggtccgggaggaggtggaggtgctgaaggagcagatccgggaactggcggagcggaacgctgcgctggagcaggagaatgggctgctgcgcgccctggccagcccggagcagctggctcagctgccctcctcgggggtcccacggcttgggccccctgcgcccaatgggccctccgtctgagcctcccttcccttacaatgtgcctttggggctgcccggccttgcgtcagccgcctgccccctcttcctatgcagctttaatgtccccgtgtccccggggtgggagttcaaggctcagtaatggcctggtcccccggcccctgccccatctcctcatcatccccagccttgatggaggagggagggcttcaggacggggcgtcagagggagccccctctgggagggaaccaacccccaccctccctcctgggaccccccagcagtagacggcttgggggagtcggaggctccccggcagacaccccacccccatcttgttcccttgaggtgcctcctctcctctgcccaggggagggagtgtggacagtatctggaagttctgggattcaggttgttattaaaataataataataattaaaaactctgaagaaacttgaaataaccaccttccccaaaccaaata

SEQ ID NO: 737351 - DNA, 1521 bp, Homo sapiens
agcctaagcagtggctgcagcaactgcaacagcagcggctgtggcaggcctggccccgggccagctggcgggaagccccaggagggagggagggaggaggaaggggaggaagaggggaaggaggaggaggaggaggagaggagcagtcagcaggcccgaggaggcaggacttcctggtgtgggggttgtcaacagcccagaaagagaaagacggagaggcagagacccaggggagccgaggagcggagacacggacccagcagggtcacgcgggaggagactcgggacacccactcgctggctgccaccgggagcagaggggggctcggccgccccctcccacatcagtctccagacccttggggcttcagaggccgctcctaggctcctcggaggaggcgcgggtttcttcttttccggagagcaaactttcctcggagatgcctggcaggatgagccgcggcccccggagaggacgggacagcctctgatcgccgcctgcgtgccccgccactgcccatggccaggaggccccagggaacggacagcccgacctcttaggcgccgggaccctcaggctcagatcagtggccgaggccccagagcgccccccagagcctgagaccggtgagagtgcgggcacatcccgggctgccacgcccctgccctctctgagggtggaagcggaggctgggggctcaggggccaggacccctccactgtcccggaggaaagctgtagacatgcggctgcggatggagttgggtgctccagaagagatggggcaggtgcccccacttgactctcgccccagctccccagccctctacttcacccacgatgccagcctggttcacaaatctccagaccccttcggagcagtagcagctcagaagttcagcctggcccactccatgttggccatcagtggtcacctagacagcgacgatgatagtggctccggaagcctggttggcattgacaacaaaatcgagcaagccatgctcgggggtcccacggcttgggccccctgcgcccaatgggccctccgtctgagcctcccttcccttacaatgtgcctttggggctgcccggccttgcgtcagccgcctgccccctcttcctatgcagctttaatgtccccgtgtccccggggtgggagttcaaggctcagtaatggcctggtcccccggcccctgccccatctcctcatcatccccagccttgatggaggagggagggcttcaggacggggcgtcagagggagccccctctgggagggaaccaacccccaccctccctcctgggaccccccagcagtagacggcttgggggagtcggaggctccccggcagacaccccacccccatcttgttcccttgaggtgcctcctctcctctgcccaggggagggagtgtggacagtatctggaagttctgggattcaggttgttattaaaataataataataattaaaaactctgaagaaacttgaaataaccaccttccccaaaccaaata

SEQ ID NO: 737352 - DNA, 1496 bp, Homo sapiens
agcctaagcagtggctgcagcaactgcaacagcagcggctgtggcaggcctggccccgggccagctggcgggaagccccaggagggagggagggaggaggaaggggaggaagaggggaaggaggaggaggaggaggagaggagcagtcagcaggcccgaggaggcaggacttcctggtgtgggggttgtcaacagcccagaaagagaaagacggagaggcagagacccaggggagccgaggagcggagacacggacccagcagggtcacgcgggaggagactcgggacacccactcgctggctgccaccgggagcagaggggggctcggccgccccctcccacatcagtctccagacccttggggcttcagaggccgctcctaggctcctcggaggaggcgcgggtttcttcttttccggagagcaaactttcctcggagatgcctggcaggatgagccgcggcccccggagaggacgggacagcctctgatcgccgcctgcgtgccccgccactgcccatggccaggaggccccagggaacggacagcccgacctcttaggcgccgggaccctcaggctcagatcagtggccgaggccccagaggtgcccccacttgactctcgccccagctccccagccctctacttcacccacgatgccagcctggttcacaaatctccagaccccttcggagcagtagcagctcagaagttcagcctggcccactccatgttggccatcagtggtcacctagacagcgacgatgatagtggctccggaagcctggttggcattgacaacaaaatcgagcaagccatggacttggtgaagtcccacctcatgtttgcggtccgggaggaggtggaggtgctgaaggagcagatccgggaactggcggagcggaacgctgcgctggagcaggagaatgggctgctgcgcgccctggccagcccggagcagctggctcagctgccctcctcgggggtcccacggcttgggccccctgcgcccaatgggccctccgtctgagcctcccttcccttacaatgtgcctttggggctgcccggccttgcgtcagccgcctgccccctcttcctatgcagctttaatgtccccgtgtccccggggtgggagttcaaggctcagtaatggcctggtcccccggcccctgccccatctcctcatcatccccagccttgatggaggagggagggcttcaggacggggcgtcagagggagccccctctgggagggaaccaacccccaccctccctcctgggaccccccagcagtagacggcttgggggagtcggaggctccccggcagacaccccacccccatcttgttcccttgaggtgcctcctctcctctgcccaggggagggagtgtggacagtatctggaagttctgggattcaggttgttattaaaataataataataattaaaaactctgaagaaacttgaaataaccaccttccccaaaccaaata

SEQ ID NO: 737353 - DNA, 2382 bp, Homo sapiens
  misc_feature (53)..(53): n is a, c, g, or t
taaacacatccaccaacaatacgacgcgcagattgtactatgaaccgtgttanagcaggtgtacggccggaattttgggatccaggggagccgaggagcggagacacggacccagcagggtcacgcgggaggagactcgggacacccactcgctggctgccaccgggagcagaggggggctcggccgccccctcccacatcagtctccagacccttggggcttcagaggccgctcctaggctcctcggaggaggcgcgggtttcttcttttccggagagcaaactttcctcggagatgcctggcaggatgagccgcggcccccggagaggacgggacagcctctgatcgccgcctgcgtgccccgccactgcccatggccaggaggccccagggaacggacagcccgacctcttaggcgccgggaccctcaggctcagatcagtggccgaggccccagagtttgcaaactcagctctggagttcagcagcaacagcagcaggaaaaacctgcccctgctcccccctcccgccacctcccctctcctcttctcccctcacccagcaggcacccccggttcccgccaggccctcctgccatgtcggacccagacgtccccaggggctcggatgtccccgccatgtggcccccttgttccaggggtgcctgagccccttcaaggagccccaacccacccccaaccttggcccagccctgagccccagggaccatgagcgggggcaagaagaagagtagtttccaaatcaccagcgtcaccacggactatgagggccctgggagcccaggggcttcggatccccctaccccacagcccccaaccgggcccccgccccgcctgcccaatggggagcccagccccgatccggggggcaagggcaccccccggaatggctccccaccacctggggccccttcctcccgtttccgggtggtgaagctgccccacggcctgggagagccttatcgccgcggtcgctggacgtgtgtggatgtttatgagcgagacctggagccccacagcttcggcggactcctggagggaattcgaggggcctcagggggcgccgggggcagatctttggattccaggttggagctggccagcctcggcctgggcgcccccaccccaccgtcaggcctgtctcagggccccacctcctggctccgtccaccccccacctctcctggacctcaggcccgctccttcactgggggactgggccagctggtggtgcccagcaaagccaaggcagagaaacccccactgtcggcctcctcaccccagcagcgccccccagagcctgagaccggtgagagtgcgggcacatcccgggctgccacgcccctgccctctctgagggtggaagcggaggctgggggctcaggggccaggacccctccactgtcccggaggaaagctgtagacatgcggctgcggatggagttgggtgctccagaagagatggggcaggtgcccccacttgactctcgccccagctccccagccctctacttcacccacgatgccagcctggttcacaaatctccagaccccttcggagcagtagcagctcagaagttcagcctggcccactccatgttggccatcagtggtcacctagacagcgacgatgatagtggctccggaagcctggttggcattgacaacaaaatcgagcaagccatggacttggtgaagtcccacctcatgtttgcggtccgggaggaggtggaggtgctgaaggagcagatccgggaactggcggagcggaacgctgcgctggagcaggagaatgggctgctgcgcgccctggccagcccggagcagctggctcagctgccctcctcgggggtcccacggcttgggccccctgcgcccaatgggccctccgtctgagcctcccttcccttacaatgtgcctttggggctgcccggccttgcgtcagccgcctgccccctcttcctatgcagctttaatgtccccgtgtccccggggtgggagttcaaggctcagtaatggcctggtcccccggcccctgccccatctcctcatcatccccagccttgatggaggagggagggcttcaggacggggcgtcagagggagccccctctgggagggaaccaacccccaccctccctcctgggaccccccagcagtagacggcttgggggagtcggaggctccccggcagacaccccacccccatcttgttcccttgaggtgcctcctctcctctgcccaggggagggagtgtggacagtatctggaagttctgggattcaggttgttattaaaataataataataattaaaaactctgaagaaacttgaaataaccaccttccccaaaccaaata

SEQ ID NO: 737354 - DNA, 314 bp, Homo sapiens
  misc_feature (140)..(140): n is a, c, g, or t
  misc_feature (149)..(149): n is a, c, g, or t
  misc_feature (159)..(159): n is a, c, g, or t
aattaagtttgcattttggataaacagtgaagaagttcctagtgtaagtatgtcccagttctatgtggctgccctacctgggcttgcctctgctggtactagctgcccagagaccttcaggcctgccacgggctgccggnacctctttnggatttcttntaagtaactgctccatactcccctgccttccccttggccatcaagatgatgtggaacatctcggcaggttcctccagcgaagccatcttgaacacaatgagccaggagctggtcccagcgagccgagtggccttggctggggagtatggagcagt

SEQ ID NO: 737355 - DNA, 726 bp, Homo sapiens
gaaagatcagagactcttttgctaggctgttgaagttcgaggtgaaatcatcttttcttcacttgttaactgaaggcaaacccttcgaaatatcctggccttgttgttcatgttgtttttgcatttttatcatcagggtcacttttgttatagatttgtcatagtgtggatcaacctgcattcttgtcagggtttgcaagcctccctgccaacgtgctgatccagtgcctgtcctggagttacccacctcatcctggtctgtctttcttagaacaatgactttctagctctagcctaatacaataatttgtttggtggtttaaaggagttggccaagaaacacaggcaagagctagcattcccaaacttaatccttaatctgtttgtcttacttgtttatggagaaaaacagaaacaaaatcaccctaagattgtgctatctgaaaccaaaacacctccaggaagatgttccaggctgaatgtcccaccccccttccctccccctgctacccctccaattcacatgttgaagttctaatgcccagtacctcagaatgagactgtgtttggagacagggtctttatagaggtacttaagttagaataaggttattaggatgggctttatccaatatggtgagtgttcttataagaggaggaaatttagatacagacacgagcagagggaagaccctcttcatgagaagacacagaaagcagacagcc

SEQ ID NO: 737356 - DNA, 487 bp, Homo sapiens
tttgatttttgttctatgccaaaggctttatgaacaaggggttaagataatgtgtatgaatgttgtacttctcccctgtattgtaggactggcgggagctgtgggtagacgatgccatctggcgcttgctgttctccatgatcctctttgtcatcatggttctctggcgaccatctgcaaacaaccagagcttggggtttattaaaacataggttgctgttcccttcgagtttcagattcagtagaactggaatgggcctgaaactttgcatttctaacaagttcacaggtgctgctgctactgctgttgttgctggtctagaaccactttcagaaccactggctgagagcttagtgggtgtcaggtgttgctaagcgctcacgacactaggtcacaggtatttacaaaaattttgcagattaggaaagtatggcatcgaaatattaaattttctaaatcacagctaatttcctaattggtagatct

SEQ ID NO: 737357 - DNA, 639 bp, Homo sapiens
tttgatttttgttctatgccaaaggctttatgaacaaggggttaagataatgtgtatgaatgttgtacttctcccctgtattgtaggactggcgggagctgtgggtagacgatgccatctggcgcttgctgttctccatgatcctctttgtcatcatggttctctggcgaccatctgcaaacaaccagagccagaggttcttggactcttctgtttactctgagttaaggtgtattacaacaaaatggtgatagcaggtagagtctggggaaatctgtattttctttcctggtgttcggtctctcttcttatgatccaggattcatgtcactgggtatacaccttggggtttattaaaacataggttgctgttcccttcgagtttcagattcagtagaactggaatgggcctgaaactttgcatttctaacaagttcacaggtgctgctgctactgctgttgttgctggtctagaaccactttcagaaccactggctgagagcttagtgggtgtcaggtgttgctaagcgctcacgacactaggtcacaggtatttacaaaaattttgcagattaggaaagtatggcatcgaaatattaaattttctaaatcacagctaatttcctaattggtagatct

SEQ ID NO: 737358 - DNA, 705 bp, Homo sapiens
tttgatttttgttctatgccaaaggctttatgaacaaggggttaagataatgtgtatgaatgttgtacttctcccctgtattgtaggactggcgggagctgtgggtagacgatgccatctggcgcttgctgttctccatgatcctctttgtcatcatggttctctggcgaccatctgcaaacaaccagagccagaggttcttggactcttctgtttactctgagttaaggtgtattacaacaaaatggtgatagcaggtagagtctggggaaatctgtattttctttcctggtgttcggtctctcttctgaggaagtacatcaagtcagttcttttccccagcaacaaaaatgtagtaacacattgtttctgtcttatgatccaggattcatgtcactgggtatacaccttggggtttattaaaacataggttgctgttcccttcgagtttcagattcagtagaactggaatgggcctgaaactttgcatttctaacaagttcacaggtgctgctgctactgctgttgttgctggtctagaaccactttcagaaccactggctgagagcttagtgggtgtcaggtgttgctaagcgctcacgacactaggtcacaggtatttacaaaaattttgcagattaggaaagtatggcatcgaaatattaaattttctaaatcacagctaatttcctaattggtagatct

SEQ ID NO: 737359 - DNA, 1064 bp, Homo sapiens
agaattcggcacgaggattctgatgttgatagttctatcaatgatcaaaagaaaaaaaaaaaaaagagaaactgttacagtatgattcagatcatttaaaaaagcaaaatcaagtgcaattttgtttacaaatggtgtatattaaagatttttctatttcagatgtactttaaagagaaatattagcttaactcttttgacatctgctattgtgacacatcccattgctggcaatgtggtgcacactccgaaacttttaactactgttttgtaagcctccaagggtggcattgcagggtccttaggcaatgttttgtttgcctttatgcagagaggtgctccaagtgctgtgattgagcaccgtgctagaggaactgtaatgcttcagaagttgtagcttatacaaaggaaacaggtcctgctggcttaatttaaacagttattgcatgaagtagcgtggaggccctggactgctgctcgttctttaggatggactgttctggtatctggtattggtttagagactgttaataagggacatcacaaggtgatgggattcatttgaagcactctatttctgttttaatggttttatccaattttgccttcccaagatttttgttctacataaaaagttcatgccactttttaatataaaaaaatttaacaaaattaatgtatttttctcatttttttcaaactttttctaaagactctttctgtcaaactcatgaaaaatttctttctatggcttttattctagattgtcttattttctgttaaaaccaatgaccacatgaccacaatcttcactaactcatactgcagtgaaagtgttaacccttaggtagtttctctacaactctttgctatggtgattttaaaaaaagtttcctaggaagtatctctgaggaacagcaatctgaagaactgactatattctcatgctaagtcattagccaaaagctggtggtattgttgcatgctgctattgcatattaaaacgtagcagatgaataatagttgtaatgcagcaggatagttggtcaaattatttttttagg

SEQ ID NO: 737360 - DNA, 591 bp, Homo sapiens
  misc_feature (13)..(13): n is a, c, g, or t
  misc_feature (23)..(23): n is a, c, g, or t
cctagaacctagnggatcccccngggctgcagggaattcgggcacgagctgaactttctgtaatgtttcattttttaaatctgacaaactaaaaagtttaacgtcttctaaaagattgtcatcaacaccataatatgtaatctccaggagcaactgcctgtaatttttatttatttagggagttacataggtgatgggggaaattgttaactacctttcattttcctgggaagtcaaggttacatcttgcagaggttgttttgagaaaaaagggcccttctgagttaaggagcccttggggtttattaaaacataggttgctgttcccttcgagtttcagattcagtagaactggaatgggcctgaaactttgcatttctaacaagttcacaggtgctgctgctactgctgttgttgctggtctagaaccactttcagaaccactggctgagagcttagtgggtgtcaggtgttgctaagcgctcacgacactaggtcacaggtatttacaaaaattttgcagattaggaaagtatggcatcgaaatattaaattttctaaatcacagctaatttcctaattggtagatct

SEQ ID NO: 737361 - DNA, 565 bp, Homo sapiens
atctgtgcttcaaaccattccctacagaaaccattccctcaggtaacctcttacaaagttggaacattttcacagtccatctctcctccctagggaaaagctaggatttggggatgttggggattctacctgcttactctacactgagctgggggagcggctgtagtgagctcatgcttgctagtccaaacttccactttgatttcagcaacttccaacctgggccctttgtttttagctctcggactcaggcaagacagaaaacagtctctcgtgcaggttctagaaaagtcagaatgttggatgtacattccagtcatttccttccctctgcaaaaagaagctgggagctgagggtttcctctctatcatgtggtactgtgctgggtccatgggaagggaagaattatggcaagagggtgcctcaggtttttctgccgactttgattcagctggtttcatgctttcctatagtgcagaagaccctcaactggtttctggatttcccacaaagggaatttttccatgtattattgaatcagtgtgtctgtagagggaaggagtg

SEQ ID NO: 737362 - DNA, 478 bp, Homo sapiens
ggacagatagaatcgagccggaccctagtctagaagttcaatcgcagacatctgtttttcaccacttctttttctttgtctgcaggcccagactgatcttgcttccttggcctttatccccttggctttcctagacactgccttgtgctggtggatatccttctcattggcttgtttgatgatggtccattttctccccttggagatgggtttccattgatctttctgcaaagagtttttatcagttttgttaattactccttagtgtggggaacagtgcatgctaagtcttaacaacctgagggttcaggtaagcagttttttttgtttctatttttttaattttaaaaatcaaattggaaattggtgactgtggaccgagctcgagataaaatcttttggcttttttcttttaagtgagcatttcatcttgattttgcacttcttgtttgtgtacctaatcatttagtgttagagt

SEQ ID NO: 737363 - DNA, 376 bp, Homo sapiens
gtaagtaaccagaaaatctttgccagttcgagtggttggaaggtgagatgtatgaaaatattcctaaggtcagcagtcactacataggcttaacttttcaattacttaattattacaatatcttaagcagaatcactatgactctgacttttgtttttaatcttatgagttcagtgatgtaagactaattttactgaaatatgctcacaaaagtcacaacagtagtgaccattttgggaatgattattaacatcaaatctcaatttctgttgatttctaaggcaccattatacatctaagaaaaaaagtaaagctgtcaatttaattgtaaaatgtcactgattgtaagacacaccttgatttaaaaaacctcaaa

SEQ ID NO: 737364 - DNA, 348 bp, Homo sapiens
gtaagtgactttatattatttaacctcagtattggatggttttgggttcaaagattgtcccatgttttgtggcagtattctttttaatgaattgttcctgtgcaattcagaaaatgttgcttgtagtcctggatttatttcttattagactgggactttgagagagtcagtatacccttgtgtgcctcattttcttatccatataatgaaggggtcagtgacctgtggaaatacctcaaagatcatctcacattctctctaggatgcatgagccaccatgcctggcctaatttttattttttgtagggacagagtcttgctatgttgcctagactggccttgaactca

SEQ ID NO: 737365 - DNA, 429 bp, Homo sapiens
ctagaggatcccccttttggggtctatgtttcacagaatccagtgtccccgggttggataagaaagatatgtaaataggagtcttcatttctttctttctttttcttcctctgcacatcttggtccctgggtaattctgcttacgagatggttcgacttcgcttcaactttggaatggctattctaagctttactgtgtgactagaaagcatagagatttaagaaatgtgttttaacatgggaatggttaaaatggaagaaatagtacttaaaatttaatgtggtaaggctagtctttcatttggataattaactacatgggttgactctttctgccccttacccattttaaaccttatttcagtaacaggtatagtcctgtgagcagacaaaaaccagatgcagggaggaaatgctgaaaagcattag

SEQ ID NO: 737366 - DNA, 979 bp, Homo sapiens
acaaggtgagccgaagaaacaagtggtcctatttatatgcagtcgatcatttaacaagcacccttctgtagaaggaagaaagagaattccttatatgccctatcatgatgatgatggtgaaaaagataacaataaatggatcaatctagattacctgagaggtgtccactgatgtctcctcctcattttctttagcagctctttgtttgtgaagaatctgtagatgctcaaagtataattggcccagggaatttatgctaatcacaacctcttcttcagacaccaagtctaccttgaatgggtttgctgtgatatggcacttcaggtctccttttccatctgccaatatcagactgcctgtgtccccagagcatgaaatcagccttacagtgcttggcttgcttgtgaggacatccggaacttcaaatctgggttttagaggagtctcttcgttaattttaagcctgaaaatgtttccttctataccataaatttcagccaggagaggaaccttacttgcttcattgatgatttggaacctggtgctgtcttcatctgttgtgactgaatccaataatgcccgataggtggacttcttggaaagccactgtttctgacgcctgtaaaatgcgatcttgttacagtctctgaaaatgtttttatctacagcttcatcttcaacacttatttcctctttcactgctgcttccatggcttctctgtcactccgaccagctcccagctctcaggacaagggccctgggcgatcttttaaaaaagccgattgggtgtctttctaaaattacaaccagtacttcatcgtcaagtttctgggaagggagtcccctccagattctcatggagtgacaaatcttgactcttgctcctggaatttttcaggcccaaactagcgtttctacaatgatttatttggcaaatttgtacggacgcgtggtcgacgattcccggaaattccggc

SEQ ID NO: 737367 - DNA, 1736 bp, Homo sapiens
atctaataattttaaatggatagttaaaatgaggtgagagagcatgtgttttgctcccttagaagtatttaagacatgccagtgggtggtacatgcatatagccccagctactcagtggggctgaggcaagaggattgcttgagcctagtagtttgaggttacagtgtgccatgactgcacctgtgagtaaccactgcactccagcctgagcaacacagtgagaccccatctctttaaaaaatttaagatgtgttaatatccaattacacagagaagctgagataaatcctcagagaaaagaataaattttggaggttcattttagtactacaagcctctactcagtttttcacatacctttacttagaagcccgcctctcagtctgggaaaaagagtattaattctctttttctatcttatttctcccttattaaataaaaacaattaaaacttggtggtttgttatccacaaatctagtttttttaatggccatataggcgaaaataccagatattttgtaaacatcatggtggtagaaatagctttgtctatgtcttcaagcatagtgttgatcacaattacattaaaacaaaaactttttattcacccagaactgggaatcacaattagtaaagaccataatagaattaacaaacagccctagaacacatatttaaatttgcagtgggtgttaagtaggaaaattatgactccatcaactcttccttggtaggttgatcttgcttttcctgaggcaccaggactcttcactgttatgtaaagaactgttaacctaaaagacatagaacagtgagtggccacctctaccagctgtgatcaagacctcccgggatccagaggatggtctaatagttcattaaattgctgtaggacactaattgtcccttctacagttgcagccagttggtttattgcaagcactgattttctacaaagaatactggcaacctcacgctgggcactggcctgttccccaaggacaactggcctgtccaggtgtgcttctgattgtctggccagttcccaaattagctgcctgttcctggccatttctgcagacacagtactggctaataagcggtagttgtgcctcatctgctgagaaggtggctggttgggcaaagcttcattttcattaggcttagatgaagaggcaaggggtaacttcacagaggtgctcagagatattcctgcatcctcggagaagctgctggaagtgttgtctctggtgaaaccttgcaaacaggctgagcatggagtttgttccaagaggtcctcaaagttctcagtcttgggagctacgttgctgatgtcccaggtaatttgtccttgtttatcaggctcctcagcttccttttgagccaggtgctgtcttgtgctgagatcctgtgtctcctcctggactgtggtttctttgcctttgaaggcatccagagttgttgggctctggtcctggcacctgaccttacttgcttcattgatgatttggaacctggtgctgtcttcatctgttgtgactgaatccaataatgcccgataggtggacttcttggaaagccactgtttctgacgcctgtaaaatgcgatcttgttacagtctctgaaaatgtttttatctacagcttcatcttcaacactaaataaaaagacattttgagaaatttatttcacacagggcttgtgaatccaacttttgtaccttctctaacgac

SEQ ID NO: 737368 - DNA, 3134 bp, Homo sapiens
atctaataattttaaatggatagttaaaatgaggtgagagagcatgtgttttgctcccttagaagtatttaagacatgccagtgggtggtacatgcatatagccccagctactcagtggggctgaggcaagaggattgcttgagcctagtagtttgaggttacagtgtgccatgactgcacctgtgagtaaccactgcactccagcctgagcaacacagtgagaccccatctctttaaaaaatttaagatgtgttaatatccaattacacagagaagctgagataaatcctcagagaaaagaataaattttggaggttcattttagtactacaagcctctactcagtttttcacatacctttacttagaagcccgcctctcagtctgggaaaaagagtattaattctctttttctatcttatttctcccttattaaataaaaacaattaaaacttggtggtttgttatccacaaatctagtttttttaatggccatataggcgaaaataccagatattttgtaaacatcatggtggtagaaatagctttgtctatgtcttcaagcatagtgttgatcacaattacattaaaacaaaaactttttattcacccagaactgggaatcacaattagtaaagaccataatagaattaacaaacagccctagaacacatatttaaatttgcagtgggtgttaagtaggaaaattatgactccatcaactcttccttggtaggttgatcttgcttttcctgaggcaccaggactcttcactgttatgtaaagaactgttaacctaaaagacatagaacagtgagtggccacctctaccagctgtgatcaagacctcccgggatccagaggatggtctaatagttcattaaattgctgtaggacactaattgtcccttctacagttgcagccagttggtttattgcaagcactgattttctacaaagaatactggcaacctcacgctgggcactggcctgttccccaaggacaactggcctgtccaggtgtgcttctgattgtctggccagttcccaaattagctgcctgttcctggccatttctgcagacacagtactggctaataagcggtagttgtgcctcatctgctgagaaggtggctggttgggcaaagcttcattttcattaggcttagatgaagaggcaaggggtaacttcacagaggtgctcagagatattcctgcatcctcggagaagctgctggaagtgttgtctctggtgaaaccttgcaaacaggctgcaaaagaaaataaacgtgttgccaaatggtcacctatatcatgagaaagcatcataattagcaatataaagtagattgctccagacatccttgctagcaatgctatttaagctagactcacaagacagcatacattttcctttgcctagatcacaagactagatctctctttctcaatccagaccaaattttcactgacgatagaaaactaatagtagtaggaaaacaacaacaacaactgagttctacaaaagcagtcaacactttcctgatcactttctattttctggaaacttctttactaaatatctacctgattattctgtcatcaggaataagcacaacactatattaggaccctatgtgagaaaacttatgcatctgaacatgcaaccagcttttctccaaagcctggacgttccgaccttgcaacaacacacaggtcaacattctagcttgttttggaacagatctatgtcctggaacatcatgtttgctatggactgaatggtgtcttcccaaagtttcctattaaagccctaacccacaatatgatggtattcagagatgaagcccttgggaggtaattaggtttagatgaggtaacgaggttgaggaagtcctcaggaatggattagtgcccttataagaaaagacgggagagcttgtgtacacactctctctccactatgcgagggcacaagaagaaggcagccatctacaaaccaagaagagagccctcaccagacagtgaagctgctagcaccttgatcttggaatttacagccttcagaactgcgagaaataaacatctgttgtgtaagctgcctagcctgtgatatttggttatggcagcctaacccaatgttgaatgaagcttggttctgcttcctggttgtttattaaggagcagactggggaagggaattgagagggagaaattcaaaaattaacaaatcttgacaactccaaagttactgctttaagggttttaaaggtgtaggggcaggcaggcaccaagagtgttggatttgtcagaatctgcctgatcagtgtaatttgagaactgcagctgtgagctgaatatgatcctcttagactctgggctgtccctcttgacctgaaataaaaagctatcattctgaataagtggatgtatgcagcttattttaaaacttcagatcacactcataccatatcttaatgtgcaatctccttgaaacacccatcttatcccagaaaccatttttaatagaagttctttgttattaaaaatttttttttttttccatgctgtctttgtcatgttttaggtcaattttttttggacagtgtctgtgttgcccaggcagcagtgtagtggcacaatcttggctcactgcaacctctgcctcccagggtcaagtgattctcatgtctcagcctttggagtagctgggattacaggcatgcatcaccctgcctggctaatttttgtatttttagaagagatggggttttgccatgttggccatagctggtctcaaactcctggcctcaagcgatctgcctgctttggcctcccaaagtgctgggattataggtgtgagccaccacgcctggcctaatagaggctctttcactatgcaatgagctgcatataagatgcaggcaacattagtgatcaccatcacctctgttgtctctaacagactgacagagggcatgaaaccttatgtacctactagtcatctcaacaccacatgacaaggaggacattaaaatggagttcagtgcagaatttcagggtgatctcccgaaatatgtatttgcatacatttgcctgagatcagggcatgcagattccctatgtggttctga

SEQ ID NO: 737369 - DNA, 2257 bp, Homo sapiens
attcaatcgtaattttttaatcaattaaatccaccagctaactaatcacagctaacagttactgaaagtcaggtataatagtgctctgtcagacagaagagaaacagaacatgctcttgagggacatacaatctagtaggagaacgcagacatactgaaaacattaaggtatgatccctgagaatgctaagtagagcacagttataagtgggacagcattacggggaagggcaaaatcactgctaatgggtatgggggtaggggtgttcacgcagttaggcttcatgggaaagtgggatttaagttgggcctggaaggatggtaagggcaggaggatattggcgcccagggatcagaaggcacagaggtggccgttagcaagttgctaagtggaggaagcctgataagaagaggtgtgtgctgaggagtgctgaggagtcgaggctgctaaaacagatgctgtggcaggcagcagggagccactgaggtctgtggagccttgggcaccatgacacgactggtatgttgtaatgttctgccccatgccaagccatattagagcctgggacaaaaggaaaactcagtaatactaatcctgtctttattttaaattttaatattttgttcatcatggttttttttgcattaattctgatttttaaaaatattggattgaaatattacttactttgattactgtatttttttggcatcccttacattttgtgcccaaggccagggtctcccttgcctcatcctagtcccagtcatgagttctacttctgaagtccagtggtgggtacatgggtatttatttcattgttattaattatagcttactcatgttataaatattatttggttagtaaacagcacttaattaaaaaaacaatgtaaaagacatggattttaagattaattagaaactattgagcctgagaagcatgaaagagaaaagaatccttcgtgctgccaagtcgatctctaggggagaataactcccacggctgcagcgtatgcagtgcacacagaagagggctgctctgcccagtccatgtgggtggaagataactggggggagtaccagaggctgctgtccacttggacactggccttgagcaactcagctgctgcagccagagcgccaatgctgcatggcctgaggcaagccctggcaaatgggctgcccaggtaggcttggcccacgttaaaacagacccacgcagccctgctgaaggaatggaagcaatagaagactcctgaacgctataaatgtctcagggctatgtatcagggagaaaaggagatgtttgatacaaggaatattgttagtacatcttaacatgtaaaatctgaaattttgaaacatgaaatctattgttcattagtataatggtgacgaatgaaagattattttgattcagggaaggcaaacagattgcagcaaaaatctcaaaaaaggtgaggggaaaggttgaaaggggcaggcaggtccctgctcacatcaccaggggcagttctttgtcatatgatgcggacctcccagtcagtggcaatgttgagtgagagcttctccaggctcaggatggatgttttggcacaatacgtaaaagccacaggctgatctttaccatcagatgagtgggtagtcacagaagatggctccttcctgaagcctaagaccaagatcttctccaccacacacttgctgggataatgacccctctggtcagcaaaactattgatcagaacactggaacagaatgaaaacttcctgtgcaaaaattgcttctggtggaggtattggaatgaatggccatcatcaagatataactcacccactgaagaacccttagtgcttagagcaacccggagtccataggaggattcagtcatccagcctgtggattttcctacagttgtctttattggtatcacacttccacctcgctgaaacactggaatagtgtccaaggctactgggatctttacagtacaccctccttcccaatgagcaaatgtcttatagtcataccagacaacgacgtgtttggaatgatgatagatcacgaataaaactctgtgactaagtcggaaagggagccagttcctcttaatgggaacccaccactttgctggaatcaacttgagaaattctcagcaaaaatatctggcagggcatttactcagcagttgttgcatttaaccttttcctcaggtttctacttggcaggggaaccttagtaaagagccctca

SEQ ID NO: 737370 - DNA, 519 bp, Homo sapiens
aaacaaagcacaattcaaagataaggttgttatctatcaagggggtttagttgctgaagtaccaataaggtctctaaagtaatttgatgggataaattcttaagatatcatcagaagcagaatgaaagcaaacatctttttctttcttctagctcagtacactttctggcagccctggagtctattttgcaagttcacctccagggattaccacatcctttatacggcaggtttgtgaagcaagagaaacaatcacagaacagtccaggaaatagtgctgaaggaacataatacacactcacaacgacgtgtttggaatgatgatagatcacgaataaaactctgtgactaagtcggaaagggagccagttcctcttaatgggaacccaccactttgctggaatcaacttgagaaattctcagcaaaaatatctggcagggcatttactcagcagttgttgcatttaaccttttcctcaggtttctacttggcaggggaaccttagtaaagagccctca

SEQ ID NO: 737371 - DNA, 229 bp, Homo sapiens
attcaatcgtaattttttaatcaattaaatccaccagctaactaatcacagctaacagttactgaaagtcaggtataatagtgctctgtcagacagaagagaaacagaacatgctcttgagggacatacaatctagtaggagaacgcagacatactgactttcagtaactgttagctgtgattagttagctggtggatttaattgattaaaaaattacgattgaatgta

SEQ ID NO: 737372 - DNA, 4302 bp, Homo sapiens
  misc_feature (2941)..(2941): n is a, c, g, or t
attcaatcgtaattttttaatcaattaaatccaccagctaactaatcacagctaacagttactgaaagtcaggtataatagtgctctgtcagacagaagagaaacagaacatgctcttgagggacatacaatctagtaggagaacgcagacatactgaaaacattaaggtatgatccctgagaatgctaagtagagcacagttataagtgggacagcattacggggaagggcaaaatcactgctaatgggtatgggggtaggggtgttcacgcagttaggcttcatgggaaagtgggatttaagttgggcctggaaggatggtaagggcaggaggatattggcgcccagggatcagaaggcacagaggtggccgttagcaagttgctaagtggaggaagcctgataagaagaggtgtgtgctgaggagtgctgaggagtcgaggctgctaaaacagatgctgtggcaggcagcagggagccactgaggtctgtggagccttgggcaccatgacacgactggtatgttgtaatgttctgccccatgccaagccatattagagcctgggacaaaaggaaaactcagtaatactaatcctgtctttattttaaattttaatattttgttcatcatggttttttttgcattaattctgatttttaaaaatattggattgaaatattacttactttgattactgtatttttttggcatcccttacattttgtgcccaaggccagggtctcccttgcctcatcctagtcccagtcatgagttctacttctgaagtccagtggtgggtacatgggtatttatttcattgttattaattatagcttactcatgttataaatattatttggttagtaaacagcacttaattaaaaaaacaatgtaaaagacatggattttaagattaattagaaactattgagcctgagaagcatgaaagagaaaagaatccttcgtgctgccaagtcgatctctaggggagaataactcccacggctgcagcgtatgcagtgcacacagaagagggctgctctgcccagtccatgtgggtggaagataactggggggagtaccagaggctgctgtccacttggacactggccttgagcaactcagctgctgcagccagagcgccaatgctgcatggcctgaggcaagccctggcaaatgggctgcccaggtaggcttggcccacgttaaaacagacccacgcagccctgctgaaggaatggaagcaatagaagactcctgaacgctataaatgtctcagggctatgtatcagggagaaaaggagatgtttgatacaaggaatattgttagtacatcttaacatgtaaaatctgaaattttgaaacatgaaatctattgttcattagtataatggtgacgaatgaaagattattttgattcagggaaggcaaacagattgcagcaaaaatctcaaaaaaggtgaggggaaaggttgaaaggggcaggcaggtccctgctcacatcaccaggggcagttctttgtcatatgatgcggacctcccagtcagtggcaatgttgagtgagagcttctccaggctcaggatggatgttttggcacaatacgtaaaagccacaggctgatctttaccatcagatgagtgggtagtcacagaagatggctccttcctgaagcctaagaccaagatcttctccaccacacacttgctgggataatgacccctctggtcagcaaaactattgatcagaacactggaacagaatgaaaacttcctgtgcaaaaattgcttctggtggaggtattggaatgaatggccatcatcaagatataactcacccactgaagaacccttagtgcttagagcaacccggagtccataggaggattcagtcatccagcctgtggattttcctacagttgtctttattggtatcacacttccacctcgctgaaacactggaatagtgtccaaggctactgggatctttacagtacaccctccttcccaatgagcaaatgtcttatagtcataccagacctcatttgatcctggaagaaacacatcaactgtggtggcttttggttctgtgactggatgaaccaataatgcactccccagcatgtattcatcttccatatcaaaagtctttagttcatcagggaactctacccacagaggcctcatgacaggttgggaagccacgtgtgcatggtagaacagagaataccaatatggcaggaggccatagcgctctctgatggcttctcggatgagtcgggtgtgttcctccccaaagagccagggctctcgtcgcttggtgttcatggtggcatggccacggaagaagggctggtaggctccagcctggtaccaacgcactagcagctctgtctctggattcccaatgaacccgcctatgtcagctccgcaaaaagagatcccagtaatgctgagagtgagtaacattgggatagaaattttcaagttgctccattctgctgtgttgtcgcctgtccacacggcaccatacttttgtgatccagcaaagaaagaacgtgtaagaacaaagggtctctccttccctttagatcgttttatcagtccttctgcagtagccatttgatgataaaaaccgtagatgttgtggagctctctgtgctcccaattgccatgatgaatggcattcttctgcatggtttgctctggccctctaaagacagaaggctcattcatgtcattccaaaggaagaggatgtccgtagatccctgataaacagggaaagcaaaaagacttgaataccactctctgaccttgggattggtgaaatccaggtaagaggagagacctggccaacacaccccttcaaagtcttccccttcctgattcttcacaaagaagccctgatctttggccttcacatatactgagtagtcaggntcaatcttgatgtggggatcactgatgaccacaagcttacgctttttgctcctgagcagctcttgcatcctcttggggtttgggaatctgtttttgtcccaggtgaagtacctcttgccctcagtgtgctctatgtccagccacatggcatcataaggaatgtcatgctcatcaaaccctgcatccactgcttttacatcctgctcatcttcatagttccagcggcactggtggtatcccaaagagaaaagagggggcatggcttgtgtgcctgtaaggtgtgagtactgtttgaagacatcagaaggtgtaggtcctgtcagcagaaaaacatcaatgatgccactctctgacatccagtgcacatgagtgcgagatctgaccttttgtttagcagcaactgggcccatctgggtcagtgtgtactctactgcaggctctgtattgatctccaccagtgtttccgaggcattcagccagaaaatacctatagttctgcccagtttgtgggccaggagataaggtactgaaccataaatgcccattttatcatatatttggtatccatagacatccaggttataaagacggtaagcatctccatcaccagtatttttaagttggtgtgattctgcatgttgtgggatcccataaagatgctcaaatccatgcaaggagaaatccaaaccaatagaagaagggccattagctttgatatccacaaattttccaaatttctcttcccacaggcccagatcttcttgattttcctgagaggtgtccactgatgtctcctcctcattttctttagcagctctttgtttgtgaagaatctgtagatgctcaaagtataattggcccagggaatttatgctaatcacaacctcttcttcagacaccaagtctaccttgaatgggtttgctgtgatatggcacttcaggtctccttttccatctgccaatatcagactgcctgtgtccccagagcatgaaatcagccttacagtgcttggcttgcttgtgaggacatccggaacttcaaatctgggttttagaggagtctcttcgttaattttaagcctgaaaatgtttccttctataccataaatttcagccaggagaggaaccttacttgcttcattgatgatttggaacctggtgctgtcttcatctgttgtgactgaatccaataatgcccgataggtggacttcttggaaagccactgtttctgacgcctatagatacggagtatgcagatgcttgataattatttgtgattgtcagtatccaaaagactatattatcatgtggaagtcattaaaattcactatgatattcagtgaatttcagggcacaaaca

SEQ ID NO: 737373 - DNA, 6221 bp, Homo sapiens
  misc_feature (2941)..(2941): n is a, c, g, or t
attcaatcgtaattttttaatcaattaaatccaccagctaactaatcacagctaacagttactgaaagtcaggtataatagtgctctgtcagacagaagagaaacagaacatgctcttgagggacatacaatctagtaggagaacgcagacatactgaaaacattaaggtatgatccctgagaatgctaagtagagcacagttataagtgggacagcattacggggaagggcaaaatcactgctaatgggtatgggggtaggggtgttcacgcagttaggcttcatgggaaagtgggatttaagttgggcctggaaggatggtaagggcaggaggatattggcgcccagggatcagaaggcacagaggtggccgttagcaagttgctaagtggaggaagcctgataagaagaggtgtgtgctgaggagtgctgaggagtcgaggctgctaaaacagatgctgtggcaggcagcagggagccactgaggtctgtggagccttgggcaccatgacacgactggtatgttgtaatgttctgccccatgccaagccatattagagcctgggacaaaaggaaaactcagtaatactaatcctgtctttattttaaattttaatattttgttcatcatggttttttttgcattaattctgatttttaaaaatattggattgaaatattacttactttgattactgtatttttttggcatcccttacattttgtgcccaaggccagggtctcccttgcctcatcctagtcccagtcatgagttctacttctgaagtccagtggtgggtacatgggtatttatttcattgttattaattatagcttactcatgttataaatattatttggttagtaaacagcacttaattaaaaaaacaatgtaaaagacatggattttaagattaattagaaactattgagcctgagaagcatgaaagagaaaagaatccttcgtgctgccaagtcgatctctaggggagaataactcccacggctgcagcgtatgcagtgcacacagaagagggctgctctgcccagtccatgtgggtggaagataactggggggagtaccagaggctgctgtccacttggacactggccttgagcaactcagctgctgcagccagagcgccaatgctgcatggcctgaggcaagccctggcaaatgggctgcccaggtaggcttggcccacgttaaaacagacccacgcagccctgctgaaggaatggaagcaatagaagactcctgaacgctataaatgtctcagggctatgtatcagggagaaaaggagatgtttgatacaaggaatattgttagtacatcttaacatgtaaaatctgaaattttgaaacatgaaatctattgttcattagtataatggtgacgaatgaaagattattttgattcagggaaggcaaacagattgcagcaaaaatctcaaaaaaggtgaggggaaaggttgaaaggggcaggcaggtccctgctcacatcaccaggggcagttctttgtcatatgatgcggacctcccagtcagtggcaatgttgagtgagagcttctccaggctcaggatggatgttttggcacaatacgtaaaagccacaggctgatctttaccatcagatgagtgggtagtcacagaagatggctccttcctgaagcctaagaccaagatcttctccaccacacacttgctgggataatgacccctctggtcagcaaaactattgatcagaacactggaacagaatgaaaacttcctgtgcaaaaattgcttctggtggaggtattggaatgaatggccatcatcaagatataactcacccactgaagaacccttagtgcttagagcaacccggagtccataggaggattcagtcatccagcctgtggattttcctacagttgtctttattggtatcacacttccacctcgctgaaacactggaatagtgtccaaggctactgggatctttacagtacaccctccttcccaatgagcaaatgtcttatagtcataccagacctcatttgatcctggaagaaacacatcaactgtggtggcttttggttctgtgactggatgaaccaataatgcactccccagcatgtattcatcttccatatcaaaagtctttagttcatcagggaactctacccacagaggcctcatgacaggttgggaagccacgtgtgcatggtagaacagagaataccaatatggcaggaggccatagcgctctctgatggcttctcggatgagtcgggtgtgttcctccccaaagagccagggctctcgtcgcttggtgttcatggtggcatggccacggaagaagggctggtaggctccagcctggtaccaacgcactagcagctctgtctctggattcccaatgaacccgcctatgtcagctccgcaaaaagagatcccagtaatgctgagagtgagtaacattgggatagaaattttcaagttgctccattctgctgtgttgtcgcctgtccacacggcaccatacttttgtgatccagcaaagaaagaacgtgtaagaacaaagggtctctccttccctttagatcgttttatcagtccttctgcagtagccatttgatgataaaaaccgtagatgttgtggagctctctgtgctcccaattgccatgatgaatggcattcttctgcatggtttgctctggccctctaaagacagaaggctcattcatgtcattccaaaggaagaggatgtccgtagatccctgataaacagggaaagcaaaaagacttgaataccactctctgaccttgggattggtgaaatccaggtaagaggagagacctggccaacacaccccttcaaagtcttccccttcctgattcttcacaaagaagccctgatctttggccttcacatatactgagtagtcaggntcaatcttgatgtggggatcactgatgaccacaagcttacgctttttgctcctgagcagctcttgcatcctcttggggtttgggaatctgtttttgtcccaggtgaagtacctcttgccctcagtgtgctctatgtccagccacatggcatcataaggaatgtcatgctcatcaaaccctgcatccactgcttttacatcctgctcatcttcatagttccagcggcactggtggtatcccaaagagaaaagagggggcatggcttgtgtgcctgtaaggtgtgagtactgtttgaagacatcagaaggtgtaggtcctgtcagcagaaaaacatcaatgatgccactctctgacatccagtgcacatgagtgcgagatctgaccttttgtttagcagcaactgggcccatctgggtcagtgtgtactctactgcaggctctgtattgatctccaccagtgtttccgaggcattcagccagaaaatacctatagttctgcccagtttgtgggccaggagataaggtactgaaccataaatgcccattttatcatatatttggtatccatagacatccaggttataaagacggtaagcatctccatcaccagtatttttaagttggtgtgattctgcatgttgtgggatcccataaagatgctcaaatccatgcaaggagaaatccaaaccaatagaagaagggccattagctttgatatccacaaattttccaaatttctcttcccacaggcccagatcttcttgattttcctgagaggtgtccactgatgtctcctcctcattttctttagcagctctttgtttgtgaagaatctgtagatgctcaaagtataattggcccagggaatttatgctaatcacaacctcttcttcagacaccaagtctaccttgaatgggtttgctgtgatatggcacttcaggtctccttttccatctgccaatatcagactgcctgtgtccccagagcatgaaatcagccttacagtgcttggcttgcttgtgaggacatccggaacttcaaatctgggttttagaggagtctcttcgttaattttaagcctgaaaatgtttccttctataccataaatttcagccaggagaggaaccttacttgcttcattgatgatttggaacctggtgctgtcttcatctgttgtgactgaatccaataatgcccgataggtggacttcttggaaagccactgtttctgacgcctgtaaaatgcgatcttgttacagtctctgaaaatgtttttatctacagcttcatcttcaacacttatttcctctttcactgctgcttccatggcttctctgtcactccgaccagctcccagctctcaggacaagggccctgggcgatcttttaaaaaagccgattgggtgtctttctaaaattacaaccagtacttcatcgtcaagtttctgggaagggagtcccctccagattctcatggagtgacaaatcttgactcttgctcctggaatttttcaggcccaaactagcgtttctacaatgatttatttggcaaatttgtcttgattatgggtggctgatgaggaacgtgcttttgttaggaaccgaaactgggcggcggtgagggcgtgtacgcaatgagtcctagagggtaaaaatcaagagcgttaagaacctggaaatgccgagacggcctccctgactgggacgaagcatctgcagatctatctcagtggcggggtcacgccacagattttgaaaactgaccctctctgtctccgttttcggttaagggtgggaagtgccggccgggtctttgctggaggctaggtctccagccagattgtactgcagcatcgtactcttcagggctagaaggggcctttgaaggttgttacactacccagtctaggaatcgcgtgtactccaccaccgccgaattccagcctttgcttaaataccacccaaaccggagaactcactactagacgccacttgggcagccaggcttagggcttttccagactttctggccccaaagtctgacattgacttagaagggatgaagggctggggcgagcggaagtagagagccaaatcctgcacggggtgcctgcctggtcctaaaacctttaacggctgggagacagaaaagactcaggccaggctggcatgtagcgatctctctaacccagctgaccaggttccaacaggatgacgcctgcgcagtaggtccaaagtctcacggcgcacagacgactgtctgagagaggggccgctacgccgcacagcaaacaagctccgcgacgtttccaggacccggataatcccgcccttagagcagagccggaagaaggcgggacgaaccggaagagggtgaaatgctttcggtaggcactccacggctgtgaagatggcggcggctgcgtggcttcaggtgttgcctgtcattcttctgcttctgggagctcacccgtcaccactgtcgtttttcagtgcgggaccggcaaccgtagctgctgccgaccggtccaaatggcacattccgataccgtcggtgagtattcacttcactaacgtctgaacctagaggagcaaggggtggggctacggcggcccaaggggtccatgaaggttccgcaaaagtctcttcaaaaggggtggggttgctgggatggtctgtgtggctagccaactgggacccacctccctggagtggaaagccgcgcacttctgtgattaggctagcgggaatgtaagggccacttcagcaacagaaaggagtggtggagcggcttctcatcagaaaaacagaactttcagtgcctgacttgagatgtaaacttgatgtacaaacggagagttgtttatctttcagatgtttcacagaatccagtgtccccgggttggataagaaagatatgtaaataggagtcttcatttctttctttctttttcttcctctgcacatcttggtccctgggtaattctgcttacgagatggttcgacttcgcttcaactttggaatggctattctaagctttactgtgtgactagaaagcatagagatttaagaaatgtgttttaacatgggaatggttaaaatggaagaaatagtacttaaaatttaatgtggtaaggctagtctttcatttggataattaactacatgggttgactctttctgccccttacccattttaaaccttatttcagtaacaggtatagtcctgtgagcagacaaaaaccagatgcagggaggaaatgctgaaaagcattag

SEQ ID NO: 737374 - DNA, 6968 bp, Homo sapiens
  misc_feature (2941)..(2941): n is a, c, g, or t
attcaatcgtaattttttaatcaattaaatccaccagctaactaatcacagctaacagttactgaaagtcaggtataatagtgctctgtcagacagaagagaaacagaacatgctcttgagggacatacaatctagtaggagaacgcagacatactgaaaacattaaggtatgatccctgagaatgctaagtagagcacagttataagtgggacagcattacggggaagggcaaaatcactgctaatgggtatgggggtaggggtgttcacgcagttaggcttcatgggaaagtgggatttaagttgggcctggaaggatggtaagggcaggaggatattggcgcccagggatcagaaggcacagaggtggccgttagcaagttgctaagtggaggaagcctgataagaagaggtgtgtgctgaggagtgctgaggagtcgaggctgctaaaacagatgctgtggcaggcagcagggagccactgaggtctgtggagccttgggcaccatgacacgactggtatgttgtaatgttctgccccatgccaagccatattagagcctgggacaaaaggaaaactcagtaatactaatcctgtctttattttaaattttaatattttgttcatcatggttttttttgcattaattctgatttttaaaaatattggattgaaatattacttactttgattactgtatttttttggcatcccttacattttgtgcccaaggccagggtctcccttgcctcatcctagtcccagtcatgagttctacttctgaagtccagtggtgggtacatgggtatttatttcattgttattaattatagcttactcatgttataaatattatttggttagtaaacagcacttaattaaaaaaacaatgtaaaagacatggattttaagattaattagaaactattgagcctgagaagcatgaaagagaaaagaatccttcgtgctgccaagtcgatctctaggggagaataactcccacggctgcagcgtatgcagtgcacacagaagagggctgctctgcccagtccatgtgggtggaagataactggggggagtaccagaggctgctgtccacttggacactggccttgagcaactcagctgctgcagccagagcgccaatgctgcatggcctgaggcaagccctggcaaatgggctgcccaggtaggcttggcccacgttaaaacagacccacgcagccctgctgaaggaatggaagcaatagaagactcctgaacgctataaatgtctcagggctatgtatcagggagaaaaggagatgtttgatacaaggaatattgttagtacatcttaacatgtaaaatctgaaattttgaaacatgaaatctattgttcattagtataatggtgacgaatgaaagattattttgattcagggaaggcaaacagattgcagcaaaaatctcaaaaaaggtgaggggaaaggttgaaaggggcaggcaggtccctgctcacatcaccaggggcagttctttgtcatatgatgcggacctcccagtcagtggcaatgttgagtgagagcttctccaggctcaggatggatgttttggcacaatacgtaaaagccacaggctgatctttaccatcagatgagtgggtagtcacagaagatggctccttcctgaagcctaagaccaagatcttctccaccacacacttgctgggataatgacccctctggtcagcaaaactattgatcagaacactggaacagaatgaaaacttcctgtgcaaaaattgcttctggtggaggtattggaatgaatggccatcatcaagatataactcacccactgaagaacccttagtgcttagagcaacccggagtccataggaggattcagtcatccagcctgtggattttcctacagttgtctttattggtatcacacttccacctcgctgaaacactggaatagtgtccaaggctactgggatctttacagtacaccctccttcccaatgagcaaatgtcttatagtcataccagacctcatttgatcctggaagaaacacatcaactgtggtggcttttggttctgtgactggatgaaccaataatgcactccccagcatgtattcatcttccatatcaaaagtctttagttcatcagggaactctacccacagaggcctcatgacaggttgggaagccacgtgtgcatggtagaacagagaataccaatatggcaggaggccatagcgctctctgatggcttctcggatgagtcgggtgtgttcctccccaaagagccagggctctcgtcgcttggtgttcatggtggcatggccacggaagaagggctggtaggctccagcctggtaccaacgcactagcagctctgtctctggattcccaatgaacccgcctatgtcagctccgcaaaaagagatcccagtaatgctgagagtgagtaacattgggatagaaattttcaagttgctccattctgctgtgttgtcgcctgtccacacggcaccatacttttgtgatccagcaaagaaagaacgtgtaagaacaaagggtctctccttccctttagatcgttttatcagtccttctgcagtagccatttgatgataaaaaccgtagatgttgtggagctctctgtgctcccaattgccatgatgaatggcattcttctgcatggtttgctctggccctctaaagacagaaggctcattcatgtcattccaaaggaagaggatgtccgtagatccctgataaacagggaaagcaaaaagacttgaataccactctctgaccttgggattggtgaaatccaggtaagaggagagacctggccaacacaccccttcaaagtcttccccttcctgattcttcacaaagaagccctgatctttggccttcacatatactgagtagtcaggntcaatcttgatgtggggatcactgatgaccacaagcttacgctttttgctcctgagcagctcttgcatcctcttggggtttgggaatctgtttttgtcccaggtgaagtacctcttgccctcagtgtgctctatgtccagccacatggcatcataaggaatgtcatgctcatcaaaccctgcatccactgcttttacatcctgctcatcttcatagttccagcggcactggtggtatcccaaagagaaaagagggggcatggcttgtgtgcctgtaaggtgtgagtactgtttgaagacatcagaaggtgtaggtcctgtcagcagaaaaacatcaatgatgccactctctgacatccagtgcacatgagtgcgagatctgaccttttgtttagcagcaactgggcccatctgggtcagtgtgtactctactgcaggctctgtattgatctccaccagtgtttccgaggcattcagccagaaaatacctatagttctgcccagtttgtgggccaggagataaggtactgaaccataaatgcccattttatcatatatttggtatccatagacatccaggttataaagacggtaagcatctccatcaccagtatttttaagttggtgtgattctgcatgttgtgggatcccataaagatgctcaaatccatgcaaggagaaatccaaaccaatagaagaagggccattagctttgatatccacaaattttccaaatttctcttcccacaggcccagatcttcttgattttcctgagaggtgtccactgatgtctcctcctcattttctttagcagctctttgtttgtgaagaatctgtagatgctcaaagtataattggcccagggaatttatgctaatcacaacctcttcttcagacaccaagtctaccttgaatgggtttgctgtgatatggcacttcaggtctccttttccatctgccaatatcagactgcctgtgtccccagagcatgaaatcagccttacagtgcttggcttgcttgtgaggacatccggaacttcaaatctgggttttagaggagtctcttcgttaattttaagcctgaaaatgtttccttctataccataaatttcagccaggagaggaaccttacttgcttcattgatgatttggaacctggtgctgtcttcatctgttgtgactgaatccaataatgcccgataggtggacttcttggaaagccactgtttctgacgcctgtaaaatgcgatcttgttacagtctctgaaaatgtttttatctacagcttcatcttcaacacttatttcctctttcactgctgcttccatggcttctctgtcactccgaccagctcccagctctcaggacaagggccctgggcgatcttttaaaaaagccgattgggtgtctttctaaaattacaaccagtacttcatcgtcaagtttctgggaagggagtcccctccagattctcatggagtgacaaatcttgactcttgctcctggaatttttcaggcccaaactagcgtttctacaatgatttatttggcaaatttgtcttgattatgggtggctgatgaggaacgtgcttttgttaggaaccgaaactgggcggcggtgagggcgtgtacgcaatgagtcctagagggtaaaaatcaagagcgttaagaacctggaaatgccgagacggcctccctgactgggacgaagcatctgcagatctatctcagtggcggggtcacgccacagattttgaaaactgaccctctctgtctccgttttcggttaagggtgggaagtgccggccgggtctttgctggaggctaggtctccagccagattgtactgcagcatcgtactcttcagggctagaaggggcctttgaaggttgttacactacccagtctaggaatcgcgtgtactccaccaccgccgaattccagcctttgcttaaataccacccaaaccggagaactcactactagacgccacttgggcagccaggcttagggcttttccagactttctggccccaaagtctgacattgacttagaagggatgaagggctggggcgagcggaagtagagagccaaatcctgcacggggtgcctgcctggtcctaaaacctttaacggctgggagacagaaaagactcaggccaggctggcatgtagcgatctctctaacccagctgaccaggttccaacaggatgacgcctgcgcagtaggtccaaagtctcacggcgcacagacgactgtctgagagaggggccgctacgccgcacagcaaacaagctccgcgacgtttccaggacccggataatcccgcccttagagcagagccggaagaaggcgggacgaaccggaagagggtgaaatgctttcggtaggcactccacggctgtgaagatggcggcggctgcgtggcttcaggtgttgcctgtcattcttctgcttctgggagctcacccgtcaccactgtcgtttttcagtgcgggaccggcaaccgtagctgctgccgaccggtccaaatggcacattccgataccgtcggtgagtattcacttcactaacgtctgaacctagaggagcaaggggtggggctacggcggcccaaggggtccatgaaggttccgcaaaagtctcttcaaaaggggtggggttgctgggatggtctgtgtggctagccaactgggacccacctccctggagtggaaagccgcgcacttctgtgattaggctagcgggaatgtaagggccacttcagcaacagaaaggagtggtggagcggcttctcatcagaaaaacagaactttcagtgcctgacttgagatgtaaacttgatgtacaaacggagagttgtttatctttcagatgtttcacagaatccagtgtccccgggttggataagaaagatatgggaaaaattattttagttttggaaagatcctcttcagaaataccactatcttcctgaagtttgatggagaaccttgtgacctgtctttgaatataacctggtatctgaaaagcgctgattgttacaatgaaatctataacttcaaggcagaagaagtagagttgtatttggaaaaacttaaggaaaaaagaggcttgtctgggaaatatcaaacatcatcaaaattgttccagaactgcagtgaactctttaaaacacagaccttttctggagattttatgcatcgactgcctcttttaggagaaaaacaggaggctaaggagaatggaacaaaccttacctttattggagacaaaaccgcaatgcatgaaccattgcaaacttggcaagatgcaccatacatttttattgtacatattggcatttcatcctcaaaggaatcatcaaaagaaaattcactgagtaatctttttaccatgactgttgaagtgaagggtccctatgaatacctcacacttgaagactatcccttgatgatttttttcatggtgatgtgtattgtatatgtcctgtttggtgttctgtggctggcatggtctgcctgctactggagagatctcctgagaattcagttttggattggtgctgtcatcttcctgggaatgcttgagaaagctgtcttctatgcggaatttcagaatatccgatacaaaggagaatctgtccagggtgctttgatccttgcagagctgctttcagcagtgaaacgctcactggctcgaaccctggtcatcatagtcagtctgggatatggcatcgtcaagtaagtattaacttcctgtatggaagagcaaattaaaatgctgattaaattaaaacagtattgcatgttcccaatgtagtagttctgaaatagttgataaaagaaataattctgaaacaagaaaggtatttgaaattttgtagcattgtaaatgttgggaaaatgtgtttcattttccatacttccaaatatattccatacttccaaatatattccatacttccaagtccaaatgtattccatacttccaaatccaaatgtattccatacttccgaatatat

SEQ ID NO: 737375 - DNA, 7157 bp, Homo sapiens
  misc_feature (2941)..(2941): n is a, c, g, or t
attcaatcgtaattttttaatcaattaaatccaccagctaactaatcacagctaacagttactgaaagtcaggtataatagtgctctgtcagacagaagagaaacagaacatgctcttgagggacatacaatctagtaggagaacgcagacatactgaaaacattaaggtatgatccctgagaatgctaagtagagcacagttataagtgggacagcattacggggaagggcaaaatcactgctaatgggtatgggggtaggggtgttcacgcagttaggcttcatgggaaagtgggatttaagttgggcctggaaggatggtaagggcaggaggatattggcgcccagggatcagaaggcacagaggtggccgttagcaagttgctaagtggaggaagcctgataagaagaggtgtgtgctgaggagtgctgaggagtcgaggctgctaaaacagatgctgtggcaggcagcagggagccactgaggtctgtggagccttgggcaccatgacacgactggtatgttgtaatgttctgccccatgccaagccatattagagcctgggacaaaaggaaaactcagtaatactaatcctgtctttattttaaattttaatattttgttcatcatggttttttttgcattaattctgatttttaaaaatattggattgaaatattacttactttgattactgtatttttttggcatcccttacattttgtgcccaaggccagggtctcccttgcctcatcctagtcccagtcatgagttctacttctgaagtccagtggtgggtacatgggtatttatttcattgttattaattatagcttactcatgttataaatattatttggttagtaaacagcacttaattaaaaaaacaatgtaaaagacatggattttaagattaattagaaactattgagcctgagaagcatgaaagagaaaagaatccttcgtgctgccaagtcgatctctaggggagaataactcccacggctgcagcgtatgcagtgcacacagaagagggctgctctgcccagtccatgtgggtggaagataactggggggagtaccagaggctgctgtccacttggacactggccttgagcaactcagctgctgcagccagagcgccaatgctgcatggcctgaggcaagccctggcaaatgggctgcccaggtaggcttggcccacgttaaaacagacccacgcagccctgctgaaggaatggaagcaatagaagactcctgaacgctataaatgtctcagggctatgtatcagggagaaaaggagatgtttgatacaaggaatattgttagtacatcttaacatgtaaaatctgaaattttgaaacatgaaatctattgttcattagtataatggtgacgaatgaaagattattttgattcagggaaggcaaacagattgcagcaaaaatctcaaaaaaggtgaggggaaaggttgaaaggggcaggcaggtccctgctcacatcaccaggggcagttctttgtcatatgatgcggacctcccagtcagtggcaatgttgagtgagagcttctccaggctcaggatggatgttttggcacaatacgtaaaagccacaggctgatctttaccatcagatgagtgggtagtcacagaagatggctccttcctgaagcctaagaccaagatcttctccaccacacacttgctgggataatgacccctctggtcagcaaaactattgatcagaacactggaacagaatgaaaacttcctgtgcaaaaattgcttctggtggaggtattggaatgaatggccatcatcaagatataactcacccactgaagaacccttagtgcttagagcaacccggagtccataggaggattcagtcatccagcctgtggattttcctacagttgtctttattggtatcacacttccacctcgctgaaacactggaatagtgtccaaggctactgggatctttacagtacaccctccttcccaatgagcaaatgtcttatagtcataccagacctcatttgatcctggaagaaacacatcaactgtggtggcttttggttctgtgactggatgaaccaataatgcactccccagcatgtattcatcttccatatcaaaagtctttagttcatcagggaactctacccacagaggcctcatgacaggttgggaagccacgtgtgcatggtagaacagagaataccaatatggcaggaggccatagcgctctctgatggcttctcggatgagtcgggtgtgttcctccccaaagagccagggctctcgtcgcttggtgttcatggtggcatggccacggaagaagggctggtaggctccagcctggtaccaacgcactagcagctctgtctctggattcccaatgaacccgcctatgtcagctccgcaaaaagagatcccagtaatgctgagagtgagtaacattgggatagaaattttcaagttgctccattctgctgtgttgtcgcctgtccacacggcaccatacttttgtgatccagcaaagaaagaacgtgtaagaacaaagggtctctccttccctttagatcgttttatcagtccttctgcagtagccatttgatgataaaaaccgtagatgttgtggagctctctgtgctcccaattgccatgatgaatggcattcttctgcatggtttgctctggccctctaaagacagaaggctcattcatgtcattccaaaggaagaggatgtccgtagatccctgataaacagggaaagcaaaaagacttgaataccactctctgaccttgggattggtgaaatccaggtaagaggagagacctggccaacacaccccttcaaagtcttccccttcctgattcttcacaaagaagccctgatctttggccttcacatatactgagtagtcaggntcaatcttgatgtggggatcactgatgaccacaagcttacgctttttgctcctgagcagctcttgcatcctcttggggtttgggaatctgtttttgtcccaggtgaagtacctcttgccctcagtgtgctctatgtccagccacatggcatcataaggaatgtcatgctcatcaaaccctgcatccactgcttttacatcctgctcatcttcatagttccagcggcactggtggtatcccaaagagaaaagagggggcatggcttgtgtgcctgtaaggtgtgagtactgtttgaagacatcagaaggtgtaggtcctgtcagcagaaaaacatcaatgatgccactctctgacatccagtgcacatgagtgcgagatctgaccttttgtttagcagcaactgggcccatctgggtcagtgtgtactctactgcaggctctgtattgatctccaccagtgtttccgaggcattcagccagaaaatacctatagttctgcccagtttgtgggccaggagataaggtactgaaccataaatgcccattttatcatatatttggtatccatagacatccaggttataaagacggtaagcatctccatcaccagtatttttaagttggtgtgattctgcatgttgtgggatcccataaagatgctcaaatccatgcaaggagaaatccaaaccaatagaagaagggccattagctttgatatccacaaattttccaaatttctcttcccacaggcccagatcttcttgattttcctgagaggtgtccactgatgtctcctcctcattttctttagcagctctttgtttgtgaagaatctgtagatgctcaaagtataattggcccagggaatttatgctaatcacaacctcttcttcagacaccaagtctaccttgaatgggtttgctgtgatatggcacttcaggtctccttttccatctgccaatatcagactgcctgtgtccccagagcatgaaatcagccttacagtgcttggcttgcttgtgaggacatccggaacttcaaatctgggttttagaggagtctcttcgttaattttaagcctgaaaatgtttccttctataccataaatttcagccaggagaggaaccttacttgcttcattgatgatttggaacctggtgctgtcttcatctgttgtgactgaatccaataatgcccgataggtggacttcttggaaagccactgtttctgacgcctgtaaaatgcgatcttgttacagtctctgaaaatgtttttatctacagcttcatcttcaacacttatttcctctttcactgctgcttccatggcttctctgtcactccgaccagctcccagctctcaggacaagggccctgggcgatcttttaaaaaagccgattgggtgtctttctaaaattacaaccagtacttcatcgtcaagtttctgggaagggagtcccctccagattctcatggagtgacaaatcttgactcttgctcctggaatttttcaggcccaaactagcgtttctacaatgatttatttggcaaatttgtcttgattatgggtggctgatgaggaacgtgcttttgttaggaaccgaaactgggcggcggtgagggcgtgtacgcaatgagtcctagagggtaaaaatcaagagcgttaagaacctggaaatgccgagacggcctccctgactgggacgaagcatctgcagatctatctcagtggcggggtcacgccacagattttgaaaactgaccctctctgtctccgttttcggttaagggtgggaagtgccggccgggtctttgctggaggctaggtctccagccagattgtactgcagcatcgtactcttcagggctagaaggggcctttgaaggttgttacactacccagtctaggaatcgcgtgtactccaccaccgccgaattccagcctttgcttaaataccacccaaaccggagaactcactactagacgccacttgggcagccaggcttagggcttttccagactttctggccccaaagtctgacattgacttagaagggatgaagggctggggcgagcggaagtagagagccaaatcctgcacggggtgcctgcctggtcctaaaacctttaacggctgggagacagaaaagactcaggccaggctggcatgtagcgatctctctaacccagctgaccaggttccaacaggatgacgcctgcgcagtaggtccaaagtctcacggcgcacagacgactgtctgagagaggggccgctacgccgcacagcaaacaagctccgcgacgtttccaggacccggataatcccgcccttagagcagagccggaagaaggcgggacgaaccggaagagggtgaaatgctttcggtaggcactccacggctgtgaagatggcggcggctgcgtggcttcaggtgttgcctgtcattcttctgcttctgggagctcacccgtcaccactgtcgtttttcagtgcgggaccggcaaccgtagctgctgccgaccggtccaaatggcacattccgataccgtcggtgagtattcacttcactaacgtctgaacctagaggagcaaggggtggggctacggcggcccaaggggtccatgaaggttccgcaaaagtctcttcaaaaggggtggggttgctgggatggtctgtgtggctagccaactgggacccacctccctggagtggaaagccgcgcacttctgtgattaggctagcgggaatgtaagggccacttcagcaacagaaaggagtggtggagcggcttctcatcagaaaaacagaactttcagtgcctgacttgagatgtaaacttgatgtacaaacggagagttgtttatctttcagatgtttcacagaatccagtgtccccgggttggataagaaagatatgggaaaaattattttagttttggaaagatcctcttcagaaataccactatcttcctgaagtttgatggagaaccttgtgacctgtctttgaatataacctggtatctgaaaagcgctgattgttacaatgaaatctataacttcaaggcagaagaagtagagttgtatttggaaaaacttaaggaaaaaagaggcttgtctgggaaatatcaaacatcatcaaaattgttccagaactgcagtgaactctttaaaacacagaccttttctggagattttatgcatcgactgcctcttttaggagaaaaacaggaggctaaggagaatggaacaaaccttacctttattggagacaaaaccgcaatgcatgaaccattgcaaacttggcaagatgcaccatacatttttattgtacatattggcatttcatcctcaaaggaatcatcaaaagaaaattcactgagtaatctttttaccatgactgttgaagtgaagggtccctatgaatacctcacacttgaagactatcccttgatgatttttttcatggtgatgtgtattgtatatgtcctgtttggtgttctgtggctggcatggtctgcctgctactggagagatctcctgagaattcagttttggattggtgctgtcatcttcctgggaatgcttgagaaagctgtcttctatgcggaatttcagaatatccgatacaaaggagaatctgtccagggtgctttgatccttgcagagctgctttcagcagtgaaacgctcactggctcgaaccctggtcatcatagtcagtctgggatatggcatcgtcaagccacgccttggagtcactcttcataaggttgtagtagcaggagccctctatcttttgttctctggcatggaaggggtcctcagagttactggggcccagactgatcttgcttccttggcctttatccccttggctttcctagacactgccttgtgctggtggatatccttctcattggcttgtttgatgatggtccattttctccccttggagatgggtttccattgatctttctgcaaagagtttttatcagttttgttaattactccttagtgtggggaacagtgcatgctaagtcttaacaacctgagggttcaggtaagcagttttttttgtttctatttttttaattttaaaaatcaaattggaaattggtgactgtggaccgagctcgagataaaatcttttgtgagcatttcatcttgattttgcacttcttgtttgtgtacctaatcatttagtgttagagt

SEQ ID NO: 737376 - DNA, 7606 bp, Homo sapiens
  misc_feature (2941)..(2941): n is a, c, g, or t
attcaatcgtaattttttaatcaattaaatccaccagctaactaatcacagctaacagttactgaaagtcaggtataatagtgctctgtcagacagaagagaaacagaacatgctcttgagggacatacaatctagtaggagaacgcagacatactgaaaacattaaggtatgatccctgagaatgctaagtagagcacagttataagtgggacagcattacggggaagggcaaaatcactgctaatgggtatgggggtaggggtgttcacgcagttaggcttcatgggaaagtgggatttaagttgggcctggaaggatggtaagggcaggaggatattggcgcccagggatcagaaggcacagaggtggccgttagcaagttgctaagtggaggaagcctgataagaagaggtgtgtgctgaggagtgctgaggagtcgaggctgctaaaacagatgctgtggcaggcagcagggagccactgaggtctgtggagccttgggcaccatgacacgactggtatgttgtaatgttctgccccatgccaagccatattagagcctgggacaaaaggaaaactcagtaatactaatcctgtctttattttaaattttaatattttgttcatcatggttttttttgcattaattctgatttttaaaaatattggattgaaatattacttactttgattactgtatttttttggcatcccttacattttgtgcccaaggccagggtctcccttgcctcatcctagtcccagtcatgagttctacttctgaagtccagtggtgggtacatgggtatttatttcattgttattaattatagcttactcatgttataaatattatttggttagtaaacagcacttaattaaaaaaacaatgtaaaagacatggattttaagattaattagaaactattgagcctgagaagcatgaaagagaaaagaatccttcgtgctgccaagtcgatctctaggggagaataactcccacggctgcagcgtatgcagtgcacacagaagagggctgctctgcccagtccatgtgggtggaagataactggggggagtaccagaggctgctgtccacttggacactggccttgagcaactcagctgctgcagccagagcgccaatgctgcatggcctgaggcaagccctggcaaatgggctgcccaggtaggcttggcccacgttaaaacagacccacgcagccctgctgaaggaatggaagcaatagaagactcctgaacgctataaatgtctcagggctatgtatcagggagaaaaggagatgtttgatacaaggaatattgttagtacatcttaacatgtaaaatctgaaattttgaaacatgaaatctattgttcattagtataatggtgacgaatgaaagattattttgattcagggaaggcaaacagattgcagcaaaaatctcaaaaaaggtgaggggaaaggttgaaaggggcaggcaggtccctgctcacatcaccaggggcagttctttgtcatatgatgcggacctcccagtcagtggcaatgttgagtgagagcttctccaggctcaggatggatgttttggcacaatacgtaaaagccacaggctgatctttaccatcagatgagtgggtagtcacagaagatggctccttcctgaagcctaagaccaagatcttctccaccacacacttgctgggataatgacccctctggtcagcaaaactattgatcagaacactggaacagaatgaaaacttcctgtgcaaaaattgcttctggtggaggtattggaatgaatggccatcatcaagatataactcacccactgaagaacccttagtgcttagagcaacccggagtccataggaggattcagtcatccagcctgtggattttcctacagttgtctttattggtatcacacttccacctcgctgaaacactggaatagtgtccaaggctactgggatctttacagtacaccctccttcccaatgagcaaatgtcttatagtcataccagacctcatttgatcctggaagaaacacatcaactgtggtggcttttggttctgtgactggatgaaccaataatgcactccccagcatgtattcatcttccatatcaaaagtctttagttcatcagggaactctacccacagaggcctcatgacaggttgggaagccacgtgtgcatggtagaacagagaataccaatatggcaggaggccatagcgctctctgatggcttctcggatgagtcgggtgtgttcctccccaaagagccagggctctcgtcgcttggtgttcatggtggcatggccacggaagaagggctggtaggctccagcctggtaccaacgcactagcagctctgtctctggattcccaatgaacccgcctatgtcagctccgcaaaaagagatcccagtaatgctgagagtgagtaacattgggatagaaattttcaagttgctccattctgctgtgttgtcgcctgtccacacggcaccatacttttgtgatccagcaaagaaagaacgtgtaagaacaaagggtctctccttccctttagatcgttttatcagtccttctgcagtagccatttgatgataaaaaccgtagatgttgtggagctctctgtgctcccaattgccatgatgaatggcattcttctgcatggtttgctctggccctctaaagacagaaggctcattcatgtcattccaaaggaagaggatgtccgtagatccctgataaacagggaaagcaaaaagacttgaataccactctctgaccttgggattggtgaaatccaggtaagaggagagacctggccaacacaccccttcaaagtcttccccttcctgattcttcacaaagaagccctgatctttggccttcacatatactgagtagtcaggntcaatcttgatgtggggatcactgatgaccacaagcttacgctttttgctcctgagcagctcttgcatcctcttggggtttgggaatctgtttttgtcccaggtgaagtacctcttgccctcagtgtgctctatgtccagccacatggcatcataaggaatgtcatgctcatcaaaccctgcatccactgcttttacatcctgctcatcttcatagttccagcggcactggtggtatcccaaagagaaaagagggggcatggcttgtgtgcctgtaaggtgtgagtactgtttgaagacatcagaaggtgtaggtcctgtcagcagaaaaacatcaatgatgccactctctgacatccagtgcacatgagtgcgagatctgaccttttgtttagcagcaactgggcccatctgggtcagtgtgtactctactgcaggctctgtattgatctccaccagtgtttccgaggcattcagccagaaaatacctatagttctgcccagtttgtgggccaggagataaggtactgaaccataaatgcccattttatcatatatttggtatccatagacatccaggttataaagacggtaagcatctccatcaccagtatttttaagttggtgtgattctgcatgttgtgggatcccataaagatgctcaaatccatgcaaggagaaatccaaaccaatagaagaagggccattagctttgatatccacaaattttccaaatttctcttcccacaggcccagatcttcttgattttcctgagaggtgtccactgatgtctcctcctcattttctttagcagctctttgtttgtgaagaatctgtagatgctcaaagtataattggcccagggaatttatgctaatcacaacctcttcttcagacaccaagtctaccttgaatgggtttgctgtgatatggcacttcaggtctccttttccatctgccaatatcagactgcctgtgtccccagagcatgaaatcagccttacagtgcttggcttgcttgtgaggacatccggaacttcaaatctgggttttagaggagtctcttcgttaattttaagcctgaaaatgtttccttctataccataaatttcagccaggagaggaaccttacttgcttcattgatgatttggaacctggtgctgtcttcatctgttgtgactgaatccaataatgcccgataggtggacttcttggaaagccactgtttctgacgcctgtaaaatgcgatcttgttacagtctctgaaaatgtttttatctacagcttcatcttcaacacttatttcctctttcactgctgcttccatggcttctctgtcactccgaccagctcccagctctcaggacaagggccctgggcgatcttttaaaaaagccgattgggtgtctttctaaaattacaaccagtacttcatcgtcaagtttctgggaagggagtcccctccagattctcatggagtgacaaatcttgactcttgctcctggaatttttcaggcccaaactagcgtttctacaatgatttatttggcaaatttgtcttgattatgggtggctgatgaggaacgtgcttttgttaggaaccgaaactgggcggcggtgagggcgtgtacgcaatgagtcctagagggtaaaaatcaagagcgttaagaacctggaaatgccgagacggcctccctgactgggacgaagcatctgcagatctatctcagtggcggggtcacgccacagattttgaaaactgaccctctctgtctccgttttcggttaagggtgggaagtgccggccgggtctttgctggaggctaggtctccagccagattgtactgcagcatcgtactcttcagggctagaaggggcctttgaaggttgttacactacccagtctaggaatcgcgtgtactccaccaccgccgaattccagcctttgcttaaataccacccaaaccggagaactcactactagacgccacttgggcagccaggcttagggcttttccagactttctggccccaaagtctgacattgacttagaagggatgaagggctggggcgagcggaagtagagagccaaatcctgcacggggtgcctgcctggtcctaaaacctttaacggctgggagacagaaaagactcaggccaggctggcatgtagcgatctctctaacccagctgaccaggttccaacaggatgacgcctgcgcagtaggtccaaagtctcacggcgcacagacgactgtctgagagaggggccgctacgccgcacagcaaacaagctccgcgacgtttccaggacccggataatcccgcccttagagcagagccggaagaaggcgggacgaaccggaagagggtgaaatgctttcggtaggcactccacggctgtgaagatggcggcggctgcgtggcttcaggtgttgcctgtcattcttctgcttctgggagctcacccgtcaccactgtcgtttttcagtgcgggaccggcaaccgtagctgctgccgaccggtccaaatggcacattccgataccgtcggtgagtattcacttcactaacgtctgaacctagaggagcaaggggtggggctacggcggcccaaggggtccatgaaggttccgcaaaagtctcttcaaaaggggtggggttgctgggatggtctgtgtggctagccaactgggacccacctccctggagtggaaagccgcgcacttctgtgattaggctagcgggaatgtaagggccacttcagcaacagaaaggagtggtggagcggcttctcatcagaaaaacagaactttcagtgcctgacttgagatgtaaacttgatgtacaaacggagagttgtttatctttcagatgtttcacagaatccagtgtccccgggttggataagaaagatatgggaaaaattattttagttttggaaagatcctcttcagaaataccactatcttcctgaagtttgatggagaaccttgtgacctgtctttgaatataacctggtatctgaaaagcgctgattgttacaatgaaatctataacttcaaggcagaagaagtagagttgtatttggaaaaacttaaggaaaaaagaggcttgtctgggaaatatcaaacatcatcaaaattgttccagaactgcagtgaactctttaaaacacagaccttttctggagattttatgcatcgactgcctcttttaggagaaaaacaggaggctaaggagaatggaacaaaccttacctttattggagacaaaaccgcaatgcatgaaccattgcaaacttggcaagatgcaccatacatttttattgtacatattggcatttcatcctcaaaggaatcatcaaaagaaaattcactgagtaatctttttaccatgactgttgaagtgaagggtccctatgaatacctcacacttgaagactatcccttgatgatttttttcatggtgatgtgtattgtatatgtcctgtttggtgttctgtggctggcatggtctgcctgctactggagagatctcctgagaattcagttttggattggtgctgtcatcttcctgggaatgcttgagaaagctgtcttctatgcggaatttcagaatatccgatacaaaggagaatctgtccagggtgctttgatccttgcagagctgctttcagcagtgaaacgctcactggctcgaaccctggtcatcatagtcagtctgggatatggcatcgtcaagccacgccttggagtcactcttcataaggttgtagtagcaggagccctctatcttttgttctctggcatggaaggggtcctcagagttactggggcccagactgatcttgcttccttggcctttatccccttggctttcctagacactgccttgtgctggtggatatttattagcctgactcaaacaatgaagctattaaaacttcggaggaacattgtaaaactctctttgtatcggcatttcaccaacacgcttattttggcagtggcagcatccattgtgtttatcatctggacaaccatgaagttcagaatagtgacatgtcagtcggactggcgggagctgtgggtagacgatgccatctggcgcttgctgttctccatgatcctctttgtcatcatggttctctggcgaccatctgcaaacaaccagagccagaggttcttggactcttctgtttactctgctaacatgagatgaccatgtcatcaattaggggtggtgcattgggggacagtatcagggctgtgtcatatagtggaaggaacactgggcctggaatcagaagaactgggttcctatctcagctctcctcttaacttcatgatttttggcatgcggcctctccacctctctggccttagtttcctttctatatactgagggggaattaaacccagcaacatgaagttcctttcagctctgacattttgtgataaatacacaggcatactatggaaataaattgcaagtttggtttcagaccatcacgataaagcagatattgagttacatacatattttgttttttccagtgcatatcaaagttatgtttacactattctgtagtctactatgtgtgcaatagcattatgtctaaaaaatatatgcacgttaatttaaaaacactttattgcca

SEQ ID NO: 737377 - DNA, 8955 bp, Homo sapiens
  misc_feature (2941)..(2941): n is a, c, g, or t
attcaatcgtaattttttaatcaattaaatccaccagctaactaatcacagctaacagttactgaaagtcaggtataatagtgctctgtcagacagaagagaaacagaacatgctcttgagggacatacaatctagtaggagaacgcagacatactgaaaacattaaggtatgatccctgagaatgctaagtagagcacagttataagtgggacagcattacggggaagggcaaaatcactgctaatgggtatgggggtaggggtgttcacgcagttaggcttcatgggaaagtgggatttaagttgggcctggaaggatggtaagggcaggaggatattggcgcccagggatcagaaggcacagaggtggccgttagcaagttgctaagtggaggaagcctgataagaagaggtgtgtgctgaggagtgctgaggagtcgaggctgctaaaacagatgctgtggcaggcagcagggagccactgaggtctgtggagccttgggcaccatgacacgactggtatgttgtaatgttctgccccatgccaagccatattagagcctgggacaaaaggaaaactcagtaatactaatcctgtctttattttaaattttaatattttgttcatcatggttttttttgcattaattctgatttttaaaaatattggattgaaatattacttactttgattactgtatttttttggcatcccttacattttgtgcccaaggccagggtctcccttgcctcatcctagtcccagtcatgagttctacttctgaagtccagtggtgggtacatgggtatttatttcattgttattaattatagcttactcatgttataaatattatttggttagtaaacagcacttaattaaaaaaacaatgtaaaagacatggattttaagattaattagaaactattgagcctgagaagcatgaaagagaaaagaatccttcgtgctgccaagtcgatctctaggggagaataactcccacggctgcagcgtatgcagtgcacacagaagagggctgctctgcccagtccatgtgggtggaagataactggggggagtaccagaggctgctgtccacttggacactggccttgagcaactcagctgctgcagccagagcgccaatgctgcatggcctgaggcaagccctggcaaatgggctgcccaggtaggcttggcccacgttaaaacagacccacgcagccctgctgaaggaatggaagcaatagaagactcctgaacgctataaatgtctcagggctatgtatcagggagaaaaggagatgtttgatacaaggaatattgttagtacatcttaacatgtaaaatctgaaattttgaaacatgaaatctattgttcattagtataatggtgacgaatgaaagattattttgattcagggaaggcaaacagattgcagcaaaaatctcaaaaaaggtgaggggaaaggttgaaaggggcaggcaggtccctgctcacatcaccaggggcagttctttgtcatatgatgcggacctcccagtcagtggcaatgttgagtgagagcttctccaggctcaggatggatgttttggcacaatacgtaaaagccacaggctgatctttaccatcagatgagtgggtagtcacagaagatggctccttcctgaagcctaagaccaagatcttctccaccacacacttgctgggataatgacccctctggtcagcaaaactattgatcagaacactggaacagaatgaaaacttcctgtgcaaaaattgcttctggtggaggtattggaatgaatggccatcatcaagatataactcacccactgaagaacccttagtgcttagagcaacccggagtccataggaggattcagtcatccagcctgtggattttcctacagttgtctttattggtatcacacttccacctcgctgaaacactggaatagtgtccaaggctactgggatctttacagtacaccctccttcccaatgagcaaatgtcttatagtcataccagacctcatttgatcctggaagaaacacatcaactgtggtggcttttggttctgtgactggatgaaccaataatgcactccccagcatgtattcatcttccatatcaaaagtctttagttcatcagggaactctacccacagaggcctcatgacaggttgggaagccacgtgtgcatggtagaacagagaataccaatatggcaggaggccatagcgctctctgatggcttctcggatgagtcgggtgtgttcctccccaaagagccagggctctcgtcgcttggtgttcatggtggcatggccacggaagaagggctggtaggctccagcctggtaccaacgcactagcagctctgtctctggattcccaatgaacccgcctatgtcagctccgcaaaaagagatcccagtaatgctgagagtgagtaacattgggatagaaattttcaagttgctccattctgctgtgttgtcgcctgtccacacggcaccatacttttgtgatccagcaaagaaagaacgtgtaagaacaaagggtctctccttccctttagatcgttttatcagtccttctgcagtagccatttgatgataaaaaccgtagatgttgtggagctctctgtgctcccaattgccatgatgaatggcattcttctgcatggtttgctctggccctctaaagacagaaggctcattcatgtcattccaaaggaagaggatgtccgtagatccctgataaacagggaaagcaaaaagacttgaataccactctctgaccttgggattggtgaaatccaggtaagaggagagacctggccaacacaccccttcaaagtcttccccttcctgattcttcacaaagaagccctgatctttggccttcacatatactgagtagtcaggntcaatcttgatgtggggatcactgatgaccacaagcttacgctttttgctcctgagcagctcttgcatcctcttggggtttgggaatctgtttttgtcccaggtgaagtacctcttgccctcagtgtgctctatgtccagccacatggcatcataaggaatgtcatgctcatcaaaccctgcatccactgcttttacatcctgctcatcttcatagttccagcggcactggtggtatcccaaagagaaaagagggggcatggcttgtgtgcctgtaaggtgtgagtactgtttgaagacatcagaaggtgtaggtcctgtcagcagaaaaacatcaatgatgccactctctgacatccagtgcacatgagtgcgagatctgaccttttgtttagcagcaactgggcccatctgggtcagtgtgtactctactgcaggctctgtattgatctccaccagtgtttccgaggcattcagccagaaaatacctatagttctgcccagtttgtgggccaggagataaggtactgaaccataaatgcccattttatcatatatttggtatccatagacatccaggttataaagacggtaagcatctccatcaccagtatttttaagttggtgtgattctgcatgttgtgggatcccataaagatgctcaaatccatgcaaggagaaatccaaaccaatagaagaagggccattagctttgatatccacaaattttccaaatttctcttcccacaggcccagatcttcttgattttcctgagaggtgtccactgatgtctcctcctcattttctttagcagctctttgtttgtgaagaatctgtagatgctcaaagtataattggcccagggaatttatgctaatcacaacctcttcttcagacaccaagtctaccttgaatgggtttgctgtgatatggcacttcaggtctccttttccatctgccaatatcagactgcctgtgtccccagagcatgaaatcagccttacagtgcttggcttgcttgtgaggacatccggaacttcaaatctgggttttagaggagtctcttcgttaattttaagcctgaaaatgtttccttctataccataaatttcagccaggagaggaaccttacttgcttcattgatgatttggaacctggtgctgtcttcatctgttgtgactgaatccaataatgcccgataggtggacttcttggaaagccactgtttctgacgcctgtaaaatgcgatcttgttacagtctctgaaaatgtttttatctacagcttcatcttcaacacttatttcctctttcactgctgcttccatggcttctctgtcactccgaccagctcccagctctcaggacaagggccctgggcgatcttttaaaaaagccgattgggtgtctttctaaaattacaaccagtacttcatcgtcaagtttctgggaagggagtcccctccagattctcatggagtgacaaatcttgactcttgctcctggaatttttcaggcccaaactagcgtttctacaatgatttatttggcaaatttgtcttgattatgggtggctgatgaggaacgtgcttttgttaggaaccgaaactgggcggcggtgagggcgtgtacgcaatgagtcctagagggtaaaaatcaagagcgttaagaacctggaaatgccgagacggcctccctgactgggacgaagcatctgcagatctatctcagtggcggggtcacgccacagattttgaaaactgaccctctctgtctccgttttcggttaagggtgggaagtgccggccgggtctttgctggaggctaggtctccagccagattgtactgcagcatcgtactcttcagggctagaaggggcctttgaaggttgttacactacccagtctaggaatcgcgtgtactccaccaccgccgaattccagcctttgcttaaataccacccaaaccggagaactcactactagacgccacttgggcagccaggcttagggcttttccagactttctggccccaaagtctgacattgacttagaagggatgaagggctggggcgagcggaagtagagagccaaatcctgcacggggtgcctgcctggtcctaaaacctttaacggctgggagacagaaaagactcaggccaggctggcatgtagcgatctctctaacccagctgaccaggttccaacaggatgacgcctgcgcagtaggtccaaagtctcacggcgcacagacgactgtctgagagaggggccgctacgccgcacagcaaacaagctccgcgacgtttccaggacccggataatcccgcccttagagcagagccggaagaaggcgggacgaaccggaagagggtgaaatgctttcggtaggcactccacggctgtgaagatggcggcggctgcgtggcttcaggtgttgcctgtcattcttctgcttctgggagctcacccgtcaccactgtcgtttttcagtgcgggaccggcaaccgtagctgctgccgaccggtccaaatggcacattccgataccgtcggtgagtattcacttcactaacgtctgaacctagaggagcaaggggtggggctacggcggcccaaggggtccatgaaggttccgcaaaagtctcttcaaaaggggtggggttgctgggatggtctgtgtggctagccaactgggacccacctccctggagtggaaagccgcgcacttctgtgattaggctagcgggaatgtaagggccacttcagcaacagaaaggagtggtggagcggcttctcatcagaaaaacagaactttcagtgcctgacttgagatgtaaacttgatgtacaaacggagagttgtttatctttcagatgtttcacagaatccagtgtccccgggttggataagaaagatatgggaaaaattattttagttttggaaagatcctcttcagaaataccactatcttcctgaagtttgatggagaaccttgtgacctgtctttgaatataacctggtatctgaaaagcgctgattgttacaatgaaatctataacttcaaggcagaagaagtagagttgtatttggaaaaacttaaggaaaaaagaggcttgtctgggaaatatcaaacatcatcaaaattgttccagaactgcagtgaactctttaaaacacagaccttttctggagattttatgcatcgactgcctcttttaggagaaaaacaggaggctaaggagaatggaacaaaccttacctttattggagacaaaaccgcaatgcatgaaccattgcaaacttggcaagatgcaccatacatttttattgtacatattggcatttcatcctcaaaggaatcatcaaaagaaaattcactgagtaatctttttaccatgactgttgaagtgaagggtccctatgaatacctcacacttgaagactatcccttgatgatttttttcatggtgatgtgtattgtatatgtcctgtttggtgttctgtggctggcatggtctgcctgctactggagagatctcctgagaattcagttttggattggtgctgtcatcttcctgggaatgcttgagaaagctgtcttctatgcggaatttcagaatatccgatacaaaggagaatctgtccagggtgctttgatccttgcagagctgctttcagcagtgaaacgctcactggctcgaaccctggtcatcatagtcagtctgggatatggcatcgtcaagccacgccttggagtcactcttcataaggttgtagtagcaggagccctctatcttttgttctctggcatggaaggggtcctcagagttactggggcccagactgatcttgcttccttggcctttatccccttggctttcctagacactgccttgtgctggtggatatttattagcctgactcaaacaatgaagctattaaaacttcggaggaacattgtaaaactctctttgtatcggcatttcaccaacacgcttattttggcagtggcagcatccattgtgtttatcatctggacaaccatgaagttcagaatagtgacatgtcagtcggactggcgggagctgtgggtagacgatgccatctggcgcttgctgttctccatgatcctctttgtcatcatggttctctggcgaccatctgcaaacaaccagaggtttgccttttcaccattgtctgaggaagaggaggaggatgaacaaaaggagcctatgctgaaagaaagctttgaaggaatgaaaatgagaagtaccaaacaagaacccaatggaaatagtaaagttaacaaagcacaggaagatgatttgaagtgggtagaagagaatgttccttcttctgtgacagatgtagcacttccagcccttctggattcagatgaggaacgaatgatcacacactttgaaaggtccaaaatggagtaaggaatgggaagatttgcagttaaagatggctaccatcagggaagagatcagcatctgtgtcagtcttctgtacggctccatgggattaaaggaagcaatgacatcctgatctgttccttgatctttgggcattggagttggcgagaggtgtcagaacaaagagaacatcttactgaaaacaagttcataagatgagaaaaatctacgagcttcttatttacaacactgctgccccctttcctcccagactctgacatggatgttcatgcaacttaagtgtgttgttcctgaactttctgtaatgtttcattttttaaatctgacaaactaaaaagtttaacgtcttctaaaagattgtcatcaacaccataatatgtaatctccaggagcaactgcctgtaatttttatttatttagggagttacataggtgatgggggaaattgttaactacctttcattttcctgggaagtcaaggttacatcttgcagaggttgttttgagaaaaaagggcccttctgagttaaggagccatagttctatcaatgatcaaaagaaaaaaaaaaaaaagagaaactgttacagtatgattcagatcatttaaaaaagcaaaatcaagtgcaattttgtttacaaatggtgtatattaaagatttttctatttcagatgtactttaaagagaaatattagcttaactcttttgacatctgctattgtgacacatcccattgctggcaatgtggtgcacactccgaaacttttaactactgttttgtaagcctccaagggtggcattgcagggtccttaggcaatgttttgtttgcctttatgcagagaggtgctccaagtgctgtgattgagcaccgtgctagaggaactgtaatgcttcagaagttgtagcttatacaaaggaaacaggtcctgctggcttaatttaaacagttattgcatgaagtagcgtggaggccctggactgctgctcgttctttaggatggactgttctggtatctggtattggtttagagactgttaataagggacatcacaaggtgatgggattcatttgaagcactctatttctgttttaatggttttatccaattttgccttcccaagatttttgttctacataaaaagttcatgccactttttaatataaaaaaatttaacaaaattaatgtatttttctcatttttttcaaactttttctaaagactctttctgtcaaactcatgaaaaatttctttctatggcttttattctagattgtcttattttctgttaaaaccaatgaccacatgaccacaatcttcactaactcatactgcagtgaaagtgttaacccttaggtagtttctctacaactctttgctatggtgattttaaaaaaagtttcctaggaagtatctctgaggaacagcaatctgaagaactgactatattctcatgctaagtcattagccaaaagctggtggtattgttgcatgctgctattgcatattaaaacgtagcagatgaataatagttgtaatgcagcaggatagttggtcaaattatttttttagg

SEQ ID NO: 737378 - DNA, 8880 bp, Homo sapiens
  misc_feature (2941)..(2941): n is a, c, g, or t
  misc_feature (8570)..(8570): n is a, c, g, or t
attcaatcgtaattttttaatcaattaaatccaccagctaactaatcacagctaacagttactgaaagtcaggtataatagtgctctgtcagacagaagagaaacagaacatgctcttgagggacatacaatctagtaggagaacgcagacatactgaaaacattaaggtatgatccctgagaatgctaagtagagcacagttataagtgggacagcattacggggaagggcaaaatcactgctaatgggtatgggggtaggggtgttcacgcagttaggcttcatgggaaagtgggatttaagttgggcctggaaggatggtaagggcaggaggatattggcgcccagggatcagaaggcacagaggtggccgttagcaagttgctaagtggaggaagcctgataagaagaggtgtgtgctgaggagtgctgaggagtcgaggctgctaaaacagatgctgtggcaggcagcagggagccactgaggtctgtggagccttgggcaccatgacacgactggtatgttgtaatgttctgccccatgccaagccatattagagcctgggacaaaaggaaaactcagtaatactaatcctgtctttattttaaattttaatattttgttcatcatggttttttttgcattaattctgatttttaaaaatattggattgaaatattacttactttgattactgtatttttttggcatcccttacattttgtgcccaaggccagggtctcccttgcctcatcctagtcccagtcatgagttctacttctgaagtccagtggtgggtacatgggtatttatttcattgttattaattatagcttactcatgttataaatattatttggttagtaaacagcacttaattaaaaaaacaatgtaaaagacatggattttaagattaattagaaactattgagcctgagaagcatgaaagagaaaagaatccttcgtgctgccaagtcgatctctaggggagaataactcccacggctgcagcgtatgcagtgcacacagaagagggctgctctgcccagtccatgtgggtggaagataactggggggagtaccagaggctgctgtccacttggacactggccttgagcaactcagctgctgcagccagagcgccaatgctgcatggcctgaggcaagccctggcaaatgggctgcccaggtaggcttggcccacgttaaaacagacccacgcagccctgctgaaggaatggaagcaatagaagactcctgaacgctataaatgtctcagggctatgtatcagggagaaaaggagatgtttgatacaaggaatattgttagtacatcttaacatgtaaaatctgaaattttgaaacatgaaatctattgttcattagtataatggtgacgaatgaaagattattttgattcagggaaggcaaacagattgcagcaaaaatctcaaaaaaggtgaggggaaaggttgaaaggggcaggcaggtccctgctcacatcaccaggggcagttctttgtcatatgatgcggacctcccagtcagtggcaatgttgagtgagagcttctccaggctcaggatggatgttttggcacaatacgtaaaagccacaggctgatctttaccatcagatgagtgggtagtcacagaagatggctccttcctgaagcctaagaccaagatcttctccaccacacacttgctgggataatgacccctctggtcagcaaaactattgatcagaacactggaacagaatgaaaacttcctgtgcaaaaattgcttctggtggaggtattggaatgaatggccatcatcaagatataactcacccactgaagaacccttagtgcttagagcaacccggagtccataggaggattcagtcatccagcctgtggattttcctacagttgtctttattggtatcacacttccacctcgctgaaacactggaatagtgtccaaggctactgggatctttacagtacaccctccttcccaatgagcaaatgtcttatagtcataccagacctcatttgatcctggaagaaacacatcaactgtggtggcttttggttctgtgactggatgaaccaataatgcactccccagcatgtattcatcttccatatcaaaagtctttagttcatcagggaactctacccacagaggcctcatgacaggttgggaagccacgtgtgcatggtagaacagagaataccaatatggcaggaggccatagcgctctctgatggcttctcggatgagtcgggtgtgttcctccccaaagagccagggctctcgtcgcttggtgttcatggtggcatggccacggaagaagggctggtaggctccagcctggtaccaacgcactagcagctctgtctctggattcccaatgaacccgcctatgtcagctccgcaaaaagagatcccagtaatgctgagagtgagtaacattgggatagaaattttcaagttgctccattctgctgtgttgtcgcctgtccacacggcaccatacttttgtgatccagcaaagaaagaacgtgtaagaacaaagggtctctccttccctttagatcgttttatcagtccttctgcagtagccatttgatgataaaaaccgtagatgttgtggagctctctgtgctcccaattgccatgatgaatggcattcttctgcatggtttgctctggccctctaaagacagaaggctcattcatgtcattccaaaggaagaggatgtccgtagatccctgataaacagggaaagcaaaaagacttgaataccactctctgaccttgggattggtgaaatccaggtaagaggagagacctggccaacacaccccttcaaagtcttccccttcctgattcttcacaaagaagccctgatctttggccttcacatatactgagtagtcaggntcaatcttgatgtggggatcactgatgaccacaagcttacgctttttgctcctgagcagctcttgcatcctcttggggtttgggaatctgtttttgtcccaggtgaagtacctcttgccctcagtgtgctctatgtccagccacatggcatcataaggaatgtcatgctcatcaaaccctgcatccactgcttttacatcctgctcatcttcatagttccagcggcactggtggtatcccaaagagaaaagagggggcatggcttgtgtgcctgtaaggtgtgagtactgtttgaagacatcagaaggtgtaggtcctgtcagcagaaaaacatcaatgatgccactctctgacatccagtgcacatgagtgcgagatctgaccttttgtttagcagcaactgggcccatctgggtcagtgtgtactctactgcaggctctgtattgatctccaccagtgtttccgaggcattcagccagaaaatacctatagttctgcccagtttgtgggccaggagataaggtactgaaccataaatgcccattttatcatatatttggtatccatagacatccaggttataaagacggtaagcatctccatcaccagtatttttaagttggtgtgattctgcatgttgtgggatcccataaagatgctcaaatccatgcaaggagaaatccaaaccaatagaagaagggccattagctttgatatccacaaattttccaaatttctcttcccacaggcccagatcttcttgattttcctgagaggtgtccactgatgtctcctcctcattttctttagcagctctttgtttgtgaagaatctgtagatgctcaaagtataattggcccagggaatttatgctaatcacaacctcttcttcagacaccaagtctaccttgaatgggtttgctgtgatatggcacttcaggtctccttttccatctgccaatatcagactgcctgtgtccccagagcatgaaatcagccttacagtgcttggcttgcttgtgaggacatccggaacttcaaatctgggttttagaggagtctcttcgttaattttaagcctgaaaatgtttccttctataccataaatttcagccaggagaggaaccttacttgcttcattgatgatttggaacctggtgctgtcttcatctgttgtgactgaatccaataatgcccgataggtggacttcttggaaagccactgtttctgacgcctgtaaaatgcgatcttgttacagtctctgaaaatgtttttatctacagcttcatcttcaacacttatttcctctttcactgctgcttccatggcttctctgtcactccgaccagctcccagctctcaggacaagggccctgggcgatcttttaaaaaagccgattgggtgtctttctaaaattacaaccagtacttcatcgtcaagtttctgggaagggagtcccctccagattctcatggagtgacaaatcttgactcttgctcctggaatttttcaggcccaaactagcgtttctacaatgatttatttggcaaatttgtcttgattatgggtggctgatgaggaacgtgcttttgttaggaaccgaaactgggcggcggtgagggcgtgtacgcaatgagtcctagagggtaaaaatcaagagcgttaagaacctggaaatgccgagacggcctccctgactgggacgaagcatctgcagatctatctcagtggcggggtcacgccacagattttgaaaactgaccctctctgtctccgttttcggttaagggtgggaagtgccggccgggtctttgctggaggctaggtctccagccagattgtactgcagcatcgtactcttcagggctagaaggggcctttgaaggttgttacactacccagtctaggaatcgcgtgtactccaccaccgccgaattccagcctttgcttaaataccacccaaaccggagaactcactactagacgccacttgggcagccaggcttagggcttttccagactttctggccccaaagtctgacattgacttagaagggatgaagggctggggcgagcggaagtagagagccaaatcctgcacggggtgcctgcctggtcctaaaacctttaacggctgggagacagaaaagactcaggccaggctggcatgtagcgatctctctaacccagctgaccaggttccaacaggatgacgcctgcgcagtaggtccaaagtctcacggcgcacagacgactgtctgagagaggggccgctacgccgcacagcaaacaagctccgcgacgtttccaggacccggataatcccgcccttagagcagagccggaagaaggcgggacgaaccggaagagggtgaaatgctttcggtaggcactccacggctgtgaagatggcggcggctgcgtggcttcaggtgttgcctgtcattcttctgcttctgggagctcacccgtcaccactgtcgtttttcagtgcgggaccggcaaccgtagctgctgccgaccggtccaaatggcacattccgataccgtcggtgagtattcacttcactaacgtctgaacctagaggagcaaggggtggggctacggcggcccaaggggtccatgaaggttccgcaaaagtctcttcaaaaggggtggggttgctgggatggtctgtgtggctagccaactgggacccacctccctggagtggaaagccgcgcacttctgtgattaggctagcgggaatgtaagggccacttcagcaacagaaaggagtggtggagcggcttctcatcagaaaaacagaactttcagtgcctgacttgagatgtaaacttgatgtacaaacggagagttgtttatctttcagatgtttcacagaatccagtgtccccgggttggataagaaagatatgggaaaaattattttagttttggaaagatcctcttcagaaataccactatcttcctgaagtttgatggagaaccttgtgacctgtctttgaatataacctggtatctgaaaagcgctgattgttacaatgaaatctataacttcaaggcagaagaagtagagttgtatttggaaaaacttaaggaaaaaagaggcttgtctgggaaatatcaaacatcatcaaaattgttccagaactgcagtgaactctttaaaacacagaccttttctggagattttatgcatcgactgcctcttttaggagaaaaacaggaggctaaggagaatggaacaaaccttacctttattggagacaaaaccgcaatgcatgaaccattgcaaacttggcaagatgcaccatacatttttattgtacatattggcatttcatcctcaaaggaatcatcaaaagaaaattcactgagtaatctttttaccatgactgttgaagtgaagggtccctatgaatacctcacacttgaagactatcccttgatgatttttttcatggtgatgtgtattgtatatgtcctgtttggtgttctgtggctggcatggtctgcctgctactggagagatctcctgagaattcagttttggattggtgctgtcatcttcctgggaatgcttgagaaagctgtcttctatgcggaatttcagaatatccgatacaaaggagaatctgtccagggtgctttgatccttgcagagctgctttcagcagtgaaacgctcactggctcgaaccctggtcatcatagtcagtctgggatatggcatcgtcaagccacgccttggagtcactcttcataaggttgtagtagcaggagccctctatcttttgttctctggcatggaaggggtcctcagagttactggggcccagactgatcttgcttccttggcctttatccccttggctttcctagacactgccttgtgctggtggatatttattagcctgactcaaacaatgaagctattaaaacttcggaggaacattgtaaaactctctttgtatcggcatttcaccaacacgcttattttggcagtggcagcatccattgtgtttatcatctggacaaccatgaagttcagaatagtgacatgtcagtcggactggcgggagctgtgggtagacgatgccatctggcgcttgctgttctccatgatcctctttgtcatcatggttctctggcgaccatctgcaaacaaccagaggtttgccttttcaccattgtctgaggaagaggaggaggatgaacaaaaggagcctatgctgaaagaaagctttgaaggaatgaaaatgagaagtaccaaacaagaacccaatggaaatagtaaagttaacaaagcacaggaagatgatttgaagtgggtagaagagaatgttccttcttctgtgacagatgtagcacttccagcccttctggattcagatgaggaacgaatgatcacacactttgaaaggtccaaaatggagtaaggaatgggaagatttgcagttaaagatggctaccatcagggaagagatcagcatctgtgtcagtcttctgtacggctccatgggattaaaggaagcaatgacatcctgatctgttccttgatctttgggcattggagttggcgagaggtgtcagaacaaagagaacatcttactgaaaacaagttcataagatgagaaaaatctacgagcttcttatttacaacactgctgccccctttcctcccagactctgacatggatgttcatgcaacttaagtgtgttgttcctgaactttctgtaatgtttcattttttaaatctgacaaactaaaaagtttaacgtcttctaaaagattgtcatcaacaccataatatgtaatctccaggagcaactgcctgtaatttttatttatttagggagttacataggtgatgggggaaattgttaactacctttcattttcctgggaagtcaaggttacatcttgcagaggttgttttgagaaaaaagggcccttctgagttaaggagccatagttctatcaatgatcaaaagaaaaaaaaaaaaaagagaaactgttacagtatgattcagatcatttaaaaaagcaaaatcaagtgcaattttgtttacaaatggtgtatattaaagatttttctatttcagatgtactttaaagagaaatattagcttaactcttttgacatctgctattgtgacacatcccattgctggcaatgtggtgcacactccgaaacttttaactactgttttgtaagcctccaagggtggcattgcagggtccttaggcaatgttttgtttgcctttatgcagagaggtgctccaagtgctgtgattgagcaccgtgctagaggaactgtaatgcttcagaagttgtagcttatacaaaggaaacaggtcctgctggcttaatttaaacagttattgcatgaagtagcgtggaggccctggactgctgctcgttctttaggatggactgttctggtatctggtattggtttagagactgttaataagggacatcacaaggtgatgggattcatttgaagcactctatttctgttttaatggttttatccaattttgccttcccaagatttttgttctacataaaaagttcatgccactttttaatataaaaaaatttaacaaaaaaaaaanaaaaaaaaaaaacacaaaaagagagacgagaaaaaaaaaaggggggggggggcggcaagagagtcccccggggggggccaggtagggggcccgagctttttgggaaaaggggggccacaaagagagaacaaataaaaacgcaacagggccaggataaaaaacgggaaggggaaacaggcacggggaactgggagaggccactaaacggggggggacaaaatgggaaaacacacaaaataaaaccccgggaaataaaataaaggaaggggcaaaccagaaaaagaggtaaaaatgaaaaaataaagaaata

SEQ ID NO: 737379 - DNA, 8099 bp, Homo sapiens
  misc_feature (2941)..(2941): n is a, c, g, or t
attcaatcgtaattttttaatcaattaaatccaccagctaactaatcacagctaacagttactgaaagtcaggtataatagtgctctgtcagacagaagagaaacagaacatgctcttgagggacatacaatctagtaggagaacgcagacatactgaaaacattaaggtatgatccctgagaatgctaagtagagcacagttataagtgggacagcattacggggaagggcaaaatcactgctaatgggtatgggggtaggggtgttcacgcagttaggcttcatgggaaagtgggatttaagttgggcctggaaggatggtaagggcaggaggatattggcgcccagggatcagaaggcacagaggtggccgttagcaagttgctaagtggaggaagcctgataagaagaggtgtgtgctgaggagtgctgaggagtcgaggctgctaaaacagatgctgtggcaggcagcagggagccactgaggtctgtggagccttgggcaccatgacacgactggtatgttgtaatgttctgccccatgccaagccatattagagcctgggacaaaaggaaaactcagtaatactaatcctgtctttattttaaattttaatattttgttcatcatggttttttttgcattaattctgatttttaaaaatattggattgaaatattacttactttgattactgtatttttttggcatcccttacattttgtgcccaaggccagggtctcccttgcctcatcctagtcccagtcatgagttctacttctgaagtccagtggtgggtacatgggtatttatttcattgttattaattatagcttactcatgttataaatattatttggttagtaaacagcacttaattaaaaaaacaatgtaaaagacatggattttaagattaattagaaactattgagcctgagaagcatgaaagagaaaagaatccttcgtgctgccaagtcgatctctaggggagaataactcccacggctgcagcgtatgcagtgcacacagaagagggctgctctgcccagtccatgtgggtggaagataactggggggagtaccagaggctgctgtccacttggacactggccttgagcaactcagctgctgcagccagagcgccaatgctgcatggcctgaggcaagccctggcaaatgggctgcccaggtaggcttggcccacgttaaaacagacccacgcagccctgctgaaggaatggaagcaatagaagactcctgaacgctataaatgtctcagggctatgtatcagggagaaaaggagatgtttgatacaaggaatattgttagtacatcttaacatgtaaaatctgaaattttgaaacatgaaatctattgttcattagtataatggtgacgaatgaaagattattttgattcagggaaggcaaacagattgcagcaaaaatctcaaaaaaggtgaggggaaaggttgaaaggggcaggcaggtccctgctcacatcaccaggggcagttctttgtcatatgatgcggacctcccagtcagtggcaatgttgagtgagagcttctccaggctcaggatggatgttttggcacaatacgtaaaagccacaggctgatctttaccatcagatgagtgggtagtcacagaagatggctccttcctgaagcctaagaccaagatcttctccaccacacacttgctgggataatgacccctctggtcagcaaaactattgatcagaacactggaacagaatgaaaacttcctgtgcaaaaattgcttctggtggaggtattggaatgaatggccatcatcaagatataactcacccactgaagaacccttagtgcttagagcaacccggagtccataggaggattcagtcatccagcctgtggattttcctacagttgtctttattggtatcacacttccacctcgctgaaacactggaatagtgtccaaggctactgggatctttacagtacaccctccttcccaatgagcaaatgtcttatagtcataccagacctcatttgatcctggaagaaacacatcaactgtggtggcttttggttctgtgactggatgaaccaataatgcactccccagcatgtattcatcttccatatcaaaagtctttagttcatcagggaactctacccacagaggcctcatgacaggttgggaagccacgtgtgcatggtagaacagagaataccaatatggcaggaggccatagcgctctctgatggcttctcggatgagtcgggtgtgttcctccccaaagagccagggctctcgtcgcttggtgttcatggtggcatggccacggaagaagggctggtaggctccagcctggtaccaacgcactagcagctctgtctctggattcccaatgaacccgcctatgtcagctccgcaaaaagagatcccagtaatgctgagagtgagtaacattgggatagaaattttcaagttgctccattctgctgtgttgtcgcctgtccacacggcaccatacttttgtgatccagcaaagaaagaacgtgtaagaacaaagggtctctccttccctttagatcgttttatcagtccttctgcagtagccatttgatgataaaaaccgtagatgttgtggagctctctgtgctcccaattgccatgatgaatggcattcttctgcatggtttgctctggccctctaaagacagaaggctcattcatgtcattccaaaggaagaggatgtccgtagatccctgataaacagggaaagcaaaaagacttgaataccactctctgaccttgggattggtgaaatccaggtaagaggagagacctggccaacacaccccttcaaagtcttccccttcctgattcttcacaaagaagccctgatctttggccttcacatatactgagtagtcaggntcaatcttgatgtggggatcactgatgaccacaagcttacgctttttgctcctgagcagctcttgcatcctcttggggtttgggaatctgtttttgtcccaggtgaagtacctcttgccctcagtgtgctctatgtccagccacatggcatcataaggaatgtcatgctcatcaaaccctgcatccactgcttttacatcctgctcatcttcatagttccagcggcactggtggtatcccaaagagaaaagagggggcatggcttgtgtgcctgtaaggtgtgagtactgtttgaagacatcagaaggtgtaggtcctgtcagcagaaaaacatcaatgatgccactctctgacatccagtgcacatgagtgcgagatctgaccttttgtttagcagcaactgggcccatctgggtcagtgtgtactctactgcaggctctgtattgatctccaccagtgtttccgaggcattcagccagaaaatacctatagttctgcccagtttgtgggccaggagataaggtactgaaccataaatgcccattttatcatatatttggtatccatagacatccaggttataaagacggtaagcatctccatcaccagtatttttaagttggtgtgattctgcatgttgtgggatcccataaagatgctcaaatccatgcaaggagaaatccaaaccaatagaagaagggccattagctttgatatccacaaattttccaaatttctcttcccacaggcccagatcttcttgattttcctgagaggtgtccactgatgtctcctcctcattttctttagcagctctttgtttgtgaagaatctgtagatgctcaaagtataattggcccagggaatttatgctaatcacaacctcttcttcagacaccaagtctaccttgaatgggtttgctgtgatatggcacttcaggtctccttttccatctgccaatatcagactgcctgtgtccccagagcatgaaatcagccttacagtgcttggcttgcttgtgaggacatccggaacttcaaatctgggttttagaggagtctcttcgttaattttaagcctgaaaatgtttccttctataccataaatttcagccaggagaggaaccttacttgcttcattgatgatttggaacctggtgctgtcttcatctgttgtgactgaatccaataatgcccgataggtggacttcttggaaagccactgtttctgacgcctgtaaaatgcgatcttgttacagtctctgaaaatgtttttatctacagcttcatcttcaacacttatttcctctttcactgctgcttccatggcttctctgtcactccgaccagctcccagctctcaggacaagggccctgggcgatcttttaaaaaagccgattgggtgtctttctaaaattacaaccagtacttcatcgtcaagtttctgggaagggagtcccctccagattctcatggagtgacaaatcttgactcttgctcctggaatttttcaggcccaaactagcgtttctacaatgatttatttggcaaatttgtcttgattatgggtggctgatgaggaacgtgcttttgttaggaaccgaaactgggcggcggtgagggcgtgtacgcaatgagtcctagagggtaaaaatcaagagcgttaagaacctggaaatgccgagacggcctccctgactgggacgaagcatctgcagatctatctcagtggcggggtcacgccacagattttgaaaactgaccctctctgtctccgttttcggttaagggtgggaagtgccggccgggtctttgctggaggctaggtctccagccagattgtactgcagcatcgtactcttcagggctagaaggggcctttgaaggttgttacactacccagtctaggaatcgcgtgtactccaccaccgccgaattccagcctttgcttaaataccacccaaaccggagaactcactactagacgccacttgggcagccaggcttagggcttttccagactttctggccccaaagtctgacattgacttagaagggatgaagggctggggcgagcggaagtagagagccaaatcctgcacggggtgcctgcctggtcctaaaacctttaacggctgggagacagaaaagactcaggccaggctggcatgtagcgatctctctaacccagctgaccaggttccaacaggatgacgcctgcgcagtaggtccaaagtctcacggcgcacagacgactgtctgagagaggggccgctacgccgcacagcaaacaagctccgcgacgtttccaggacccggataatcccgcccttagagcagagccggaagaaggcgggacgaaccggaagagggtgaaatgctttcggtaggcactccacggctgtgaagatggcggcggctgcgtggcttcaggtgttgcctgtcattcttctgcttctgggagctcacccgtcaccactgtcgtttttcagtgcgggaccggcaaccgtagctgctgccgaccggtccaaatggcacattccgataccgtcggtgagtattcacttcactaacgtctgaacctagaggagcaaggggtggggctacggcggcccaaggggtccatgaaggttccgcaaaagtctcttcaaaaggggtggggttgctgggatggtctgtgtggctagccaactgggacccacctccctggagtggaaagccgcgcacttctgtgattaggctagcgggaatgtaagggccacttcagcaacagaaaggagtggtggagcggcttctcatcagaaaaacagaactttcagtgcctgacttgagatgtaaacttgatgtacaaacggagagttgtttatctttcagatgtttcacagaatccagtgtccccgggttggataagaaagatatgggaaaaattattttagttttggaaagatcctcttcagaaataccactatcttcctgaagtttgatggagaaccttgtgacctgtctttgaatataacctggtatctgaaaagcgctgattgttacaatgaaatctataacttcaaggcagaagaagtagagttgtatttggaaaaacttaaggaaaaaagaggcttgtctgggaaatatcaaacatcatcaaaattgttccagaactgcagtgaactctttaaaacacagaccttttctggagattttatgcatcgactgcctcttttaggagaaaaacaggaggctaaggagaatggaacaaaccttacctttattggagacaaaaccgcaatgcatgaaccattgcaaacttggcaagatgcaccatacatttttattgtacatattggcatttcatcctcaaaggaatcatcaaaagaaaattcactgagtaatctttttaccatgactgttgaagtgaagggtccctatgaatacctcacacttgaagactatcccttgatgatttttttcatggtgatgtgtattgtatatgtcctgtttggtgttctgtggctggcatggtctgcctgctactggagagatctcctgagaattcagttttggattggtgctgtcatcttcctgggaatgcttgagaaagctgtcttctatgcggaatttcagaatatccgatacaaaggagaatctgtccagggtgctttgatccttgcagagctgctttcagcagtgaaacgctcactggctcgaaccctggtcatcatagtcagtctgggatatggcatcgtcaagccacgccttggagtcactcttcataaggttgtagtagcaggagccctctatcttttgttctctggcatggaaggggtcctcagagttactggggcccagactgatcttgcttccttggcctttatccccttggctttcctagacactgccttgtgctggtggatatttattagcctgactcaaacaatgaagctattaaaacttcggaggaacattgtaaaactctctttgtatcggcatttcaccaacacgcttattttggcagtggcagcatccattgtgtttatcatctggacaaccatgaagttcagaatagtgacatgtcagtcggactggcgggagctgtgggtagacgatgccatctggcgcttgctgttctccatgatcctctttgtcatcatggttctctggcgaccatctgcaaacaaccagaggtttgccttttcaccattgtctgaggaagaggaggaggatgaacaaaaggagcctatgctgaaagaaagctttgaaggaatgaaaatgagaagtaccaaacaagaacccaatggaaatagtaaagttaacaaagcacaggaagatgatttgaagtgggtagaagagaatgttccttcttctgtgacagatgtagcacttccagcccttctggattcagatgaggaacgaatgatcacacactttgaaaggtccaaaatggagtaaggaatgggaagatttgcagttaaagatggctaccatcagggaagagatcagcatctgtgtcagtcttctgtacggctccatgggattaaaggaagcaatgacatcctgatctgttccttgatctttgggcattggagttggcgagaggtgtcagaacaaagagaacatcttactgaaaacaagttcataagatgagaaaaatctacgagcttcttatttacaacactgctgccccctttcctcccagactctgacatggatgttcatgcaacttaagtgtgttgttcctgaactttctgtaatgtttcattttttaaatctgacaaactaaaaagtttaacgtcttctaaaagattgtcatcaacaccataatatgtaatctccaggagcaactgcctgtaatttttatttatttagggagttacataggtgatgggggaaattgttaactacctttcattttcctgggaagtcaaggttacatcttgcagaggttgttttgagaaaaaagggcccttctgagttaaggagccatagttctatcaatgatcaaaagaaaaaaaaaaaactcgaggtcgacggttccataagcttgtatttaaattcgcagctttcttacgggaagggaaaactttattcttaaaaagtggccccctaaaggttgttggcctttccccccccaaaaatttttttttacaaaaccaaaaaaaagg

SEQ ID NO: 737380 - DNA, 7946 bp, Homo sapiens
  misc_feature (2941)..(2941): n is a, c, g, or t
  misc_feature (7827)..(7827): n is a, c, g, or t
attcaatcgtaattttttaatcaattaaatccaccagctaactaatcacagctaacagttactgaaagtcaggtataatagtgctctgtcagacagaagagaaacagaacatgctcttgagggacatacaatctagtaggagaacgcagacatactgaaaacattaaggtatgatccctgagaatgctaagtagagcacagttataagtgggacagcattacggggaagggcaaaatcactgctaatgggtatgggggtaggggtgttcacgcagttaggcttcatgggaaagtgggatttaagttgggcctggaaggatggtaagggcaggaggatattggcgcccagggatcagaaggcacagaggtggccgttagcaagttgctaagtggaggaagcctgataagaagaggtgtgtgctgaggagtgctgaggagtcgaggctgctaaaacagatgctgtggcaggcagcagggagccactgaggtctgtggagccttgggcaccatgacacgactggtatgttgtaatgttctgccccatgccaagccatattagagcctgggacaaaaggaaaactcagtaatactaatcctgtctttattttaaattttaatattttgttcatcatggttttttttgcattaattctgatttttaaaaatattggattgaaatattacttactttgattactgtatttttttggcatcccttacattttgtgcccaaggccagggtctcccttgcctcatcctagtcccagtcatgagttctacttctgaagtccagtggtgggtacatgggtatttatttcattgttattaattatagcttactcatgttataaatattatttggttagtaaacagcacttaattaaaaaaacaatgtaaaagacatggattttaagattaattagaaactattgagcctgagaagcatgaaagagaaaagaatccttcgtgctgccaagtcgatctctaggggagaataactcccacggctgcagcgtatgcagtgcacacagaagagggctgctctgcccagtccatgtgggtggaagataactggggggagtaccagaggctgctgtccacttggacactggccttgagcaactcagctgctgcagccagagcgccaatgctgcatggcctgaggcaagccctggcaaatgggctgcccaggtaggcttggcccacgttaaaacagacccacgcagccctgctgaaggaatggaagcaatagaagactcctgaacgctataaatgtctcagggctatgtatcagggagaaaaggagatgtttgatacaaggaatattgttagtacatcttaacatgtaaaatctgaaattttgaaacatgaaatctattgttcattagtataatggtgacgaatgaaagattattttgattcagggaaggcaaacagattgcagcaaaaatctcaaaaaaggtgaggggaaaggttgaaaggggcaggcaggtccctgctcacatcaccaggggcagttctttgtcatatgatgcggacctcccagtcagtggcaatgttgagtgagagcttctccaggctcaggatggatgttttggcacaatacgtaaaagccacaggctgatctttaccatcagatgagtgggtagtcacagaagatggctccttcctgaagcctaagaccaagatcttctccaccacacacttgctgggataatgacccctctggtcagcaaaactattgatcagaacactggaacagaatgaaaacttcctgtgcaaaaattgcttctggtggaggtattggaatgaatggccatcatcaagatataactcacccactgaagaacccttagtgcttagagcaacccggagtccataggaggattcagtcatccagcctgtggattttcctacagttgtctttattggtatcacacttccacctcgctgaaacactggaatagtgtccaaggctactgggatctttacagtacaccctccttcccaatgagcaaatgtcttatagtcataccagacctcatttgatcctggaagaaacacatcaactgtggtggcttttggttctgtgactggatgaaccaataatgcactccccagcatgtattcatcttccatatcaaaagtctttagttcatcagggaactctacccacagaggcctcatgacaggttgggaagccacgtgtgcatggtagaacagagaataccaatatggcaggaggccatagcgctctctgatggcttctcggatgagtcgggtgtgttcctccccaaagagccagggctctcgtcgcttggtgttcatggtggcatggccacggaagaagggctggtaggctccagcctggtaccaacgcactagcagctctgtctctggattcccaatgaacccgcctatgtcagctccgcaaaaagagatcccagtaatgctgagagtgagtaacattgggatagaaattttcaagttgctccattctgctgtgttgtcgcctgtccacacggcaccatacttttgtgatccagcaaagaaagaacgtgtaagaacaaagggtctctccttccctttagatcgttttatcagtccttctgcagtagccatttgatgataaaaaccgtagatgttgtggagctctctgtgctcccaattgccatgatgaatggcattcttctgcatggtttgctctggccctctaaagacagaaggctcattcatgtcattccaaaggaagaggatgtccgtagatccctgataaacagggaaagcaaaaagacttgaataccactctctgaccttgggattggtgaaatccaggtaagaggagagacctggccaacacaccccttcaaagtcttccccttcctgattcttcacaaagaagccctgatctttggccttcacatatactgagtagtcaggntcaatcttgatgtggggatcactgatgaccacaagcttacgctttttgctcctgagcagctcttgcatcctcttggggtttgggaatctgtttttgtcccaggtgaagtacctcttgccctcagtgtgctctatgtccagccacatggcatcataaggaatgtcatgctcatcaaaccctgcatccactgcttttacatcctgctcatcttcatagttccagcggcactggtggtatcccaaagagaaaagagggggcatggcttgtgtgcctgtaaggtgtgagtactgtttgaagacatcagaaggtgtaggtcctgtcagcagaaaaacatcaatgatgccactctctgacatccagtgcacatgagtgcgagatctgaccttttgtttagcagcaactgggcccatctgggtcagtgtgtactctactgcaggctctgtattgatctccaccagtgtttccgaggcattcagccagaaaatacctatagttctgcccagtttgtgggccaggagataaggtactgaaccataaatgcccattttatcatatatttggtatccatagacatccaggttataaagacggtaagcatctccatcaccagtatttttaagttggtgtgattctgcatgttgtgggatcccataaagatgctcaaatccatgcaaggagaaatccaaaccaatagaagaagggccattagctttgatatccacaaattttccaaatttctcttcccacaggcccagatcttcttgattttcctgagaggtgtccactgatgtctcctcctcattttctttagcagctctttgtttgtgaagaatctgtagatgctcaaagtataattggcccagggaatttatgctaatcacaacctcttcttcagacaccaagtctaccttgaatgggtttgctgtgatatggcacttcaggtctccttttccatctgccaatatcagactgcctgtgtccccagagcatgaaatcagccttacagtgcttggcttgcttgtgaggacatccggaacttcaaatctgggttttagaggagtctcttcgttaattttaagcctgaaaatgtttccttctataccataaatttcagccaggagaggaaccttacttgcttcattgatgatttggaacctggtgctgtcttcatctgttgtgactgaatccaataatgcccgataggtggacttcttggaaagccactgtttctgacgcctgtaaaatgcgatcttgttacagtctctgaaaatgtttttatctacagcttcatcttcaacacttatttcctctttcactgctgcttccatggcttctctgtcactccgaccagctcccagctctcaggacaagggccctgggcgatcttttaaaaaagccgattgggtgtctttctaaaattacaaccagtacttcatcgtcaagtttctgggaagggagtcccctccagattctcatggagtgacaaatcttgactcttgctcctggaatttttcaggcccaaactagcgtttctacaatgatttatttggcaaatttgtcttgattatgggtggctgatgaggaacgtgcttttgttaggaaccgaaactgggcggcggtgagggcgtgtacgcaatgagtcctagagggtaaaaatcaagagcgttaagaacctggaaatgccgagacggcctccctgactgggacgaagcatctgcagatctatctcagtggcggggtcacgccacagattttgaaaactgaccctctctgtctccgttttcggttaagggtgggaagtgccggccgggtctttgctggaggctaggtctccagccagattgtactgcagcatcgtactcttcagggctagaaggggcctttgaaggttgttacactacccagtctaggaatcgcgtgtactccaccaccgccgaattccagcctttgcttaaataccacccaaaccggagaactcactactagacgccacttgggcagccaggcttagggcttttccagactttctggccccaaagtctgacattgacttagaagggatgaagggctggggcgagcggaagtagagagccaaatcctgcacggggtgcctgcctggtcctaaaacctttaacggctgggagacagaaaagactcaggccaggctggcatgtagcgatctctctaacccagctgaccaggttccaacaggatgacgcctgcgcagtaggtccaaagtctcacggcgcacagacgactgtctgagagaggggccgctacgccgcacagcaaacaagctccgcgacgtttccaggacccggataatcccgcccttagagcagagccggaagaaggcgggacgaaccggaagagggtgaaatgctttcggtaggcactccacggctgtgaagatggcggcggctgcgtggcttcaggtgttgcctgtcattcttctgcttctgggagctcacccgtcaccactgtcgtttttcagtgcgggaccggcaaccgtagctgctgccgaccggtccaaatggcacattccgataccgtcggtgagtattcacttcactaacgtctgaacctagaggagcaaggggtggggctacggcggcccaaggggtccatgaaggttccgcaaaagtctcttcaaaaggggtggggttgctgggatggtctgtgtggctagccaactgggacccacctccctggagtggaaagccgcgcacttctgtgattaggctagcgggaatgtaagggccacttcagcaacagaaaggagtggtggagcggcttctcatcagaaaaacagaactttcagtgcctgacttgagatgtaaacttgatgtacaaacggagagttgtttatctttcagatgtttcacagaatccagtgtccccgggttggataagaaagatatgggaaaaattattttagttttggaaagatcctcttcagaaataccactatcttcctgaagtttgatggagaaccttgtgacctgtctttgaatataacctggtatctgaaaagcgctgattgttacaatgaaatctataacttcaaggcagaagaagtagagttgtatttggaaaaacttaaggaaaaaagaggcttgtctgggaaatatcaaacatcatcaaaattgttccagaactgcagtgaactctttaaaacacagaccttttctggagattttatgcatcgactgcctcttttaggagaaaaacaggaggctaaggagaatggaacaaaccttacctttattggagacaaaaccgcaatgcatgaaccattgcaaacttggcaagatgcaccatacatttttattgtacatattggcatttcatcctcaaaggaatcatcaaaagaaaattcactgagtaatctttttaccatgactgttgaagtgaagggtccctatgaatacctcacacttgaagactatcccttgatgatttttttcatggtgatgtgtattgtatatgtcctgtttggtgttctgtggctggcatggtctgcctgctactggagagatctcctgagaattcagttttggattggtgctgtcatcttcctgggaatgcttgagaaagctgtcttctatgcggaatttcagaatatccgatacaaaggagaatctgtccagggtgctttgatccttgcagagctgctttcagcagtgaaacgctcactggctcgaaccctggtcatcatagtcagtctgggatatggcatcgtcaagccacgccttggagtcactcttcataaggttgtagtagcaggagccctctatcttttgttctctggcatggaaggggtcctcagagttactggggcccagactgatcttgcttccttggcctttatccccttggctttcctagacactgccttgtgctggtggatatttattagcctgactcaaacaatgaagctattaaaacttcggaggaacattgtaaaactctctttgtatcggcatttcaccaacacgcttattttggcagtggcagcatccattgtgtttatcatctggacaaccatgaagttcagaatagtgacatgtcagtcggactggcgggagctgtgggtagacgatgccatctggcgcttgctgttctccatgatcctctttgtcatcatggttctctggcgaccatctgcaaacaaccagaggtttgccttttcaccattgtctgaggaagaggaggaggatgaacaaaaggagcctatgctgaaagaaagctttgaaggaatgaaaatgagaagtaccaaacaagaacccaatggaaatagtaaagttaacaaagcacaggaagatgatttgaagtgggtagaagagaatgttccttcttctgtgacagatgtagcacttccagcccttctggattcagatgaggaacgaatgatcacacactttgaaaggtccaaaatggagtaaggaatgggaagatttgcagttaaagatggctaccatcagggaagagatcagcatctgtgtcagtcttctgtacggctccatgggattaaaggaagcaatgacatcctgatctgttccttgatctttgggcattggagttggcgagaggtgtcagaacaaagagaacatcttactgaaaacaagttcataagatgagaaaaatctacgagcttcttatttacaacactgctgccccctttcctcccagactctgacatggatgttcatgcaacttaagtgtgttgttcttagggagttacataggtgatgggggaaattgttaactacctttcattttcctgggaagtcaaggttacatcttgcagaggttgttttgagaaaaaagggcccttctgagttaaggagccatagttctatcaatgatcaaaagaaaaaaaaaanaaaaaaaaaaaaaaaaattctcttttcctcaaattaaaaaagaggaagagtttttacagagattataaactatttcagggcttagttacctctaattaaacctttctgcgttacaagaa

SEQ ID NO: 737381 - DNA, 8204 bp, Homo sapiens
  misc_feature (2941)..(2941): n is a, c, g, or t
attcaatcgtaattttttaatcaattaaatccaccagctaactaatcacagctaacagttactgaaagtcaggtataatagtgctctgtcagacagaagagaaacagaacatgctcttgagggacatacaatctagtaggagaacgcagacatactgaaaacattaaggtatgatccctgagaatgctaagtagagcacagttataagtgggacagcattacggggaagggcaaaatcactgctaatgggtatgggggtaggggtgttcacgcagttaggcttcatgggaaagtgggatttaagttgggcctggaaggatggtaagggcaggaggatattggcgcccagggatcagaaggcacagaggtggccgttagcaagttgctaagtggaggaagcctgataagaagaggtgtgtgctgaggagtgctgaggagtcgaggctgctaaaacagatgctgtggcaggcagcagggagccactgaggtctgtggagccttgggcaccatgacacgactggtatgttgtaatgttctgccccatgccaagccatattagagcctgggacaaaaggaaaactcagtaatactaatcctgtctttattttaaattttaatattttgttcatcatggttttttttgcattaattctgatttttaaaaatattggattgaaatattacttactttgattactgtatttttttggcatcccttacattttgtgcccaaggccagggtctcccttgcctcatcctagtcccagtcatgagttctacttctgaagtccagtggtgggtacatgggtatttatttcattgttattaattatagcttactcatgttataaatattatttggttagtaaacagcacttaattaaaaaaacaatgtaaaagacatggattttaagattaattagaaactattgagcctgagaagcatgaaagagaaaagaatccttcgtgctgccaagtcgatctctaggggagaataactcccacggctgcagcgtatgcagtgcacacagaagagggctgctctgcccagtccatgtgggtggaagataactggggggagtaccagaggctgctgtccacttggacactggccttgagcaactcagctgctgcagccagagcgccaatgctgcatggcctgaggcaagccctggcaaatgggctgcccaggtaggcttggcccacgttaaaacagacccacgcagccctgctgaaggaatggaagcaatagaagactcctgaacgctataaatgtctcagggctatgtatcagggagaaaaggagatgtttgatacaaggaatattgttagtacatcttaacatgtaaaatctgaaattttgaaacatgaaatctattgttcattagtataatggtgacgaatgaaagattattttgattcagggaaggcaaacagattgcagcaaaaatctcaaaaaaggtgaggggaaaggttgaaaggggcaggcaggtccctgctcacatcaccaggggcagttctttgtcatatgatgcggacctcccagtcagtggcaatgttgagtgagagcttctccaggctcaggatggatgttttggcacaatacgtaaaagccacaggctgatctttaccatcagatgagtgggtagtcacagaagatggctccttcctgaagcctaagaccaagatcttctccaccacacacttgctgggataatgacccctctggtcagcaaaactattgatcagaacactggaacagaatgaaaacttcctgtgcaaaaattgcttctggtggaggtattggaatgaatggccatcatcaagatataactcacccactgaagaacccttagtgcttagagcaacccggagtccataggaggattcagtcatccagcctgtggattttcctacagttgtctttattggtatcacacttccacctcgctgaaacactggaatagtgtccaaggctactgggatctttacagtacaccctccttcccaatgagcaaatgtcttatagtcataccagacctcatttgatcctggaagaaacacatcaactgtggtggcttttggttctgtgactggatgaaccaataatgcactccccagcatgtattcatcttccatatcaaaagtctttagttcatcagggaactctacccacagaggcctcatgacaggttgggaagccacgtgtgcatggtagaacagagaataccaatatggcaggaggccatagcgctctctgatggcttctcggatgagtcgggtgtgttcctccccaaagagccagggctctcgtcgcttggtgttcatggtggcatggccacggaagaagggctggtaggctccagcctggtaccaacgcactagcagctctgtctctggattcccaatgaacccgcctatgtcagctccgcaaaaagagatcccagtaatgctgagagtgagtaacattgggatagaaattttcaagttgctccattctgctgtgttgtcgcctgtccacacggcaccatacttttgtgatccagcaaagaaagaacgtgtaagaacaaagggtctctccttccctttagatcgttttatcagtccttctgcagtagccatttgatgataaaaaccgtagatgttgtggagctctctgtgctcccaattgccatgatgaatggcattcttctgcatggtttgctctggccctctaaagacagaaggctcattcatgtcattccaaaggaagaggatgtccgtagatccctgataaacagggaaagcaaaaagacttgaataccactctctgaccttgggattggtgaaatccaggtaagaggagagacctggccaacacaccccttcaaagtcttccccttcctgattcttcacaaagaagccctgatctttggccttcacatatactgagtagtcaggntcaatcttgatgtggggatcactgatgaccacaagcttacgctttttgctcctgagcagctcttgcatcctcttggggtttgggaatctgtttttgtcccaggtgaagtacctcttgccctcagtgtgctctatgtccagccacatggcatcataaggaatgtcatgctcatcaaaccctgcatccactgcttttacatcctgctcatcttcatagttccagcggcactggtggtatcccaaagagaaaagagggggcatggcttgtgtgcctgtaaggtgtgagtactgtttgaagacatcagaaggtgtaggtcctgtcagcagaaaaacatcaatgatgccactctctgacatccagtgcacatgagtgcgagatctgaccttttgtttagcagcaactgggcccatctgggtcagtgtgtactctactgcaggctctgtattgatctccaccagtgtttccgaggcattcagccagaaaatacctatagttctgcccagtttgtgggccaggagataaggtactgaaccataaatgcccattttatcatatatttggtatccatagacatccaggttataaagacggtaagcatctccatcaccagtatttttaagttggtgtgattctgcatgttgtgggatcccataaagatgctcaaatccatgcaaggagaaatccaaaccaatagaagaagggccattagctttgatatccacaaattttccaaatttctcttcccacaggcccagatcttcttgattttcctgagaggtgtccactgatgtctcctcctcattttctttagcagctctttgtttgtgaagaatctgtagatgctcaaagtataattggcccagggaatttatgctaatcacaacctcttcttcagacaccaagtctaccttgaatgggtttgctgtgatatggcacttcaggtctccttttccatctgccaatatcagactgcctgtgtccccagagcatgaaatcagccttacagtgcttggcttgcttgtgaggacatccggaacttcaaatctgggttttagaggagtctcttcgttaattttaagcctgaaaatgtttccttctataccataaatttcagccaggagaggaaccttacttgcttcattgatgatttggaacctggtgctgtcttcatctgttgtgactgaatccaataatgcccgataggtggacttcttggaaagccactgtttctgacgcctgtaaaatgcgatcttgttacagtctctgaaaatgtttttatctacagcttcatcttcaacacttatttcctctttcactgctgcttccatggcttctctgtcactccgaccagctcccagctctcaggacaagggccctgggcgatcttttaaaaaagccgattgggtgtctttctaaaattacaaccagtacttcatcgtcaagtttctgggaagggagtcccctccagattctcatggagtgacaaatcttgactcttgctcctggaatttttcaggcccaaactagcgtttctacaatgatttatttggcaaatttgtcttgattatgggtggctgatgaggaacgtgcttttgttaggaaccgaaactgggcggcggtgagggcgtgtacgcaatgagtcctagagggtaaaaatcaagagcgttaagaacctggaaatgccgagacggcctccctgactgggacgaagcatctgcagatctatctcagtggcggggtcacgccacagattttgaaaactgaccctctctgtctccgttttcggttaagggtgggaagtgccggccgggtctttgctggaggctaggtctccagccagattgtactgcagcatcgtactcttcagggctagaaggggcctttgaaggttgttacactacccagtctaggaatcgcgtgtactccaccaccgccgaattccagcctttgcttaaataccacccaaaccggagaactcactactagacgccacttgggcagccaggcttagggcttttccagactttctggccccaaagtctgacattgacttagaagggatgaagggctggggcgagcggaagtagagagccaaatcctgcacggggtgcctgcctggtcctaaaacctttaacggctgggagacagaaaagactcaggccaggctggcatgtagcgatctctctaacccagctgaccaggttccaacaggatgacgcctgcgcagtaggtccaaagtctcacggcgcacagacgactgtctgagagaggggccgctacgccgcacagcaaacaagctccgcgacgtttccaggacccggataatcccgcccttagagcagagccggaagaaggcgggacgaaccggaagagggtgaaatgctttcggtaggcactccacggctgtgaagatggcggcggctgcgtggcttcaggtgttgcctgtcattcttctgcttctgggagctcacccgtcaccactgtcgtttttcagtgcgggaccggcaaccgtagctgctgccgaccggtccaaatggcacattccgataccgtcggtgagtattcacttcactaacgtctgaacctagaggagcaaggggtggggctacggcggcccaaggggtccatgaaggttccgcaaaagtctcttcaaaaggggtggggttgctgggatggtctgtgtggctagccaactgggacccacctccctggagtggaaagccgcgcacttctgtgattaggctagcgggaatgtaagggccacttcagcaacagaaaggagtggtggagcggcttctcatcagaaaaacagaactttcagtgcctgacttgagatgtaaacttgatgtacaaacggagagttgtttatctttcagatgtttcacagaatccagtgtccccgggttggataagaaagatatgggaaaaattattttagttttggaaagatcctcttcagaaataccactatcttcctgaagtttgatggagaaccttgtgacctgtctttgaatataacctggtatctgaaaagcgctgattgttacaatgaaatctataacttcaaggcagaagaagtagagttgtatttggaaaaacttaaggaaaaaagaggcttgtctgggaaatatcaaacatcatcaaaattgttccagaactgcagtgaactctttaaaacacagaccttttctggagattttatgcatcgactgcctcttttaggagaaaaacaggaggctaaggagaatggaacaaaccttacctttattggagacaaaaccgcaatgcatgaaccattgcaaacttggcaagatgcaccatacatttttattgtacatattggcatttcatcctcaaaggaatcatcaaaagaaaattcactgagtaatctttttaccatgactgttgaagtgaagggtccctatgaatacctcacacttgaagactatcccttgatgatttttttcatggtgatgtgtattgtatatgtcctgtttggtgttctgtggctggcatggtctgcctgctactggagagatctcctgagaattcagttttggattggtgctgtcatcttcctgggaatgcttgagaaagctgtcttctatgcggaatttcagaatatccgatacaaaggagaatctgtccagggtgctttgatccttgcagagctgctttcagcagtgaaacgctcactggctcgaaccctggtcatcatagtcagtctgggatatggcatcgtcaagccacgccttggagtcactcttcataaggttgtagtagcaggagccctctatcttttgttctctggcatggaaggggtcctcagagttactggggcccagactgatcttgcttccttggcctttatccccttggctttcctagacactgccttgtgctggtggatatttattagcctgactcaaacaatgaagctattaaaacttcggaggaacattgtaaaactctctttgtatcggcatttcaccaacacgcttattttggcagtggcagcatccattgtgtttatcatctggacaaccatgaagttcagaatagtgacatgtcagtcggactggcgggagctgtgggtagacgatgccatctggcgcttgctgttctccatgatcctctttgtcatcatggttctctggcgaccatctgcaaacaaccagaggtttgccttttcaccattgtctgaggaagaggaggaggatgaacaaaaggagcctatgctgaaagaaagctttgaaggaatgaaaatgagaagtaccaaacaagaacccaatggaaatagtaaagttaacaaagcacaggaagatgatttgaagtgggtagaagagaatgttccttcttctgtgacagatgtagcacttccagcccttctggattcagatgaggaacgaatgatcacacactttgaaaggtccaaaatggagtaaggaatgggaagatttgcagttaaagatggctaccatcagggaagagatcagcatctgtgtcagtcttctgtacggctccatgggattaaaggaagcaatgacatcctgatctgttccttgatctttgggcattggagttggcgagaggtgtcagaacaaagagaacatcttactgaaaacaagttcataagatgagaaaaatctacgagcttcttatttacaacatgctgctcgttctttaggatggactgttctggtatctggtattggtttagagactgttaataagggacatcacaaggtgatgggattcatttgaagcactctatttctgttttaatggttttatccaattttgccttcccaagatttttgttctacataaaaagttcatgccactttttaatataaaaaaatttaacaaaattaatgtatttttctcatttttttcaaactttttctaaagactctttctgtcaaactcatgaaaaatttctttctatggcttttattctagattgtcttattttctgttaaaaccaatgaccacatgaccacaatcttcactaactcatactgcagtgaaagtgttaacccttaggtagtttctctacaactctttgctatggtgattttaaaaaaagtttcctaggaagtatctctgaggaacagcaatctgaagaactgactatattctcatgctaagtcattagccaaaagctggtggtattgttgcatgctgctattgcatattaaaacgtagcagatgaataatagttgtaatgcagcaggatagttggtcaaattatttttttagg

SEQ ID NO: 737382 - DNA, 7610 bp, Homo sapiens
  misc_feature (2941)..(2941): n is a, c, g, or t
  misc_feature (7486)..(7486): n is a, c, g, or t
  misc_feature (7507)..(7507): n is a, c, g, or t
  misc_feature (7515)..(7515): n is a, c, g, or t
  misc_feature (7522)..(7522): n is a, c, g, or t
attcaatcgtaattttttaatcaattaaatccaccagctaactaatcacagctaacagttactgaaagtcaggtataatagtgctctgtcagacagaagagaaacagaacatgctcttgagggacatacaatctagtaggagaacgcagacatactgaaaacattaaggtatgatccctgagaatgctaagtagagcacagttataagtgggacagcattacggggaagggcaaaatcactgctaatgggtatgggggtaggggtgttcacgcagttaggcttcatgggaaagtgggatttaagttgggcctggaaggatggtaagggcaggaggatattggcgcccagggatcagaaggcacagaggtggccgttagcaagttgctaagtggaggaagcctgataagaagaggtgtgtgctgaggagtgctgaggagtcgaggctgctaaaacagatgctgtggcaggcagcagggagccactgaggtctgtggagccttgggcaccatgacacgactggtatgttgtaatgttctgccccatgccaagccatattagagcctgggacaaaaggaaaactcagtaatactaatcctgtctttattttaaattttaatattttgttcatcatggttttttttgcattaattctgatttttaaaaatattggattgaaatattacttactttgattactgtatttttttggcatcccttacattttgtgcccaaggccagggtctcccttgcctcatcctagtcccagtcatgagttctacttctgaagtccagtggtgggtacatgggtatttatttcattgttattaattatagcttactcatgttataaatattatttggttagtaaacagcacttaattaaaaaaacaatgtaaaagacatggattttaagattaattagaaactattgagcctgagaagcatgaaagagaaaagaatccttcgtgctgccaagtcgatctctaggggagaataactcccacggctgcagcgtatgcagtgcacacagaagagggctgctctgcccagtccatgtgggtggaagataactggggggagtaccagaggctgctgtccacttggacactggccttgagcaactcagctgctgcagccagagcgccaatgctgcatggcctgaggcaagccctggcaaatgggctgcccaggtaggcttggcccacgttaaaacagacccacgcagccctgctgaaggaatggaagcaatagaagactcctgaacgctataaatgtctcagggctatgtatcagggagaaaaggagatgtttgatacaaggaatattgttagtacatcttaacatgtaaaatctgaaattttgaaacatgaaatctattgttcattagtataatggtgacgaatgaaagattattttgattcagggaaggcaaacagattgcagcaaaaatctcaaaaaaggtgaggggaaaggttgaaaggggcaggcaggtccctgctcacatcaccaggggcagttctttgtcatatgatgcggacctcccagtcagtggcaatgttgagtgagagcttctccaggctcaggatggatgttttggcacaatacgtaaaagccacaggctgatctttaccatcagatgagtgggtagtcacagaagatggctccttcctgaagcctaagaccaagatcttctccaccacacacttgctgggataatgacccctctggtcagcaaaactattgatcagaacactggaacagaatgaaaacttcctgtgcaaaaattgcttctggtggaggtattggaatgaatggccatcatcaagatataactcacccactgaagaacccttagtgcttagagcaacccggagtccataggaggattcagtcatccagcctgtggattttcctacagttgtctttattggtatcacacttccacctcgctgaaacactggaatagtgtccaaggctactgggatctttacagtacaccctccttcccaatgagcaaatgtcttatagtcataccagacctcatttgatcctggaagaaacacatcaactgtggtggcttttggttctgtgactggatgaaccaataatgcactccccagcatgtattcatcttccatatcaaaagtctttagttcatcagggaactctacccacagaggcctcatgacaggttgggaagccacgtgtgcatggtagaacagagaataccaatatggcaggaggccatagcgctctctgatggcttctcggatgagtcgggtgtgttcctccccaaagagccagggctctcgtcgcttggtgttcatggtggcatggccacggaagaagggctggtaggctccagcctggtaccaacgcactagcagctctgtctctggattcccaatgaacccgcctatgtcagctccgcaaaaagagatcccagtaatgctgagagtgagtaacattgggatagaaattttcaagttgctccattctgctgtgttgtcgcctgtccacacggcaccatacttttgtgatccagcaaagaaagaacgtgtaagaacaaagggtctctccttccctttagatcgttttatcagtccttctgcagtagccatttgatgataaaaaccgtagatgttgtggagctctctgtgctcccaattgccatgatgaatggcattcttctgcatggtttgctctggccctctaaagacagaaggctcattcatgtcattccaaaggaagaggatgtccgtagatccctgataaacagggaaagcaaaaagacttgaataccactctctgaccttgggattggtgaaatccaggtaagaggagagacctggccaacacaccccttcaaagtcttccccttcctgattcttcacaaagaagccctgatctttggccttcacatatactgagtagtcaggntcaatcttgatgtggggatcactgatgaccacaagcttacgctttttgctcctgagcagctcttgcatcctcttggggtttgggaatctgtttttgtcccaggtgaagtacctcttgccctcagtgtgctctatgtccagccacatggcatcataaggaatgtcatgctcatcaaaccctgcatccactgcttttacatcctgctcatcttcatagttccagcggcactggtggtatcccaaagagaaaagagggggcatggcttgtgtgcctgtaaggtgtgagtactgtttgaagacatcagaaggtgtaggtcctgtcagcagaaaaacatcaatgatgccactctctgacatccagtgcacatgagtgcgagatctgaccttttgtttagcagcaactgggcccatctgggtcagtgtgtactctactgcaggctctgtattgatctccaccagtgtttccgaggcattcagccagaaaatacctatagttctgcccagtttgtgggccaggagataaggtactgaaccataaatgcccattttatcatatatttggtatccatagacatccaggttataaagacggtaagcatctccatcaccagtatttttaagttggtgtgattctgcatgttgtgggatcccataaagatgctcaaatccatgcaaggagaaatccaaaccaatagaagaagggccattagctttgatatccacaaattttccaaatttctcttcccacaggcccagatcttcttgattttcctgagaggtgtccactgatgtctcctcctcattttctttagcagctctttgtttgtgaagaatctgtagatgctcaaagtataattggcccagggaatttatgctaatcacaacctcttcttcagacaccaagtctaccttgaatgggtttgctgtgatatggcacttcaggtctccttttccatctgccaatatcagactgcctgtgtccccagagcatgaaatcagccttacagtgcttggcttgcttgtgaggacatccggaacttcaaatctgggttttagaggagtctcttcgttaattttaagcctgaaaatgtttccttctataccataaatttcagccaggagaggaaccttacttgcttcattgatgatttggaacctggtgctgtcttcatctgttgtgactgaatccaataatgcccgataggtggacttcttggaaagccactgtttctgacgcctgtaaaatgcgatcttgttacagtctctgaaaatgtttttatctacagcttcatcttcaacacttatttcctctttcactgctgcttccatggcttctctgtcactccgaccagctcccagctctcaggacaagggccctgggcgatcttttaaaaaagccgattgggtgtctttctaaaattacaaccagtacttcatcgtcaagtttctgggaagggagtcccctccagattctcatggagtgacaaatcttgactcttgctcctggaatttttcaggcccaaactagcgtttctacaatgatttatttggcaaatttgtcttgattatgggtggctgatgaggaacgtgcttttgttaggaaccgaaactgggcggcggtgagggcgtgtacgcaatgagtcctagagggtaaaaatcaagagcgttaagaacctggaaatgccgagacggcctccctgactgggacgaagcatctgcagatctatctcagtggcggggtcacgccacagattttgaaaactgaccctctctgtctccgttttcggttaagggtgggaagtgccggccgggtctttgctggaggctaggtctccagccagattgtactgcagcatcgtactcttcagggctagaaggggcctttgaaggttgttacactacccagtctaggaatcgcgtgtactccaccaccgccgaattccagcctttgcttaaataccacccaaaccggagaactcactactagacgccacttgggcagccaggcttagggcttttccagactttctggccccaaagtctgacattgacttagaagggatgaagggctggggcgagcggaagtagagagccaaatcctgcacggggtgcctgcctggtcctaaaacctttaacggctgggagacagaaaagactcaggccaggctggcatgtagcgatctctctaacccagctgaccaggttccaacaggatgacgcctgcgcagtaggtccaaagtctcacggcgcacagacgactgtctgagagaggggccgctacgccgcacagcaaacaagctccgcgacgtttccaggacccggataatcccgcccttagagcagagccggaagaaggcgggacgaaccggaagagggtgaaatgctttcggtaggcactccacggctgtgaagatggcggcggctgcgtggcttcaggtgttgcctgtcattcttctgcttctgggagctcacccgtcaccactgtcgtttttcagtgcgggaccggcaaccgtagctgctgccgaccggtccaaatggcacattccgataccgtcggtgagtattcacttcactaacgtctgaacctagaggagcaaggggtggggctacggcggcccaaggggtccatgaaggttccgcaaaagtctcttcaaaaggggtggggttgctgggatggtctgtgtggctagccaactgggacccacctccctggagtggaaagccgcgcacttctgtgattaggctagcgggaatgtaagggccacttcagcaacagaaaggagtggtggagcggcttctcatcagaaaaacagaactttcagtgcctgacttgagatgtaaacttgatgtacaaacggagagttgtttatctttcagatgtttcacagaatccagtgtccccgggttggataagaaagatatgggaaaaattattttagttttggaaagatcctcttcagaaataccactatcttcctgaagtttgatggagaaccttgtgacctgtctttgaatataacctggtatctgaaaagcgctgattgttacaatgaaatctataacttcaaggcagaagaagtagagttgtatttggaaaaacttaaggaaaaaagaggcttgtctgggaaatatcaaacatcatcaaaattgttccagaactgcagtgaactctttaaaacacagaccttttctggagattttatgcatcgactgcctcttttaggagaaaaacaggaggctaaggagaatggaacaaaccttacctttattggagacaaaaccgcaatgcatgaaccattgcaaacttggcaagatgcaccatacatttttattgtacatattggcatttcatcctcaaaggaatcatcaaaagaaaattcactgagtaatctttttaccatgactgttgaagtgaagggtccctatgaatacctcacacttgaagactatcccttgatgatttttttcatggtgatgtgtattgtatatgtcctgtttggtgttctgtggctggcatggtctgcctgctactggagagatctcctgagaattcagttttggattggtgctgtcatcttcctgggaatgcttgagaaagctgtcttctatgcggaatttcagaatatccgatacaaaggagaatctgtccagggtgctttgatccttgcagagctgctttcagcagtgaaacgctcactggctcgaaccctggtcatcatagtcagtctgggatatggcatcgtcaagccacgccttggagtcactcttcataaggttgtagtagcaggagccctctatcttttgttctctggcatggaaggggtcctcagagttactggggcccagactgatcttgcttccttggcctttatccccttggctttcctagacactgccttgtgctggtggatatttattagcctgactcaaacaatgaagctattaaaacttcggaggaacattgtaaaactctctttgtatcggcatttcaccaacacgcttattttggcagtggcagcatccattgtgtttatcatctggacaaccatgaagttcagaatagtgacatgtcagtcggactggcgggagctgtgggtagacgatgccatctggcgcttgctgttctccatgatcctctttgtcatcatggttctctggcgaccatctgcaaacaaccagaggtttgccttttcaccattgtctgaggaagaggaggaggatgaacaaaaggagcctatgctgaaagaaagctttgaaggaatgaaaatgagaagtaccaaacaagaacccaatggaaatagtaaagttaacaaagcacaggaagatgatttgaagtgggtagaagagaatgttccttcttctgtgacagatgtagcacttccagcccttctggattcagatgaggaacgaatgatcacacactttgaaaggtccaaaatggagtaaggaatgggaagatttgcagttaaagatggctaccatcagggaagagatcagcatctgtgtcaggatggataagttctgaagatctattgaatagcatggngactacagtgaataatgtttngtgtattngaaaatngctaggagagtggatcttaaatggtctccccacaaaaatgacaagtatgtgaggtgacagatatgttaatgagcttgatttaatcact

SEQ ID NO: 737383 - DNA, 8910 bp, Homo sapiens
  misc_feature (2941)..(2941): n is a, c, g, or t
attcaatcgtaattttttaatcaattaaatccaccagctaactaatcacagctaacagttactgaaagtcaggtataatagtgctctgtcagacagaagagaaacagaacatgctcttgagggacatacaatctagtaggagaacgcagacatactgaaaacattaaggtatgatccctgagaatgctaagtagagcacagttataagtgggacagcattacggggaagggcaaaatcactgctaatgggtatgggggtaggggtgttcacgcagttaggcttcatgggaaagtgggatttaagttgggcctggaaggatggtaagggcaggaggatattggcgcccagggatcagaaggcacagaggtggccgttagcaagttgctaagtggaggaagcctgataagaagaggtgtgtgctgaggagtgctgaggagtcgaggctgctaaaacagatgctgtggcaggcagcagggagccactgaggtctgtggagccttgggcaccatgacacgactggtatgttgtaatgttctgccccatgccaagccatattagagcctgggacaaaaggaaaactcagtaatactaatcctgtctttattttaaattttaatattttgttcatcatggttttttttgcattaattctgatttttaaaaatattggattgaaatattacttactttgattactgtatttttttggcatcccttacattttgtgcccaaggccagggtctcccttgcctcatcctagtcccagtcatgagttctacttctgaagtccagtggtgggtacatgggtatttatttcattgttattaattatagcttactcatgttataaatattatttggttagtaaacagcacttaattaaaaaaacaatgtaaaagacatggattttaagattaattagaaactattgagcctgagaagcatgaaagagaaaagaatccttcgtgctgccaagtcgatctctaggggagaataactcccacggctgcagcgtatgcagtgcacacagaagagggctgctctgcccagtccatgtgggtggaagataactggggggagtaccagaggctgctgtccacttggacactggccttgagcaactcagctgctgcagccagagcgccaatgctgcatggcctgaggcaagccctggcaaatgggctgcccaggtaggcttggcccacgttaaaacagacccacgcagccctgctgaaggaatggaagcaatagaagactcctgaacgctataaatgtctcagggctatgtatcagggagaaaaggagatgtttgatacaaggaatattgttagtacatcttaacatgtaaaatctgaaattttgaaacatgaaatctattgttcattagtataatggtgacgaatgaaagattattttgattcagggaaggcaaacagattgcagcaaaaatctcaaaaaaggtgaggggaaaggttgaaaggggcaggcaggtccctgctcacatcaccaggggcagttctttgtcatatgatgcggacctcccagtcagtggcaatgttgagtgagagcttctccaggctcaggatggatgttttggcacaatacgtaaaagccacaggctgatctttaccatcagatgagtgggtagtcacagaagatggctccttcctgaagcctaagaccaagatcttctccaccacacacttgctgggataatgacccctctggtcagcaaaactattgatcagaacactggaacagaatgaaaacttcctgtgcaaaaattgcttctggtggaggtattggaatgaatggccatcatcaagatataactcacccactgaagaacccttagtgcttagagcaacccggagtccataggaggattcagtcatccagcctgtggattttcctacagttgtctttattggtatcacacttccacctcgctgaaacactggaatagtgtccaaggctactgggatctttacagtacaccctccttcccaatgagcaaatgtcttatagtcataccagacctcatttgatcctggaagaaacacatcaactgtggtggcttttggttctgtgactggatgaaccaataatgcactccccagcatgtattcatcttccatatcaaaagtctttagttcatcagggaactctacccacagaggcctcatgacaggttgggaagccacgtgtgcatggtagaacagagaataccaatatggcaggaggccatagcgctctctgatggcttctcggatgagtcgggtgtgttcctccccaaagagccagggctctcgtcgcttggtgttcatggtggcatggccacggaagaagggctggtaggctccagcctggtaccaacgcactagcagctctgtctctggattcccaatgaacccgcctatgtcagctccgcaaaaagagatcccagtaatgctgagagtgagtaacattgggatagaaattttcaagttgctccattctgctgtgttgtcgcctgtccacacggcaccatacttttgtgatccagcaaagaaagaacgtgtaagaacaaagggtctctccttccctttagatcgttttatcagtccttctgcagtagccatttgatgataaaaaccgtagatgttgtggagctctctgtgctcccaattgccatgatgaatggcattcttctgcatggtttgctctggccctctaaagacagaaggctcattcatgtcattccaaaggaagaggatgtccgtagatccctgataaacagggaaagcaaaaagacttgaataccactctctgaccttgggattggtgaaatccaggtaagaggagagacctggccaacacaccccttcaaagtcttccccttcctgattcttcacaaagaagccctgatctttggccttcacatatactgagtagtcaggntcaatcttgatgtggggatcactgatgaccacaagcttacgctttttgctcctgagcagctcttgcatcctcttggggtttgggaatctgtttttgtcccaggtgaagtacctcttgccctcagtgtgctctatgtccagccacatggcatcataaggaatgtcatgctcatcaaaccctgcatccactgcttttacatcctgctcatcttcatagttccagcggcactggtggtatcccaaagagaaaagagggggcatggcttgtgtgcctgtaaggtgtgagtactgtttgaagacatcagaaggtgtaggtcctgtcagcagaaaaacatcaatgatgccactctctgacatccagtgcacatgagtgcgagatctgaccttttgtttagcagcaactgggcccatctgggtcagtgtgtactctactgcaggctctgtattgatctccaccagtgtttccgaggcattcagccagaaaatacctatagttctgcccagtttgtgggccaggagataaggtactgaaccataaatgcccattttatcatatatttggtatccatagacatccaggttataaagacggtaagcatctccatcaccagtatttttaagttggtgtgattctgcatgttgtgggatcccataaagatgctcaaatccatgcaaggagaaatccaaaccaatagaagaagggccattagctttgatatccacaaattttccaaatttctcttcccacaggcccagatcttcttgattttcctgagaggtgtccactgatgtctcctcctcattttctttagcagctctttgtttgtgaagaatctgtagatgctcaaagtataattggcccagggaatttatgctaatcacaacctcttcttcagacaccaagtctaccttgaatgggtttgctgtgatatggcacttcaggtctccttttccatctgccaatatcagactgcctgtgtccccagagcatgaaatcagccttacagtgcttggcttgcttgtgaggacatccggaacttcaaatctgggttttagaggagtctcttcgttaattttaagcctgaaaatgtttccttctataccataaatttcagccaggagaggaaccttacttgcttcattgatgatttggaacctggtgctgtcttcatctgttgtgactgaatccaataatgcccgataggtggacttcttggaaagccactgtttctgacgcctgtaaaatgcgatcttgttacagtctctgaaaatgtttttatctacagcttcatcttcaacacttatttcctctttcactgctgcttccatggcttctctgtcactccgaccagctcccagctctcaggacaagggccctgggcgatcttttaaaaaagccgattgggtgtctttctaaaattacaaccagtacttcatcgtcaagtttctgggaagggagtcccctccagattctcatggagtgacaaatcttgactcttgctcctggaatttttcaggcccaaactagcgtttctacaatgatttatttggcaaatttgtcttgattatgggtggctgatgaggaacgtgcttttgttaggaaccgaaactgggcggcggtgagggcgtgtacgcaatgagtcctagagggtaaaaatcaagagcgttaagaacctggaaatgccgagacggcctccctgactgggacgaagcatctgcagatctatctcagtggcggggtcacgccacagattttgaaaactgaccctctctgtctccgttttcggttaagggtgggaagtgccggccgggtctttgctggaggctaggtctccagccagattgtactgcagcatcgtactcttcagggctagaaggggcctttgaaggttgttacactacccagtctaggaatcgcgtgtactccaccaccgccgaattccagcctttgcttaaataccacccaaaccggagaactcactactagacgccacttgggcagccaggcttagggcttttccagactttctggccccaaagtctgacattgacttagaagggatgaagggctggggcgagcggaagtagagagccaaatcctgcacggggtgcctgcctggtcctaaaacctttaacggctgggagacagaaaagactcaggccaggctggcatgtagcgatctctctaacccagctgaccaggttccaacaggatgacgcctgcgcagtaggtccaaagtctcacggcgcacagacgactgtctgagagaggggccgctacgccgcacagcaaacaagctccgcgacgtttccaggacccggataatcccgcccttagagcagagccggaagaaggcgggacgaaccggaagagggtgaaatgctttcggtaggcactccacggctgtgaagatggcggcggctgcgtggcttcaggtgttgcctgtcattcttctgcttctgggagctcacccgtcaccactgtcgtttttcagtgcgggaccggcaaccgtagctgctgccgaccggtccaaatggcacattccgataccgtcggtgagtattcacttcactaacgtctgaacctagaggagcaaggggtggggctacggcggcccaaggggtccatgaaggttccgcaaaagtctcttcaaaaggggtggggttgctgggatggtctgtgtggctagccaactgggacccacctccctggagtggaaagccgcgcacttctgtgattaggctagcgggaatgtaagggccacttcagcaacagaaaggagtggtggagcggcttctcatcagaaaaacagaactttcagtgcctgacttgagatgtaaacttgatgtacaaacggagagttgtttatctttcagatgtttcacagaatccagtgtccccgggttggataagaaagatatgggaaaaattattttagttttggaaagatcctcttcagaaataccactatcttcctgaagtttgatggagaaccttgtgacctgtctttgaatataacctggtatctgaaaagcgctgattgttacaatgaaatctataacttcaaggcagaagaagtagagttgtatttggaaaaacttaaggaaaaaagaggcttgtctgggaaatatcaaacatcatcaaaattgttccagaactgcagtgaactctttaaaacacagaccttttctggagattttatgcatcgactgcctcttttaggagaaaaacaggaggctaaggagaatggaacaaaccttacctttattggagacaaaaccgcaatgcatgaaccattgcaaacttggcaagatgcaccatacatttttattgtacatattggcatttcatcctcaaaggaatcatcaaaagaaaattcactgagtaatctttttaccatgactgttgaagtgaagggtccctatgaatacctcacacttgaagactatcccttgatgatttggctggcatggtctgcctgctactggagagatctcctgagaattcagttttggattggtgctgtcatcttcctgggaatgcttgagaaagctgtcttctatgcggaatttcagaatatccgatacaaaggagaatctgtccagggtgctttgatccttgcagagctgctttcagcagtgaaacgctcactggctcgaaccctggtcatcatagtcagtctgggatatggcatcgtcaagccacgccttggagtcactcttcataaggttgtagtagcaggagccctctatcttttgttctctggcatggaaggggtcctcagagttactggggcccagactgatcttgcttccttggcctttatccccttggctttcctagacactgccttgtgctggtggatatttattagcctgactcaaacaatgaagctattaaaacttcggaggaacattgtaaaactctctttgtatcggcatttcaccaacacgcttattttggcagtggcagcatccattgtgtttatcatctggacaaccatgaagttcagaatagtgacatgtcagtcggactggcgggagctgtgggtagacgatgccatctggcgcttgctgttctccatgatcctctttgtcatcatggttctctggcgaccatctgcaaacaaccagaggtttgccttttcaccattgtctgaggaagaggaggaggatgaacaaaaggagcctatgctgaaagaaagctttgaaggaatgaaaatgagaagtaccaaacaagaacccaatggaaatagtaaagttaacaaagcacaggaagatgatttgaagtgggtagaagagaatgttccttcttctgtgacagatgtagcacttccagcccttctggattcagatgaggaacgaatgatcacacactttgaaaggtccaaaatggagtaaggaatgggaagatttgcagttaaagatggctaccatcagggaagagatcagcatctgtgtcagtcttctgtacggctccatgggattaaaggaagcaatgacatcctgatctgttccttgatctttgggcattggagttggcgagaggtgtcagaacaaagagaacatcttactgaaaacaagttcataagatgagaaaaatctacgagcttcttatttacaacactgctgccccctttcctcccagactctgacatggatgttcatgcaacttaagtgtgttgttcctgaactttctgtaatgtttcattttttaaatctgacaaactaaaaagtttaacgtcttctaaaagattgtcatcaacaccataatatgtaatctccaggagcaactgcctgtaatttttatttatttagggagttacataggtgatgggggaaattgttaactacctttcattttcctgggaagtcaaggttacatcttgcagaggttgttttgagaaaaaagggcccttctgagttaaggagccatagttctatcaatgatcaaaagaaaaaaaaaaaaaagagaaactgttacagtatgattcagatcatttaaaaaagcaaaatcaagtgcaattttgtttacaaatggtgtatattaaagatttttctatttcagatgtactttaaagagaaatattagcttaactcttttgacatctgctattgtgacacatcccattgctggcaatgtggtgcacactccgaaacttttaactactgttttgtaagcctccaagggtggcattgcagggtccttaggcaatgttttgtttgcctttatgcagagaggtgctccaagtgctgtgattgagcaccgtgctagaggaactgtaatgcttcagaagttgtagcttatacaaaggaaacaggtcctgctggcttaatttaaacagttattgcatgaagtagcgtggaggccctggactgctgctcgttctttaggatggactgttctggtatctggtattggtttagagactgttaataagggacatcacaaggtgatgggattcatttgaagcactctatttctgttttaatggttttatccaattttgccttcccaagatttttgttctacataaaaagttcatgccactttttaatataaaaaaatttaacaaaattaatgtatttttctcatttttttcaaactttttctaaagactctttctgtcaaactcatgaaaaatttctttctatggcttttattctagattgtcttattttctgttaaaaccaatgaccacatgaccacaatcttcactaactcatactgcagtgaaagtgttaacccttaggtagtttctctacaactctttgctatggtgattttaaaaaaagtttcctaggaagtatctctgaggaacagcaatctgaagaactgactatattctcatgctaagtcattagccaaaagctggtggtattgttgcatgctgctattgcatattaaaacgtagcagatgaataatagttgtaatgcagcaggatagttggtcaaattatttttttagg

SEQ ID NO: 737384 - DNA, 9261 bp, Homo sapiens
  misc_feature (2941)..(2941): n is a, c, g, or t
  misc_feature (8378)..(8378): n is a, c, g, or t
  misc_feature (8977)..(8977): n is a, c, g, or t
attcaatcgtaattttttaatcaattaaatccaccagctaactaatcacagctaacagttactgaaagtcaggtataatagtgctctgtcagacagaagagaaacagaacatgctcttgagggacatacaatctagtaggagaacgcagacatactgaaaacattaaggtatgatccctgagaatgctaagtagagcacagttataagtgggacagcattacggggaagggcaaaatcactgctaatgggtatgggggtaggggtgttcacgcagttaggcttcatgggaaagtgggatttaagttgggcctggaaggatggtaagggcaggaggatattggcgcccagggatcagaaggcacagaggtggccgttagcaagttgctaagtggaggaagcctgataagaagaggtgtgtgctgaggagtgctgaggagtcgaggctgctaaaacagatgctgtggcaggcagcagggagccactgaggtctgtggagccttgggcaccatgacacgactggtatgttgtaatgttctgccccatgccaagccatattagagcctgggacaaaaggaaaactcagtaatactaatcctgtctttattttaaattttaatattttgttcatcatggttttttttgcattaattctgatttttaaaaatattggattgaaatattacttactttgattactgtatttttttggcatcccttacattttgtgcccaaggccagggtctcccttgcctcatcctagtcccagtcatgagttctacttctgaagtccagtggtgggtacatgggtatttatttcattgttattaattatagcttactcatgttataaatattatttggttagtaaacagcacttaattaaaaaaacaatgtaaaagacatggattttaagattaattagaaactattgagcctgagaagcatgaaagagaaaagaatccttcgtgctgccaagtcgatctctaggggagaataactcccacggctgcagcgtatgcagtgcacacagaagagggctgctctgcccagtccatgtgggtggaagataactggggggagtaccagaggctgctgtccacttggacactggccttgagcaactcagctgctgcagccagagcgccaatgctgcatggcctgaggcaagccctggcaaatgggctgcccaggtaggcttggcccacgttaaaacagacccacgcagccctgctgaaggaatggaagcaatagaagactcctgaacgctataaatgtctcagggctatgtatcagggagaaaaggagatgtttgatacaaggaatattgttagtacatcttaacatgtaaaatctgaaattttgaaacatgaaatctattgttcattagtataatggtgacgaatgaaagattattttgattcagggaaggcaaacagattgcagcaaaaatctcaaaaaaggtgaggggaaaggttgaaaggggcaggcaggtccctgctcacatcaccaggggcagttctttgtcatatgatgcggacctcccagtcagtggcaatgttgagtgagagcttctccaggctcaggatggatgttttggcacaatacgtaaaagccacaggctgatctttaccatcagatgagtgggtagtcacagaagatggctccttcctgaagcctaagaccaagatcttctccaccacacacttgctgggataatgacccctctggtcagcaaaactattgatcagaacactggaacagaatgaaaacttcctgtgcaaaaattgcttctggtggaggtattggaatgaatggccatcatcaagatataactcacccactgaagaacccttagtgcttagagcaacccggagtccataggaggattcagtcatccagcctgtggattttcctacagttgtctttattggtatcacacttccacctcgctgaaacactggaatagtgtccaaggctactgggatctttacagtacaccctccttcccaatgagcaaatgtcttatagtcataccagacctcatttgatcctggaagaaacacatcaactgtggtggcttttggttctgtgactggatgaaccaataatgcactccccagcatgtattcatcttccatatcaaaagtctttagttcatcagggaactctacccacagaggcctcatgacaggttgggaagccacgtgtgcatggtagaacagagaataccaatatggcaggaggccatagcgctctctgatggcttctcggatgagtcgggtgtgttcctccccaaagagccagggctctcgtcgcttggtgttcatggtggcatggccacggaagaagggctggtaggctccagcctggtaccaacgcactagcagctctgtctctggattcccaatgaacccgcctatgtcagctccgcaaaaagagatcccagtaatgctgagagtgagtaacattgggatagaaattttcaagttgctccattctgctgtgttgtcgcctgtccacacggcaccatacttttgtgatccagcaaagaaagaacgtgtaagaacaaagggtctctccttccctttagatcgttttatcagtccttctgcagtagccatttgatgataaaaaccgtagatgttgtggagctctctgtgctcccaattgccatgatgaatggcattcttctgcatggtttgctctggccctctaaagacagaaggctcattcatgtcattccaaaggaagaggatgtccgtagatccctgataaacagggaaagcaaaaagacttgaataccactctctgaccttgggattggtgaaatccaggtaagaggagagacctggccaacacaccccttcaaagtcttccccttcctgattcttcacaaagaagccctgatctttggccttcacatatactgagtagtcaggntcaatcttgatgtggggatcactgatgaccacaagcttacgctttttgctcctgagcagctcttgcatcctcttggggtttgggaatctgtttttgtcccaggtgaagtacctcttgccctcagtgtgctctatgtccagccacatggcatcataaggaatgtcatgctcatcaaaccctgcatccactgcttttacatcctgctcatcttcatagttccagcggcactggtggtatcccaaagagaaaagagggggcatggcttgtgtgcctgtaaggtgtgagtactgtttgaagacatcagaaggtgtaggtcctgtcagcagaaaaacatcaatgatgccactctctgacatccagtgcacatgagtgcgagatctgaccttttgtttagcagcaactgggcccatctgggtcagtgtgtactctactgcaggctctgtattgatctccaccagtgtttccgaggcattcagccagaaaatacctatagttctgcccagtttgtgggccaggagataaggtactgaaccataaatgcccattttatcatatatttggtatccatagacatccaggttataaagacggtaagcatctccatcaccagtatttttaagttggtgtgattctgcatgttgtgggatcccataaagatgctcaaatccatgcaaggagaaatccaaaccaatagaagaagggccattagctttgatatccacaaattttccaaatttctcttcccacaggcccagatcttcttgattttcctgagaggtgtccactgatgtctcctcctcattttctttagcagctctttgtttgtgaagaatctgtagatgctcaaagtataattggcccagggaatttatgctaatcacaacctcttcttcagacaccaagtctaccttgaatgggtttgctgtgatatggcacttcaggtctccttttccatctgccaatatcagactgcctgtgtccccagagcatgaaatcagccttacagtgcttggcttgcttgtgaggacatccggaacttcaaatctgggttttagaggagtctcttcgttaattttaagcctgaaaatgtttccttctataccataaatttcagccaggagaggaaccttacttgcttcattgatgatttggaacctggtgctgtcttcatctgttgtgactgaatccaataatgcccgataggtggacttcttggaaagccactgtttctgacgcctgtaaaatgcgatcttgttacagtctctgaaaatgtttttatctacagcttcatcttcaacacttatttcctctttcactgctgcttccatggcttctctgtcactccgaccagctcccagctctcaggacaagggccctgggcgatcttttaaaaaagccgattgggtgtctttctaaaattacaaccagtacttcatcgtcaagtttctgggaagggagtcccctccagattctcatggagtgacaaatcttgactcttgctcctggaatttttcaggcccaaactagcgtttctacaatgatttatttggcaaatttgtcttgattatgggtggctgatgaggaacgtgcttttgttaggaaccgaaactgggcggcggtgagggcgtgtacgcaatgagtcctagagggtaaaaatcaagagcgttaagaacctggaaatgccgagacggcctccctgactgggacgaagcatctgcagatctatctcagtggcggggtcacgccacagattttgaaaactgaccctctctgtctccgttttcggttaagggtgggaagtgccggccgggtctttgctggaggctaggtctccagccagattgtactgcagcatcgtactcttcagggctagaaggggcctttgaaggttgttacactacccagtctaggaatcgcgtgtactccaccaccgccgaattccagcctttgcttaaataccacccaaaccggagaactcactactagacgccacttgggcagccaggcttagggcttttccagactttctggccccaaagtctgacattgacttagaagggatgaagggctggggcgagcggaagtagagagccaaatcctgcacggggtgcctgcctggtcctaaaacctttaacggctgggagacagaaaagactcaggccaggctggcatgtagcgatctctctaacccagctgaccaggttccaacaggatgacgcctgcgcagtaggtccaaagtctcacggcgcacagacgactgtctgagagaggggccgctacgccgcacagcaaacaagctccgcgacgtttccaggacccggataatcccgcccttagagcagagccggaagaaggcgggacgaaccggaagagggtgaaatgctttcggtaggcactccacggctgtgaagatggcggcggctgcgtggcttcaggtgttgcctgtcattcttctgcttctgggagctcacccgtcaccactgtcgtttttcagtgcgggaccggcaaccgtagctgctgccgaccggtccaaatggcacattccgataccgtcggtgagtattcacttcactaacgtctgaacctagaggagcaaggggtggggctacggcggcccaaggggtccatgaaggttccgcaaaagtctcttcaaaaggggtggggttgctgggatggtctgtgtggctagccaactgggacccacctccctggagtggaaagccgcgcacttctgtgattaggctagcgggaatgtaagggccacttcagcaacagaaaggagtggtggagcggcttctcatcagaaaaacagaactttcagtgcctgacttgagatgtaaacttgatgtacaaacggagagttgtttatctttcagatgtttcacagaatccagtgtccccgggttggataagaaagatatgggaaaaattattttagttttggaaagatcctcttcagaaataccactatcttcctgaagtttgatggagaaccttgtgacctgtctttgaatataacctggtatctgaaaagcgctgattgttacaatgaaatctataacttcaaggcagaagaagtagagttgtatttggaaaaacttaaggaaaaaagaggcttgtctgggaaatatcaaacatcatcaaaattgttccagaactgcagtgaactctttaaaacacagaccttttctggagattttatgcatcgactgcctcttttaggagaaaaacaggaggctaaggagaatggaacaaaccttacctttattggagacaaaaccattcagatgcctttcttgaagaaacatttcttggattgttgaaagactttaataatttccaaagttccaaaagttgattttgatagtttttgccagtgttttcgttgcttttatggatgagtagattttcagagtttcttattctgccattctgaaagtgttctcactacctaaaccccagttttatttgtacagaattttaactgaatgtaagttaggcatgacagtctttgttaatttttttaaacaaaagatagccattaggactgggtacagtggctcacgcctgtaatgccaacactttgggaggccaaggtgggcagatgacttgaggttgggagttcgagaccagcttggccaatgtggtgaaactttgtctttactaaaaatacaaaaattagttgctcatggtggcaggcacctgtaatccaagctactcaggaggctgaggcaggagaatcgcgtgaacttgggaggtggaggctgcagtgagctgagatcacgctactgcactccagcctgggcagccagtgagattccatctcaaaaaaaaaagaaaaaagatattcattggattttctcttactaataggtatatattcactgtgaaaatggagacgatatacataaatgaaaagaagaaaatagtaatctataataccatgcagtgatatatttatcttcctattcttttgtatatgggcatgtttatattattttaaaaagggaatcttagagtatgtattatatgacttttttttgtagcttagcaatataacatggacatgtcgtcagtttggtaaatattgtattgcatcgttacttaaatgcttgtatagggtcttattgtatgagtacattgcaatttgttcaattctctgttcttgaacttttatgagtttcattatcttggaattttatgcagtgttgtgattaatattttaactacatttgcttttaagtctttattttctgatctcagaagaattgtatattgggataagtttttaattctataacttaaaagtaaaaatcctttgtaattttatgttctaatagttttagcagtttggtgtgattacacagagcacatgcatattaaccaaaataagatcatattatataccattgtataattttttctttttattaccaaattggtacattgaatactacttcacctttttatggctgcttagtgttccattttattatgattttaataactcccaattgatgaacattggggttgttcccaaatttcccctattatgggtaaagttatgttcataatgtctagctatatttctgtgtacatttataatctttaggctaaattcctggaggtagaattgctagatccacatgtatgcacagtttaaaggtgctttttcatagcaatttatggccccaagaaagtgagagtgagtgtctttgtttatgttgctatgaaaggacacctggagctgggtaatttataaagaaaagaggtttatttggctcactgttctgtgggctatgaaagaagcatggtgccggcatctgtttctagtgagggcttcaggctgtttctactcatggtggaaggtgaaggggggagcctgtgtgtgcagatcacctggcaagagaggaagaaggaaagagggaggaggaggagaggaggtagtgggctttttttttaataatcaaggaaccaatagagggataactcattactgaaaggacagtggcaccaagccattcattagggattggctcccatgacccaaacacctctctctagaattcacctcaaacattggggatcaaatttcaatatgaaatttgggaggacagatatctaaaccatagcagtgagtttccatctttcctcacaaaaacaatggctgtcatcatttaaaatagattttatgcagtttgtctagttaagcaacaatttgttcttgtaaattgtatttaaaaagttatcgttaagccaggcgctgtggctcacacctgtaaccccagcaccttgggaggccacagcaggcagatcgctagagcttacgagtttgagaccaccctgggcaatatggtgaaacctcgtctctacaaaaaatggaaaaattagccagaaggtggcacgtgcacctgtagtccccgctacttgggagacngaagtgggaggatggcttgagtctgggaggcagaggttgcagtgagccaaagtcacaccacttcactctaggcgatagagccatacctcgtctctaaaacaaaaacaacagcaaaaaaattattgttgagggtgaaccttcatttatatggatattggcacttgtgctttcttcagttgtcttctgtgcacagcatactttgagttctactcaaggcttgagtcttgttacagtgattaaaactggctgaaaggtgagcctgttgaataccacaagtaatatttaggaatacttagtcaaaatatagtcaaaagaaatgaaagagttatctatcttttgatctttcttcctgaaaatttggtccaaggcaaataccttataatcctatttaaagaatattcacaggctgggttcagtggtaatctcagcactttttaaggcccaaggtgggtgaatcacttgaagccagggtttgagactagtctggtcaacatgacaaaaccctatctctactaaaaatgcaaaaattagcttggtgtggtggggtacacctgtaatcccagctacttgggtgcatgaggcctgagaatcacttgagnccaagaagcagaggttgtagtgagccatgattgcaccactgcactccagcctgggtgacaaaatgagactctgtctcaaaaagcaaaaaggatactcacaaattcagtacctccatcctatttcattaaagctctgattaaacatatatgtttatgggccgggtgtggtggctcacacctgtgatcccagcactttgggaggccaaggtgggtggatcacctgatgtcaggagttcgagatcagcctggcaaacatggtgaaacctcatctctactaaaaatac

SEQ ID NO: 737385 - DNA, 8684 bp, Homo sapiens
  misc_feature (2941)..(2941): n is a, c, g, or t
  misc_feature (8400)..(8400): n is a, c, g, or t
attcaatcgtaattttttaatcaattaaatccaccagctaactaatcacagctaacagttactgaaagtcaggtataatagtgctctgtcagacagaagagaaacagaacatgctcttgagggacatacaatctagtaggagaacgcagacatactgaaaacattaaggtatgatccctgagaatgctaagtagagcacagttataagtgggacagcattacggggaagggcaaaatcactgctaatgggtatgggggtaggggtgttcacgcagttaggcttcatgggaaagtgggatttaagttgggcctggaaggatggtaagggcaggaggatattggcgcccagggatcagaaggcacagaggtggccgttagcaagttgctaagtggaggaagcctgataagaagaggtgtgtgctgaggagtgctgaggagtcgaggctgctaaaacagatgctgtggcaggcagcagggagccactgaggtctgtggagccttgggcaccatgacacgactggtatgttgtaatgttctgccccatgccaagccatattagagcctgggacaaaaggaaaactcagtaatactaatcctgtctttattttaaattttaatattttgttcatcatggttttttttgcattaattctgatttttaaaaatattggattgaaatattacttactttgattactgtatttttttggcatcccttacattttgtgcccaaggccagggtctcccttgcctcatcctagtcccagtcatgagttctacttctgaagtccagtggtgggtacatgggtatttatttcattgttattaattatagcttactcatgttataaatattatttggttagtaaacagcacttaattaaaaaaacaatgtaaaagacatggattttaagattaattagaaactattgagcctgagaagcatgaaagagaaaagaatccttcgtgctgccaagtcgatctctaggggagaataactcccacggctgcagcgtatgcagtgcacacagaagagggctgctctgcccagtccatgtgggtggaagataactggggggagtaccagaggctgctgtccacttggacactggccttgagcaactcagctgctgcagccagagcgccaatgctgcatggcctgaggcaagccctggcaaatgggctgcccaggtaggcttggcccacgttaaaacagacccacgcagccctgctgaaggaatggaagcaatagaagactcctgaacgctataaatgtctcagggctatgtatcagggagaaaaggagatgtttgatacaaggaatattgttagtacatcttaacatgtaaaatctgaaattttgaaacatgaaatctattgttcattagtataatggtgacgaatgaaagattattttgattcagggaaggcaaacagattgcagcaaaaatctcaaaaaaggtgaggggaaaggttgaaaggggcaggcaggtccctgctcacatcaccaggggcagttctttgtcatatgatgcggacctcccagtcagtggcaatgttgagtgagagcttctccaggctcaggatggatgttttggcacaatacgtaaaagccacaggctgatctttaccatcagatgagtgggtagtcacagaagatggctccttcctgaagcctaagaccaagatcttctccaccacacacttgctgggataatgacccctctggtcagcaaaactattgatcagaacactggaacagaatgaaaacttcctgtgcaaaaattgcttctggtggaggtattggaatgaatggccatcatcaagatataactcacccactgaagaacccttagtgcttagagcaacccggagtccataggaggattcagtcatccagcctgtggattttcctacagttgtctttattggtatcacacttccacctcgctgaaacactggaatagtgtccaaggctactgggatctttacagtacaccctccttcccaatgagcaaatgtcttatagtcataccagacctcatttgatcctggaagaaacacatcaactgtggtggcttttggttctgtgactggatgaaccaataatgcactccccagcatgtattcatcttccatatcaaaagtctttagttcatcagggaactctacccacagaggcctcatgacaggttgggaagccacgtgtgcatggtagaacagagaataccaatatggcaggaggccatagcgctctctgatggcttctcggatgagtcgggtgtgttcctccccaaagagccagggctctcgtcgcttggtgttcatggtggcatggccacggaagaagggctggtaggctccagcctggtaccaacgcactagcagctctgtctctggattcccaatgaacccgcctatgtcagctccgcaaaaagagatcccagtaatgctgagagtgagtaacattgggatagaaattttcaagttgctccattctgctgtgttgtcgcctgtccacacggcaccatacttttgtgatccagcaaagaaagaacgtgtaagaacaaagggtctctccttccctttagatcgttttatcagtccttctgcagtagccatttgatgataaaaaccgtagatgttgtggagctctctgtgctcccaattgccatgatgaatggcattcttctgcatggtttgctctggccctctaaagacagaaggctcattcatgtcattccaaaggaagaggatgtccgtagatccctgataaacagggaaagcaaaaagacttgaataccactctctgaccttgggattggtgaaatccaggtaagaggagagacctggccaacacaccccttcaaagtcttccccttcctgattcttcacaaagaagccctgatctttggccttcacatatactgagtagtcaggntcaatcttgatgtggggatcactgatgaccacaagcttacgctttttgctcctgagcagctcttgcatcctcttggggtttgggaatctgtttttgtcccaggtgaagtacctcttgccctcagtgtgctctatgtccagccacatggcatcataaggaatgtcatgctcatcaaaccctgcatccactgcttttacatcctgctcatcttcatagttccagcggcactggtggtatcccaaagagaaaagagggggcatggcttgtgtgcctgtaaggtgtgagtactgtttgaagacatcagaaggtgtaggtcctgtcagcagaaaaacatcaatgatgccactctctgacatccagtgcacatgagtgcgagatctgaccttttgtttagcagcaactgggcccatctgggtcagtgtgtactctactgcaggctctgtattgatctccaccagtgtttccgaggcattcagccagaaaatacctatagttctgcccagtttgtgggccaggagataaggtactgaaccataaatgcccattttatcatatatttggtatccatagacatccaggttataaagacggtaagcatctccatcaccagtatttttaagttggtgtgattctgcatgttgtgggatcccataaagatgctcaaatccatgcaaggagaaatccaaaccaatagaagaagggccattagctttgatatccacaaattttccaaatttctcttcccacaggcccagatcttcttgattttcctgagaggtgtccactgatgtctcctcctcattttctttagcagctctttgtttgtgaagaatctgtagatgctcaaagtataattggcccagggaatttatgctaatcacaacctcttcttcagacaccaagtctaccttgaatgggtttgctgtgatatggcacttcaggtctccttttccatctgccaatatcagactgcctgtgtccccagagcatgaaatcagccttacagtgcttggcttgcttgtgaggacatccggaacttcaaatctgggttttagaggagtctcttcgttaattttaagcctgaaaatgtttccttctataccataaatttcagccaggagaggaaccttacttgcttcattgatgatttggaacctggtgctgtcttcatctgttgtgactgaatccaataatgcccgataggtggacttcttggaaagccactgtttctgacgcctgtaaaatgcgatcttgttacagtctctgaaaatgtttttatctacagcttcatcttcaacacttatttcctctttcactgctgcttccatggcttctctgtcactccgaccagctcccagctctcaggacaagggccctgggcgatcttttaaaaaagccgattgggtgtctttctaaaattacaaccagtacttcatcgtcaagtttctgggaagggagtcccctccagattctcatggagtgacaaatcttgactcttgctcctggaatttttcaggcccaaactagcgtttctacaatgatttatttggcaaatttgtcttgattatgggtggctgatgaggaacgtgcttttgttaggaaccgaaactgggcggcggtgagggcgtgtacgcaatgagtcctagagggtaaaaatcaagagcgttaagaacctggaaatgccgagacggcctccctgactgggacgaagcatctgcagatctatctcagtggcggggtcacgccacagattttgaaaactgaccctctctgtctccgttttcggttaagggtgggaagtgccggccgggtctttgctggaggctaggtctccagccagattgtactgcagcatcgtactcttcagggctagaaggggcctttgaaggttgttacactacccagtctaggaatcgcgtgtactccaccaccgccgaattccagcctttgcttaaataccacccaaaccggagaactcactactagacgccacttgggcagccaggcttagggcttttccagactttctggccccaaagtctgacattgacttagaagggatgaagggctggggcgagcggaagtagagagccaaatcctgcacggggtgcctgcctggtcctaaaacctttaacggctgggagacagaaaagactcaggccaggctggcatgtagcgatctctctaacccagctgaccaggttccaacaggatgacgcctgcgcagtaggtccaaagtctcacggcgcacagacgactgtctgagagaggggccgctacgccgcacagcaaacaagctccgcgacgtttccaggacccggataatcccgcccttagagcagagccggaagaaggcgggacgaaccggaagagggtgaaatgctttcggtaggcactccacggctgtgaagatggcggcggctgcgtggcttcaggtgttgcctgtcattcttctgcttctgggagctcacccgtcaccactgtcgtttttcagtgcgggaccggcaaccgtagctgctgccgaccggtccaaatggcacattccgataccgtcggtgagtattcacttcactaacgtctgaacctagaggagcaaggggtggggctacggcggcccaaggggtccatgaaggttccgcaaaagtctcttcaaaaggggtggggttgctgggatggtctgtgtggctagccaactgggacccacctccctggagtggaaagccgcgcacttctgtgattaggctagcgggaatgtaagggccacttcagcaacagaaaggagtggtggagcggcttctcatcagaaaaacagaactttcagtgcctgacttgagatgtaaacttgatgtacaaacggagagttgtttatctttcagatgtttcacagaatccagtgtccccgggttggataagaaagatatgggaaaaattattttagttttggaaagatcctcttcagaaataccactatcttcctgaagtttgatggagaaccttgtgacctgtctttgaatataacctggtatctgaaaagcgctgattgttacaatgaaatctataacttcaaggcagaagaagtagagttgtatttggaaaaacttaaggaaaaaagaggcttgtctgggaaatatcaaacatcatcaaaattgttccagaactgcagtgaactctttaaaacacagaccttttctggagattttatgcatcgactgcctcttttaggagaaaaacaggaggctaaggagaatggaacaaaccttacctttattggagacaaaaccattcagatgcctttcttgaagaaacatttcttggattgttgaaagactttaataatttccaaagttccaaaagttgattttgatagtttttgccagtgttttcgttgcttttatggatgagtagattttcagagtttcttattctgccattctgaaagtgttctcactacctaaaccccagttttatttgtacagaattttaactgaatgtaagttaggcatgacagtctttgttaatttttttaaacaaaagatagccattaggactgggtacagtggctcacgcctgtaatgccaacactttgggaggccaaggtgggcagatgacttgaggttgggagttcgagaccagcttggccaatgtggtgaaactttgtctttactaaaaatacaaaaattagttgctcatggtggcaggcacctgtaatccaagctactcaggaggctgaggcaggagaatcgcgtgaacttgggaggtggaggctgcagtgagctgagatcacgctactgcactccagcctgggcagccagtgagattccatctcaaaaaaaaaagaaaaaagatattcattggattttctcttactaataggtatatattcactgtgaaaatggagacgatatacataaatgaaaagaagaaaatagtaatctataataccatgcagtgatatatttatcttcctattcttttgtatatgggcatgtttatattattttaaaaagggaatcttagagtatgtattatatgacttttttttgtagcttagcaatataacatggacatgtcgtcagtttggtaaatattgtattgcatcgttacttaaatgcttgtatagggtcttattgtatgagtacattgcaatttgttcaattctctgttcttgaacttttatgagtttcattatcttggaattttatgcagtgttgtgattaatattttaactacatttgcttttaagtctttattttctgatctcagaagaattgtatattgggataagtttttaattctataacttaaaagtaaaaatcctttgtaattttatgttctaatagttttagcagtttggtgtgattacacagagcacatgcatattaaccaaaataagatcatattatataccattgtataattttttctttttattaccaaattggtacattgaatactacttcacctttttatggctgcttagtgttccattttattatgattttaataactcccaattgatgaacattggggttgttcccaaatttcccctattatgggtaaagttatgttcataatgtctagctatatttctgtgtacatttataatctttaggctaaattcctggaggtagaattgctagatccacatgtatgcacagtttaaaggtgctttttcatagcaatttatggccccaagaaagtgagagtgagtgtctttgtttatgttgctatgaaaggacacctggagctgggtaatttataaagaaaagaggtttatttggctcactgttctgtgggctatgaaagaagcatggtgccggcatctgtttctagtgagggcttcaggctgtttctactcatggtggaaggtgaaggggggagcctgtgtgtgcagatcacctggcaagagaggaagaaggaaagagggaggaggaggagaggaggtagtgggctttttttttaataatcaaggaaccaatagagggataactcattactgaaaggacagtggcaccaagccattcattagggattggctcccatgacccaaacacctctctctagaattcacctcaaacattggggatcaaatttcaatatgaaatttgggaggacagatatctaaaccatagcagtgagtttccatctttcctcacaaaaacaatggctgtcatcatttaaaatagattttatgcagtttgtctagttaagcaacaatttgttcttgtaaattgtatttaaaaagttatcgttaagccaggcgctgtggctcacacctgtaaccccagcaccttgggaggccacagcaggcagatcgctagagcttacgagtttgagaccaccctgggcaatatggtgaaacctcgtctctacaaaaaatggaaaaattagccagaaggtggcacgtgcacctgtaatcccagctacttgggtgcatgaggcctgagaatcacttgagnccaagaagcagaggttgtagtgagccatgattgcaccactgcactccagcctgggtgacaaaatgagactctgtctcaaaaagcaaaaaggatactcacaaattcagtacctccatcctatttcattaaagctctgattaaacatatatgtttatgggccgggtgtggtggctcacacctgtgatcccagcactttgggaggccaaggtgggtggatcacctgatgtcaggagttcgagatcagcctggcaaacatggtgaaacctcatctctactaaaaatac

SEQ ID NO: 737386 - DNA, 9076 bp, Homo sapiens
  misc_feature (2941)..(2941): n is a, c, g, or t
attcaatcgtaattttttaatcaattaaatccaccagctaactaatcacagctaacagttactgaaagtcaggtataatagtgctctgtcagacagaagagaaacagaacatgctcttgagggacatacaatctagtaggagaacgcagacatactgaaaacattaaggtatgatccctgagaatgctaagtagagcacagttataagtgggacagcattacggggaagggcaaaatcactgctaatgggtatgggggtaggggtgttcacgcagttaggcttcatgggaaagtgggatttaagttgggcctggaaggatggtaagggcaggaggatattggcgcccagggatcagaaggcacagaggtggccgttagcaagttgctaagtggaggaagcctgataagaagaggtgtgtgctgaggagtgctgaggagtcgaggctgctaaaacagatgctgtggcaggcagcagggagccactgaggtctgtggagccttgggcaccatgacacgactggtatgttgtaatgttctgccccatgccaagccatattagagcctgggacaaaaggaaaactcagtaatactaatcctgtctttattttaaattttaatattttgttcatcatggttttttttgcattaattctgatttttaaaaatattggattgaaatattacttactttgattactgtatttttttggcatcccttacattttgtgcccaaggccagggtctcccttgcctcatcctagtcccagtcatgagttctacttctgaagtccagtggtgggtacatgggtatttatttcattgttattaattatagcttactcatgttataaatattatttggttagtaaacagcacttaattaaaaaaacaatgtaaaagacatggattttaagattaattagaaactattgagcctgagaagcatgaaagagaaaagaatccttcgtgctgccaagtcgatctctaggggagaataactcccacggctgcagcgtatgcagtgcacacagaagagggctgctctgcccagtccatgtgggtggaagataactggggggagtaccagaggctgctgtccacttggacactggccttgagcaactcagctgctgcagccagagcgccaatgctgcatggcctgaggcaagccctggcaaatgggctgcccaggtaggcttggcccacgttaaaacagacccacgcagccctgctgaaggaatggaagcaatagaagactcctgaacgctataaatgtctcagggctatgtatcagggagaaaaggagatgtttgatacaaggaatattgttagtacatcttaacatgtaaaatctgaaattttgaaacatgaaatctattgttcattagtataatggtgacgaatgaaagattattttgattcagggaaggcaaacagattgcagcaaaaatctcaaaaaaggtgaggggaaaggttgaaaggggcaggcaggtccctgctcacatcaccaggggcagttctttgtcatatgatgcggacctcccagtcagtggcaatgttgagtgagagcttctccaggctcaggatggatgttttggcacaatacgtaaaagccacaggctgatctttaccatcagatgagtgggtagtcacagaagatggctccttcctgaagcctaagaccaagatcttctccaccacacacttgctgggataatgacccctctggtcagcaaaactattgatcagaacactggaacagaatgaaaacttcctgtgcaaaaattgcttctggtggaggtattggaatgaatggccatcatcaagatataactcacccactgaagaacccttagtgcttagagcaacccggagtccataggaggattcagtcatccagcctgtggattttcctacagttgtctttattggtatcacacttccacctcgctgaaacactggaatagtgtccaaggctactgggatctttacagtacaccctccttcccaatgagcaaatgtcttatagtcataccagacctcatttgatcctggaagaaacacatcaactgtggtggcttttggttctgtgactggatgaaccaataatgcactccccagcatgtattcatcttccatatcaaaagtctttagttcatcagggaactctacccacagaggcctcatgacaggttgggaagccacgtgtgcatggtagaacagagaataccaatatggcaggaggccatagcgctctctgatggcttctcggatgagtcgggtgtgttcctccccaaagagccagggctctcgtcgcttggtgttcatggtggcatggccacggaagaagggctggtaggctccagcctggtaccaacgcactagcagctctgtctctggattcccaatgaacccgcctatgtcagctccgcaaaaagagatcccagtaatgctgagagtgagtaacattgggatagaaattttcaagttgctccattctgctgtgttgtcgcctgtccacacggcaccatacttttgtgatccagcaaagaaagaacgtgtaagaacaaagggtctctccttccctttagatcgttttatcagtccttctgcagtagccatttgatgataaaaaccgtagatgttgtggagctctctgtgctcccaattgccatgatgaatggcattcttctgcatggtttgctctggccctctaaagacagaaggctcattcatgtcattccaaaggaagaggatgtccgtagatccctgataaacagggaaagcaaaaagacttgaataccactctctgaccttgggattggtgaaatccaggtaagaggagagacctggccaacacaccccttcaaagtcttccccttcctgattcttcacaaagaagccctgatctttggccttcacatatactgagtagtcaggntcaatcttgatgtggggatcactgatgaccacaagcttacgctttttgctcctgagcagctcttgcatcctcttggggtttgggaatctgtttttgtcccaggtgaagtacctcttgccctcagtgtgctctatgtccagccacatggcatcataaggaatgtcatgctcatcaaaccctgcatccactgcttttacatcctgctcatcttcatagttccagcggcactggtggtatcccaaagagaaaagagggggcatggcttgtgtgcctgtaaggtgtgagtactgtttgaagacatcagaaggtgtaggtcctgtcagcagaaaaacatcaatgatgccactctctgacatccagtgcacatgagtgcgagatctgaccttttgtttagcagcaactgggcccatctgggtcagtgtgtactctactgcaggctctgtattgatctccaccagtgtttccgaggcattcagccagaaaatacctatagttctgcccagtttgtgggccaggagataaggtactgaaccataaatgcccattttatcatatatttggtatccatagacatccaggttataaagacggtaagcatctccatcaccagtatttttaagttggtgtgattctgcatgttgtgggatcccataaagatgctcaaatccatgcaaggagaaatccaaaccaatagaagaagggccattagctttgatatccacaaattttccaaatttctcttcccacaggcccagatcttcttgattttcctgagaggtgtccactgatgtctcctcctcattttctttagcagctctttgtttgtgaagaatctgtagatgctcaaagtataattggcccagggaatttatgctaatcacaacctcttcttcagacaccaagtctaccttgaatgggtttgctgtgatatggcacttcaggtctccttttccatctgccaatatcagactgcctgtgtccccagagcatgaaatcagccttacagtgcttggcttgcttgtgaggacatccggaacttcaaatctgggttttagaggagtctcttcgttaattttaagcctgaaaatgtttccttctataccataaatttcagccaggagaggaaccttacttgcttcattgatgatttggaacctggtgctgtcttcatctgttgtgactgaatccaataatgcccgataggtggacttcttggaaagccactgtttctgacgcctgtaaaatgcgatcttgttacagtctctgaaaatgtttttatctacagcttcatcttcaacacttatttcctctttcactgctgcttccatggcttctctgtcactccgaccagctcccagctctcaggacaagggccctgggcgatcttttaaaaaagccgattgggtgtctttctaaaattacaaccagtacttcatcgtcaagtttctgggaagggagtcccctccagattctcatggagtgacaaatcttgactcttgctcctggaatttttcaggcccaaactagcgtttctacaatgatttatttggcaaatttgtcttgattatgggtggctgatgaggaacgtgcttttgttaggaaccgaaactgggcggcggtgagggcgtgtacgcaatgagtcctagagggtaaaaatcaagagcgttaagaacctggaaatgccgagacggcctccctgactgggacgaagcatctgcagatctatctcagtggcggggtcacgccacagattttgaaaactgaccctctctgtctccgttttcggttaagggtgggaagtgccggccgggtctttgctggaggctaggtctccagccagattgtactgcagcatcgtactcttcagggctagaaggggcctttgaaggttgttacactacccagtctaggaatcgcgtgtactccaccaccgccgaattccagcctttgcttaaataccacccaaaccggagaactcactactagacgccacttgggcagccaggcttagggcttttccagactttctggccccaaagtctgacattgacttagaagggatgaagggctggggcgagcggaagtagagagccaaatcctgcacggggtgcctgcctggtcctaaaacctttaacggctgggagacagaaaagactcaggccaggctggcatgtagcgatctctctaacccagctgaccaggttccaacaggatgacgcctgcgcagtaggtccaaagtctcacggcgcacagacgactgtctgagagaggggccgctacgccgcacagcaaacaagctccgcgacgtttccaggacccggataatcccgcccttagagcagagccggaagaaggcgggacgaaccggaagagggtgaaatgctttcggtaggcactccacggctgtgaagatggcggcggctgcgtggcttcaggtgttgcctgtcattcttctgcttctgggagctcacccgtcaccactgtcgtttttcagtgcgggaccggcaaccgtagctgctgccgaccggtccaaatggcacattccgataccgtcggtgagtattcacttcactaacgtctgaacctagaggagcaaggggtggggctacggcggcccaaggggtccatgaaggttccgcaaaagtctcttcaaaaggggtggggttgctgggatggtctgtgtggctagccaactgggacccacctccctggagtggaaagccgcgcacttctgtgattaggctagcgggaatgtaagggccacttcagcaacagaaaggagtggtggagcggcttctcatcagaaaaacagaactttcagtgcctgacttgagatgtaaacttgatgtacaaacggagagttgtttatctttcagatgtttcacagaatccagtgtccccgggttggataagaaagatatgggaaaaattattttagttttggaaagatcctcttcagaaataccactatcttcctgaagtttgatggagaaccttgtgacctgtctttgaatataacctggtatctgaaaagcgctgattgttacaatgaaatctataacttcaaggcagaagaagtagagttgtatttggaaaaacttaaggaaaaaagaggcttgtctgggaaatatcaaacatcatcaaaattgttccagaactgcagtgaactctttaaaacacagactaggaggattggttggtcttttcttggatttgattatggaaagctacctgatgcatctggttgctggaggctgactacttttagatgtgctgtaatctttccagggtcttggcttattgaccttttctggagattttatgcatcgactgcctcttttaggagaaaaacaggaggctaaggagaatggaacaaaccttacctttattggagacaaaaccgcaatgcatgaaccattgcaaacttggcaagatgcaccatacatttttattgtacatattggcatttcatcctcaaaggaatcatcaaaagaaaattcactgagtaatctttttaccatgactgttgaagtgaagggtccctatgaatacctcacacttgaagactatcccttgatgatttttttcatggtgatgtgtattgtatatgtcctgtttggtgttctgtggctggcatggtctgcctgctactggagagatctcctgagaattcagttttggattggtgctgtcatcttcctgggaatgcttgagaaagctgtcttctatgcggaatttcagaatatccgatacaaaggagaatctgtccagggtgctttgatccttgcagagctgctttcagcagtgaaacgctcactggctcgaaccctggtcatcatagtcagtctgggatatggcatcgtcaagccacgccttggagtcactcttcataaggttgtagtagcaggagccctctatcttttgttctctggcatggaaggggtcctcagagttactggggcccagactgatcttgcttccttggcctttatccccttggctttcctagacactgccttgtgctggtggatatttattagcctgactcaaacaatgaagctattaaaacttcggaggaacattgtaaaactctctttgtatcggcatttcaccaacacgcttattttggcagtggcagcatccattgtgtttatcatctggacaaccatgaagttcagaatagtgacatgtcagtcggactggcgggagctgtgggtagacgatgccatctggcgcttgctgttctccatgatcctctttgtcatcatggttctctggcgaccatctgcaaacaaccagaggtttgccttttcaccattgtctgaggaagaggaggaggatgaacaaaaggagcctatgctgaaagaaagctttgaaggaatgaaaatgagaagtaccaaacaagaacccaatggaaatagtaaagttaacaaagcacaggaagatgatttgaagtgggtagaagagaatgttccttcttctgtgacagatgtagcacttccagcccttctggattcagatgaggaacgaatgatcacacactttgaaaggtccaaaatggagtaaggaatgggaagatttgcagttaaagatggctaccatcagggaagagatcagcatctgtgtcagtcttctgtacggctccatgggattaaaggaagcaatgacatcctgatctgttccttgatctttgggcattggagttggcgagaggtgtcagaacaaagagaacatcttactgaaaacaagttcataagatgagaaaaatctacgagcttcttatttacaacactgctgccccctttcctcccagactctgacatggatgttcatgcaacttaagtgtgttgttcctgaactttctgtaatgtttcattttttaaatctgacaaactaaaaagtttaacgtcttctaaaagattgtcatcaacaccataatatgtaatctccaggagcaactgcctgtaatttttatttatttagggagttacataggtgatgggggaaattgttaactacctttcattttcctgggaagtcaaggttacatcttgcagaggttgttttgagaaaaaagggcccttctgagttaaggagccatagttctatcaatgatcaaaagaaaaaaaaaaaaaagagaaactgttacagtatgattcagatcatttaaaaaagcaaaatcaagtgcaattttgtttacaaatggtgtatattaaagatttttctatttcagatgtactttaaagagaaatattagcttaactcttttgacatctgctattgtgacacatcccattgctggcaatgtggtgcacactccgaaacttttaactactgttttgtaagcctccaagggtggcattgcagggtccttaggcaatgttttgtttgcctttatgcagagaggtgctccaagtgctgtgattgagcaccgtgctagaggaactgtaatgcttcagaagttgtagcttatacaaaggaaacaggtcctgctggcttaatttaaacagttattgcatgaagtagcgtggaggccctggactgctgctcgttctttaggatggactgttctggtatctggtattggtttagagactgttaataagggacatcacaaggtgatgggattcatttgaagcactctatttctgttttaatggttttatccaattttgccttcccaagatttttgttctacataaaaagttcatgccactttttaatataaaaaaatttaacaaaattaatgtatttttctcatttttttcaaactttttctaaagactctttctgtcaaactcatgaaaaatttctttctatggcttttattctagattgtcttattttctgttaaaaccaatgaccacatgaccacaatcttcactaactcatactgcagtgaaagtgttaacccttaggtagtttctctacaactctttgctatggtgattttaaaaaaagtttcctaggaagtatctctgaggaacagcaatctgaagaactgactatattctcatgctaagtcattagccaaaagctggtggtattgttgcatgctgctattgcatattaaaacgtagcagatgaataatagttgtaatgcagcaggatagttggtcaaattatttttttagg

SEQ ID NO: 737387 - DNA, 1497 bp, Homo sapiens
atggataaaccaaatgtggcatatgcacaccatggaacattactccacctgctgtggagttcacgttgctgtgaacactggtatacaaatatctgagtggaattgctggatcatatggtaattctgcatttaactttttaaggaactgccaaactgttttccacagagctgtaacattttacatccaaaccagcaataggacctggataaaaggtggctaaggcacagttaaataaaatactgttagttactgcccatttgcattgggtttctagtggcaaataatctagccgtgtccttgactggatctcccaatgattcttttcagtcatttgaatgagtatggtggtggtgacactggcaggaggctggagggtactttaattaacacgcgaacacacacaaatccattgcaccccactaagccgcccaaacacacatgaaacacaaaaactatccttgctagggaaacacagccctggaacaaaccccctggaccccttgtcaccaccagcccatcctgtaagaaaatgatggttgaagctgcagtgacagaattggagagatgctctgttagacaagtctgtcagctgaaaggggcagaaaccattgttgaactgcttatatgagaggaagacctgggtggcacaggcctggctggacgcagggctcacagagcgtcatcagcacttcatctcttcccctgcgggacctgctgtcctctgcgttgcacacaccccccgccaggctcatccctgtatcctccttggaggaaagtgccaggctggtgctacttggccctgcctgggtcacacgcctgcctcgggatgtggaggatggtcagcccagccacagcacatggattgctatgtgaaggatgatgttccacaagaaaaccaggacggcttcaccagggaggcaagagcagcagatgcccatgacagagggtgtatactctgaataaaagaatttggatttttaaaaagagacaggaagaaaaggacttccaaactctagaaagtttaaaactagtagaatgaaacatattgtgtataaatgtaaagctctttgttgagattaaatatacgtatcagttaaattttatttaaacatatatatacacatatacacacacacacatacatatatatgacccaagtacaggataaagatgaaattaataagtactctttaaaaatcttagttttggggctgggcgcggtggctcacgcctctaatccaagcactttgggaggccaaggcgggcggatcacctgagatcggtagttcgagaccagcctgaccaacgtggagaaaccctgtctctactaaaaatacaaagaattagccggacgtggtggcgcatgcctgtaatcccagctactcgggaggctgaggcaggagaatcgcttgaacccgggaggcggagatcgcagtgagccaagatggtgccatgtcactccagcctaggcaacaagagcaaaactccatctcaaa

SEQ ID NO: 737388 - DNA, 1529 bp, Homo sapiens; identical to SEQ ID NO: 62682

SEQ ID NO: 737389 - DNA, 539 bp, Homo sapiens
agatttcaccgccaggcttcttattgctaaatccttcttaggaccttaaggtagcctcctctccaggcttgttctccctcttggaatatggggaggactggaggacctctaaggtcccttggttctccccagtccttagattaaaaggcccaggccccaggctggccccctgcctgctgtcccactccttcattccatttcttggaatgtggccatgcctccagtgcctccattcaaccccctctaactgattccttccatcctctgcgaccagagacgccgcccgcctcctgcccaccacctccagaagctcctggctggggtgcactgccgtctcctcccactccccacattgccatgcctgggccacgcccaccccacccactcacccacccccagtgtccgttgtgtgacctagtgcaccatgtattagcttccatggcccccaccccagcccccaccacaccccctttccccacccctttcccctcggcgacttcacctttttttgccgcgataaacgccatctcagcatctgt

SEQ ID NO: 737390 - DNA, 1106 bp, Homo sapiens; identical to SEQ ID NO: 60469

SEQ ID NO: 737391 - DNA, 489 bp, Homo sapiens
aaatttcgtaccttctataattggcattcttcaaagaggtagaactttgatttttttgtagaatattaaaacaagctttcttaggttaaagaagtgatcttactacgaacagcaatggtttcatgatgtgtaattgctttatgttatctttctgctatagaatgtttcctggagaaaggtacggtttttagtaataagataaatttactttagtcctgcaaataaggtgaaatcttatgtccagtatctcacaaaggagaactgacagtgccacttttatatttaatgtcaatctcattagacaaaaatgaaatatagttcctagggtttccaatttaaaaagtgaaataataaatatattcactcaaacattttctcagtgccatatgcaagttaccatgtcccagaagctgatacagtttgaagaaggaaatatataagtactgtaagcctgtgataactaaaagcaacatactaaaaagtgaaggt

SEQ ID NO: 737392 - DNA, 1037 bp, Homo sapiens
cagcacatggcacaatgcccagcacatagtgttttgagagacagctgactggctgtctcatacaaggccctgctctgttgggcacaagggctgcttaacacattcctatgctacaaaagacagtgctcctctccaggaaccaccaaataaattcagatactaatgccaaaaagaaggcagcatcagcttgggaaaagagtgcctttaaggcactgtttctctctatgaaggcagtgtggaatgatagggatgatctaggacctagaggagagaccttaagtcttacttgcagccaaaagccttcaaacctgagctagccagaactgttacatcagaattctcacccatgacaagaagcctggagggagtccagggttgatggattgacttaaggtgtcatcaaaagcttagactttacccttctgctgcaccacccttattgccttgttgtcacaagaggactactgctgttcaagtcatcacttccacattccagaaggaagaaaggagaggtagagggccagaagtatcccctccttttatcaggagccattaactttcccagaaacttccatgtccacccagcagacctccacttacatctcactaggcagaactcctatcacttggccaccccagcagtcagggaagctggaagggtgagcattcagctatagagagtggaagcacaagcagcaagggaagaacaggtcagtaattgctgtagagtttcctgcccagcagcatctgccaaaactaggtaaattattttttaacataatagtatttttgtggattttcttacaaaagcaatgcatatatattgttactttgaaaaataaagattttaaatcttcaacaagcccattactcaggagtgatgactgttattcttggtttattagctttctagatctttgtattttttttaacgtgggtagaaccacaatatgggttgctctgaaattagcctttacacttggcattgtgaaaaatctttccaaatcattaaatgttctctgcagaattaaaaatta

SEQ ID NO: 737393 - DNA, 727 bp, Homo sapiens
gaaaactagtaaaaggacactttaagcatttattttacctttcctgtataaacaatatcactaggtaaccaagtagacaatgaaggcaagggtctttttatacaagtattcaactaactaaaaagataatttgttgaattagaatttcagcagtttacaatgaattaacagacacagcatcacatatcaacagatggtaaccatgaaaaggacaaaacaagaatacgtgtctccgatagtcttgctaaacaccagcagtcttttcaaggagatcaaacctgagtctgatcaagtctttgggtctacttaccaattggcaggaaacccagaggacagaggaacatgctgcaccatgtgtatgcagtcaacaagttcagttcaaatatatcttggatccttcagcaaataatgtataaggaacataaaaggtagagagaaaaatctatggataaaaagagacttaaaagaaatgtcaaagtttaaaaataatacaatcctaattatatttggtaaacatggatgttagagctgtttttaaaagctggaatgtcattactataaaagtcaggagtgattacctgtgtgggaagggaaggggctgtgatgggactgatgccttggtggttttagatggttggtaaagttttatttcttaacctggtagtggttctgaggctttttgacttagtataactcattaaaccacacatttattttgcatgatttt

SEQ ID NO: 737394 - DNA, 1669 bp, Homo sapiens
atcgcttgaacccaagaggtggaggctgcagtgagccaagattgagccatggcactccagcctggggacaagagagacttcgtctcaaaaaaaaaaaaaaacaaaaaaacatactttttgaaaattagtggtctgtaattgtaatcttgcagtagttgtttattgaatactagcataagtaaggattgaatgggatagtaaaggttgtctttgcccttgaggaactcaggctcattgaggggggtaccgttccttgaatgtttcctttttttctgcagcaaatacacacattcaaaacatctactgcacacaagcaaactcagagaggaccagcctggctgagaggagttgaccatccccctcaggactgacttcctttccttcaacattattatataattaaagtcctagactatatagaagtgacaggtatgctctctatgcatttattattatgggaggtgttttacttggaagcagtactttctccatgttaagtgctttgagctctgaagggccatcttaatccattctctctgacctcagaggttgtcaagacctatagaagagtttctatcaagccacattaggaaaaatgtggatgtctactttttggcttcactttttttaggatttgtatttaaggtaatttctttgagaacaggtaaaaggaaatggttcaattaaaaaggaaagggtcatttaagtaagttactaatttttgtgaacacctatatgtcttagatatgacctgatgggcagagaaggcatactagctttaaattaggattaaatcccggttttacaattaccatgtattgcatttcccaaaataaactactctgaatcttggtttccttatccataatgtagggatgataaaacttgcagtataagctaatgttttaggatgcatttggagactgcattataaggttacagagaagataacaacagaaacatttgagagcttactttgcgcctgacactgtgctaagagatttcaagtattaatatagttataatatagaggttagacagcaagcatcatgtctagcatataatatgcaatcaattaaaatttccatttgtcttcctctcaattttaatttctcatttaatttacattcagacaaatagtcatctagcttcatggttctcaaacctggctgatcattatatatagctttgagctttcaaaaaatactgatgccaagactctaccctgaaccaattaaattacagcctaaagtgcagctgagtttgagaatcatggcttaccttttcttgaactccttaagttagggaatacatactcccttcccagttttgtcaaattgattcaaatttgccaccttataaacatccagctattgcaaagagcctggtatatcgtagagtttcagtatatctatttcatagtttcccccctgtggtcttgcagaatggaattaacctgaattcaacaaaagaggtctttaaaattcataacagcaggtgtcgtctgtctttgaaattcccttgccaaaaaaggaaatgatttcttagtgatatgctttacttctgttgatcactatttgctcttttaaagtgtccaaagatgttttaatagatacttggtatttgttgttttctttaataaagtataatttacatgtagcacaggaat

SEQ ID NO: 737395 - DNA, 672 bp, Homo sapiens; identical to SEQ ID NO: 23665

SEQ ID NO: 737396 - DNA, 2799 bp, Homo sapiens
attggcgggcgggcgcgctgagggcagcgccggggacgcggcctcagcaggggcgccccgccacggggagcagcccaggcgctcgccccaggacgttgtccggcgggctgggctgggacccctctgcctccagggcgcgtcgggagcagcagggatcggtgccgcgccgtgagggtgcgcagaggctgccctcgggcccgctacccacagaccctccgcggggcagcgtctccgggccggccgcgccctggtccgccgaccgcagacgacttgtgacacggacggcgcgtcctgctgaccccagccggcgccgagggcttggaatctcgagcgggaaaagactaccatggctgcaggagtcttgcctcagaatgaacaaccatattctaccttggtgaataacagcgagtgtgttgcaaacatgaaaggaaatttagaacgtccaacaccaaagtacacaaaagtaggggagcgtttacggcatgtcattcctggacacatggcatgttccatggcgtgtggcggtagagcttgcaagtatgagaacccagcccgctggagtgagcaggagcaagccattaagggggtttactcatcctgggtcactgataatatactggccatggcccgcccatcctctgagctcctggagaagtaccacatcattgatcagttcctcagccatggcataaaaacaataatcaacctccagcgccctggtgagcatgctagctgtgggaaccctctggaacaagaaagtggcttcacataccttcctgaggctttcatggaggctggcatttacttctacaatttcggatggaaggattatggtgtagcgtctcttactactatcctagatatggtgaaggtgatgacatttgccttacaggaaggaaaagtagctatccattgtcatgcagggcttggtcgaacaggtgttttaatagcctgttacttagtttttgcaacgagaatgactgctgaccaagcaattatatttgtgcgggcaaagcgacccaattccatacaaaccagaggacagctcctctgtgtaagggaatttactcagtttctaactcctctccgcaatatattctcttgctgtgatcccaaagcacatgctgtcaccttacctcaatatctaattcgccagcgtcatctgcttcatggttatgaggcacgacttctgaaacacgtgccaaaaattatccacctagtttgcaaattgctgctggacttagcggagaacaggccagtgatgatgaaggatgtgtccgaaggacctggtctctctgctgaaatagaaaagacaatgtctgagatggtcaccatgcagctggataaagagttactgaggcatgacagtgatgtgtccaacccgcctaaccccactgcagtggcagcagattttgacaatcgaggcatgattttctccaatgagcaacagtttgaccctctttggaaaaggcggaatgttgagtgccttcaacccctgactcatctgaaaaggcggctcagctacagtgactcagatttaaagagggccgagaacctcctggagcaaggggagactccacagacagtgcctgcccagatcttggttggccacaagcccaggcagcagaagctcataagccattgttacatcccacagtctccagaaccagacttacacaaggaagccttggttcgcagcacactttctttctggagtcagtcaaagtttggaggcctggaaggactcaaagataatgggtcaccaattttccatggaaggatcattccaaaggaagcacagcagagtggagctttctctgcagatgtttcaggctcacacagccctggggagccagtttcacccagctttgcaaatgtccataaggatccaaaccctgctcaccagcaagtgtctcactgtcagtgtaaaactcatggtgttgggagccctggctctgtcaggcagaacagcaggacaccccgaagccctctggactgtggctccagtcccaaagcacagttcttggttgaacatgaaacccaggacagtaaagatctgtctgaagcagcttcacactctgcattacagtctgaattgagtgctgaggcaagaagaatactggcggccaaagccctagcaaatttaaatgaatctgtagaaaaggaggaactaaaaaggaaggtagaaatgtggcagaaagagcttaattcccgagatggagcttgggaaagaatatgtggcgagagggaccctttcatcctatgcagcttgatgtggtcttgggtggagcaactgaaggagcctgtaatcaccaaagaggatgtggacatgttggttgacaggcgagcagatgccgcagaagcactttttttattagagaaggtaaagtggctgtaggaccagttaatgactgtaactgaggcccttagtttttcacgcagaaaaaaaaaatccattataaaaaaagagaattcacacagaatcccaaatctagatctaatttaatagtttttccaagagaagagaagaaactgatacccagtgtaaacacttagaaaatacaaaaataaaaacgagaactatccatagtcctgggagaggcactgcaaacattttcaaacattttaaacttaccaatatgtatattaacttgttaaaaatcattttaacatacaagtttatatttcatttttgcttaaagttataacatagctattttcctgtgaataatgtaagcttttcataaatattgactcttaacggatatgatgctgtaacacgagactgtgccataatta

SEQ ID NO: 737397 - DNA, 4683 bp, Homo sapiens
attggcgggcgggcgcgctgagggcagcgccggggacgcggcctcagcaggggcgccccgccacggggagcagcccaggcgctcgccccaggacgttgtccggcgggctgggctgggacccctctgcctccagggcgcgtcgggagcagcagggatcggtgccgcgccgtgagggtgcgcagaggctgccctcgggcccgctacccacagaccctccgcggggcagcgtctccgggccggccgcgccctggtccgccgaccgcagacgacttgtgacacggacggcgcgtcctgctgaccccagccggcgccgagggcttggaatctcgagcgggaaaagactaccatggctgcaggagtcttgcctcagaatgaacaaccatattctaccttggtgaataacagcgagtgtgttgcaaacatgaaaggaaatttagaacgtccaacaccaaagtacacaaaagtaggggagcgtttacggcatgtcattcctggacacatggcatgttccatggcgtgtggcggtagagcttgcaagtatgagaacccagcccgctggagtgagcaggagcaagccattaagggggtttactcatcctgggtcactgataatatactggccatggcccgcccatcctctgagctcctggagaagtaccacatcattgatcagttcctcagccatggcataaaaacaataatcaacctccagcgccctggtgagcatgctagctgtgggaaccctctggaacaagaaagtggcttcacataccttcctgaggctttcatggaggctggcatttacttctacaatttcggatggaaggattatggtgtagcgtctcttactactatcctagatatggtgaaggtgatgacatttgccttacaggaaggaaaagtagctatccattgtcatgcagggcttggtcgaacaggtgttttaatagcctgttacttagtttttgcaacgagaatgactgctgaccaagcaattatatttgtgcgggcaaagcgacccaattccatacaaaccagaggacagctcctctgtgtaagggaatttactcagtttctaactcctctccgcaatatattctcttgctgtgatcccaaagcacatgctgtcaccttacctcaatatctaattcgccagcgtcatctgcttcatggttatgaggcacgacttctgaaacacgtgccaaaaattatccacctagtttgcaaattgctgctggacttagcggagaacaggccagtgatgatgaaggatgtgtccgaaggacctggtctctctgctgaaatagaaaagacaatgtctgagatggtcaccatgcagctggataaagagttactgaggcatgacagtgatgtgtccaacccgcctaaccccactgcagtggcagcagattttgacaatcgaggcatgattttctccaatgagcaacagtttgaccctctttggaaaaggcggaatgttgagtgccttcaacccctgactcatctgaaaaggcggctcagctacagtgactcagatttaaagagggccgagaacctcctggagcaaggggagactccacagacagtgcctgcccagatcttggttggccacaagcccaggcagcagaagctcataagccattgttacatcccacagtctccagaaccagacttacacaaggaagccttggttcgcagcacactttctttctggagtcagtcaaagtttggaggcctggaaggactcaaagataatgggtcaccaattttccatggaaggatcattccaaaggaagcacagcagagtggagctttctctgcagatgtttcaggctcacacagccctggggagccagtttcacccagctttgcaaatgtccataaggatccaaaccctgctcaccagcaagtgtctcactgtcagtgtaaaactcatggtgttgggagccctggctctgtcaggcagaacagcaggacaccccgaagccctctggactgtggctccagtcccaaagcacagttcttggttgaacatgaaacccaggacagtaaagatctgtctgaagcagcttcacactctgcattacagtctgaattgagtgctgaggcaagaagaatactggcggccaaagccctagcaaatttaaatgaatctgtagaaaaggaggaactaaaaaggaaggtagaaatgtggcagaaagagcttaattcccgagatggagcttgggaaagaatatgtggcgagagggaccctttcatcctatgcagcttgatgtggtcttgggtggagcaactgaaggagcctgtaatcaccaaagaggatgtggacatgttggttgacaggcgagcagatgccgcagaagcactttttttattagagaagggacagcaccagactattctctgcgtgttgcactgcatagtgaacctgcagacaattcccgtggatgtggaggaagctttccttgcccatgccattaaggcattcactaaggttaattttgattctgaaaatggaccaacagtttacaacaccctgaagaaaatatttaagcacacgctggaagaaaaaagaaaaatgacaaaagatggccctaagcctggcctctagctttcactcgtggtgaatatttcagacctaaagatccagatagtatctctgttcatatgtgaataagttgaagattgtggggctactttttctcatagcactttattttgaatgttgttagtttgtgctgagaatggtcgtccgtatttgaaccaattatttattttaaaatatatttaagctacatttttgttttgaaaaattgccataaatttggtgccactttcttttatttatttgactgagttaatattattgtattaacattttaagtatatggtgtttacattcttatttcttttgacattttggaaataatcataacttgtctttccaaaataaccattttcttgatggaactcttcctagagtttttaccaaatagctaactttagtagtaaaacctcattgtgtatccattcccccacagatgaactaagaaagtcaccaagtgtcttaagctgttttatatttgttacgaagaaggctattgctacaatatttttaaaggtttcttttttaactttgaaattttttgtttttccttttctttttataaatgtaacagagggtttcaaagcatattatttttcagagagatttagttttactttaatggagtgactgtgaagtggttgggattttttgcttgtagaaagtagacttgctctttgtcagatttccaaacaaccttgccagccttggctgtcaaaaggaggcaggagcagttctcaacacaccaagccttattcccactcccttgggttgctgctgagccaaatagcatctttacagaggaagtgggatcagaggcaggaagtgtggaaagttgctaagaagcagggcttgcctctgtcctcccggggactccacagggatattcgtgcagggcaggggctctgtgccagccctgctctctcagatgccacagccactctgcagaggtgactcttggagctggaggaagtcaaaactgggccactgtttgtactgatggtgtattagcatgagcagcgtggccctggccccacactcccaaatctgccactccatagacccacttgcctcaaggctttatatttggctgctttcttacaatgagaattaagatttttaaactgaagttgaccatacaggttgcattagccctaactggcttcatgtaagaagggtgactgcctaaactagttccttgtaagctgaaccatcaattatcagttgaagccatacttttatttaaattaatatacgtagataccagaggccaagccacagagaggataatagttcttcccaataaaggtgatattaatcagactaatttcgaactaaagaagttactgcttaaagacggaatttcaggggaagcaagactcatttagaacaaatgaaatttctccagtcctacatttctgaattgacttctagcacatcaaaaatatttcagtcattatcagtctcattaactgaaatgccaaatgctaaatgcagtgttctttcacactgttttaattttcttgggaaattgagtccagtggatgttaatggagtgggttgcccatccctgaaatgtcttattttcaagtgcctggcctgggaaagaaggggaagaaacaattgcattatatccaaagatacactataaaaatagagtttttaccaaaaaaagatgtttgttctcatctcagtaggcctcatttgggcaagtgacccacaggtcttttggcgagtttgctatttgcctgttgaaatacttgtttcaacttagagaacagttatgatgtgaccatagcatggcacaactaaaaatctaagcctgaaacctgaaaaaagagatatgacaagggaaattaatcaggctatacataagtattgtatttatttgaataaaaataaaaagagcaacccataatcctagtcctgtacttctttaccttgatgctctaggacatctgatgataaagacaaggttttgtcttagattatcctaataggcagattgagttgtcggctgattcagtgagccaagctctagttagtgcagactccttccatcagttcagcatgaccaa

SEQ ID NO: 737398 - DNA, 4628 bp, Homo sapiens
attggcgggcgggcgcgctgagggcagcgccggggacgcggcctcagcaggggcgccccgccacggggagcagcccaggcgctcgccccaggacgttgtccggcgggctgggctgggacccctctgcctccagggcgcgtcgggagcagcagggatcggtgccgcgccgtgagggtgcgcagaggctgccctcgggcccgctacccacagaccctccgcggggcagcgtctccgggccggccgcgccctggtccgccgaccgcagacgacttgtgacacggacggcgcgtcctgctgaccccagccggcgccgagggcttggaatctcgagcgggaaaagactaccatggctgcaggagtcttgcctcagaatgaacaaccatattctaccttggtgaataacagcgagtgtgttgcaaacatgaaaggaaatttagaacgtccaacaccaaagtacacaaaagtaggggagcgtttacggcatgtcattcctggacacatggcatgttccatggcgtgtggcggtagagcttgcaagtatgagaacccagcccgctggagtgagcaggagcaagccattaagggggtttactcatcctgggtcactgataatatactggccatggcccgcccatcctctgagctcctggagaagtaccacatcattgatcagttcctcagccatggcataaaaacaataatcaacctccagcgccctggtgagcatgctagctgtgggaaccctctggaacaagaaagtggcttcacataccttcctgaggctttcatggaggctggcatttacttctacaatttcggatggaaggattatggtgtagcgtctcttactactatcctagatatggtgaaggtgatgacatttgccttacaggaaggaaaagtagctatccattgtcatgcagggcttggtcgaacaggtgttttaatagcctgttacttagtttttgcaacgagaatgactgctgaccaagcaattatatttgtgcgggcaaagcgacccaattccatacaaaccagaggacagctcctctgtgtaagggaatttactcagtttctaactcctctccgcaatatattctcttgctgtgatcccaaagcacatgctgtcaccttacctcaatatctaattcgccagcgtcatctgcttcatggttatgaggcacgacttctgaaacacgtgccaaaaattatccacctagtttgcaaattgctgctggacttagcggagaacaggccagtgatgatgaaggatgtgtccgaaggacctggtctctctgctgaaatagaaaagacaatgtctgagatggtcaccatgcagctggataaagagttactgaggcatgacagtgatgtgtccaacccgcctaaccccactgcagtggcagcagattttgacaatcgaggcatgattttctccaatgagcaacagtttgaccctctttggaaaaggcggaatgttgagtgccttcaacccctgactcatctgaaaaggcggctcagctacagtgactcagatttaaagagggccgagaacctcctggagcaaggggagactccacagacagtgcctgcccagatcttggttggccacaagcccaggcagcagaagctcataagccattgttacatcccacagtctccagaaccagacttacacaaggaagccttggttcgcagcacactttctttctggagtcagtcaaagtttggaggcctggaaggactcaaagataatgggtcaccaattttccatggaaggatcattccaaaggaagcacagcagagtggagctttctctgcagatgtttcaggctcacacagccctggggagccagtttcacccagctttgcaaatgtccataaggatccaaaccctgctcaccagcaagtgtctcactgtcagtgtaaaactcatggtgttgggagccctggctctgtcaggcagaacagcaggacaccccgaagccctctggactgtggctccagtcccaaagcacagttcttggttgaacatgaaacccaggacagtaaagatctgtctgaagcagcttcacactctgcattacagtctgaattgagtgctgaggcaagaagaatactggcggccaaagccctagcaaatttaaatgaatctgtagaaaaggaggaactaaaaaggaaggtagaaatgtggcagaaagagcttaattcccgagatggagcttgggaaagaatatgtggcgagagggaccctttcatcctatgcagcttgatgtggtcttgggtggagcaactgaaggagcctgtaatcaccaaagaggatgtggacatgttggttgacaggcgagcagatgccgcagaagcactttttttattagagaagggacagcaccagactattctctgcgtgttgcactgcatagtgaacctgcagacaattcccgtggatgtggaggaagctttccttgcccatgccattaaggcattcactaaggttaattttgattctgaaaatggaccaacagtttacaacaccctgaagaaaatatttaagcacacgctggaagaaaaaagaaaaatgacaaaagatggccctaagcctggcctctagctttcactcgtggtgaatatttcagacctaaagatccagatagtatctctgttcatatgtgaataagttgaagattgtggggctactttttctcatagcactttattttgaatgttgttagtttgtgctgagaatggtcgtccgtatttgaaccaattatttattttaaaatatatttaagctacatttttgttttgaaaaattgccataaatttggtgccactttcttttatttatttgactgagttaatattattgtattaacattttaagtatatggtgtttacattcttatttcttttgacattttggaaataatcataacttgtctttccaaaataaccattttcttgatggaactcttcctagagtttttaccaaatagctaactttagtatgtcttaagctgttttatatttgttacgaagaaggctattgctacaatatttttaaaggtttcttttttaactttgaaattttttgtttttccttttctttttataaatgtaacagagggtttcaaagcatattatttttcagagagatttagttttactttaatggagtgactgtgaagtggttgggattttttgcttgtagaaagtagacttgctctttgtcagatttccaaacaaccttgccagccttggctgtcaaaaggaggcaggagcagttctcaacacaccaagccttattcccactcccttgggttgctgctgagccaaatagcatctttacagaggaagtgggatcagaggcaggaagtgtggaaagttgctaagaagcagggcttgcctctgtcctcccggggactccacagggatattcgtgcagggcaggggctctgtgccagccctgctctctcagatgccacagccactctgcagaggtgactcttggagctggaggaagtcaaaactgggccactgtttgtactgatggtgtattagcatgagcagcgtggccctggccccacactcccaaatctgccactccatagacccacttgcctcaaggctttatatttggctgctttcttacaatgagaattaagatttttaaactgaagttgaccatacaggttgcattagccctaactggcttcatgtaagaagggtgactgcctaaactagttccttgtaagctgaaccatcaattatcagttgaagccatacttttatttaaattaatatacgtagataccagaggccaagccacagagaggataatagttcttcccaataaaggtgatattaatcagactaatttcgaactaaagaagttactgcttaaagacggaatttcaggggaagcaagactcatttagaacaaatgaaatttctccagtcctacatttctgaattgacttctagcacatcaaaaatatttcagtcattatcagtctcattaactgaaatgccaaatgctaaatgcagtgttctttcacactgttttaattttcttgggaaattgagtccagtggatgttaatggagtgggttgcccatccctgaaatgtcttattttcaagtgcctggcctgggaaagaaggggaagaaacaattgcattatatccaaagatacactataaaaatagagtttttaccaaaaaaagatgtttgttctcatctcagtaggcctcatttgggcaagtgacccacaggtcttttggcgagtttgctatttgcctgttgaaatacttgtttcaacttagagaacagttatgatgtgaccatagcatggcacaactaaaaatctaagcctgaaacctgaaaaaagagatatgacaagggaaattaatcaggctatacataagtattgtatttatttgaataaaaataaaaagagcaacccataatcctagtcctgtacttctttaccttgatgctctaggacatctgatgataaagacaaggttttgtcttagattatcctaataggcagattgagttgtcggctgattcagtgagccaagctctagttagtgcagactccttccatcagttcagcatgaccaa

SEQ ID NO: 737399 - DNA, 4311 bp, Homo sapiens
attggcgggcgggcgcgctgagggcagcgccggggacgcggcctcagcaggggcgccccgccacggggagcagcccaggcgctcgccccaggacgttgtccggcgggctgggctgggacccctctgcctccagggcgcgtcgggagcagcagggatcggtgccgcgccgtgagggtgcgcagaggctgccctcgggcccgctacccacagaccctccgcggggcagcgtctccgggccggccgcgccctggtccgccgaccgcagacgacttgtgacacggacggcgcgtcctgctgaccccagccggcgccgagggcttggaatctcgagcgggaaaagactaccatggctgcaggagtcttgcctcagaatgaacaaccatattctaccttggtgaataacagcgagtgtgttgcaaacatgaaagtttacttctacaatttcggatggaaggattatggtgtagcgtctcttactactatcctagatatggtgaaggtgatgacatttgccttacaggaaggaaaagtagctatccattgtcatgcagggcttggtcgaacaggtgttttaatagcctgttacttagtttttgcaacgagaatgactgctgaccaagcaattatatttgtgcgggcaaagcgacccaattccatacaaaccagaggacagctcctctgtgtaagggaatttactcagtttctaactcctctccgcaatatattctcttgctgtgatcccaaagcacatgctgtcaccttacctcaatatctaattcgccagcgtcatctgcttcatggttatgaggcacgacttctgaaacacgtgccaaaaattatccacctagtttgcaaattgctgctggacttagcggagaacaggccagtgatgatgaaggatgtgtccgaaggacctggtctctctgctgaaatagaaaagacaatgtctgagatggtcaccatgcagctggataaagagttactgaggcatgacagtgatgtgtccaacccgcctaaccccactgcagtggcagcagattttgacaatcgaggcatgattttctccaatgagcaacagtttgaccctctttggaaaaggcggaatgttgagtgccttcaacccctgactcatctgaaaaggcggctcagctacagtgactcagatttaaagagggccgagaacctcctggagcaaggggagactccacagacagtgcctgcccagatcttggttggccacaagcccaggcagcagaagctcataagccattgttacatcccacagtctccagaaccagacttacacaaggaagccttggttcgcagcacactttctttctggagtcagtcaaagtttggaggcctggaaggactcaaagataatgggtcaccaattttccatggaaggatcattccaaaggaagcacagcagagtggagctttctctgcagatgtttcaggctcacacagccctggggagccagtttcacccagctttgcaaatgtccataaggatccaaaccctgctcaccagcaagtgtctcactgtcagtgtaaaactcatggtgttgggagccctggctctgtcaggcagaacagcaggacaccccgaagccctctggactgtggctccagtcccaaagcacagttcttggttgaacatgaaacccaggacagtaaagatctgtctgaagcagcttcacactctgcattacagtctgaattgagtgctgaggcaagaagaatactggcggccaaagccctagcaaatttaaatgaatctgtagaaaaggaggaactaaaaaggaaggtagaaatgtggcagaaagagcttaattcccgagatggagcttgggaaagaatatgtggcgagagggaccctttcatcctatgcagcttgatgtggtcttgggtggagcaactgaaggagcctgtaatcaccaaagaggatgtggacatgttggttgacaggcgagcagatgccgcagaagcactttttttattagagaagggacagcaccagactattctctgcgtgttgcactgcatagtgaacctgcagacaattcccgtggatgtggaggaagctttccttgcccatgccattaaggcattcactaaggttaattttgattctgaaaatggaccaacagtttacaacaccctgaagaaaatatttaagcacacgctggaagaaaaaagaaaaatgacaaaagatggccctaagcctggcctctagctttcactcgtggtgaatatttcagacctaaagatccagatagtatctctgttcatatgtgaataagttgaagattgtggggctactttttctcatagcactttattttgaatgttgttagtttgtgctgagaatggtcgtccgtatttgaaccaattatttattttaaaatatatttaagctacatttttgttttgaaaaattgccataaatttggtgccactttcttttatttatttgactgagttaatattattgtattaacattttaagtatatggtgtttacattcttatttcttttgacattttggaaataatcataacttgtctttccaaaataaccattttcttgatggaactcttcctagagtttttaccaaatagctaactttagtagtaaaacctcattgtgtatccattcccccacagatgaactaagaaagtcaccaagtgtcttaagctgttttatatttgttacgaagaaggctattgctacaatatttttaaaggtttcttttttaactttgaaattttttgtttttccttttctttttataaatgtaacagagggtttcaaagcatattatttttcagagagatttagttttactttaatggagtgactgtgaagtggttgggattttttgcttgtagaaagtagacttgctctttgtcagatttccaaacaaccttgccagccttggctgtcaaaaggaggcaggagcagttctcaacacaccaagccttattcccactcccttgggttgctgctgagccaaatagcatctttacagaggaagtgggatcagaggcaggaagtgtggaaagttgctaagaagcagggcttgcctctgtcctcccggggactccacagggatattcgtgcagggcaggggctctgtgccagccctgctctctcagatgccacagccactctgcagaggtgactcttggagctggaggaagtcaaaactgggccactgtttgtactgatggtgtattagcatgagcagcgtggccctggccccacactcccaaatctgccactccatagacccacttgcctcaaggctttatatttggctgctttcttacaatgagaattaagatttttaaactgaagttgaccatacaggttgcattagccctaactggcttcatgtaagaagggtgactgcctaaactagttccttgtaagctgaaccatcaattatcagttgaagccatacttttatttaaattaatatacgtagataccagaggccaagccacagagaggataatagttcttcccaataaaggtgatattaatcagactaatttcgaactaaagaagttactgcttaaagacggaatttcaggggaagcaagactcatttagaacaaatgaaatttctccagtcctacatttctgaattgacttctagcacatcaaaaatatttcagtcattatcagtctcattaactgaaatgccaaatgctaaatgcagtgttctttcacactgttttaattttcttgggaaattgagtccagtggatgttaatggagtgggttgcccatccctgaaatgtcttattttcaagtgcctggcctgggaaagaaggggaagaaacaattgcattatatccaaagatacactataaaaatagagtttttaccaaaaaaagatgtttgttctcatctcagtaggcctcatttgggcaagtgacccacaggtcttttggcgagtttgctatttgcctgttgaaatacttgtttcaacttagagaacagttatgatgtgaccatagcatggcacaactaaaaatctaagcctgaaacctgaaaaaagagatatgacaagggaaattaatcaggctatacataagtattgtatttatttgaataaaaataaaaagagcaacccataatcctagtcctgtacttctttaccttgatgctctaggacatctgatgataaagacaaggttttgtcttagattatcctaataggcagattgagttgtcggctgattcagtgagccaagctctagttagtgcagactccttccatcagttcagcatgaccaa

SEQ ID NO: 737400 - DNA, 4565 bp, Homo sapiens
ctctcagtgaaagttcctcactgagtgagtggggctgactcttcctgcctccggctcttgcctcccagtgccatgcaggtgcaggatgcaaccaggcggccctcagccgtgcgcttcctcagctcctttctccagggccgccggcactccacctcagacccagtactgcggctgcagcaggcccggcggggctctggcttgggctccggctctgccacgaagctgctgtcctcgtcctctctccaggtgatggtggctgtttcctcagtcagccatgcagagggaaacccaactttccccgaaagaaaaagaaatttagaacgtccaacaccaaagtacacaaaagtaggggagcgtttacggcatgtcattcctggacacatggcatgttccatggcgtgtggcggtagagcttgcaagtatgagaacccagcccgctggagtgagcaggagcaagccattaagggggtttactcatcctgggtcactgataatatactggccatggcccgcccatcctctgagctcctggagaagtaccacatcattgatcagttcctcagccatggcataaaaacaataatcaacctccagcgccctggtgagcatgctagctgtgggaaccctctggaacaagaaagtggcttcacataccttcctgaggctttcatggaggctggcatttacttctacaatttcggatggaaggattatggtgtagcgtctcttactactatcctagatatggtgaaggtgatgacatttgccttacaggaaggaaaagtagctatccattgtcatgcagggcttggtcgaacaggtgttttaatagcctgttacttagtttttgcaacgagaatgactgctgaccaagcaattatatttgtgcgggcaaagcgacccaattccatacaaaccagaggacagctcctctgtgtaagggaatttactcagtttctaactcctctccgcaatatattctcttgctgtgatcccaaagcacatgctgtcaccttacctcaatatctaattcgccagcgtcatctgcttcatggttatgaggcacgacttctgaaacacgtgccaaaaattatccacctagtttgcaaattgctgctggacttagcggagaacaggccagtgatgatgaaggatgtgtccgaaggacctggtctctctgctgaaatagaaaagacaatgtctgagatggtcaccatgcagctggataaagagttactgaggcatgacagtgatgtgtccaacccgcctaaccccactgcagtggcagcagattttgacaatcgaggcatgattttctccaatgagcaacagtttgaccctctttggaaaaggcggaatgttgagtgccttcaacccctgactcatctgaaaaggcggctcagctacagtgactcagatttaaagagggccgagaacctcctggagcaaggggagactccacagacagtgcctgcccagatcttggttggccacaagcccaggcagcagaagctcataagccattgttacatcccacagtctccagaaccagacttacacaaggaagccttggttcgcagcacactttctttctggagtcagtcaaagtttggaggcctggaaggactcaaagataatgggtcaccaattttccatggaaggatcattccaaaggaagcacagcagagtggagctttctctgcagatgtttcaggctcacacagccctggggagccagtttcacccagctttgcaaatgtccataaggatccaaaccctgctcaccagcaagtgtctcactgtcagtgtaaaactcatggtgttgggagccctggctctgtcaggcagaacagcaggacaccccgaagccctctggactgtggctccagtcccaaagcacagttcttggttgaacatgaaacccaggacagtaaagatctgtctgaagcagcttcacactctgcattacagtctgaattgagtgctgaggcaagaagaatactggcggccaaagccctagcaaatttaaatgaatctgtagaaaaggaggaactaaaaaggaaggtagaaatgtggcagaaagagcttaattcccgagatggagcttgggaaagaatatgtggcgagagggaccctttcatcctatgcagcttgatgtggtcttgggtggagcaactgaaggagcctgtaatcaccaaagaggatgtggacatgttggttgacaggcgagcagatgccgcagaagcactttttttattagagaagggacagcaccagactattctctgcgtgttgcactgcatagtgaacctgcagacaattcccgtggatgtggaggaagctttccttgcccatgccattaaggcattcactaaggttaattttgattctgaaaatggaccaacagtttacaacaccctgaagaaaatatttaagcacacgctggaagaaaaaagaaaaatgacaaaagatggccctaagcctggcctctagctttcactcgtggtgaatatttcagacctaaagatccagatagtatctctgttcatatgtgaataagttgaagattgtggggctactttttctcatagcactttattttgaatgttgttagtttgtgctgagaatggtcgtccgtatttgaaccaattatttattttaaaatatatttaagctacatttttgttttgaaaaattgccataaatttggtgccactttcttttatttatttgactgagttaatattattgtattaacattttaagtatatggtgtttacattcttatttcttttgacattttggaaataatcataacttgtctttccaaaataaccattttcttgatggaactcttcctagagtttttaccaaatagctaactttagtagtaaaacctcattgtgtatccattcccccacagatgaactaagaaagtcaccaagtgtcttaagctgttttatatttgttacgaagaaggctattgctacaatatttttaaaggtttcttttttaactttgaaattttttgtttttccttttctttttataaatgtaacagagggtttcaaagcatattatttttcagagagatttagttttactttaatggagtgactgtgaagtggttgggattttttgcttgtagaaagtagacttgctctttgtcagatttccaaacaaccttgccagccttggctgtcaaaaggaggcaggagcagttctcaacacaccaagccttattcccactcccttgggttgctgctgagccaaatagcatctttacagaggaagtgggatcagaggcaggaagtgtggaaagttgctaagaagcagggcttgcctctgtcctcccggggactccacagggatattcgtgcagggcaggggctctgtgccagccctgctctctcagatgccacagccactctgcagaggtgactcttggagctggaggaagtcaaaactgggccactgtttgtactgatggtgtattagcatgagcagcgtggccctggccccacactcccaaatctgccactccatagacccacttgcctcaaggctttatatttggctgctttcttacaatgagaattaagatttttaaactgaagttgaccatacaggttgcattagccctaactggcttcatgtaagaagggtgactgcctaaactagttccttgtaagctgaaccatcaattatcagttgaagccatacttttatttaaattaatatacgtagataccagaggccaagccacagagaggataatagttcttcccaataaaggtgatattaatcagactaatttcgaactaaagaagttactgcttaaagacggaatttcaggggaagcaagactcatttagaacaaatgaaatttctccagtcctacatttctgaattgacttctagcacatcaaaaatatttcagtcattatcagtctcattaactgaaatgccaaatgctaaatgcagtgttctttcacactgttttaattttcttgggaaattgagtccagtggatgttaatggagtgggttgcccatccctgaaatgtcttattttcaagtgcctggcctgggaaagaaggggaagaaacaattgcattatatccaaagatacactataaaaatagagtttttaccaaaaaaagatgtttgttctcatctcagtaggcctcatttgggcaagtgacccacaggtcttttggcgagtttgctatttgcctgttgaaatacttgtttcaacttagagaacagttatgatgtgaccatagcatggcacaactaaaaatctaagcctgaaacctgaaaaaagagatatgacaagggaaattaatcaggctatacataagtattgtatttatttgaataaaaataaaaagagcaacccataatcctagtcctgtacttctttaccttgatgctctaggacatctgatgataaagacaaggttttgtcttagattatcctaataggcagattgagttgtcggctgattcagtgagccaagctctagttagtgcagactccttccatcagttcagcatgaccaa

SEQ ID NO: 737401 - DNA, 2984 bp, Homo sapiens
gcagacttcgaagctcaaagcttttccttttccttagaccccaggttaatgtataaatgttcccttatttctactttctcatctaccatctactttattgcaaaaaaatagttctgttttgttcaccagaaggctgaaaaggaagactcttgtgaactgtttctgtggtttctgaataaagtagagaacttggattaactaagccctttccctgtgctataagctttaaccgaccttatctcagtcaatcagcccaacagcttgtgaagcaggggatgagtttcatagagagaaactggggcttacagaattcagtgtcttagtccagtgtccagcctggaagtggagaggctgggaggggtcccagttctgcactctggagcctgagtctttcactcttgtgggcagcgcaagaatcatgcagtgtcaaatggtgcacctccctctcctctccctgtctctgtctctgtctgtctgtctctttctcttcctttttagaaagagcttaattcccgagatggagcttgggaaagaatatgtggcgagagggaccctttcatcctatgcagcttgatgtggtcttgggtggagcaactgaaggagcctgtaatcaccaaagaggatgtggacatgttggttgacaggcgagcagatgccgcagaagcactttttttattagagaagggacagcaccagactattctctgcgtgttgcactgcatagtgaacctgcagacaattcccgtggatgtggaggaagctttccttgcccatgccattaaggcattcactaaggttaattttgattctgaaaatggaccaacagtttacaacaccctgaagaaaatatttaagcacacgctggaagaaaaaagaaaaatgacaaaagatggccctaagcctggcctctagctttcactcgtggtgaatatttcagacctaaagatccagatagtatctctgttcatatgtgaataagttgaagattgtggggctactttttctcatagcactttattttgaatgttgttagtttgtgctgagaatggtcgtccgtatttgaaccaattatttattttaaaatatatttaagctacatttttgttttgaaaaattgccataaatttggtgccactttcttttatttatttgactgagttaatattattgtattaacattttaagtatatggtgtttacattcttatttcttttgacattttggaaataatcataacttgtctttccaaaataaccattttcttgatggaactcttcctagagtttttaccaaatagctaactttagtagtaaaacctcattgtgtatccattcccccacagatgaactaagaaagtcaccaagtgtcttaagctgttttatatttgttacgaagaaggctattgctacaatatttttaaaggtttcttttttaactttgaaattttttgtttttccttttctttttataaatgtaacagagggtttcaaagcatattatttttcagagagatttagttttactttaatggagtgactgtgaagtggttgggattttttgcttgtagaaagtagacttgctctttgtcagatttccaaacaaccttgccagccttggctgtcaaaaggaggcaggagcagttctcaacacaccaagccttattcccactcccttgggttgctgctgagccaaatagcatctttacagaggaagtgggatcagaggcaggaagtgtggaaagttgctaagaagcagggcttgcctctgtcctcccggggactccacagggatattcgtgcagggcaggggctctgtgccagccctgctctctcagatgccacagccactctgcagaggtgactcttggagctggaggaagtcaaaactgggccactgtttgtactgatggtgtattagcatgagcagcgtggccctggccccacactcccaaatctgccactccatagacccacttgcctcaaggctttatatttggctgctttcttacaatgagaattaagatttttaaactgaagttgaccatacaggttgcattagccctaactggcttcatgtaagaagggtgactgcctaaactagttccttgtaagctgaaccatcaattatcagttgaagccatacttttatttaaattaatatacgtagataccagaggccaagccacagagaggataatagttcttcccaataaaggtgatattaatcagactaatttcgaactaaagaagttactgcttaaagacggaatttcaggggaagcaagactcatttagaacaaatgaaatttctccagtcctacatttctgaattgacttctagcacatcaaaaatatttcagtcattatcagtctcattaactgaaatgccaaatgctaaatgcagtgttctttcacactgttttaattttcttgggaaattgagtccagtggatgttaatggagtgggttgcccatccctgaaatgtcttattttcaagtgcctggcctgggaaagaaggggaagaaacaattgcattatatccaaagatacactataaaaatagagtttttaccaaaaaaagatgtttgttctcatctcagtaggcctcatttgggcaagtgacccacaggtcttttggcgagtttgctatttgcctgttgaaatacttgtttcaacttagagaacagttatgatgtgaccatagcatggcacaactaaaaatctaagcctgaaacctgaaaaaagagatatgacaagggaaattaatcaggctatacataagtattgtatttatttgaataaaaataaaaagagcaacccataatcctagtcctgtacttctttaccttgatgctctaggacatctgatgataaagacaaggttttgtcttagattatcctaataggcagattgagttgtcggctgattcagtgagccaagctctagttagtgcagactccttccatcagttcagcatgaccaa

SEQ ID NO: 737402 - DNA, 2262 bp, Homo sapiens
cctgtccttacccacttttccaaacggggaagactcaggtatcaggaattacccattgcacattttgcgggggggggggctaatgtagacatgacaccaagtgcttttcattttaattctctaagcagtagatgagatctttcccttgggagaaatcacagagatggagttttccatttctgcttatacgaaatatgactgaaaatgaacaaagccacctttttaaccaaatacactagaacatatgcactcaagagttagcataattggagttattttcttgatgttgcatgtgccaagaacacttagggttcccctttgggattacctttgaagccatgcaaggcaagaggcctcacaactttatagtcagaccttgtgttttatccaacccctcctcctgcccaccaagatcatcctgagctgcttcacccattttatttagcagacttattttctaatgctctttagctgttaaaaaaaaaaaatcattcctcaaaaaatagatctacccttaaaggacaaagatttaccaacactgaagacccttacaagttgacagtttctaaagagggttctaggaatgttctgtgtaaggtcagcttcactggaataaacatacatcttcccaaggtgactacttcaaaggcaacactacccattcgggtgcagaaattaccgtacttactctgccataaatgtaaaatgtgtataaagttaagctattgcattttttcataacacatttaaatagaaattggcttttaaagtattgtagttaaaaccagatctcaccaagtaatagttgtgcaattgacaaatgtttggtgccatgtaatggagatgtcacactacacagttgtagtttaaatgcagtccaacataaggtgcatgccactgaactgtaaccctagtaatgtgtcttgtacagttgaaaaataatacttcacctttatataggttaagatatgtaccttatctttaccactcagggtggctttaaaagacggacagctttaggtttgttctcactggaactggttacactttctgtgcaaacttaaccaagtgatgatcgtctggaagctgcattccctcatttccactgtttggtgtgaatctagtctccccactttatctaaaaggaggctagcagggccccagcctgagcagagcagctagagagtgcttccagattcctttgccaaaggaggcccattttccagctgtgagtgacatctgtagtcattggcttcattgcctggcactagccctgtctagaagtggagaaagctggatcacagctggaccacaaccagccccaatccaggatttcccataccatgctggctgtgggctctgtgagcctcagccaggtggccaggctatacttgtcacagctggccacaggcctgctgaaggaacatggggtgtagagccagagcctggttctggttctccgcttgaacagctgacctcgtgcaatcacaggaactctgcgtctccatgtttcactcagatagagaaaatgcctcctttgtttacctctttgaagctgaagtaagtgagactggtgcatgtaaattaatggtagtagagcacctcccacatctgattttataacagtttcccatcactccttaaagaaaaaggccaggccgggcgtggtggttcacgcctgtaatctcagcacttcgggaggccgaggcgggtggatcatgaggtcaggagattgagaccattctggctaacacagtgaacaaaaaattagtcgggcatggtggcgggcgcctgtagtcccagctacttgggaggctgaggcaggagaattgcttgaaccttggaggtggaggctgcagtgagccaagattatgccactgcactccagcctgggtgacagagcgagactccgtctcaaaaaaaaaaaaaaaaagccacacattcttggcattagcacaccaaacagtggtagggtaccctgagaaaggaatgcagcttctcagaggcctcacttccagccagggaaacttaagacctgaaaggaataaggctctttgtgtattcagacagccttctggatgtatcgtatataacctgaaactctccactcttgtataccaactaacaaagtcttccttatgtaacatagattgcagtgtctgtatatggtcttcccattatctggtagtagcatcttgaaactggtcaaaacttgaatgccaatagctcagtcactcagaatatacgattctgcacttggga

SEQ ID NO: 737403 - DNA, 520 bp, Homo sapiens
gtctacactcagagtctgcagtctaccaactttaatgaaatgtaattttatgcataacataaagtaatattaaaaattacttgtagaaatagttaattgggctaattagatattctttttttttttttctttgagatggagtccagcctgggtgacagagcgagactccgtctcaaaaaaaaaaaaaaaaagccacacattcttggcattagcacaccaaacagtggtagggtaccctgagaaaggaatgcagcttctcagaggcctcacttccagccagggaaacttaagacctgaaaggaataaggctctttgtgtattcagacagccttctggatgtatcgtatataacctgaaactctccactcttgtataccaactaacaaagtcttccttatgtaacatagattgcagtgtctgtatatggtcttcccattatctggtagtagcatcttgaaactggtcaaaacttgaatgccaatagctcagtcactcagaatatacgattctgcacttggga

SEQ ID NO: 737404 - DNA, 1607 bp, Homo sapiens
accgcgcccgcgccacgccctcaccacctcccctagatccagaggggaccggtccggaatttttccaatgagggcatcatcattaactgagcaccagctgtgctaagcctgccacgggcgtatccttgcagcctcacaacagtgggaggtctgtatcctgaatgtcctcattttacagatgaggacattgaggagaagagacttacccaggctcacacagcagctcagcctgttccaggcgctggtcagtgcgtgttctttgccaccagcctgtcactccagtggcagctccagaaacggaggctgttgcttttatccctaaactgcatccacagagaagccccaagaaggaggttggggccagctcataaaaagcctgaatgccaagccaaggagtggatgcctccagtcatatttagaacaaagtcaagtataaatttacagagaaaaaattctaagacagttggatgttgtcctgttggtgaggaagggaaaggtttttcttgtagggaactggaaccagcccacaactgcacgcttgtgagctgtcatggaaacctgatccccaacagcttttgaggttgtttgtttgtttgtttgtttacctgtcttgggctttgttgcttttggcaaaaggtacttcaaacaagggagggcctggactgagggggaccaggtcttcttgctgacctcgtctacaaaggcaaaggaaggcaaaggaagctgtctcgggtgtttctgaacaacgtgactcatgaggggctttggctacctcttgcgttccccctagagatgtccaggccttacatttaatcggctttctctgcggtggggtagagaatggagctcccgccttgcgggcagtgctaaaggtggagctgggggattttcctgggaatgatttgagggctcttgaaagcccatgtgttccaaagcgtctttaactctgggatagcattggaagccgctgtcatgacaggacatggcactggatggctggcagagagccctggctgggagttagggagccctgggttggaatccagccccacctcttttatgccacaggtttggtcaagttctctcccgctcagggtagggctgtgaactccctcttacagctaagaacatgcagcttagtgaggacaagacccttctagagctttacccctaatccccccccaggagccccgaggccggcattattcctccccattacaggtgatgagcctcaaattcagagagcttaagcaacctgctcagggtcacgtctccaacaggcagtagagtcaaggtataaaccaggtctgtttttgtaccagagtcccagactaactgttggtaggaatcttgtaaccagtcatgttttcttccttgttttggccgctgggaagctcaaagtcaaattcgagacccttttttttccaattgtgctgagtctcctactagactcgcttcattctagctttctgcttttacctttaccctaatctttttatttttatgctattgtactttatttttgtaagttgctgagatatctgttttgcaacaagatgggctatatctaaataaagacatgatcaaaggtttgatttaaaaaaaag

SEQ ID NO: 737405 - DNA, 1913 bp, Homo sapiens
gggtaggtacgaggctgggtggtgctggaatgcaatggcgcgattcagctcactgcaatctccgcctcccgggttcaagtgattctcctgccttagcctcctgaaaagctgggattacagggccctgccaccaagcccagctaattgtatttttagtagagacaggatttcaccatgttggccaggccagtctcaaactcctgacctcaggtgatccacctgcctcagcctcccagactgttgggattacaggcatgagccaccacgcctggccagtttcttcattttacatatggtcacattggcgcctagaacagttaggtcgctcgtcacataggcagttaagtggagaaccaggtttcaaaatcaggtaagaaaaccatcatcattaactgagcaccagctgtgctaagcctgccacgggcgtatccttgcagcctcacaacagtgggaggtctgtatcctgaatgtcctcattttacagatgaggacattgaggagaagagacttacccaggctcacacagcagctcagcctgttccaggcgctggtcagtgcgtgttctttgccaccagcctgtcactccagtggcagctccagaaacggaggctgttgcttttatccctaaactgcatccacagagaagccccaagaaggaggttggggccagctcataaaaagcctgaatgccaagccaaggagtggatgcctccagtcatatttagaacaaagtcaagtataaatttacagagaaaaaattctaagacagttggatgttgtcctgttggtgaggaagggaaaggtttttcttgtagggaactggaaccagcccacaactgcacgcttgtgagctgtcatggaaacctgatccccaacagcttttgaggttgtttgtttgtttgtttgtttacctgtcttgggctttgttgcttttggcaaaaggtacttcaaacaagggagggcctggactgagggggaccaggtcttcttgctgacctcgtctacaaaggcaaaggaaggcaaaggaagctgtctcgggtgtttctgaacaacgtgactcatgaggggctttggctacctcttgcgttccccctagagatgtccaggccttacatttaatcggctttctctgcggtggggtagagaatggagctcccgccttgcgggcagtgctaaaggtggagctgggggattttcctgggaatgatttgagggctcttgaaagcccatgtgttccaaagcgtctttaactctgggatagcattggaagccgctgtcatgacaggacatggcactggatggctggcagagagccctggctgggagttagggagccctgggttggaatccagccccacctcttttatgccacaggtttggtcaagttctctcccgctcagggtagggctgtgaactccctcttacagctaagaacatgcagcttagtgaggacaagacccttctagagctttacccctaatccccccccaggagccccgaggccggcattattcctccccattacaggtgatgagcctcaaattcagagagcttaagcaacctgctcagggtcacgtctccaacaggcagtagagtcaaggtataaaccaggtctgtttttgtaccagagtcccagactaactgttggtaggaatcttgtaaccagtcatgttttcttccttgttttggccgctgggaagctcaaagtcaaattcgagacccttttttttccaattgtgctgagtctcctactagactcgcttcattctagctttctgcttttacctttaccctaatctttttatttttatgctattgtactttatttttgtaagttgctgagatatctgttttgcaacaagatgggctatatctaaataaagacatgatcaaaggtttgatttaaaaaaaag

SEQ ID NO: 737406 - DNA, 2473 bp, Homo sapiens
gcttctctttaaaattgacccaaggcatgagccactgcgcctggccagcaaatgctttttgtgcagaatacacttctttcaggcattgtcaggtgctgttttgtttaagctctaactcacccctggaatacaggggaatgatgacaaccagcccagccaggcctgactcatcatggtcacatccagcccccacccccggccaactaaccactgcaggctcctcttccagactcaccagggggcctcgaggccccggcatctcccttggccctgggtgtgggttttacaagactgtgtctttcatgacatcatagcccaaccatgtgagaagaaggagaaggcccccctttcttcattaatctgaaaaaaaggaaagtgagaataggctgatttttaaaagttaaggggcaagcagcattgcattctgggggaacgatcctggccacagccgccaaacaaacattcactaggcctcttctgttttcatacccttgtaagtgggttatgtggtgggtatggtcagttttttcttttttcttttcttttcttttttttgagacagagtttcgcttttgttgcccgggctggaatgcaatggcgcgattcagctcactgcaatctccgcctcccgggttcaagtgattctcctgccttagcctcctgaaaagctgggattacagggccctgccaccaagcccagctaattgtatttttagtagagacaggatttcaccatgttggccaggccagtctcaaactcctgacctcaggtgatccacctgcctcagcctcccagactgttgggattacaggcatgagccaccacgcctggccagtttcttcattttacatatggtcacattggcgcctagaacagttaggtcgctcgtcacataggcagttaagtggagaaccaggtttcaaaatcaggtaagaaaaccatcatcattaactgagcaccagctgtgctaagcctgccacgggcgtatccttgcagcctcacaacagtgggaggtctgtatcctgaatgtcctcattttacagatgaggacattgaggagaagagacttacccaggctcacacagcagctcagcctgttccaggcgctggtcagtgcgtgttctttgccaccagcctgtcactccagtggcagctccagaaacggaggctgttgcttttatccctaaactgcatccacagagaagccccaagaaggaggttggggccagctcataaaaagcctgaatgccaagccaaggagtggatgcctccagtcatatttagaacaaagtcaagtataaatttacagagaaaaaattctaagacagttggatgttgtcctgttggtgaggaagggaaaggtttttcttgtagggaactggaaccagcccacaactgcacgcttgtgagctgtcatggaaacctgatccccaacagcttttgaggttgtttgtttgtttgtttgtttacctgtcttgggctttgttgcttttggcaaaaggtacttcaaacaagggagggcctggactgagggggaccaggtcttcttgctgacctcgtctacaaaggcaaaggaaggcaaaggaagctgtctcgggtgtttctgaacaacgtgactcatgaggggctttggctacctcttgcgttccccctagagatgtccaggccttacatttaatcggctttctctgcggtggggtagagaatggagctcccgccttgcgggcagtgctaaaggtggagctgggggattttcctgggaatgatttgagggctcttgaaagcccatgtgttccaaagcgtctttaactctgggatagcattggaagccgctgtcatgacaggacatggcactggatggctggcagagagccctggctgggagttagggagccctgggttggaatccagccccacctcttttatgccacaggtttggtcaagttctctcccgctcagggtagggctgtgaactccctcttacagctaagaacatgcagcttagtgaggacaagacccttctagagctttacccctaatccccccccaggagccccgaggccggcattattcctccccattacaggtgatgagcctcaaattcagagagcttaagcaacctgctcagggtcacgtctccaacaggcagtagagtcaaggtataaaccaggtctgtttttgtaccagagtcccagactaactgttggtaggaatcttgtaaccagtcatgttttcttccttgttttggccgctgggaagctcaaagtcaaattcgagacccttttttttccaattgtgctgagtctcctactagactcgcttcattctagctttctgcttttacctttaccctaatctttttatttttatgctattgtactttatttttgtaagttgctgagatatctgttttgcaacaagatgggctatatctaaataaagacatgatcaaaggtttgatttaaaaaaaag

SEQ ID NO: 737407 - DNA, 3281 bp, Homo sapiens
tgtgtgtgtccaggagtgtgtgtctaggtgtgtgtgtctaggtgtgctcgttgggaactgcttcctggtgtgcggcatcctgtatgccgtggacacgtacaaccagcaggaaggccaggtcgcctacgctttcgacacgcacacgggcaccgacgcacgcccccagctgccgttcctcaacgagcacgcctacaccacccagatcgactacaaccccaaggagcgggtgctgtacgcctgggacaatggccaccagctcacctacaccctccacttcgtggtctgagtggagacctgtgctcccgggagaggggcagcagtgcgggaggggctttgcacagcagctcctgcaactgacccagtccgcaaatatttattgggggccagcccagggctgggactgggcatgaggtggtcaccaggattgagcttcctcagcacccagtgggtaatacttgcttccacttgcagagcaccgtgccaagcacttcccacacacttacccgtttgattctcctagcacctcccttggaggtagagatcatgaacccatttaacagacgaggagacaggctcagagaggcaccgtcccttgcctaacacctcagttgtgatcaggcaggctgtgctctcaggacagccccattttagggatgaggagacttcaccacgccctccctagtagctgggactacagcacccaccaccacacccagctaatttttgtatttttagtagagacaggggtttcaccacgttggccaggctggtctcgaactcctgaccttaggtgatccgcccgcctcagcctcccaaagtgttgggattacaggcatgagccactgcgcctggccagcaaatgctttttgtgcagaatacacttctttcaggcattgtcaggtgctgttttgtttaagctctaactcacccctggaatacaggggaatgatgacaaccagcccagccaggcctgactcatcatggtcacatccagcccccacccccggccaactaaccactgcaggctcctcttccagactcaccagggggcctcgaggccccggcatctcccttggccctgggtgtgggttttacaagactgtgtctttcatgacatcatagcccaaccatgtgagaagaaggagaaggcccccctttcttcattaatctgaaaaaaaggaaagtgagaataggctgatttttaaaagttaaggggcaagcagcattgcattctgggggaacgatcctggccacagccgccaaacaaacattcactaggcctcttctgttttcatacccttgtaagtgggttatgtggtgggtatggtcagttttttcttttttcttttcttttcttttttttgagacagagtttcgcttttgttgcccgggctggaatgcaatggcgcgattcagctcactgcaatctccgcctcccgggttcaagtgattctcctgccttagcctcctgaaaagctgggattacagggccctgccaccaagcccagctaattgtatttttagtagagacaggatttcaccatgttggccaggccagtctcaaactcctgacctcaggtgatccacctgcctcagcctcccagactgttgggattacaggcatgagccaccacgcctggccagtttcttcattttacatatggtcacattggcgcctagaacagttaggtcgctcgtcacataggcagttaagtggagaaccaggtttcaaaatcaggtaagaaaaccatcatcattaactgagcaccagctgtgctaagcctgccacgggcgtatccttgcagcctcacaacagtgggaggtctgtatcctgaatgtcctcattttacagatgaggacattgaggagaagagacttacccaggctcacacagcagctcagcctgttccaggcgctggtcagtgcgtgttctttgccaccagcctgtcactccagtggcagctccagaaacggaggctgttgcttttatccctaaactgcatccacagagaagccccaagaaggaggttggggccagctcataaaaagcctgaatgccaagccaaggagtggatgcctccagtcatatttagaacaaagtcaagtataaatttacagagaaaaaattctaagacagttggatgttgtcctgttggtgaggaagggaaaggtttttcttgtagggaactggaaccagcccacaactgcacgcttgtgagctgtcatggaaacctgatccccaacagcttttgaggttgtttgtttgtttgtttgtttacctgtcttgggctttgttgcttttggcaaaaggtacttcaaacaagggagggcctggactgagggggaccaggtcttcttgctgacctcgtctacaaaggcaaaggaaggcaaaggaagctgtctcgggtgtttctgaacaacgtgactcatgaggggctttggctacctcttgcgttccccctagagatgtccaggccttacatttaatcggctttctctgcggtggggtagagaatggagctcccgccttgcgggcagtgctaaaggtggagctgggggattttcctgggaatgatttgagggctcttgaaagcccatgtgttccaaagcgtctttaactctgggatagcattggaagccgctgtcatgacaggacatggcactggatggctggcagagagccctggctgggagttagggagccctgggttggaatccagccccacctcttttatgccacaggtttggtcaagttctctcccgctcagggtagggctgtgaactccctcttacagctaagaacatgcagcttagtgaggacaagacccttctagagctttacccctaatccccccccaggagccccgaggccggcattattcctccccattacaggtgatgagcctcaaattcagagagcttaagcaacctgctcagggtcacgtctccaacaggcagtagagtcaaggtataaaccaggtctgtttttgtaccagagtcccagactaactgttggtaggaatcttgtaaccagtcatgttttcttccttgttttggccgctgggaagctcaaagtcaaattcgagacccttttttttccaattgtgctgagtctcctactagactcgcttcattctagctttctgcttttacctttaccctaatctttttatttttatgctattgtactttatttttgtaagttgctgagatatctgttttgcaacaagatgggctatatctaaataaagacatgatcaaaggtttgatttaaaaaaaag

SEQ ID NO: 737408 - DNA, 736 bp, Homo sapiens
gtgagtgagcctcacaggagtcagcacactgtagcctgtgcccaaatctagcccacagcctgtttctgtgaagccctcaagttaagaaatgctttttatagctgagcatggtagctcacacctgtaatcccaaagtgctgggattacaggcatgagccaccgcaccaagcccaggtagtattttcaacaaattcttcttaaaatgtcacctagaatgccatcatcaaatccagcaactatttttatttctttatttcctgtgtccaatcgttggctctgttttgatgtcagcatttatagttttgctctgtgtctcatggtagaaatcttcctcgttaagtcattgatcccgtccttccgaagggatcttggctctctgtggtgaaaatccttcaaaccctgtcctgctttggtccaaggtcattccacttctaggaatctttcctgaaggatctaccagcaatgggaacaacagctgcagcttaagtggttgcatcatggcatcatttctaatgtcagaaaactggaaataacacgaagggctgacatggggaggactggtcagataaattcagggcacagctgtccaccggcctggcagaaccttgaaatcacatcattaaaagcctatttaatgatgagagaaattgctcaacggaggctaaaaacaggatacataaaactgtatactcacagttttttaaagtatgtctgcatgactgtacatgcaaagaaa

SEQ ID NO: 737409 - DNA, 4516 bp, Homo sapiens
aatttttcgaatatcgtcgaccacgcgtccgttatcctagaggttgggtgaccaaccctgtcccagtttgcctgggacttgagggtttttccaggatgcagcactttcagtgctaaaactaggaatgttccaggcactctgggatgagttggtcaccttgcctaggtgcctaagaacctctcccctgcccacgtactaagaccaatgagtaagagagacaaggctgggaaggacacagctagaggaaaaggcaaggacatcagcaagtatggcagtgtgcagaaaagctttgcagacagaggcctcccaaaacctcccaaggagaagctgcttcaggtggagaagctgagaaaggagagcggcaagggcagtttcctccagcccacagccaagccccgcgccctggcccagcagcaggctgtgatccggggcttcacctactacaaggcaggcaagcaggaggtgaccgaggcggtggcagacaacaccctccagggcacttcctggctggagcaactgccgcccaaggtggagggcaggtccaactccgcagagcccaactccgcagagcaggatgaggctgagcccaggtcctccgagcgagtggacctggcttctggcacccccacttcaatccctgccaccaccaccaccgccaccaccaccccaacccccaccaccagtctcctgcccaccgagccaccttcaggtccagaagtctccagccaaggcagagaggcgagctgtgagggcaccctccgggctgtggacccccctgtgaggcaccacagctatgggcgccacgagggagcctggatgaaggaccctgcagctcgagacgacaggatctatgtcaccaactactactatggaaacagcctggtggagttccgcaacctggaaaacttcaagcaaggccgctggagtaacatgtacaagctaccctacaactggatcggcacaggccacgtggtgtaccagggcgccttctactacaaccgcgccttcaccaagaacatcatcaagtacgacctacggcagcgcttcgtggcctcctgggcgctgctgcccgacgtggtatatgaggacaccacaccttggaagtggcgcggacactcggacattgactttgccgtggacgagagcggcctgtgggtcatctaccccgccgtggacgaccgcgatgaggcccagcccgaggtgatcgtcctgagtcgcttggaccccggcgatctctccgtgcaccgggagaccacgtggaagacacggctgcggcggaactcctacgggaactgcttcctggtgtgcggcatcctgtatgccgtggacacgtacaaccagcaggaaggccaggtcgcctacgctttcgacacgcacacgggcaccgacgcacgcccccagctgccgttcctcaacgagcacgcctacaccacccagatcgactacaaccccaaggagcgggtgctgtacgcctgggacaatggccaccagctcacctacaccctccacttcgtggtctgagtggagacctgtgctcccgggagaggggcagcagtgcgggaggggctttgcacagcagctcctgcaactgacccagtccgcaaatatttattgggggccagcccagggctgggactgggcatgaggtggtcaccaggattgagcttcctcagcacccagtgggtaatacttgcttccacttgcagagcaccgtgccaagcacttcccacacacttacccgtttgattctcctagcacctcccttggaggtagagatcatgaacccatttaacagacgaggagacaggctcagagaggcaccgtcccttgcctaacacctcagttgtgatcaggcaggctgtgctctcaggacagccccattttagggatgaggagacttcaccacgccctccctagtagctgggactacagcacccaccaccacacccagctaatttttgtatttttagtagagacaggggtttcaccacgttggccaggctggtctcgaactcctgaccttaggtgatccgcccgcctcagcctcccaaagtgttgggattacaggcatgagccactgcgcctggccagcaaatgctttttgtgcagaatacacttctttcaggcattgtcaggtgctgttttgtttaagctctaactcacccctggaatacaggggaatgatgacaaccagcccagccaggcctgactcatcatggtcacatccagcccccacccccggccaactaaccactgcaggctcctcttccagactcaccagggggcctcgaggccccggcatctcccttggccctgggtgtgggttttacaagactgtgtctttcatgacatcatagcccaaccatgtgagaagaaggagaaggcccccctttcttcattaatctgaaaaaaaggaaagtgagaataggctgatttttaaaagttaaggggcaagcagcattgcattctgggggaacgatcctggccacagccgccaaacaaacattcactaggcctcttctgttttcatacccttgtaagtgggttatgtggtgggtatggtcagttttttcttttttcttttcttttcttttttttgagacagagtttcgcttttgttgcccgggctggaatgcaatggcgcgattcagctcactgcaatctccgcctcccgggttcaagtgattctcctgccttagcctcctgaaaagctgggattacagggccctgccaccaagcccagctaattgtatttttagtagagacaggatttcaccatgttggccaggccagtctcaaactcctgacctcaggtgatccacctgcctcagcctcccagactgttgggattacaggcatgagccaccacgcctggccagtttcttcattttacatatggtcacattggcgcctagaacagttaggtcgctcgtcacataggcagttaagtggagaaccaggtttcaaaatcaggtaagaaaaccatcatcattaactgagcaccagctgtgctaagcctgccacgggcgtatccttgcagcctcacaacagtgggaggtctgtatcctgaatgtcctcattttacagatgaggacattgaggagaagagacttacccaggctcacacagcagctcagcctgttccaggcgctggtcagtgcgtgttctttgccaccagcctgtcactccagtggcagctccagaaacggaggctgttgcttttatccctaaactgcatccacagagaagccccaagaaggaggttggggccagctcataaaaagcctgaatgccaagccaaggagtggatgcctccagtcatatttagaacaaagtcaagtataaatttacagagaaaaaattctaagacagttggatgttgtcctgttggtgaggaagggaaaggtttttcttgtagggaactggaaccagcccacaactgcacgcttgtgagctgtcatggaaacctgatccccaacagcttttgaggttgtttgtttgtttgtttgtttacctgtcttgggctttgttgcttttggcaaaaggtacttcaaacaagggagggcctggactgagggggaccaggtcttcttgctgacctcgtctacaaaggcaaaggaaggcaaaggaagctgtctcgggtgtttctgaacaacgtgactcatgaggggctttggctacctcttgcgttccccctagagatgtccaggccttacatttaatcggctttctctgcggtggggtagagaatggagctcccgccttgcgggcagtgctaaaggtggagctgggggattttcctgggaatgatttgagggctcttgaaagcccatgtgttccaaagcgtctttaactctgggatagcattggaagccgctgtcatgacaggacatggcactggatggctggcagagagccctggctgggagttagggagccctgggttggaatccagccccacctcttttatgccacaggtttggtcaagttctctcccgctcagggtagggctgtgaactccctcttacagctaagaacatgcagcttagtgaggacaagacccttctagagctttacccctaatccccccccaggagccccgaggccggcattattcctccccattacaggtgatgagcctcaaattcagagagcttaagcaacctgctcagggtcacgtctccaacaggcagtagagtcaaggtataaaccaggtctgtttttgtaccagagtcccagactaactgttggtaggaatcttgtaaccagtcatgttttcttccttgttttggccgctgggaagctcaaagtcaaattcgagacccttttttttccaattgtgctgagtctcctactagactcgcttcattctagctttctgcttttacctttaccctaatctttttatttttatgctattgtactttatttttgtaagttgctgagatatctgttttgcaacaagatgggctatatctaaataaagacatgatcaaaggtttgatttaaaaaaaag

SEQ ID NO: 737410 - DNA, 4873 bp, Homo sapiens
ccgcaacaggtgtttggggacctggaccaggtgaggatgacctcggagggctccgactgccgttgcaagtgcatcatgcggcccctgagcaaggacgcgtgtagccgagtgcgcagtgggcgggcacgcgtggaggacttctacacggtggagactgtgagctcgggcactgactgccgctgctcctgtaccgcacctccctcctctctcaacccctgtgagaacgagtggaagatggagaaactcaaaaagcaggcgcccgagctcctcaagctgcagtccatggtggatctcctggagggcaccctgtacagcatggacttgatgaaggtgcacgcctacgtccacaaggtggcctcccagatgaacacactggaagagagcatcaaggccaacctgagccgggagaatgaggtggtgaaggacagcgtgcgccacctcagtgagcagttgaggcactatgagaatcactctgccatcatgctgggcatcaagaaggagctgtcccgcctgggcctccagctgctgcagaaggatgccgccgccgcccctgccacccctgccacgggcactggtagcaaggcccaggacacagctagaggaaaaggcaaggacatcagcaagtatggcagtgtgcagaaaagctttgcagacagaggcctcccaaaacctcccaaggagaagctgcttcaggtggagaagctgagaaaggagagcggcaagggcagtttcctccagcccacagccaagccccgcgccctggcccagcagcaggctgtgatccggggcttcacctactacaaggcaggcaagcaggaggtgaccgaggcggtggcagacaacaccctccagggcacttcctggctggagcaactgccgcccaaggtggagggcaggtccaactccgcagagcccaactccgcagagcaggatgaggctgagcccaggtcctccgagcgagtggacctggcttctggcacccccacttcaatccctgccaccaccaccaccgccaccaccaccccaacccccaccaccagtctcctgcccaccgagccaccttcaggtccagaagtctccagccaaggcagagaggcgagctgtgagggcaccctccgggctgtggacccccctgtgaggcaccacagctatgggcgccacgagggagcctggatgaaggaccctgcagctcgagacgacaggatctatgtcaccaactactactatggaaacagcctggtggagttccgcaacctggaaaacttcaagcaaggccgctggagtaacatgtacaagctaccctacaactggatcggcacaggccacgtggtgtaccagggcgccttctactacaaccgcgccttcaccaagaacatcatcaagtacgacctacggcagcgcttcgtggcctcctgggcgctgctgcccgacgtggtatatgaggacaccacaccttggaagtggcgcggacactcggacattgactttgccgtggacgagagcggcctgtgggtcatctaccccgccgtggacgaccgcgatgaggcccagcccgaggtgatcgtcctgagtcgcttggaccccggcgatctctccgtgcaccgggagaccacgtggaagacacggctgcggcggaactcctacgggaactgcttcctggtgtgcggcatcctgtatgccgtggacacgtacaaccagcaggaaggccaggtcgcctacgctttcgacacgcacacgggcaccgacgcacgcccccagctgccgttcctcaacgagcacgcctacaccacccagatcgactacaaccccaaggagcgggtgctgtacgcctgggacaatggccaccagctcacctacaccctccacttcgtggtctgagtggagacctgtgctcccgggagaggggcagcagtgcgggaggggctttgcacagcagctcctgcaactgacccagtccgcaaatatttattgggggccagcccagggctgggactgggcatgaggtggtcaccaggattgagcttcctcagcacccagtgggtaatacttgcttccacttgcagagcaccgtgccaagcacttcccacacacttacccgtttgattctcctagcacctcccttggaggtagagatcatgaacccatttaacagacgaggagacaggctcagagaggcaccgtcccttgcctaacacctcagttgtgatcaggcaggctgtgctctcaggacagccccattttagggatgaggagacttcaccacgccctccctagtagctgggactacagcacccaccaccacacccagctaatttttgtatttttagtagagacaggggtttcaccacgttggccaggctggtctcgaactcctgaccttaggtgatccgcccgcctcagcctcccaaagtgttgggattacaggcatgagccactgcgcctggccagcaaatgctttttgtgcagaatacacttctttcaggcattgtcaggtgctgttttgtttaagctctaactcacccctggaatacaggggaatgatgacaaccagcccagccaggcctgactcatcatggtcacatccagcccccacccccggccaactaaccactgcaggctcctcttccagactcaccagggggcctcgaggccccggcatctcccttggccctgggtgtgggttttacaagactgtgtctttcatgacatcatagcccaaccatgtgagaagaaggagaaggcccccctttcttcattaatctgaaaaaaaggaaagtgagaataggctgatttttaaaagttaaggggcaagcagcattgcattctgggggaacgatcctggccacagccgccaaacaaacattcactaggcctcttctgttttcatacccttgtaagtgggttatgtggtgggtatggtcagttttttcttttttcttttcttttcttttttttgagacagagtttcgcttttgttgcccgggctggaatgcaatggcgcgattcagctcactgcaatctccgcctcccgggttcaagtgattctcctgccttagcctcctgaaaagctgggattacagggccctgccaccaagcccagctaattgtatttttagtagagacaggatttcaccatgttggccaggccagtctcaaactcctgacctcaggtgatccacctgcctcagcctcccagactgttgggattacaggcatgagccaccacgcctggccagtttcttcattttacatatggtcacattggcgcctagaacagttaggtcgctcgtcacataggcagttaagtggagaaccaggtttcaaaatcaggtaagaaaaccatcatcattaactgagcaccagctgtgctaagcctgccacgggcgtatccttgcagcctcacaacagtgggaggtctgtatcctgaatgtcctcattttacagatgaggacattgaggagaagagacttacccaggctcacacagcagctcagcctgttccaggcgctggtcagtgcgtgttctttgccaccagcctgtcactccagtggcagctccagaaacggaggctgttgcttttatccctaaactgcatccacagagaagccccaagaaggaggttggggccagctcataaaaagcctgaatgccaagccaaggagtggatgcctccagtcatatttagaacaaagtcaagtataaatttacagagaaaaaattctaagacagttggatgttgtcctgttggtgaggaagggaaaggtttttcttgtagggaactggaaccagcccacaactgcacgcttgtgagctgtcatggaaacctgatccccaacagcttttgaggttgtttgtttgtttgtttgtttacctgtcttgggctttgttgcttttggcaaaaggtacttcaaacaagggagggcctggactgagggggaccaggtcttcttgctgacctcgtctacaaaggcaaaggaaggcaaaggaagctgtctcgggtgtttctgaacaacgtgactcatgaggggctttggctacctcttgcgttccccctagagatgtccaggccttacatttaatcggctttctctgcggtggggtagagaatggagctcccgccttgcgggcagtgctaaaggtggagctgggggattttcctgggaatgatttgagggctcttgaaagcccatgtgttccaaagcgtctttaactctgggatagcattggaagccgctgtcatgacaggacatggcactggatggctggcagagagccctggctgggagttagggagccctgggttggaatccagccccacctcttttatgccacaggtttggtcaagttctctcccgctcagggtagggctgtgaactccctcttacagctaagaacatgcagcttagtgaggacaagacccttctagagctttacccctaatccccccccaggagccccgaggccggcattattcctccccattacaggtgatgagcctcaaattcagagagcttaagcaacctgctcagggtcacgtctccaacaggcagtagagtcaaggtataaaccaggtctgtttttgtaccagagtcccagactaactgttggtaggaatcttgtaaccagtcatgttttcttccttgttttggccgctgggaagctcaaagtcaaattcgagacccttttttttccaattgtgctgagtctcctactagactcgcttcattctagctttctgcttttacctttaccctaatctttttatttttatgctattgtactttatttttgtaagttgctgagatatctgttttgcaacaagatgggctatatctaaataaagacatgatcaaaggtttgatttaaaaaaaag

SEQ ID NO: 737411 - DNA, 382 bp, Homo sapiens; identical to SEQ ID NO: 26428

SEQ ID NO: 737412 - DNA, 1893 bp, Homo sapiens
  misc_feature (274)..(274): n is a, c, g, or t
gaggggtgggacccgcggcggaagcacatgcccatggggctggtgtttgctgaagctggagccaaggtggccacccatcctcagctcaggactcagcccccgaggcctcctggtccagggccccgggaggtgggcatggggctggcctgaagccccagggatctcaccggctgtcctgtttcctccagctgtgaggcatcagcctgggcaggccggagggggctgggatgagctggacagcggccccagctctcagaattcctcccagaacagngacctgagcagggtctcggactcgggcagtcattccggcagcgacagccattcaggggccagccgggagccgggtgacctggcagaaagctcttccaggaagccctccctgactgcacatgcagtttgccacccatgacacagctcatgctcaactcccaagctccggagggcagaaatggttccattcatctctgtgcacttgaacactctgaactgcctggcggccactggaatcacacggggaggcctctcccggccgccaggccctggcaccttccctctgcctgtgggcattcccagcttctttcttcctgttttctccctggctttcagtcagagcgacgagtgagcctggggttcgcaccaccgcaggcgaacctcatagtggggtttctaaaacgggcatgctggaagaaccctgcgtccaacagttggaaatgcccagatgtgccaggccacgtgttcactccctccggcagtgcctggcgggttatgacggggagggtgtccatttgtctgctgaccgacgctgtgcctctccctgggagccaggtcttcctgcagcctctgagttcaaccccggtctcgtcccggagccctgctccctcatctgggatgccgtccagccctgtgcccaccccacccccagatgcctcccccattccagcccccggagaccccagcgaggccgaggccagactggcagaaagcaggcggtggagacctgaacggatcccagggggcacggacagcccaaagagaggccccagcagctgtgcgtggagccgcgactccttgtttgctggcatggagctggtggcctgtccccgcctggtgggggctggggctgctgcgggagagtcctgtcctgatgctccccgcgccccccaaacatcgtcccagaggacagcagccaaagagcctcctggctcagagccgtcagctttcgcgttcctgaacgcctgacccgatggcctggccctggagtcttcagcttcagctgctgtctggggcggtctgtgcttcctgagcagcctcaaccgtagctgctacagtctccaggcagcttgacttgagaggacgaccctagggctacctcagtttcccccatctcctctgccagaggctctggctatttggacttgaatccctacgagggatggcaggtggcagggcttcagaaatgtcgatctcagggctctcagggggcagtccctgcctgtcttgccctcagacatgaggtttcttgtatgaatgcggaagcgactaccaggttccttatttcattttgatctcagctccctccttccccaggaggtcatgagcagcaacaagccactgctcccccgtcccatcggggtgggctaggtgctgaggctgggtttggtgcatgtgggttgagggtgtcttgtccgggctgccttgtgctgtctggcctgaggccatttcaagtctcagatccctacgtgatccttccctggctctcacctgctcctttaggctgtaattgcttcctacacacgaagcctctgattggagcctctggtccatctcagaaaaaccttccaagagcgctggggtttatgctttctgaataaacactactgtttacatgaa

SEQ ID NO: 737413 - DNA, 991 bp, Homo sapiens; identical to SEQ ID NO: 285126
  misc_feature (673)..(673): n is a, c, g, or t
  misc_feature (682)..(682): n is a, c, g, or t
  misc_feature (701)..(701): n is a, c, g, or t
  misc_feature (704)..(704): n is a, c, g, or t
  misc_feature (711)..(713): n is a, c, g, or t
  misc_feature (719)..(719): n is a, c, g, or t
  misc_feature (728)..(728): n is a, c, g, or t
  misc_feature (732)..(732): n is a, c, g, or t
  misc_feature (735)..(735): n is a, c, g, or t
  misc_feature (747)..(747): n is a, c, g, or t
  misc_feature (751)..(751): n is a, c, g, or t
  misc_feature (755)..(755): n is a, c, g, or t
  misc_feature (759)..(759): n is a, c, g, or t
  misc_feature (769)..(770): n is a, c, g, or t
  misc_feature (776)..(777): n is a, c, g, or t
  misc_feature (781)..(782): n is a, c, g, or t
  misc_feature (790)..(790): n is a, c, g, or t
  misc_feature (803)..(803): n is a, c, g, or t
  misc_feature (811)..(811): n is a, c, g, or t
  misc_feature (818)..(818): n is a, c, g, or t
  misc_feature (822)..(822): n is a, c, g, or t
  misc_feature (831)..(831): n is a, c, g, or t

SEQ ID NO: 737414 - DNA, 4315 bp, Homo sapiens
  misc_feature (2698)..(2698): n is a, c, g, or t
ggcctggcggaagcggggcagaccgggaggggacctggatcatggctgccgcgccgccgctacgggaccgcctgagctttctacaccgggtgagtgagggcggtccgcccgggccccggtcccacggctcctctcgagcgccgcattccccggactcgccccgggccggagccattgaccttgcgtctccgcgccgggtagctgctcctggccccttcgcccgcgccgacgcccctgagctgcccgcccgccgcgccgtcccggggccttccaagccgggccttccaagccggacccgccgagcgcaagggcgatgggcacagccagaccctgggggaacgaacaggcctcggccagcattcagtggcctccgacgggagggaaggagcggcggacccggtggacgtggagccgctgtgtccgtgctgctggcgcccaggtgggctggcagcccgccgtcctccctgacggtggcgtttcagaggactccggtcctggagaggcacccctgggttgcagagaacacagacgtctcgaagggacagagaaggacgcaccattgtaagcccctcttagtaaaccctctgagaagtagaggccggggcgagttcccaggtgtcgtcctgagcaaactgccctcttttgtcagccctgagctttcctgggctggacctcagagggggctgggtggtcccagggcgcgaccttgggctgccagaagccacgctagggttggtcaaggctctcagtgcaaggtttcgacatagtcgttctgtgctgcgttctgcagttgtcagctgtcacctgcaaacctcagcagctccccttagggcgtggtgggcaaacagtgtcagtgatgcgtgtccacagcctcgggaaacacttcaggtccacgttttcgtatgttgtcactagatctcggcccttccgaccgaaaggcttcggcacctcacgcggtgggtcccatgcttgtcctgttaaatactcttgaactctattctgtcctgatactgaataatgcaagaatgggtggttccagttttcatccctataaaccgtacatctttgtgccagtaagtaagcatgaaacaaataagtacgtctgcgctaagcgaacgtaaaacacacgacatcagtcggttctcggggagcgatggagctagtcacgctgagcggctgtcactctgccattccggcctctggggaggtggaacgattcatagtcccctgtgtggaaaaggggcttgcctgggccttgtttggctttgctagtcagtaggtaggtacaggagaggtaccttcaaatagccttacatgctggtaagtgcagggaggctgggggctgtgtcccttcttaacccaagtggcgcagctcctccgtggagaaccaccattgatttgcctcttctccgaggctgttcatccctgactgttgagagaggaccctgctgcagcctccctgtggccagtagcacagttctcatcccttcccagtcctctctccggccatgtcaacagtgagaggtgggtcgtttccatcccctttggggggctgcggattcacccctgtgggaaatggcacctcatcatggtaggggctcttgttccctttcagctcccgattctcctgaaggggacgtccgatgatgatgtcccgtgtccgggctacctgtttgaagagattgctagtatccttccttgatgtccccgtgtagtggaaagagcggatggcagggtcccagagtggtgcaaagggttcctggggattctgctgtccctagggggatgcacggctcctttattattgtaaccaggcatgggtggggtctgaaggctgcaatactgatgacacaggggaccctagaagcccaggtgctcctgatggcagagcctccagtaggcgcctccagggagcgtgaactgagaggccccatggcctggtctccctgcggcctggcgcagccctcatcatctcgcccttccctaacccgagcgtgccgcagaaatctcccacgagtctccgggcagcagccagtgcctgctggagtacctcctgagccgcctgcacagcagctccggccacgggaagctcaaggtgctgaagatcctgctctatctgtgcagccacggctcctccttcttcctgctcatcctcaaacgcaactctgccttcatccaggaagctgcagcttttgcagggcccccagatcctctgcacgggaacagcttgtaccagaaggttcgcgcggccgcgcaggacttggggagcaccctgttctcggacaccgtgttgccgctggctccctcccagcctctggggaccccgcctgccacaggcatgggctcccaggccaggccgcacagcaccctccagggtttcggctacagcaaggaacacggccgcacgggctcggcaggcgaagccttcctctccaccatccagaaggccgcagaggtggtggccagcgccatgcgccccgggcccgagagtcccagtacccggaggctcctgccgcggggtgacacctaccagcctgccatgatgccttcagccagccacggtcccccaaccctggggaacctactccccggggccattccaggtccccgagctgtgaggcatcagcctgggcaggccggagggggctgggatgagctggacagcggccccagctctcagaattcctcccagaacagngacctgagcagggtctcggactcgggcagtcattccggcagcgacagccattcaggggccagccgggagccgggtgacctggcagaaagggtcgaggtggtggccctgagtgactgtcagcaggagttgagcttggtgaggactgtgactcggggaccacgcgccttcctgagccgcgaggaggcacagcacttcatcaaagcgtgtggactgctcaactgtgaggccgtgctgcagctgctgacctgccacctgcgtgggaccagtgaatgcacgcagctgagggcgctgtgtgccatcgcctccctggggagcagcgacctcctcccccaggagcacatcctcctccgcacccggccgtggctgcaggagctcagcatgggcagcccgggacctgtgaccaacaaggccaccaagatcctgaggcactttgaggcctcctgtgggcagctgtcccctgcccggggcacctcagctgagcctggccccacagccgccctcccaggcccatctgacctgctgaccgacgctgtgcctctccctgggagccaggtcttcctgcagcctctgagttcaaccccggtctcgtcccggagccctgctccctcatctgggatgccgtccagccctgtgcccaccccacccccagatgcctcccccattccagcccccggagaccccagcgaggccgaggccagactggcagaaagcaggcggtggagacctgaacggatcccagggggcacggacagcccaaagagaggccccagcagctgtgcgtggagccgcgactccttgtttgctggcatggagctggtggcctgtccccgcctggtgggggctggggctgctgcgggagagtcctgtcctgatgctccccgcgccccccaaacatcgtcccagaggacagcagccaaagagcctcctggctcagagccgtcagctttcgcgttcctgaacgcctgacccgatggcctggccctggagtcttcagcttcagctgctgtctggggcggtctgtgcttcctgagcagcctcaaccgtagctgctacagtctccaggcagcttgacttgagaggacgaccctagggctacctcagtttcccccatctcctctgccagaggctctggctatttggacttgaatccctacgagggatggcaggtggcagggcttcagaaatgtcgatctcagggctctcagggggcagtccctgcctgtcttgccctcagacatgaggtttcttgtatgaatgcggaagcgactaccaggttccttatttcattttgatctcagctccctccttccccaggaggtcatgagcagcaacaagccactgctcccccgtcccatcggggtgggctaggtgctgaggctgggtttggtgcatgtgggttgagggtgtcttgtccgggctgccttgtgctgtctggcctgaggccatttcaagtctcagatccctacgtgatccttccctggctctcacctgctcctttaggctgtaattgcttcctacacacgaagcctctgattggagcctctggtccatctcagaaaaaccttccaagagcgctggggtttatgctttctgaataaacactactgtttacatgaa

SEQ ID NO: 737415 - DNA, 2101 bp, Homo sapiens
ggcctggcggaagcggggcagaccgggaggggacctggatcatggctgccgcgccgccgctacgggaccgcctgagctttctacaccgggtgagtgagggcggtccgcccgggccccggtcccacggctcctctcgagcgccgcattccccggactcgccccgggccggagccattgaccttgcgtctccgcgccgggtagctgctcctggccccttcgcccgcgccgacgcccctgagctgcccgcccgccgcgccgtcccggggccttccaagccgggccttccaagccggacccgccgagcgcaagggcgatgggcacagccagaccctgggggaacgaacaggcctcggccagcattcagtggcctccgacgggagggaaggagcggcggacccggtggacgtggagccgctgtgtccgtgctgctggcgcccaggtgggctggcagcccgccgtcctccctgacggtggcgtttcagaggactccggtcctggagaggcacccctgggttgcagagaacacagacgtctcgaagggacagagaaggacgcaccattgtaagcccctcttagtaaaccctctgagaagtagaggccggggcgagttcccaggtgtcgtcctgagcaaactgccctcttttgtcagccctgagctttcctgggctggacctcagagggggctgggtggtcccagggcgcgaccttgggctgccagaagccacgctagggttggtcaaggctctcagtgcaaggtttcgacatagtcgttctgtgctgcgttctgcagttgtcagctgtcacctgcaaacctcagcagctccccttagggcgtggtgggcaaacagtgtcagtgatgcgtgtccacagcctcgggaaacacttcaggtccacgttttcgtatgttgtcactagatctcggcccttccgaccgaaaggcttcggcacctcacgcggtgggtcccatgcttgtcctgttaaatactcttgaactctattctgtcctgatactgaataatgcaagaatgggtggttccagttttcatccctataaaccgtacatctttgtgccagtaagtaagcatgaaacaaataagtacgtctgcgctaagcgaacgtaaaacacacgacatcagtcggttctcggggagcgatggagctagtcacgctgagcggctgtcactctgccattccggcctctggggaggtggaacgattcatagtcccctgtgtggaaaaggggcttgcctgggccttgtttggctttgctagtcagtaggtaggtacaggagaggtaccttcaaatagccttacatgctggtaagtgcagggaggctgggggctgtgtcccttcttaacccaagtggcgcagctcctccgtggagaaccaccattgatttgcctcttctccgaggctgttcatccctgactgttgagagaggaccctgctgcagcctccctgtggccagtagcacagttctcatcccttcccagtcctctctccggccatgtcaacagtgagaggtgggtcgtttccatcccctttggggggctgcggattcacccctgtgggaaatggcacctcatcatggtaggggctcttgttccctttcagctcccgattctcctgaaggggacgtccgatgatgatgtcccgtgtccgggctacctgtttgaagagattgctaaaatctcccacgagtctccgggcagcagccagtgcctgctggagtacctcctgagccgcctgcacagcagctccggccacgggaagctcaaggtgagcccctgggtggtcaagggtcaggcctgaggcccggcccacggtggtgaggatggaggagcagacgagcggcccagggtggcaggcagctctgtgcccttggggtgcccccgggccctgccctgggtgtcccgtgtccggcctgcccagcactgctgaccgccccactccccaggtgctgaagatcctgctctatctgtgcagccacggctcctccttcttcctgctcatcctcaaacgcaactctgccttcatccaggaagctgcaggtacaggggccgcgcacgcgctcaggaagagccagggctttggagaatg

SEQ ID NO: 737416 - DNA, 4000 bp, Homo sapiens
  misc_feature (2383)..(2383): n is a, c, g, or t
ggcctggcggaagcggggcagaccgggaggggacctggatcatggctgccgcgccgccgctacgggaccgcctgagctttctacaccgggtgagtgagggcggtccgcccgggccccggtcccacggctcctctcgagcgccgcattccccggactcgccccgggccggagccattgaccttgcgtctccgcgccgggtagctgctcctggccccttcgcccgcgccgacgcccctgagctgcccgcccgccgcgccgtcccggggccttccaagccgggccttccaagccggacccgccgagcgcaagggcgatgggcacagccagaccctgggggaacgaacaggcctcggccagcattcagtggcctccgacgggagggaaggagcggcggacccggtggacgtggagccgctgtgtccgtgctgctggcgcccaggtgggctggcagcccgccgtcctccctgacggtggcgtttcagaggactccggtcctggagaggcacccctgggttgcagagaacacagacgtctcgaagggacagagaaggacgcaccattgtaagcccctcttagtaaaccctctgagaagtagaggccggggcgagttcccaggtgtcgtcctgagcaaactgccctcttttgtcagccctgagctttcctgggctggacctcagagggggctgggtggtcccagggcgcgaccttgggctgccagaagccacgctagggttggtcaaggctctcagtgcaaggtttcgacatagtcgttctgtgctgcgttctgcagttgtcagctgtcacctgcaaacctcagcagctccccttagggcgtggtgggcaaacagtgtcagtgatgcgtgtccacagcctcgggaaacacttcaggtccacgttttcgtatgttgtcactagatctcggcccttccgaccgaaaggcttcggcacctcacgcggtgggtcccatgcttgtcctgttaaatactcttgaactctattctgtcctgatactgaataatgcaagaatgggtggttccagttttcatccctataaaccgtacatctttgtgccagtaagtaagcatgaaacaaataagtacgtctgcgctaagcgaacgtaaaacacacgacatcagtcggttctcggggagcgatggagctagtcacgctgagcggctgtcactctgccattccggcctctggggaggtggaacgattcatagtcccctgtgtggaaaaggggcttgcctgggccttgtttggctttgctagtcagtaggtaggtacaggagaggtaccttcaaatagccttacatgctggtaagtgcagggaggctgggggctgtgtcccttcttaacccaagtggcgcagctcctccgtggagaaccaccattgatttgcctcttctccgaggctgttcatccctgactgttgagagaggaccctgctgcagcctccctgtggccagtagcacagttctcatcccttcccagtcctctctccggccatgtcaacagtgagaggtgggtcgtttccatcccctttggggggctgcggattcacccctgtgggaaatggcacctcatcatggtaggggctcttgttccctttcagctcccgattctcctgaaggggacgtccgatgatgatgtcccgtgtccgggctacctgtttgaagagattgctaaaatctcccacgagtctccgggcagcagccagtgcctgctggagtacctcctgagccgcctgcacagcagctccggccacgggaagctcaaggtgctgaagatcctgctctatctgtgcagccacggctcctccttcttcctgctcatcctcaaacgcaactctgccttcatccaggaagctgcagcttttgcagggcccccagatcctctgcacgggaacagcttgtaccagaaggttcgcgcggccgcgcaggacttggggagcaccctgttctcggacaccgtgttgccgctggctccctcccagcctctggggaccccgcctgccacaggcatgggctcccaggccaggccgcacagcaccctccagggtttcggctacagcaaggaacacggccgcacgggctcggcaggcgaagccttcctctccaccatccagaaggccgcagaggtggtggccagcgccatgcgccccgggcccgagagtcccagtacccggaggctcctgccgcggggtgacacctaccagcctgccatgatgccttcagccagccacggtcccccaaccctggggaacctactccccggggccattccaggtccccgagctgtgaggcatcagcctgggcaggccggagggggctgggatgagctggacagcggccccagctctcagaattcctcccagaacagngacctgagcagggtctcggactcgggcagtcattccggcagcgacagccattcaggggccagccgggagccgggtgacctggcagaaagggtcgaggtggtggccctgagtgactgtcagcaggagttgagcttggtgaggactgtgactcggggaccacgcgccttcctgagccgcgaggaggcacagcacttcatcaaagcgtgtggactgctcaactgtgaggccgtgctgcagctgctgacctgccacctgcgtgggaccagtgaatgcacgcagctgagggcgctgtgtgccatcgcctccctggggagcagcgacctcctcccccaggagcacatcctcctccgcacccggccgtggctgcaggagctcagcatgggcagcccgggacctgtgaccaacaaggccaccaagatcctgaggcactttgaggcctcctgtgggcagctgtcccctgcccggggcacctcagctgagcctggccccacagccgccctcccaggcccatctgacctgctgaccgacgctgtgcctctccctgggagccaggtcttcctgcagcctctgagttcaaccccggtctcgtcccggagccctgctccctcatctgggatgccgtccagccctgtgcccaccccacccccagatgcctcccccattccagcccccggagaccccagcgaggccgaggccagactggcagaaagcaggcggtggagacctgaacggatcccagggggcacggacagcccaaagagaggccccagcagctgtgcgtggagccgcgactccttgtttgctggcatggagctggtggcctgtccccgcctggtgggggctggggctgctgcgggagagtcctgtcctgatgctccccgcgccccccaaacatcgtcccagaggacagcagccaaagagcctcctggctcagagccgtcagctttcgcgttcctgaacgcctgacccgatggcctggccctggagtcttcagcttcagctgctgtctggggcggtctgtgcttcctgagcagcctcaaccgtagctgctacagtctccaggcagcttgacttgagaggacgaccctagggctacctcagtttcccccatctcctctgccagaggctctggctatttggacttgaatccctacgagggatggcaggtggcagggcttcagaaatgtcgatctcagggctctcagggggcagtccctgcctgtcttgccctcagacatgaggtttcttgtatgaatgcggaagcgactaccaggttccttatttcattttgatctcagctccctccttccccaggaggtcatgagcagcaacaagccactgctcccccgtcccatcggggtgggctaggtgctgaggctgggtttggtgcatgtgggttgagggtgtcttgtccgggctgccttgtgctgtctggcctgaggccatttcaagtctcagatccctacgtgatccttccctggctctcacctgctcctttaggctgtaattgcttcctacacacgaagcctctgattggagcctctggtccatctcagaaaaaccttccaagagcgctggggtttatgctttctgaataaacactactgtttacatgaa

SEQ ID NO: 737417 - DNA, 1794 bp, Homo sapiens
ggcctggcggaagcggggcagaccgggaggggacctggatcatggctgccgcgccgccgctacgggaccgcctgagctttctacaccgggtgagtgagggcggtccgcccgggccccggtcccacggctcctctcgagcgccgcattccccggactcgccccgggccggagccattgaccttgcgtctccgcgccgggtagctgctcctggccccttcgcccgcgccgacgcccctgagctgcccgcccgccgcgccgtcccggggccttccaagccgggccttccaagccggacccgccgagcgcaagggcgatgggcacagccagaccctgggggaacgaacaggcctcggccagcattcagtggcctccgacgggagggaaggagcggcggacccggtggacgtggagccgctgtgtccgtgctgctggcgcccaggtgggctggcagcccgccgtcctccctgacggtggcgtttcagaggactccggtcctggagaggcacccctgggttgcagagaacacagacgtctcgaagggacagagaaggacgcaccattgtaagcccctcttagtaaaccctctgagaagtagaggccggggcgagttcccaggtgtcgtcctgagcaaactgccctcttttgtcagccctgagctttcctgggctggacctcagagggggctgggtggtcccagggcgcgaccttgggctgccagaagccacgctagggttggtcaaggctctcagtgcaaggtttcgacatagtcgttctgtgctgcgttctgcagttgtcagctgtcacctgcaaacctcagcagctccccttagggcgtggtgggcaaacagtgtcagtgatgcgtgtccacagcctcgggaaacacttcaggtccacgttttcgtatgttgtcactagatctcggcccttccgaccgaaaggcttcggcacctcacgcggtgggtcccatgcttgtcctgttaaatactcttgaactctattctgtcctgatactgaataatgcaagaatgggtggttccagttttcatccctataaaccgtacatctttgtgccagtaagtaagcatgaaacaaataagtacgtctgcgctaagcgaacgtaaaacacacgacatcagtcggttctcggggagcgatggagctagtcacgctgagcggctgtcactctgccattccggcctctggggaggtggaacgattcatagtcccctgtgtggaaaaggggcttgcctgggccttgtttggctttgctagtcagtaggtaggtacaggagaggtaccttcaaatagccttacatgctggtaagtgcagggaggctgggggctgtgtcccttcttaacccaagtggcgcagctcctccgtggagaaccaccattgatttgcctcttctccgaggctgttcatccctgactgttgagagaggaccctgctgcagcctccctgtggccagtagcacagttctcatcccttcccagtcctctctccggccatgtcaacagtgagaggtgggtcgtttccatcccctttggggggctgcggattcacccctgtgggaaatggcacctcatcatggtaggggctcttgttccctttcagctcccgattctcctgaaggggacgtccgatgatgatgtcccgtgtccgggctacctgtttgaagagattgctaaaatctcccacgagtctccgggcagcagccagtgcctgctggagtacctcctgagccgtggctgcacagatagagcaggatcttcagcaccttgagcttccgtcga

SEQ ID NO: 737418 - DNA, 3909 bp, Homo sapiens
  misc_feature (2292)..(2292): n is a, c, g, or t
ggcctggcggaagcggggcagaccgggaggggacctggatcatggctgccgcgccgccgctacgggaccgcctgagctttctacaccgggtgagtgagggcggtccgcccgggccccggtcccacggctcctctcgagcgccgcattccccggactcgccccgggccggagccattgaccttgcgtctccgcgccgggtagctgctcctggccccttcgcccgcgccgacgcccctgagctgcccgcccgccgcgccgtcccggggccttccaagccgggccttccaagccggacccgccgagcgcaagggcgatgggcacagccagaccctgggggaacgaacaggcctcggccagcattcagtggcctccgacgggagggaaggagcggcggacccggtggacgtggagccgctgtgtccgtgctgctggcgcccaggtgggctggcagcccgccgtcctccctgacggtggcgtttcagaggactccggtcctggagaggcacccctgggttgcagagaacacagacgtctcgaagggacagagaaggacgcaccattgtaagcccctcttagtaaaccctctgagaagtagaggccggggcgagttcccaggtgtcgtcctgagcaaactgccctcttttgtcagccctgagctttcctgggctggacctcagagggggctgggtggtcccagggcgcgaccttgggctgccagaagccacgctagggttggtcaaggctctcagtgcaaggtttcgacatagtcgttctgtgctgcgttctgcagttgtcagctgtcacctgcaaacctcagcagctccccttagggcgtggtgggcaaacagtgtcagtgatgcgtgtccacagcctcgggaaacacttcaggtccacgttttcgtatgttgtcactagatctcggcccttccgaccgaaaggcttcggcacctcacgcggtgggtcccatgcttgtcctgttaaatactcttgaactctattctgtcctgatactgaataatgcaagaatgggtggttccagttttcatccctataaaccgtacatctttgtgccagtaagtaagcatgaaacaaataagtacgtctgcgctaagcgaacgtaaaacacacgacatcagtcggttctcggggagcgatggagctagtcacgctgagcggctgtcactctgccattccggcctctggggaggtggaacgattcatagtcccctgtgtggaaaaggggcttgcctgggccttgtttggctttgctagtcagtaggtaggtacaggagaggtaccttcaaatagccttacatgctggtaagtgcagggaggctgggggctgtgtcccttcttaacccaagtggcgcagctcctccgtggagaaccaccattgatttgcctcttctccgaggctgttcatccctgactgttgagagaggaccctgctgcagcctccctgtggccagtagcacagttctcatcccttcccagtcctctctccggccatgtcaacagtgagagctcccgattctcctgaaggggacgtccgatgatgatgtcccgtgtccgggctacctgtttgaagagattgctaaaatctcccacgagtctccgggcagcagccagtgcctgctggagtacctcctgagccgcctgcacagcagctccggccacgggaagctcaaggtgctgaagatcctgctctatctgtgcagccacggctcctccttcttcctgctcatcctcaaacgcaactctgccttcatccaggaagctgcagcttttgcagggcccccagatcctctgcacgggaacagcttgtaccagaaggttcgcgcggccgcgcaggacttggggagcaccctgttctcggacaccgtgttgccgctggctccctcccagcctctggggaccccgcctgccacaggcatgggctcccaggccaggccgcacagcaccctccagggtttcggctacagcaaggaacacggccgcacgggctcggcaggcgaagccttcctctccaccatccagaaggccgcagaggtggtggccagcgccatgcgccccgggcccgagagtcccagtacccggaggctcctgccgcggggtgacacctaccagcctgccatgatgccttcagccagccacggtcccccaaccctggggaacctactccccggggccattccaggtccccgagctgtgaggcatcagcctgggcaggccggagggggctgggatgagctggacagcggccccagctctcagaattcctcccagaacagngacctgagcagggtctcggactcgggcagtcattccggcagcgacagccattcaggggccagccgggagccgggtgacctggcagaaagggtcgaggtggtggccctgagtgactgtcagcaggagttgagcttggtgaggactgtgactcggggaccacgcgccttcctgagccgcgaggaggcacagcacttcatcaaagcgtgtggactgctcaactgtgaggccgtgctgcagctgctgacctgccacctgcgtgggaccagtgaatgcacgcagctgagggcgctgtgtgccatcgcctccctggggagcagcgacctcctcccccaggagcacatcctcctccgcacccggccgtggctgcaggagctcagcatgggcagcccgggacctgtgaccaacaaggccaccaagatcctgaggcactttgaggcctcctgtgggcagctgtcccctgcccggggcacctcagctgagcctggccccacagccgccctcccaggcccatctgacctgctgaccgacgctgtgcctctccctgggagccaggtcttcctgcagcctctgagttcaaccccggtctcgtcccggagccctgctccctcatctgggatgccgtccagccctgtgcccaccccacccccagatgcctcccccattccagcccccggagaccccagcgaggccgaggccagactggcagaaagcaggcggtggagacctgaacggatcccagggggcacggacagcccaaagagaggccccagcagctgtgcgtggagccgcgactccttgtttgctggcatggagctggtggcctgtccccgcctggtgggggctggggctgctgcgggagagtcctgtcctgatgctccccgcgccccccaaacatcgtcccagaggacagcagccaaagagcctcctggctcagagccgtcagctttcgcgttcctgaacgcctgacccgatggcctggccctggagtcttcagcttcagctgctgtctggggcggtctgtgcttcctgagcagcctcaaccgtagctgctacagtctccaggcagcttgacttgagaggacgaccctagggctacctcagtttcccccatctcctctgccagaggctctggctatttggacttgaatccctacgagggatggcaggtggcagggcttcagaaatgtcgatctcagggctctcagggggcagtccctgcctgtcttgccctcagacatgaggtttcttgtatgaatgcggaagcgactaccaggttccttatttcattttgatctcagctccctccttccccaggaggtcatgagcagcaacaagccactgctcccccgtcccatcggggtgggctaggtgctgaggctgggtttggtgcatgtgggttgagggtgtcttgtccgggctgccttgtgctgtctggcctgaggccatttcaagtctcagatccctacgtgatccttccctggctctcacctgctcctttaggctgtaattgcttcctacacacgaagcctctgattggagcctctggtccatctcagaaaaaccttccaagagcgctggggtttatgctttctgaataaacactactgtttacatgaa

SEQ ID NO: 737419 - DNA, 729 bp, Homo sapiens
gggatgtttaggggaatccttggcttctacccacaagatgccagcattcaatgctgatagctgcccctcccccagttgtgacagtcaaaaatgtctccagacatggccaggtgtacctagaggccaaaattgtccctggttgagacccactgatgaatgtgtgcaatagtggttcccataaactgcatttaaaaaacagctgttaggtttcgtttggctcaagggctgtcatttttcactcctccccccatagagtatgtaaaatgattagaaatgacaacagactatcatttagtatcagattagtgtgtgtatatgccataaattatttccttagcaattcctttagtatttttgttgcaataattctttaaacgctacatttgtaatgctgtcttggagcctaggaattatttttggagatatttatgcagacttccctctataatgatcggttttttattatggttaatccataaatattttgagatgtatctctaaaaaacgagcactctttgaaaacataaccacaatgccattattatacctacaaaaattaaccacaattccttaaaacataatgatgcctttttgaagagagatatattgagacttcattctggggagaaacctttcagataactttatttaccttttcctttgccaagcatacaacattagatttgaaatatgctttgtatcaagtggaagtgtctcttaagatagccc

SEQ ID NO: 737420 - DNA, 10453 bp, Homo sapiens; identical to SEQ ID NO: 4

SEQ ID NO: 737421 - DNA, 10618 bp, Homo sapiens; identical to SEQ ID NO: 24
  misc_feature (9466)..(9466): n is a, c, g, or t

SEQ ID NO: 737422 - DNA, 10512 bp, Homo sapiens; identical to SEQ ID NO: 25

SEQ ID NO: 737423 - DNA, 2399 bp, Homo sapiens; identical to SEQ ID NO: 26

SEQ ID NO: 737424 - DNA, 2490 bp, Homo sapiens; identical to SEQ ID NO: 27

SEQ ID NO: 737425 - DNA, 2995 bp, Homo sapiens; identical to SEQ ID NO: 28

SEQ ID NO: 737426 - DNA, 2995 bp, Homo sapiens; identical to SEQ ID NO: 28

SEQ ID NO: 737427 - DNA, 2455 bp, Homo sapiens
ccggtggggtgcagccctgctgaagccccagagctcagcccagtgctgggcacatagtaggcgctcaggaaatgattgctgaatgtggaatgaaagtccccagcagacaaaaggctgtgacttctgttagtggggtggtggtcctctggggcgagtgtatggagaacttcaaggcctcctcctggctgcccaggaaagggcgccaaaggcgacgtgccggccgccagctccaggccgagccccgagcgcctgcaggaacaggccccttcacccggcgcgggacgcagagctgcgagagaatcttgttcagcgcggactcaacgccagggcgccgcctagaggttggtctctgtctcggcctcacccgccgggagaccacagagctgcttccccagccgcccgccgccagaaattggaaaaaaaaaaaaaaaaaaaaaaaaaaatccagctggggtctaggaactcggcttctggcacctctgaattctccgagactgtctcctccctccccgcctgtaatgaaccctgtgaagggagacaggccaggaagtcccagaaatatttattcttgtgactctcacaaaatggaaaagggtctcaatttttgtttctttaaggaacttgtgttctgcgtctgtgtctacactgcctcctctcaccaaccaaattgtctagcccccctccagttacgctagaactctgctttatcttcaaggaagaaagggagtggggagaagttacctctaaaccctccagcatggccatcaattttctgaataatttggaggtcaacatgcttttggaaaagtgtttggaaaacgtttgggggtgaaaagaaatgttgcctaactggcctttactcacggagtgaccatcatctcagctagttagtgtatgagcggcaccagcaccccggccatgggtgtctgtgctgagcctctgaaagttgacttatcctttggggagccctcggaaagacacagctggtatctatgggaatggctttggggtgtcctttggcaccatacagataattttgtttttttaattggaatccatggcctgggttcttgggatgggggtagggggaagccacaaagcccctggaaatgtatgcaaaacatatgggtgtgcaggtgcatcatcctaaggctatggcctcttcagtttttccaaagagtctaagactataaaaggtttccatctccttttctcagccagggagccacagagacccaggccagcagtaggctgggagccagcacaccggcccccaccaggtgcccggtaggggatgggtaataacactcttgaatggtctggaaactgctggcccctcagtcctgccgtcctcccagagggaaatcctaatagaagaagtgacagccagtagctgccatctcagtattttgaatgaaaatataacatgataaagagcaaatgagggaggctggaggggcctccccatgcaaatactggaatatgaatgttggccagaaataagatacttcctgccctccagctgttaaagagctccccaattcctcccttttggtgctaggaaggggccagagggcactgcccccagaccaccacccacctctggagagctggggccgagtgggactgcctgcagcagagttaacccttcagaaaattcaaaacctatactgcctagtattttccctgcccgtttattttttaatcagatttttaaaatatccagcagcactttggtgccttttcttggggttggggagtggggttatctatgtgtgtatctatgggaaggtgggtgccttcagtgcactaaaccccctcttgggcctgcagctggacctcactcctgtacctgaacactctgcctgagcctgagctaatcttagccatccattgtgtctcaaaactgttttggaggtgaataactgtgaggcaggatggagaaccttttgctctcccatccagaagggcacctaaccaggcccctggagcagacaaaaggagcaggaagtcaatcacttcgatcccagttctctgaagcccaagaagaaaacggattttccttcgttttggttcggaggcctagtagagaatttggattccaccaagttctcttttttcaaaaaaagtaaacggtccagagcagacaaaaactgtggaaacttgaggcctgggtagtagtggttttgtttgattttgaggctttaaagagataaggagacggtggtggagctccgccacgccgcgtggctctcacttccacgccgaggaagaccgaccggcccctaggtttatcctctgggagcccccggcccaatcagcccccttcaggccttgggagtcaccccgagtcttatcttctgtccccttccagcaagtacccggcaataaacgggcagggctgggcaaaggtctggccgctagaaacggaaaaggaaagagaaaagtaaagtta

SEQ ID NO: 737428 - DNA, 2124 bp, Homo sapiens
atggagcccggcaattatgccaccttggatggagccaaggatatcgaaggcttgctgggagcgggaggggggcggaatctggtcgcccactcccctctgaccagccacccagcggcgcctacgctgatgcctgctgtcaactatgcccccttggatctgccaggctcggcggagccgccaaagcaatgccacccatgccctggggtgccccaggggacgtccccagctcccgtgccttatggttactttggaggcgggtactactcctgccgagtgtcccggagctcgctgaaaccctgtgcccaggcagccaccctggccgcgtaccccgcggagactcccacggccggggaagagtaccccagccgccccactgagtttgccttctatccgggatatccgggaacctaccagcctatggccagttacctggacgtgtctgtggtgcagactctgggtgctcctggagaaccgcgacatgactccctgttgcctgtggacagttaccagtcttgggctctcgctggtggctggaacagccagatgtgttgccagggagaacagaacccaccaggtcccttttggaaggcagcatttgcagactccagcgggcagcaccctcctgacgcctgcgcctttcgtcgcggccgcaagaaacgcattccgtacagcaaggggcagttgcgggagctggagcgggagtatgcggctaacaagttcatcaccaaggacaagaggcgcaagatctcggcagccaccagcctctcggagcgccagattaccatctggtttcagaaccgccgggtcaaagagaagaaggttctcgccaaggagaacctgcgggcaggctttcatcgtccgcggagctacaggcttccagcggcctggggcctcgtgggtactgagctgcgtgtgggggtccaggacccgatgtcgcctgccattcggccagggcatcggcagatgtattggtccagcccccgagagacccaggaagaaggcaaggaggttcggtacgagccatctcgaatggaagaagaaggcggtcgatatacccgatctgcctttgcggacccagctgtcaagggctgcaccgtgcctggatatgagctgtatttgccgagatgtagcatgaaggagaatgggtctgttgttgaaatccaaaatttattgggtgaaaaatacatccacggggttcagatgagaccaggtgttgcttgttcagtatctcaagcccaaaaagatgaattcatccttgaaggaaatgacattgagcttgtttcaaattcagcggctttgattcagcaagccacaacagttaaaaacaaggatatcaggaaatttttgaacgtctcctcctacttccgtaaaaagcctttagtttcagaaccaaggcagcagccagttctccccagtaaattaccagacccaaagagagagtttcagaaccggcagtcgaagagcttcctggcagaggtcccgggcctggaaacactcggctttctgagcgaggagcaccctctagtgtctgtccacggggaacgcaggagcgtgagccccttcgcgcccccagcgccgtcggcgtcgctgccccagacacagacactgcctcgagaggcctcacagaggcgggggcagaaggcggcgacccagagccgccacatcccccgccttgggcgccgtcacagtccccagacgccctggactcctgcagtctacgaagacgcgcgggggacggcgtggttccgagaggcaaatatggaggaggtagtgattgggtgttgtggcctgactggtctcagtctaagagtccccagcacctgtgacctggttcctggtgttccaagaagtccagtgtcttcttttgcaagctgggggaggggtttaaagatgctggcgctgccctctagccggctgctggggacatcaaaggagattcgggctgtggaaggctccctagcgtcggagatggagttaggagagggcgccaaaggcgacgtgccggccgccagctccaggccgagccccgagcgcctgcaggaacaggccccttcacccggcgcgggacgcagagctgcgagagaatcttgttcagcgcggactcaacgccagggcgccgcctag

SEQ ID NO: 737429 - DNA, 600 bp, Homo sapiens; identical to SEQ ID NO: 32

SEQ ID NO: 737430 - DNA, 4128 bp, Homo sapiens; identical to SEQ ID NO: 12

SEQ ID NO: 737431 - DNA, 3753 bp, Homo sapiens; identical to SEQ ID NO: 29
  misc_feature (1005)..(1005): n is a, c, g, or t

SEQ ID NO: 737432 - DNA, 3260 bp, Homo sapiens; identical to SEQ ID NO: 30
  misc_feature (1005)..(1005): n is a, c, g, or t

SEQ ID NO: 737433 - DNA, 2932 bp, Homo sapiens; identical to SEQ ID NO: 31

SEQ ID NO: 737434 - DNA, 600 bp, Homo sapiens; identical to SEQ ID NO: 15

SEQ ID NO: 737435 - DNA, 527 bp, Homo sapiens; identical to SEQ ID NO: 18

SEQ ID NO: 737436 - DNA, 1417 bp, Homo sapiens; identical to SEQ ID NO: 21

SEQ ID NO: 737437 - protein, 161 aa, Homo sapiens
MTYFGHFGGANHAHTLGELEACIAMLVEQLRTQGCGGRTLGTSEEEAELQQKVEENEHLRLELQMVETERVRLSLLEEKLVDVLQLLQRLRDLNISKRALGKILLSTLDAFRDPTHEGRPSPAAILDALHQALAACQLLRRQPSAPASAAAALTNPLLVSC

SEQ ID NO: 737438 - protein, 78 aa, Homo sapiens
WAGRLTWCGASLGLSPAYGLSRVFKPSGFLLVKMSDKPDLSEVEKFDRSKLKKTNTEEKNTLPSKETIQQEKECVQTS

SEQ ID NO: 737439 - protein, 86 aa, Homo sapiens
WAGRLTWCGASLGLSPAYGLSRVFKPSGFLLVKMSDKPDLSEVEKFDRSKLKKTNTEEKNTLPSKETRLCLKKRKSFLSLNLEPSY

SEQ ID NO: 737440 - protein, 107 aa, Homo sapiens
VADPSAPASGPGLSFLAGLSLTTRHPPYLKLVISFLFISAAVQVEQSYLVLFCTHASQLHDHVQGLEVSAVLSTPLWEWVLQRFGKKTSAFGIFAMVPFAILLAAVP

SEQ ID NO: 737441 - protein, 137 aa, Homo sapiens
ASQKMGQKISRQPYSGSWSLFSCSDPQKASKSLNLETRQFFLISCLKAVQSSVNKPLHAGLINAGPLRAMTQEHGLGSTLKSRNHSTDNGNFVGGNRLLELNAFVRFLDLQISLCGPALGGKAGIHNNLINLTQTTC

SEQ ID NO: 737442 - protein, 120 aa, Homo sapiens [sequence omitted]

SEQ ID NO: 737443 - protein, 111 aa, Homo sapiens
LFFFDGVSLLLPGLECNAAISAHCNLRLLGSRNSPASASRVAGITGMYHHAWLIFVFLVEKGFCHAGQAGLELLTSSVPRISASQSAGITSMSHRTRPILLNVGNSLKICL

SEQ ID NO: 737444 - protein, 114 aa, Homo sapiens
QKSPFLNYIHSEVIWSSPTPGLLRKNNTAVPKRQLTNSPSSFFYTPLPPLETNFGDKAIATVMRKELSSPVSVVRLVQMSEMATISCKELWITVVKCPGVAVSLVTEWKKELAV

SEQ ID NO: 737445 - protein, 142 aa, Homo sapiens
SLPFHSFAAVFSPNSSSSPLLFPLHLLLHLPPQSFPLSQIWSFSANLGRGCRSDVIISSLCITRGRSKARRWCHKSPREEGTLSSTLLGSAFLVFFRLSGPGLDWKFPGVSFAIAQFHRCPQPGFPTLSAGNHTLPFARLPA

SEQ ID NO: 737446 - protein, 124 aa, Homo sapiens
MGHGDNRGHLWLSPCRSGASEHGINCILSSPAPCQQPSSHTQRTDTGKGRVAELLVSWGQRRKPSTLYTPRPGPWHRGAAWGLRSHTAELEPSLSQCQLCTLSSDGTAAWPGAAGTLTHSSGHS

SEQ ID NO: 737447 - protein, 684 aa, Homo sapiens
WGPGSTDEAFTYLGKSGGAQKEKKTVGGRGSSLCLHLCPLKQKGISFLSSAPNPVEARLGTLFTSPRFPSRSPLCHPCTLFRVMPERELWPAGTGSEPVTRVGSCDSMMSSTSTRSGSSDSSYDFLSTEEKECLLFLEETIGSLDTEADSGLSTDESEPATTPRGFRALPITQPTPRGGPEETITQQGRTPRTVTESSSSHPPEPQGLGLRSGSYSLPRNIHIARSQNFRKSTTQASSHNPGEPGRLAPEPEKEQVSQSSQPRQAPASPQEAALDLDVVLIPPPEAFRDTQPEQCREASLPEGPGQQGHTPQLHTPSSSQEREQTPSEAMSQKAKETVSTRYTQPQPPPAGLPQNARAEDAPLSSGEDPNSRLAPLTTPKPRKLPPNIVLKSSRSSFHSDPQHWLSRHTEAAPGDSGLISCSLQEQRKARKEALEKLGLPQDQDEPGLHLSKPTSSIRPKETRAQHLSPAPGLAQPAAPAQASAAIPAAGKALAQAPAPAPGPAQGPLPMKSPAPGNVAASKSMPIPIPKAPRANSALTPPKPESGLTLQESNTPGLRQMNFKSNTLERSGVGLSSYLSTEKDASPKTSTSLGKGSFLDKISPSVLRNSRPRPASLGTGKDFAGIQVGKLADLEQEQSSKRLSYQGQSRDKLPRPPCVSVKISPKGVPNEHRREALKKLGLLKE

SEQ ID NO: 737448 - protein, 727 aa, Homo sapiens
WGPGSTDEAFTYLGKSGGAQKEKKTVGGRGSSLCLHLCPLKQKGISFLSSAPNPVEARLGTLFTSPRFPSRSPLCHPCTLFRVMPERELWPAGTGSEPVTRVGSCDSMMSSTSTRSGSSDSSYDFLSTEEKECLLFLEETIGSLDTEADSGLSTDESEPATTPRGFRALPITQPTPRGGPEETITQQGRTPRTVTESSSSHPPEPQGLGLRSGSYSLPRNIHIARSQNFRKSTTQASSHNPGEPGRLAPEPEKEQVSQSSQPRQAPASPQEAALDLDVVLIPPPEAFRDTQPEQCREASLPEGPGQQGHTPQLHTPSSSQEREQTPSEAMSQKAKETVSTRYTQPQPPPAGLPQNARAEDAPLSSGEDPNSRLAPLTTPKPRKLPPNIVLKSSRSSFHSDPQHWLSRHTEAAPGDSGLISCSLQEQRKARKEALEKLGLPQDQDEPGLHLSKPTSSIRPKETRAQHLSPAPGLAQPAAPAQASAAIPAAGKALAQAPAPAPGPAQGPLPMKSPAPGNVAASKSMPIPIPKAPRANSALTPPKPESGLTLQESNTPGLRQMNFKSNTLERSGVGLSSYLSTEKDASPKTSTSLGKGSFLDKISPSVLRNSRPRPASLGTGKDFAGIQVGKLADLEQEQSSKRLSYQGQSRDKLPRPPCVSVKISPKGVPHFILSPELRGGKGSQVEHVSLLVQPGQGLYWSQSLLLQQSQLLQGLPSVFIGDTLWGGL

SEQ ID NO: 737449 - protein, 538 aa, Homo sapiens
WGPGSTDEAFTYLGKSGGAQKEKKTVGGRGSSLCLHLCPLKQKGISFLSSAPNPVEARLGTLFTSPRFPSRSPLCHPCTLFRVMPERELWPAGTGSEPVTRVGSCDSMMSSTSTRSGSSDSSYDFLSTEEKECLLFLEETIGSLDTEADSGLSTDESEPATTPRGFRALPITQPTPRGGPEETITQQGRTPRTVTESSSSHPPEPQGLGLRSGSYSLPRNIHIARSQNFRKSTTQASSHNPGEPGRLAPEPEKEQVSQSSQPRQAPASPQEAALDLDVVLIPPPEAFRDTQPEQCREASLPEGPGQQGHTPQLHTPSSSQEREQTPSEAMSQKAKETVSTRYTQPQPPPAGLPQNARAEDAPLSSGEDPNSRLAPLTTPKPRKLPPNIVLKSSRSSFHSDPQHWLSRHTEAAPGDSGLISCSLQEQRKARKEALEKLGLPQDQDEPGLHLSKPTSSIRPKETRAQHLSPAPGLAQPAAPAQASVWRDSQCWGSLWKLLRLLFRTILGGSFRGLGVVRGASRLFGSSPDERGASSALAF

SEQ ID NO: 737450 - protein, 417 aa, Homo sapiens
WGPGSTDEAFTYLGKSGGAQKEKKTVGGRGSSLCLHLCPLKQKGISFLSSAPNPVEARLGTLFTSPRFPSRSPLCHPCTLFRVMPERELWPAGTGSEPVTRVGSCDSMMSSTSTRSGSSDSSYDFLSTEEKECLLFLEETIGSLDTEADSGLSTDESEPATTPRGFRALPITQPTPRGGPEETITQQGRTPRTVTESSSSHPPEPQGLGLRSGSYSLPRNIHIARSQNFRKSTTQASSHNPGEPGRLAPEPEKEQVSQSSQPRQAPASPQEAALDLDVVLIPPPEAFRDTQPEQCREASLPEGPGQQGHTPQLHTPSSSQEREQTPSEAMSQKAKETVSTRYTQPQPPPAGLPQNARAEDAPLSSGEDPNSRLAPLTTPKPRKLPPNIVLKSSRSSFHSDPQHWLSRHTEAWAGAAG

SEQ ID NO: 737451 - protein, 128 aa, Homo sapiens
GVAGSPRTRSCCPFYLFTACVQGGQGFDGVELGADRVWMHCTAASLPRRQECQCLPSMGFFVLDSPWGPGMVPAYELRPLPRKSVLSGPRLVLVQWGLSLFSPIVRPLAVTCWSPLRHLLFGTDRGLF

SEQ ID NO: 737452 - protein, 126 aa, Homo sapiens
MPEPAKSAPAPKKGSKKAVTKAQKKDGKKRKRSRKESYSVYVYKVLKQVHPDTGISSKAMGIMNSFVNDIFERIAGEASRLAHYNKRSTITSREIQTAVRLLLPGELAKHAVSEGTKAVTKYTSSK

SEQ ID NO: 737453 - protein, 126 aa, Homo sapiens; identical to SEQ ID NO: 737452

SEQ ID NO: 737454 - protein, 126 aa, Homo sapiens; identical to SEQ ID NO: 737452

SEQ ID NO: 737455 - protein, 118 aa, Homo sapiens
MRRAGLGEGVPPGNYGNYGYANSGYSACEEENERLTESLRSKVTAIKSLSIEIGHEVKTQNKLLAEMDSQFDSTTGFLGKTMGKLKILSRGSQTKLLCYMMLFSLFVFFIIYWIIKLR

SEQ ID NO: 737456 - protein, 118 aa, Homo sapiens; identical to SEQ ID NO: 737455

SEQ ID NO: 737457 - protein, 83 aa, Homo sapiens
MRRAGLGEGVPPGNYGNYGYANSGYSACEEENERLTESLRSKVTAIKSLSIEIGHEVKTQNKLLAEMDSQFDSTTGFLGLCPM

SEQ ID NO: 737458 - protein, 118 aa, Homo sapiens; identical to SEQ ID NO: 737455

SEQ ID NO: 737459 - protein, 104 aa, Homo sapiens
QAKFLGVEYERHKREARACCVPTRARRCTSADKSWGSHPLPEHGGREMLRGRREPFWFSLPRPPMSWQGVLGKWEGEPQHTHPDGGDIIAFRPHGNGQPGLRLH

SEQ ID NO: 737460 - protein, 108 aa, Homo sapiens
QCQTETEALGSHSVCSKVAPRAGRKAPPAAKLLLHHPRCRGAAPGGGLQLPLSQGQACGVRAFSGPRPHCPSTGPACGSYADGSFLNAGAAVIFSHSTVIMESENDGA

SEQ ID NO: 737461 - protein, 72 aa, Homo sapiens
LCAMGPSGAFEATFWLLRHHRVILDKKFTLSEPRFFQLAMGMITPSSQGFAEGLLSHRGEELTVCPARSGWP

SEQ ID NO: 737462 - protein, 106 aa, Homo sapiens
FFFLYSFVRDVIHPYARNQQSDFYKIPIEIVNKTLPIVAITLLSLVYLAGLLAAAYQLYYGTKYRRFPPWLETWLQCRKQLGLLSFFFAMVHVAYSLCLPMRRSER

SEQ ID NO: 737463 - protein, 267 aa, Homo sapiens
MASPSKGNDLFSPDEEGPAVVAGPGPGPGGAEGAAEERRVKVSSLPFSVEALMSDKKPPKEASPLPAESASAGATLRPLLLSGHGAREAHSPGPLVKPFETASVKSENSEDGAAWMQEPGRYSPPPRHTSPTTCTLRKHKTNRKPRTPFTTSQLLALERKFRQKQYLSIAERAEFSSSLNLTETQVKIWFQNRRAKAKRLQEAELEKLKMAAKPMLPSSFSLPFPISSPLQAASIYGASYPFHRPVLPIPPVGLYATPVGYGMYHLS

SEQ ID NO: 737464 - protein, 267 aa, Homo sapiens; identical to SEQ ID NO: 737463

SEQ ID NO: 737465 - protein, 267 aa, Homo sapiens; identical to SEQ ID NO: 737463

SEQ ID NO: 737466 - protein, 194 aa, Homo sapiens
MASPSKGNDLFSPDEEGPAVVAGPGPGPGGAEGAAEERRVKVSSLPFSVEALMSDKKPPKEASPLPAESASAGATLRPLLLSGHGAREAHSPGPLVKPFETASVKSENSEDGAAWMQEPGRYSPPPRHTSPTTCTLRKHKTNRKPRTPFTTSQLLALERKFRQKQYLSIAERAEFSSSLNLTETQVKIWFQNRR

SEQ ID NO: 737467 - protein, 267 aa, Homo sapiens; identical to SEQ ID NO: 737463

SEQ ID NO: 737468 - protein, 155 aa, Homo sapiens
VQPFLLAREEGAGPAFWVAEPGAFSQVLNFSERLKSGRAGPRPRSRPQPESFGIGSRELNSGDDAGGASSLFCPGRENAVRVRAEPEVWPEAGTSAVRMWYLIRDKAGVCVSVGPSWGHSGVWEEQTVGESTGQAVPVMSVEATRLQEPEQGDTG

SEQ ID NO: 737469 - protein, 108 aa, Homo sapiens
TLSQKQKQNKTKNMGDLTTPLLWLEQRRNTRRRRDRALQLSLPAWPHACSLNPPATAGCTFFSNEYGIFLKIDHMLAHQTGLDKFKGIEIILDMFSVKFKWKSTTKDS

SEQ ID NO: 737470 - protein, 76 aa, Homo sapiens
YITETSDTASVNRVKDAPLQKWLQAQHGSFPDTRRARTFAETPPTQVEEALAPLLSGWKGNTAGTPQSGKEAGPKP

SEQ ID NO: 737471 - protein, 83 aa, Homo sapiens
NQARKDDDVLHVAPGHAPGTETCPGGNTGTDVDGCPTGATLSREPCAAQGWALSPVSFLQASKYPGRDLTPEFQREERRTVKK

SEQ ID NO: 737472 - protein, 77 aa, Homo sapiens
MGQVWGLVHFTLDLFHTDDEEEREYSEVIEEVTEHVYLPAKAKVAKEGEVHPYPSAPPHYYFEEKDPPDLSFPEDTG

SEQ ID NO: 737473 - protein, 140 aa, Homo sapiens
MVDLLWKSSLAPLIPRVACLFHIPYQLYSIPALDSIGTSRSCTAQSWFVGPMAPRSLMAMHVRHSSLCSIVARQSKRRYIHTLEDHSTVKRNEITDTWHKMNEAQKRKKERWAQKPTYRPGAVAHTCDPRTLGGRGGRTA

SEQ ID NO: 737474 - protein, 153 aa, Homo sapiens
LLLSTAPTWSFPASALGLRKEFLAFEGGDLRHKPVKGTTPIHGEAPASLPYPGSAPIVTSSCARHLGFPVGVRGRGRAWLTLPWTLVPFGHRGVLLAAGSGGSAADPQPGPAPTEAATLCSVCFQQAPPPRASPLLCPKPVGLHHRGLGPGGL

SEQ ID NO: 737475 - protein, 75 aa, Homo sapiens
SVTHKHLVLGLRSLCFSFFAWKLPIPRTLQTASRNLPSTARDEQPQLLWASLLGSLISPEIPREPLRPTARVRGL

SEQ ID NO: 737476 - protein, 107 aa, Homo sapiens
FEGTIREVNATETTHRTAAGQASPLLKSPSLVSHSAHCSLLTKPHTNSKTSSLCFSGPSLDFRLILDRWGNDYLQSRIPYIATFPNSSVLLQYAQNWRGTFFSFPED

SEQ ID NO: 737477 - protein, 330 aa, Homo sapiens
RCGGRGRPGPAQLCPRPARPRPRPPDKPLSDPSSGFKSPGPARRTALLLTPARPVRPSVPLPRGPSKGPLHLGPKMTSVAKVYYSQTTQTESRPLMGPGIRRRRVLTKDGRSNVRMEHIADKRFLYLKDLWTTFIDMQWRYKLLLFSATFAGTWFLFGVVWYLVAVAHGDLLELDPPANHTPCVVQVHTLTGAFLFSLESQTTIGYGFRYISEECPLAIVLLIAQLVLTTILEIFITGTFLAKIARPKKRAETIRFSQHAVVASHNGKPCLMIRVANMRKSLLIGCQVTGKLLQTHQTKEGENIRLNQAAQRRSVSLCPVNGRTQANMFL

SEQ ID NO: 737478 - protein, 454 aa, Homo sapiens
RCGGRGRPGPAQLCPRPARPRPRPPDKPLSDPSSGFKSPGPARRTALLLTPARPVRPSVPLPRGPSKGPLHLGPKMTSVAKVYYSQTTQTESRPLMGPGIRRRRVLTKDGRSNVRMEHIADKRFLYLKDLWTTFIDMQWRYKLLLFSATFAGTWFLFGVVWYLVAVAHGDLLELDPPANHTPCVVQVHTLTGAFLFSLESQTTIGYGFRYISEECPLAIVLLIAQLVLTTILEIFITGTFLAKIARPKKRAETIRFSQHAVVASHNGKPCLMIRVANMRKSLLIGCQVTGKLLQTHQTKEGENIRLNQVNVTFQVDTASDSPFLILPLTFYHVVDETSPLKDLPLRSGEGDFELVLILSGTVESTSATCQVRTSYLPEEILWGYEFTPAISLSASGKYIADFSLFDQVVKVASPSGLRDSTVRYGDPEKLKLEESLREQAEKEGSALSVRISNV

SEQ ID NO: 737479 - protein, 454 aa, Homo sapiens; identical to SEQ ID NO: 737478

SEQ ID NO: 737480 - protein, 33 aa, Homo sapiens
MGWSQVLAQPLGPATPTSVNLFTHLQIGDDMFL

SEQ ID NO: 737481 - protein, 123 aa, Homo sapiens
FFCYGHPSCMAPHLSHHRSRNTWGGSCCASFSILPPPHTIRIRISLHVASASVPFQAGATFPRSDAAASAPASDRPTRYHLSLRGIWEMRGRPAPRPPPLPTTCWDKVLAGCQNGWGWGQPWP

SEQ ID NO: 737482 - protein, 146 aa, Homo sapiens
MQPGSSRCEEETPSLLWGLDPVFLAFAKLYIRDILDMKESRQVPGVFLYNGHPIKQVDVLGTVIGVRERDAFYSYGVDDSTGVINCICWKKLNTESVSAAPSAARELSLTSQLKKLQETIEQYREEREIHATAYYKVDDPVWNFCG

SEQ ID NO: 737483 - protein, 102 aa, Homo sapiens
YHRVTPQCKIRYVYQQLCIFIEDHEFTHSLKKPIYVTREDKDLHRKIHRIIQQDCQKPNHMEKGCHFLHILACARLSIRPGLSEAVLQQVLELLEDHYYTAF

SEQ ID NO: 737484 - protein, 368 aa, Homo sapiens
MQPGSSRCEEETPSLLWGLDPVFLAFAKLYIRDILDMKESRQVPGVFLYNGHPIKQVDVLGTVIGVRERDAFYSYGVDDSTGVINCICWKKLNTESVSAAPSAARELSLTSQLKKLQETIEQKTKIEIGDTIRVRGSIRTYREEREIHATAYYKVDDPVWNIQIARMLELPTIYRKVYDQPFHSSALEKEEALSNPGALDLPSLTSLLSEKAKEFLMENRVQSFYQQELEMVESLLSLANQPVIHSACSDQVNFKKDTTSKAIHSIFKNAIQLLQEKGLVFQKDDGFDNLYYVTREDKDLHRKIHRIIQQDCQKPNHMEKGCHFLHILACARLSIRPGLSEAVLQQVLELLEDQSDIVSTMEHYYTAF

SEQ ID NO: 737485 - protein, 368 aa, Homo sapiens; identical to SEQ ID NO: 737484

SEQ ID NO: 737486 - protein, 368 aa, Homo sapiens; identical to SEQ ID NO: 737484

SEQ ID NO: 737487 - protein, 368 aa, Homo sapiens; identical to SEQ ID NO: 737484

SEQ ID NO: 737488 - protein, 359 aa, Homo sapiens
MQPGSSRCEEETPSLLWGLDPVFLAFAKLYIRDILDMKESRQVPGVFLYNGHPIKQVDVLGTVIGVRERDAFYSYGVDDSTGVINCICWKKLNTESVSAAPSAARELSLTSQLKKLQETIEQKTKIEIGDTIRVRGSIRTYREEREIHATAYYKVDDPVWNIQIARMLELPTIYRKVYDQPFHSSALEKEEALSNPGALDLPSLTSLLSEKAKEFLMENRVQSFYQQELEMVESLLSLANQPVIHSACSDQVNFKKDTTSKAIHSIFKNAIQLLQEKGLVFQKDDGFDNLYYVTREDKDLHRKIHRIIQQDCQKPNHMEKGCHFLHILACARLSIRPGLSEAVLQQVLELLEDHYYTAF

SEQ ID NO: 737489 - protein, 593 aa, Homo sapiens
GKEMKSKVDTIVNFTHQHFTSQFEVTVWAPRLPLQIEISDTELSQIKGWRIPVAANRRPTRESDDEDDEEKKGRGCSLQYQHATVRVLTQFVAESPDLGQLTYMLGPDWQFDITDLVTEFMKVEEPKIAQLQDGRTLAGREPGITTVQVLSPLSDSILAEKTVIVLDDRVTIAELGVQLVAGMSLSLQPHRADKRAIVSTAAALDVLQSPQQEAIVSSWILFSDGSVTPLDIYDPKDYSVTVSSLDEMVVSVQANLESKWPIVVAEGEGQGPLIKLEMMISEPCQKTKRKSVLAVGKGNVKVKFEPSSDEHQGGSNDIEGINREYKDHLSNSIEREGNQERAVQEWFHRGTPVGQEESTNKSTTPQSPMEGKNKLLKSGGPDAFTSFPTQGKSPDPNNPSDLTVTSRGLTDLEIGMYALLCVFCLAILVFLINCVAFAWKYRHKRFAVSEQGNIPHSHDWVWLGNEVELLENPVDITLPSEECTTMIDRGLQFEERNFLLNGSSQKTFHSQLLRPSDYVYEKEIKNEPMNSSGPKRKRVKFTSYTTILPEDGGPYTNSILFDSDDNIKWVCQDMGLGDSQDFRDYMESLQDQM

SEQ ID NO: 737490 - protein, 228 aa, Homo sapiens
GKEMKSKVDTIVNFTHQHFTSQFEVTVWAPRLPLQIEISDTELSQIKGWRIPVAANRRPTRESDDEDDEEKKGRGCSLQYQHATVRVLTQFVAESPDLGQLTYMLGPDWQFDITDLVTEFMKVEEPKIAQLQDGRTLAGREPGITTVQVLSPLSDSILAEKTVIVLDDRVTIAELGVQLVAGMSLSLQPHRADKRAIVSTARMESDNGERTCGNRLGKCYAVVPSVER

SEQ ID NO: 737491 - protein, 242 aa, Homo sapiens
REGSGKMASLDRVKVLVLGDSGVGKSSLVHLLCQNQVLGNPSWTVGCSVDVRVHDYKEGTPEEKTYYIELWDVGGSVGSASSVKSTRAVFYNSVNGIIFVHDLTNKKSSQNLRRWSLEALNRDLVPTGVLVTNGDYDQEQFADNQIPLLVIGTKLDQIHETKRHEVLTRTAFLAEDFNPEEINLDCTNPRYLAAGSSNAVKLSRFFDKVIEKRYFLREGNQIPGFPDRKRFGAGTLKSLHYD

SEQ ID NO: 737492 - protein, 291 aa, Homo sapiens
MFEGSGMMASLESGEVPVLGDYRDNKSCDEEPSRNLKLREWFQDDQLGTAPVYSSQRERRRRQVISAFPTGVGKSSLVHLLCQNQVLGNPSWTVGCSVDVRVHDYKEGTPEEKTYYIELWDVGGSVGSASSVKSTRAVFYNSVNGIIFVHDLTNKKSSQNLRRWSLEALNRDLVPTGVLVTNGDYDQEQFADNQIPLLVIGTKLDQIHETKRHEVLTRTAFLAEDFNPEEINLDCTNPRYLAAGSSNAVKLSRFFDKVIEKRYFLREGNQIPGFPDRKRFGAGTLKSLHYD

SEQ ID NO: 737493 - protein, 242 aa, Homo sapiens; identical to SEQ ID NO: 737491

SEQ ID NO: 737494 - protein, 106 aa, Homo sapiens
REGSGKMASLDRVKVLVLGDSGVGKSSLVHLLCQNQVLGNPSWTVGCSVDVRVHDYKEGTPEEKTYYIELWDVGGSVGSASSTTNSPSSTTNSAAPRIRRAAPRIR

SEQ ID NO: 737495 - protein, 72 aa, Homo sapiens
MGVATTLQPPTTSKTLQKQHLEAVGAYQYVLTFLFMGPFFSLLVFVLLFTSLWPFSVFYLVWLYVDWDTPNQ

SEQ ID NO: 737496 - protein, 188 aa, Homo sapiens
MPAGCPPHSTTASLPQHGDRGFPFAAAAAAGQAPPRPRPAAAMQFMLLFSRQGKLRLQKWYVPLSDKEKKKITRELVQTVLARKPKMCSFLEWRDLKIVYKRYASLYFCCAIEDQDNELITLEIIHRYVELLDKYFGSVCELDIIFNFEKAYFILDEFLLGGEVQETSKKNVLKAIEQADLLQEDAKG

SEQ ID NO: 737497 - protein, 188 aa, Homo sapiens; identical to SEQ ID NO: 737496

SEQ ID NO: 737498 - protein, 188 aa, Homo sapiens; identical to SEQ ID NO: 737496

SEQ ID NO: 737499 - protein, 188 aa, Homo sapiens; identical to SEQ ID NO: 737496

SEQ ID NO: 737500 - protein, 188 aa, Homo sapiens; identical to SEQ ID NO: 737496

SEQ ID NO: 737501 - protein, 146 aa, Homo sapiens
MQFMLLFSRQGKLRLQKWYVPLSDKEKKKITRELVQTVLARKPKMCSFLEWRDLKIVYKRYASLYFCCAIEDQDNELITLEIIHRYVELLDKYFGSVCELDIIFNFEKAYFILDEFLLGGEVQETSKKNVLKAIEQADLLQEDAKG

SEQ ID NO: 737502 - protein, 168 aa, Homo sapiens
KNAEQLLRSLESLSSPKDDKDVMQFMLLFSRQGKLRLQKWYVPLSDKEKKKITRELVQTVLARKPKMCSFLEWRDLKIVYKRYASLYFCCAIEDQDNELITLEIIHRYVELLDKYFGSVCELDIIFNFEKAYFILDEFLLGGEVQETSKKNVLKAIEQADLLQEDAKG

SEQ ID NO: 737503 - protein, 150 aa, Homo sapiens
ILNEINPPPPFSRQGKLRLQKWYVPLSDKEKKKITRELVQTVLARKPKMCSFLEWRDLKIVYKRYASLYFCCAIEDQDNELITLEIIHRYVELLDKYFGSVCELDIIFNFEKAYFILDEFLLGGEVQETSKKNVLKAIEQADLLQEDAKG

SEQ ID NO: 737504 - protein, 188 aa, Homo sapiens
MPAGCPPHSTTASLPQHGDRGFPFAAAAAAGQAPPRPRPAAAMQFMLLFSRQGKLRLQKWYVPLSDKEKKKITRELVQTVLARKPKMCSFLEWRDLKIVYKRYASLYFCCAIEDQDNELITLEIIHRYVELLDKYFGSVCELDIIFNFEKAYFILDEFLLGGEVQETSKKNVLKAIEQADLLQEDEPE

SEQ ID NO: 737505 - protein, 203 aa, Homo sapiens
MPAGCPPHSTTASLPQHGDRGFPFAAAAAAGQAPPRPRPAAAMQFMLLFSRQGKLRLQKWYVPLSDKEKKKITRELVQTVLARKPKMCSFLEWRDLKIVYKRYASLYFCCAIEDQDNELITLEIIHRYVELLDKYFGSVCELDIIFNFEKAYFILDEFLLGGEVQETSKKNVLKAIEQADLLQEDEFLFFLKDVFPVKRGFSL

SEQ ID NO: 737506 - protein, 203 aa, Homo sapiens; identical to SEQ ID NO: 737505

SEQ ID NO: 737507 - protein, 188 aa, Homo sapiens
MPAGCPPHSTTASLPQHGDRGFPFAAAAAAGQAPPRPRPAAAMQFMLLFSRQGKLRLQKWYVPLSDKEKKKITRELVQTVLARKPKMCSFLEWRDLKIVYKRYASLYFCCAIEDQDNELITLEIIHRYVELLDKYFGSVCELDIIFNFEKAYFILDEFLLGGEVQETSKKNVLKAIEQADLLQEDATS

SEQ ID NO: 737508 - protein, 150 aa, Homo sapiens
ILNEINPPPPFSRQGKLRLQKWYVPLSDKEKKKITRELVQTVLARKPKMCSFLEWRDLKIVYKRYASLYFCCAIEDQDNELITLEIIHRYVELLDKYFGSVCELDIIFNFEKAYFILDEFLLGGEVQETSKKNVLKAIEQADLLQEDATS

SEQ ID NO: 737509 - protein, 1556 aa, Homo sapiens
MKLYVFLVNTGTTLTFDTELTVQTVADLKHAIQSKYKIAIQHQVLVVNGGECMAADRRVCTYSAGTDTNPIFLFNKEMILCDRPPAIPKTTFSTENDMEIKVEESLMMPAVFHTVASRTQLALEMYEVAKKLCSFCEGLVHDEHLQHQGWAAIMANLEDCSNSYQKLLFKFESIYSNYLQSIEDIKLKLTHLGTAVSVMAKIPLLECLTRHSYRECLGRLDSLPEHEDSEKAETKRSTELVLSPDMPRTTNESLLTSFPKSVEHVSPDTADAESGKEIRESCQSTVHQQDETTIDTKDGDLPFFNVSLLDWINVQDRPNDVESLVRKCFDSMSRLDPRIIRPFIAECRQTIAKLDNQNMKAIKGLEDRLYALDQMIASCGRLVNEQKELAQGFLANQKRAENLKDASVLPDLCLSHANQLMIMLQNHRKLLDIKQKCTTAKQELANNLHVRLKWCCFVMLHADQDGEKLQALLRLVIELLERVKIVEALSTVPQMYCLAVVEVVRRKMFIKHYREWAGALVKDGKRLYEAEKSKRESFGKLFRKSFLRNRLFRGLDSWPPSFCTQKPRKFDCELPDISLKDLQFLQSFCPSEVQPFLRVPLLCDFEPLHQHVLALHNLVKAAQSLDEMSQTITDLLSEQKASVSQTSPQSASSPRMESTAGITTTTSPRTPPPLTVQDPLCPAVCPLEELSPDSIDAHTFDFETIPHPNIEQTIHQVSLDLDSLAESPESDFMSAVNEFVIEENLSSPNPISDPQSPEMMVESLYSSVINAIDSRRMQDTNVCGKEDFGDHTSLNVQLERCRVVAQDSHFSIQTIKEDLCHFRTFVQKEQCDFSNSLKCTAVEIRNIIEKVKCSLEITLKEKHQKELLSLKNEYEGKLDGLIKETEENENKIKKLKGELVCLEEVLQNKDNEFALVKHEKEAVICLQNEKDQKLLEMENIMHSQNCEIKELKQSREIVLEDLKKLHVENDEKLQLLRAELQSLEQSHLKELEDTLQVRHIQEFEKVMTDHRVSLEELKKENQQIINQIQESHAEIIQEKEKQLQELKLKVSDLSDTRCKLEVELALKEAETDEIKILLEESRAQQKETLKSLLEQETENLRTEISKLNQKIQDNNENYQVGLAELRTLMTIEKDQCISELISRHEEESNILKAELNKVTSLHNQAFEIEKNLKEQIIELQSKLDSELSALERQKDEKITQQEEKYEAIIQNLEKDRQKLVSSQEQDREQLIQKLNCEKDEAIQTALKEFKLEREVVEKELLEKVKHLENQIAKSPAIDSTRGDSSSLVAELQEKLQEEKAKFLEQLEEQEKRKNEEMQNVRTSLIAEQQTNFNTVLTREKMRKENIINDLSDKLKSTMQQQERDKDLIESLSEDRARLLEEKKKLEEEVSKLRSSSFVPSPYVATAPELYGACAPELPGESDRSAVETADEGRVDSAMETSMMSVQENIHMLSEEKQRIMLLERTLQLKEEENKRLNQRLMSQSMSSVSSRHSEKIAIRDFQVGDLVLIILDERHDNYVLFTVSPTLYFLHSESLPALDLKPRLQVHLEDPGYLEK

SEQ ID NO: 737510 - protein, 1556 aa, Homo sapiens; identical to SEQ ID NO: 737509

SEQ ID NO: 737511 - protein, 929 aa, Homo sapiens
MSQTITDLLSEQKASVSQTSPQSASSPRMESTAGITTTTSPRTPPPLTVQDPLCPAVCPLEELSPDSIDAHTFDFETIPHPNIEQTIHQVSLDLDSLAESPESDFMSAVNEFVIEENLSSPNPISDPQSPEMMVESLYSSVINAIDSRRMQDTNVCGKEDFGDHTSLNVQLERCRVVAQDSHFSIQTIKEDLCHFRTFVQKEQCDFSNSLKCTAVEIRNIIEKVKCSLEITLKEKHQKELLSLKNEYEGKLDGLIKETEENENKIKKLKGELVCLEEVLQNKDNEFALVKHEKEAVICLQNEKDQKLLEMENIMHSQNCEIKELKQSREIVLEDLKKLHVENDEKLQLLRAELQSLEQSHLKELEDTLQVRHIQEFEKVMTDHRVSLEELKKENQQIINQIQESHAEIIQEKEKQLQELKLKVSDLSDTRCKLEVELALKEAETDEIKILLEESRAQQKETLKSLLEQETENLRTEISKLNQKIQDNNENYQVGLAELRTLMTIEKDQCISELISRHEEESNILKAELNKVTSLHNQAFEIEKNLKEQIIELQSKLDSELSALERQKDEKITQQEEKYEAIIQNLEKDRQKLVSSQEQDREQLIQKLNCEKDEAIQTALKEFKLEREVVEKELLEKVKHLENQIAKSPAIDSTRGDSSSLVAELQEKLQEEKAKFLEQLEEQEKRKNEEMQNVRTSLIAEQQTNFNTVLTREKMRKENIINDLSDKLKSTMQQQERDKDLIESLSEDRARLLEEKKKLEEEVSKLRSSSFVPSPYVATAPELYGACAPELPGESDRSAVETADEGRVDSAMETSMMSVQENIHMLSEEKQRIMLLERTLQLKEEENKRLNQRLMSQSMSSVSSRHSEKIAIRDFQVGDLVLIILDERHDNYVLFTVSPTLYFLHSESLPALDLKPRLQVHLEDPGYLEK

SEQ ID NO: 737512 - protein, 1556 aa, Homo sapiens; identical to SEQ ID NO: 737509

SEQ ID NO: 737513 - protein, 1559 aa, Homo sapiens
  misc_feature (1554)..(1554): Xaa can be any naturally occurring amino acid
MKLYVFLVNTGTTLTFDTELTVQTVADLKHAIQSKYKIAIQHQVLVVNGGECMAADRRVCTYSAGTDTNPIFLFNKEMILCDRPPAIPKTTFSTENDMEIKVEESLMMPAVFHTVASRTQLALEMYEVAKKLCSFCEGLVHDEHLQHQGWAAIMANLEDCSNSYQKLLFKFESIYSNYLQSIEDIKLKLTHLGTAVSVMAKIPLLECLTRHSYRECLGRLDSLPEHEDSEKAETKRSTELVLSPDMPRTTNESLLTSFPKSVEHVSPDTADAESGKEIRESCQSTVHQQDETTIDTKDGDLPFFNVSLLDWINVQDRPNDVESLVRKCFDSMSRLDPRIIRPFIAECRQTIAKLDNQNMKAIKGLEDRLYALDQMIASCGRLVNEQKELAQGFLANQKRAENLKDASVLPDLCLSHANQLMIMLQNHRKLLDIKQKCTTAKQELANNLHVRLKWCCFVMLHADQDGEKLQALLRLVIELLERVKIVEALSTVPQMYCLAVVEVVRRKMFIKHYREWAGALVKDGKRLYEAEKSKRESFGKLFRKSFLRNRLFRGLDSWPPSFCTQKPRKFDCELPDISLKDLQFLQSFCPSEVQPFLRVPLLCDFEPLHQHVLALHNLVKAAQSLDEMSQTITDLLSEQKASVSQTSPQSASSPRMESTAGITTTTSPRTPPPLTVQDPLCPAVCPLEELSPDSIDAHTFDFETIPHPNIEQTIHQVSLDLDSLAESPESDFMSAVNEFVIEENLSSPNPISDPQSPEMMVESLYSSVINAIDSRRMQDTNVCGKEDFGDHTSLNVQLERCRVVAQDSHFSIQTIKEDLCHFRTFVQKEQCDFSNSLKCTAVEIRNIIEKVKCSLEITLKEKHQKELLSLKNEYEGKLDGLIKETEENENKIKKLKGELVCLEEVLQNKDNEFALVKHEKEAVICLQNEKDQKLLEMENIMHSQNCEIKELKQSREIVLEDLKKLHVENDEKLQLLRAELQSLEQSHLKELEDTLQVRHIQEFEKVMTDHRVSLEELKKENQQIINQIQESHAEIIQEKEKQLQELKLKVSDLSDTRCKLEVELALKEAETDEIKILLEESRAQQKETLKSLLEQETENLRTEISKLNQKIQDNNENYQVGLAELRTLMTIEKDQCISELISRHEEESNILKAELNKVTSLHNQAFEIEKNLKEQIIELQSKLDSELSALERQKDEKITQQEEKYEAIIQNLEKDRQKLVSSQEQDREQLIQKLNCEKDEAIQTALKEFKLEREVVEKELLEKVKHLENQIAKSPAIDSTRGDSSSLVAELQEKLQEEKAKFLEQLEEQEKRKNEEMQNVRTSLIAEQQTNFNTVLTREKMRKENIINDLSDKLKSTMQQQERDKDLIESLSEDRARLLEEKKKLEEEVSKLRSSSFVPSPYVATAPELYGACAPELPGESDRSAVETADEGRVDSAMETSMMSVQENIHMLSEEKQRIMLLERTLQLKEEENKRLNQRLMSQSMSSVSSRHSEKIAIRDFQVGDLVLIILDERHDNYVLFTVSPTLYFLHSESLPALDLKPTQAFKGGNPKKXTPGGN

SEQ ID NO: 737514 - protein, 1346 aa, Homo sapiens
MKLYVFLVNTGTTLTFDTELTVQTVADLKHAIQSKYKIAIQHQVLVVNGGECMAADRRVCTYSAGTDTNPIFLFNKEMILCDRPPAIPKTTFSTENDMEIKVEESLMMPAVFHTVASRTQLALEMYEVAKKLCSFCEGLVHDEHLQHQGWAAIMANLEDCSNSYQKLLFKFESIYSNYLQSIEDIKLKLTHLGTAVSVMAKIPLLECLTRHSYRECLGRLDSLPEHEDSEKAETKRSTELVLSPDMPRTTNESLLTSFPKSVEHVSPDTADAESGKEIRESCQSTVHQQDETTIDTKDGDLPFFNVSLLDWINVQDRPNDVESLVRKCFDSMSRLDPRIIRPFIAECRQTIAKLDNQNMKAIKGLEDRLYALDQMIASCGRLVNEQKELAQGFLANQKRAENLKDASVLPDLCLSHANQLMIMLQNHRKLLDIKQKCTTAKQELANNLHVRLKWCCFVMLHADQDGEKLQALLRLVIELLERVKIVEALSTVPQMYCLAVVEVVRRKMFIKHYREWAGALVKDGKRLYEAEKSKRESFGKLFRKSFLRNRLFRGLDSWPPSFCTQKPRKFDCELPDISLKDLQFLQSFCPSEVQPFLRVPLLCDFEPLHQHVLALHNLVKAAQSLDEMSQTITDLLSEQKASVSQTSPQSASSPRMESTAGITTTTSPRTPPPLTVQDPLCPAVCPLEELSPDSIDAHTFDFETIPHPNIEQTIHQVSLDLDSLAESPESDFMSAVNEFVIEENLSSPNPISDPQSPEMMVESLYSSVINAIDSRRMQDTNVCGKEDFGDHTSLNVQLERCRVVAQDSHFSIQTIKEDLCHFRTFVQKEQCDFSNSLKCTAVEIRNIIEKVKCSLEITLKEKHQKELLSLKNEYEGKLDGLIKETEENENKIKKLKGELVCLEEVLQNKDNEFALVKHEKEAVICLQNEKDQKLLEMENIMHSQNCEIKELKQSREIVLEDLKKLHVENDEKLQLLRAELQSLEQSHLKELEDTLQVRHIQEFEKVMTDHRVSLEELKKENQQIINQIQESHAEIIQEKEKQLQELKLKVSDLSDTRCKLEVELALKEAETDEIKILLEESRAQQKETLKSLLEQETENLRTEISKLNQKIQDNNENYQVGLAELRTLMTIEKDQCISELISRHEEESNILKAELNKVTSLHNQAFEIEKNLKEQIIELQSKLDSELSALERQKDEKITQQEEKYEAIIQNLEKDRQKLVSSQEQDREQLIQKLNCEKDEAIQTALKEFKLEREVVEKELLEKVKHLENQIAKSPAIDSTRGDSSSLVAELQEKLQEEKAKFLEQLEEQEKRKNEEMQNVRTSLIAEQQTNFNTVLTREKLLRKSY

SEQ ID NO: 737515 - protein, 384 aa, Homo sapiens
  misc_feature (2)..(2): Xaa can be any naturally occurring amino acid
  misc_feature (7)..(7): Xaa can be any naturally occurring amino acid
LXGTVEXRSKLDSELSALERQKDEKITQQEEKYEAIIQNLEKDRQKLVSSQEQDREQLIQKLNCEKDEAIQTALKEFKLEREVVEKELLEKVKHLENQIAKSPAIDSTRGDSSSLVAELQEKLQEEKAKFLEQLEEQEKRKNEEMQNVRTSLIAEQQTNFNTVLTREKMRKENIINDLSDKLKSTMQQQERDKDLIESLSEDRARLLEEKKKLEEEVSKLRSSSFVPSPYVATAPELYGACAPELPGESDRSAVETADEGRVDSAMETSMMSVQENIHMLSEEKQRIMLLERTLQLKEEENKRLNQRLMSQSMSSVSSRHSEKIAIRDFQVGDLVLIILDERHDNYVLFTVSPTLYFLHSESLPALDLKPRLQVHLEDPGYLEK

SEQ ID NO: 737516 - protein, 1274 aa, Homo sapiens
MKLYVFLVNTGTTLTFDTELTVQTVADLKHAIQSKYKIAIQHQVLVVNGGECMAADRRVCTYSAGTDTNPIFLFNKEMILCDRPPAIPKTTFSTENDMEIKVEESLMMPAVFHTVASRTQLALEMYEVAKKLCSFCEGLVHDEHLQHQGWAAIMANLEDCSNSYQKLLFKFESIYSNYLQSIEDIKLKLTHLGTAVSVMAKIPLLECLTRHSYRECLGRLDSLPEHEDSEKAETKRSTELVLSPDMPRTTNESLLTSFPKSVEHVSPDTADAESGKEIRESCQSTVHQQDETTIDTKDGDLPFFNVSLLDWINVQDRPNDVESLVRKCFDSMSRLDPRIIRPFIAECRQTIAKLDNQNMKAIKGLEDRLYALDQMIASCGRLVNEQKELAQGFLANQKRAENLKDASVLPDLCLSHANQLMIMLQNHRKLLDIKQKCTTAKQELANNLHVRLKWCCFVMLHADQDGEKLQALLRLVIELLERVKIVEALSTVPQMYCLAVVEVVRRKMFIKHYREWAGALVKDGKRLYEAEKSKRESFGKLFRKSFLRNRLFRGLDSWPPSFCTQKPRKFDCELPDISLKDLQFLQSFCPSEVQPFLRVPLLCDFEPLHQHVLALHNLVKAAQSLDEMSQTITDLLSEQKASVSQTSPQSASSPRMESTAGITTTTSPRTPPPLTVQDPLCPAVCPLEELSPDSIDAHTFDFETIPHPNIEQTIHQVSLDLDSLAESPESDFMSAVNEFVIEENLSSPNPISDPQSPEMMVESLYSSVINAIDSRRMQDTNVCGKEDFGDHTSLNVQLERCRVVAQDSHFSIQTIKEDLCHFRTFVQKEQCDFSNSLKCTAVEIRNIIEKVKCSLEITLKEKHQKELLSLKNEYEGKLDGLIKETEENENKIKKLKGELVCLEEVLQNKDNEFALVKHEKEAVICLQNEKDQKLLEMENIMHSQNCEIKELKQSREIVLEDLKKLHVENDEKLQLLRAELQSLEQSHLKELEDTLQVRHIQEFEKVMTDHRVSLEELKKENQQIINQIQESHAEIIQEKEKQLQELKLKVSDLSDTRCKLEVELALKEAETDEIKILLEESRAQQKETLKSLLEQETENLRTEISKLNQKIQDNNENYQVGLAELRTLMTIEKDQCISELISRHEEESNILKAELNKVTSLHNQAFEIEKNLKEQIIELQSKLDSELSALERQKDEKITQQEEKYEAIIQNLEKDRQKLVSSQEQDREQLIQKLNCEKDEAIQTALKEFKLEREVVEKELLEKVKHLENQIAKR

SEQ ID NO: 737517 - protein, 375 aa, Homo sapiens
LVVVRPSFFIDEKIMEIHIQEEKYEAIIQNLEKDRQKLVSSQEQDREQLIQKLNCEKDEAIQTALKEFKLEREVVEKELLEKVKHLENQIAKSPAIDSTRGDSSSLVAELQEKLQEEKAKFLEQLEEQEKRKNEEMQNVRTSLIAEQQTNFNTVLTREKMRKENIINDLSDKLKSTMQQQERDKDLIESLSEDRARLLEEKKKLEEEVSKLRSSSFVPSPYVATAPELYGACAPELPGESDRSAVETADEGRVDSAMETSMMSVQENIHMLSEEKQRIMLLERTLQLKEEENKRLNQRLMSQSMSSVSSRHSEKIAIRDFQVGDLVLIILDERHDNYVLFTVSPTLYFLHSESLPALDLKPRLQVHLEDPGYLEK

SEQ ID NO: 737518 - protein, 912 aa, Homo sapiens
MKLYVFLVNTGTTLTFDTELTVQTVADLKHAIQSKYKIAIQHQVLVVNGGECMAADRRVCTYSAGTDTNPIFLFNKEMILCDRPPAIPKTTFSTENDMEIKVEESLMMPAVFHTVASRTQLALEMYEVAKKLCSFCEGLVHDEHLQHQGWAAIMANLEDCSNSYQKLLFKFESIYSNYLQSIEDIKLKLTHLGTAVSVMAKIPLLECLTRHSYRECLGRLDSLPEHEDSEKAETKRSTELVLSPDMPRTTNESLLTSFPKSVEHVSPDTADAESGKEIRESCQSTVHQQDETTIDTKDGDLPFFNVSLLDWINVQDRPNDVESLVRKCFDSMSRLDPRIIRPFIAECRQTIAKLDNQNMKAIKGLEDRLYALDQMIASCGRLVNEQKELAQGFLANQKRAENLKDASVLPDLCLSHANQLMIMLQNHRKLLDIKQKCTTAKQELANNLHVRLKWCCFVMLHADQDGEKLQALLRLVIELLERVKIVEALSTVPQMYCLAVVEVVRRKMFIKHYREWAGALVKDGKRLYEAEKSKRESFGKLFRKSFLRNRLFRGLDSWPPSFCTQKPRKFDCELPDISLKDLQFLQSFCPSEVQPFLRVPLLCDFEPLHQHVLALHNLVKAAQSLDEMSQTITDLLSEQKASVSQTSPQSASSPRMESTAGITTTTSPRTPPPLTVQDPLCPAVCPLEELSPDSIDAHTFDFETIPHPNIEQTIHQVSLDLDSLAESPESDFMSAVNEFVIEENLSSPNPISDPQSPEMMVESLYSSVINAIDSRRMQDTNVCGKEDFGDHTSLNVQLERCRVVAQDSHFSIQTIKEDLCHFRTFVQKEQCDFSNSLKCTAVEIRNIIEKVKCSLEITLKEKHQKELLSLKNEYEGKLDGLIKETEENENKIKKLKGELVCLTHFIPYNGSS

SEQ ID NO: 737519 - protein, 1556 aa, Homo sapiens; identical to SEQ ID NO: 737509

SEQ ID NO: 737520 - protein, 1556 aa, Homo sapiens; identical to SEQ ID NO: 737509

SEQ ID NO: 737521 - protein, 1549 aa, Homo sapiens
MKLYVFLVNTGTTLTFDTELTVQTVADLKHAIQSKYKIAIQHQVLVVNGGECMAADRRVCTYSAGTDTNPIFLFNKEMILCDRPPAIPKTTFSTENDMEIKVEESLMMPAVFHTVASRTQLALEMYEVAKKLCSFCEGLVHDEHLQHQGWAAIMANLEDCSNSYQKLLFKFESIYSNYLQSIEDIKLKLTHLGTAVSVMAKIPLLECLTRHSYRECLGRLDSLPEHEDSEKAETKRSTELVLSPDMPRTTNESLLTSFPKSVEHVSPDTADAESGKEIRESCQSTVHQQDETTIDTKDGDLPFFNVSLLDWINVQDRPNDVESLVRKCFDSMSRLDPRIIRPFIAECRQTIAKLDNQNMKAIKGLEDRLYALDQMIASCGRLVNEQKELAQGFLANQKRAENLKDASVLPDLCLSHANQLMIMLQNHRKLLDIKQKCTTAKQELANNLHVRLKWCCFVMLHADQDGEKLQALLRLVIELLERVKIVEALSTVPQMYCLAVVEVVRRKMFIKHYREWAGALVKDGKRLYEAEKSKRESFGKLFRKSFLRNRLFRGLDSWPPSFCTQKPRKFDCELPDISLKDLQFLQSFCPSEVQPFLRVPLLCDFEPLHQHVLALHNLVKAAQSLDEMSQTITDLLSEQKASVSQTSPQSASSPRMESTAGITTTTSPRTPPPLTVQDPLCPAVCPLEELSPDSIDAHTFDFETIPHPNIEQTIHQVSLDLDSLAESPESDFMSAVNEFVIEENLSSPNPISDPQSPEMMVESLYSSVINAIDSRRMQDTNVCGKEDFGDHTSLNVQLERCRVVAQDSHFSIQTIKEDLCHFRTFVQKEQCDFSNSLKCTAVEIRNIIEKVKCSLEITLKEKHQKELLSLKNEYEGKLDGLIKETEENENKIKKLKGELVCLEEVLQNKDNEFALVKHEKEAVICLQNEKDQKLLEMENIMHSQNCEIKELKQSREIVLEDLKKLHVENDEKLQLLRAELQSLEQSHLKELEDTLQVRHIQEFEKVMTDHRVSLEELKKENQQIINQIQESHAEIIQEKEKQLQELKLKVSDLSDTRCKLEVELALKEAETDEIKILLEESRAQQKETLKSLLEQETENLRTEISKLNQKIQDNNENYQVGLAELRTLMTIEKDQCISELISRHEEESNILKAELNKVTSLHNQAFEIEKNLKEQIIELQSKLDSELSALERQKDEKITQQEEKYEAIIQNLEKDRQKLVSSQEQDREQLIQKLNCEKDEAIQTALKEFKLEREVVEKELLEKVKHLENQIAKRGDSSSLVAELQEKLQEEKAKFLEQLEEQEKRKNEEMQNVRTSLIAEQQTNFNTVLTREKMRKENIINDLSDKLKSTMQQQERDKDLIESLSEDRARLLEEKKKLEEEVSKLRSSSFVPSPYVATAPELYGACAPELPGESDRSAVETADEGRVDSAMETSMMSVQENIHMLSEEKQRIMLLERTLQLKEEENKRLNQRLMSQSMSSVSSRHSEKIAIRDFQVGDLVLIILDERHDNYVLFTVSPTLYFLHSESLPALDLKPRLQVHLEDPGYLEK

SEQ ID NO: 737522 - protein, 1314 aa, Homo sapiens
MKLYVFLVNTGTTLTFDTELTVQTVADLKHAIQSKYKIAIQHQVLVVNGGECMAADRRVCTYSAGTDTNPIFLFNKEMILCDRPPAIPKTTFSTENDMEIKVEESLMMPAVFHTVASRTQLALEMYEVAKKLCSFCEGLVHDEHLQHQGWAAIMANLEDCSNSYQKLLFKFESIYSNYLQSIEDIKLKLTHLGTAVSVMAKIPLLECLTRHSYRECLGRLDSLPEHEDSEKAETKRSTELVLSPDMPRTTNESLLTSFPKSVEHVSPDTADAESGKEIRESCQSTVHQQDETTIDTKDGDLPFFNVSLLDWINVQDRPNDVESLVRKCFDSMSRLDPRIIRPFIAECRQTIAKLDNQNMKAIKGLEDRLYALDQMIASCGRLVNEQKELAQGFLANQKRAENLKDASVLPDLCLSHANQLMIMLQNHRKLLDIKQKCTTAKQELANNLHVRLKWCCFVMLHADQDGEKLQALLRLVIELLERVKIVEALSTVPQMYCLAVVEVVRRKMFIKHYREWAGALVKDGKRLYEAEKSKRESFGKLFRKSFLRNRLFRGLDSWPPSFCTQKPRKFDCELPDISLKDLQFLQSFCPSEVQPFLRVPLLCDFEPLHQHVLALHNLVKAAQSLDEMSQTITDLLSEQKASVSQTSPQSASSPRMESTAGITTTTSPRTPPPLTVQDPLCPAVCPLEELSPDSIDAHTFDFETIPHPNIEQTIHQVSLDLDSLAESPESDFMSAVNEFVIEENLSSPNPISDPQSPEMMVESLYSSVINAIDSRRMQDTNVCGKEDFGDHTSLNVQLERCRVVAQDSHFSIQTIKEDLCHFRTFVQKEQCDFSNSLKCTAVEIRNIIEKVKCSLEITLKEKHQKELLSLKNEYEGKLDGLIKETEENENKIKKLKGELVCLEEVLQNKDNEFALVKHEKEAVICLQNEKDQKLLEMENIMHSQNCEIKELKQSREIVLEDLKKLHVENDEKLQLLRAELQSLEQSHLKELEDTLQVRHIQEFEKVMTDHRVSLEELKKENQQIINQIQESHAEIIQEKEKQLQELKLKVSDLSDTRCKLEVELALKEAETDEIKILLEESRAQQKETLKSLLEQETENLRTEISKLNQKIQDNNENYQVGLAELRTLMTIEKDQCISELISRHEEESNILKAELNKVTSLHNQAFEIEKNLKEQIIELQSKLDSELSALERQKDEKITQQEEKYEAIIQNLEKDRQKLVSSQEQDREQLIQKLNCEKDEAIQTALKEFKLEREVVEKELLEKVKHLENQIAKSPAIDSTRGDSSSLVAELQEKLQEEKAKFLDICRHSGSSRV

SEQ ID NO: 737523 - protein, 1256 aa, Homo sapiens
MKLYVFLVNTGTTLTFDTELTVQTVADLKHAIQSKYKIAIQHQVLVVNGGECMAADRRVCTYSAGTDTNPIFLFNKEMILCDRPPAIPKTTFSTENDMEIKVEESLMMPAVFHTVASRTQLALEMYEVAKKLCSFCEGLVHDEHLQHQGWAAIMANLEDCSNSYQKLLFKFESIYSNYLQSIEDIKLKLTHLGTAVSVMAKIPLLECLTRHSYRECLGRLDSLPEHEDSEKAETKRSTELVLSPDMPRTTNESLLTSFPKSVEHVSPDTADAESGKEIRESCQSTVHQQDETTIDTKDGDLPFFNVSLLDWINVQDRPNDVESLVRKCFDSMSRLDPRIIRPFIAECRQTIAKLDNQNMKAIKGLEDRLYALDQMIASCGRLVNEQKELAQGFLANQKRAENLKDASVLPDLCLSHANQLMIMLQNHRKLLDIKQKCTTAKQELANNLHVRLKWCCFVMLHADQDGEKLQALLRLVIELLERVKIVEALSTVPQMYCLAVVEVVRRKMFIKHYREWAGALVKDGKRLYEAEKSKRESFGKLFRKSFLRNRLFRGLDSWPPSFCTQKPRKFDCELPDISLKDLQFLQSFCPSEVQPFLRVPLLCDFEPLHQHVLALHNLVKAAQSLDEMSQTITDLLSEQKASVSQTSPQSASSPRMESTAGITTTTSPRTPPPLTVQDPLCPAVCPLEELSPDSIDAHTFDFETIPHPNIEQTIHQVSLDLDSLAESPESDFMSAVNEFVIEENLSSPNPISDPQSPEMMVESLYSSVINAIDSRRMQDTNVCGKEDFGDHTSLNVQLERCRVVAQDSHFSIQTIKEDLCHFRTFVQKEQCDFSNSLKCTAVEIRNIIEKVKCSLEITLKEKHQKELLSLKNEYEGKLDGLIKETEENENKIKKLKGELVCLEEVLQNKDNEFALVKHEKEAVICLQNEKDQKLLEMENIMHSQNCEIKELKQSREIVLEDLKKLHVENDEKLQLLRAELQSLEQSHLKELEDTLQVRHIQEFEKVMTDHRVSLEELKKENQQIINQIQESHAEIIQEKEKQLQELKLKVSDLSDTRCKLEVELALKEAETDEIKILLEESRAQQKETLKSLLEQETENLRTEISKLNQKIQDNNENYQVGLAELRTLMTIEKDQCISELISRHEEESNILKAELNKVTSLHNQAFEIEKNLKEQIIELQSKLDSELSALERQKDEKITQQEEKYEAIIQNLEKDRQKLVSSQEQDREQLIQKLNCEKDEAIQTALWTEKLQVLGT

SEQ ID NO: 737524 - protein, 240 aa, Homo sapiens
MQNVRTSLIAEQQTNFNTVLTREKMRKENIINDLSDKLKSTMQQQERDKDLIESLSEDRARLLEEKKKLEEEVSKLRSSSFVPSPYVATAPELYGACAPELPGESDRSAVETADEGRVDSAMETSMMSVQENIHMLSEEKQRIMLLERTLQLKEEENKRLNQRLMSQSMSSVSSRHSEKIAIRDFQVGDLVLIILDERHDNYVLFTVSPTLYFLHSESLPALDLKPRLQVHLEDPGYLEK

SEQ ID NO: 737525 - protein, 120 aa, Homo sapiens
GTTSCEFGTRENIHMLSEEKQRIMLLERTLQLKEEENKRLNQRLMSQSMSSVSSRHSEKIAIRDFQVGDLVLIILDERHDNYVLFTVSPTLYFLHSESLPALDLKPRLQVHLEDPGYLEK

SEQ ID NO: 737526 - protein, 211 aa, Homo sapiens
MRLFLWNAVLTLFVTSLIGALIPEPEVKIEVLQKPFICHRKTKGGDLMLVHYEGYLEKDGSLFHSTHKHNNGQPIWFTLGILEALKGWDQGLKGMCVGEKRKLIIPPALGYGKEGKGKIPPESTLIFNIDLLEIRNGPRSHESFQEMDLNDDWKLSKDEVKAYLKKEFEKHGAVVNESHHDALVEDIFDKEDEDKDGFISAREFTYKHDEL

SEQ ID NO: 737527 - protein, 211 aa, Homo sapiens; identical to SEQ ID NO: 737526

SEQ ID NO: 737528 - protein, 126 aa, Homo sapiens
MRLFLWNAVLTLFVTSLIGALIPEPEVKIEVLQKPFICHRKTKGGDLMLVHYEGYLEKDGSLFHSTHKHNNGQPIWFTLGILEALKGWDQGLKGMCVGEKRKLIIPPALGYGKEGKGNSISVFFLL

SEQ ID NO: 737529 - protein, 118 aa, Homo sapiens
MRLFLWNAVLTLFVTSLIGALIPEPEVKIEVLQKPFICHRKTKGGDLMLVHYEGYLEKDGSLFHSTHKHNNGQPIWFTLGILEALKGWDQGLKGMCVGEKRKLIIPPALGYGKEGKVF

SEQ ID NO: 737530 - protein, 90 aa, Homo sapiens
PVSCTQLFPAGGTRDRLEAELLPSPFLHASSVFSPESLLSQELFSRVGGLLRTPVRKMGGGAAQRVLTPRELGRRSLDNSWTSPVLLLTT

SEQ ID NO: 737531 - protein, 112 aa, Homo sapiens
MMGKLDNHMANKLQPHSFAKINSKWTKDLNVRAKTIKLLGCGSGFLDMTPNSQTTKEKIGKLYFIKILCIKEHYQQSKKITYGVGGNNMQFTYLIRIKHPEYIQNSQNATTV

SEQ ID NO: 737532 - protein, 86 aa, Homo sapiens
NTAALDSAHRVTAQAPCGRVGLRGSLQKKSPGVPFSTFLPGMQMKQPGQGSHLETSEPQLGQKPGPEHDVGGGQGLCGMAGKWPPP

SEQ ID NO: 737533 - protein, 95 aa, Homo sapiens
LAETTLLIFPPLQDHEHLQSLFLMGVHCQQANRFLHLSEIVFDVFDDEGVFFATAISFDHLTVWAARSRVCPFTLHDNPLPPNCESPKCLPAGEG

SEQ ID NO: 737534 - protein, 31 aa, Homo sapiens
MTFRKQEKMGKIGQARWLNLGGRGGQITSAQ

SEQ ID NO: 737535 - protein, 104 aa, Homo sapiens
RTYPGPGSMGGICKRVGVKTWLLKPRNYFQISFVLFFQCLNSQPMLSPTSSKEMIMAKPEQRRKRRKGGYLENKETDSCIYKIRCLSVEEGGNAVSPPYWTARL

SEQ ID NO: 737536 - protein, 104 aa, Homo sapiens; identical to SEQ ID NO: 737535

SEQ ID NO: 737537 - protein, 139 aa, Homo sapiens
MAGRGKGGQARRGDCSRSQNSARGAPGRPRGDRGRDRRGTAGIGARLQLPDCGGRVGTFPRSHPRTGFQGVKGNSPGRCKKATAPPRPASRLVHENHLEGRVQCPGATRHVVTALGWHRLVRGRRAAVSAPVRVCALAA

SEQ ID NO: 737538 - protein, 81 aa, Homo sapiens
LTFLGSSAAKSQQRRWSSFVRIASFAPNVKRTARMPQDTSSPGFCGACTVLNQPESCGSASPGCIADCRLHGGACAGERTC

SEQ ID NO: 737539 - protein, 134 aa, Homo sapiens
KRVCLYSLFNPVPPILPGICSTLAFVSTISLKPLAKITNILLTAKSSDQFSAGILPDPSAASDKVGYYCFPWCLEYHDLHLPVCSSICPADSMGPGEAPDHSSHSLGGLNPSYDFEQQFNANDFKFAFLILTSH

SEQ ID NO: 737540 - protein, 179 aa, Homo sapiens
LLPLRLWPRRSWGDGSIMASMQTTGRRVEVWFPKRLQKELLALQNDPPPGMTLNEKSVQNSITQWIVDMEGAPGTLYEGEKFQLLFKFSSRYPFDSPQVMFTGENIPVHPHVYSNGHICLSILTEDWSPALSVQSVCLSIISMLSSCKEKRRPPDNSFYVRTCNKNPKKTKWWYHDDTC

SEQ ID NO: 737541 - protein, 168 aa, Homo sapiens
LLPLRLWPRRSWGDGSIMASMQKRLQKELLALQNDPPPGMTLNEKSVQNSITQWIVDMEGAPGTLYEGEKFQLLFKFSSRYPFDSPQVMFTGENIPVHPHVYSNGHICLSILTEDWSPALSVQSVCLSIISMLSSCKEKRRPPDNSFYVRTCNKNPKKTKWWYHDDTC

SEQ ID NO: 737542 - protein, 168 aa, Homo sapiens; identical to SEQ ID NO: 737541

SEQ ID NO: 737543 - protein, 178 aa, Homo sapiens
LLPLRLWPRRSWGDGSIMASMQKRLQKELLALQNDPPPGMTLNEKSVQNSITQWIVDMEGAPGTLYEGEKFQLLFKFSSRYPFDSPQVMFTGENIPVHPHVYSNGHICLSILTEDWSPALSVQSVCLSIISMLSSCKEKRRPPDNSFYVRTCNKNPKKTKWWYHGKFEHRDIHKGKKM

SEQ ID NO: 737544 - protein, 161 aa, Homo sapiens
GIMASMQKRLQKELLALQNDPPPGMTLNEKSVQNSITQWIVDMEGAPGTLYEGEKFQLLFKFSSRYPFDSPQVMFTGENIPVHPHVYSNGHICLSILTEDWSPALSVQSVCLSIISMLSSCKEKRRPPDNSFYVRTCNKNPKKTKWWYHELKSAFILSITD

SEQ ID NO: 737545 - protein, 179 aa, Homo sapiens; identical to SEQ ID NO: 737540

SEQ ID NO: 737546 - protein, 168 aa, Homo sapiens; identical to SEQ ID NO: 737541

SEQ ID NO: 737547 - protein, 249 aa, Homo sapiens
MIALYLGAGGVNYPQVELKSQEAQSLQQQQDQYLGHLQQYVATYQQQVVTYQQLTSEEEELHNQLLLQTQLVDRLQQQKAQSKAVAKMGCQELRETQEHLEAISQQNQQPQAQLSLMALPGEEMDSEEEEEVPQPMPSIPEDLESQKAMVAFFNSAVASAEEEQARLCGQLKECTASAWLICWPRPRRNLRQQRHAHKTGGDPMCGETHQALQGAMEKLWESTSHCTRARGQCGRRRSASAGWPRTRER

SEQ ID NO: 737548 - protein, 149 aa, Homo sapiens
MSLAEQGPPRWSSSYKQRLTTCRRSWRVWQLRAQEQDTEGFSHPNQEEEERLLELEQVAELLREQAESRRQILETMQNKCTTISHVLTQNHKLKEQLSPLQNGFIKLVPREADTKFWGLQLQWVAANCFSLSRLMRTWRSPVHCSWNST

SEQ ID NO: 737549 - protein, 141 aa, Homo sapiens
MIALYLGAGGVNYPQVELKSQEAQSLQQQQDQYLGHLQQYVATYQQQVVTYQQLTSEEEELHNQLLLQTQLVDRLQQQKAQSKAVAKMGCQELRETQEHLEAISQQNQQPQAQLSLMALPGEGTGDCSQEEERAPGGNGNC

SEQ ID NO: 737550 - protein, 137 aa, Homo sapiens
QRWAHSALVGLSEDLSGHPQQEMDSEEEEEVPQPMPSIPEDLESQKAMVAFFNSAVASAEEEQARLCGQLKECTASAWLICWPRPRRNLRQQRHAHKTGGDPMCGETHQALQGAMEKLWVSLSWHGPRRVGAGRSLP

SEQ ID NO: 737551 - protein, 233 aa, Homo sapiens
MIALYLGAGGVNYPQVELKSQEAQSLQQQQDQYLGHLQQYVATYQQQVVTYQQLTSEEEELHNQLLLQTQLVDRLQQQKAQSKAVAKMGCQELRETQEHLEAISQQNQQPQAQLSLMALPGEEMDSEEEEEVPQPMPSIPEDLESQKAMVAFFNSAVASAEEEQARLCGQLKECTASAWLICWPRPRRNLRQQRHAHKTGGDPMCGETHQALQGAMEKLWSRFMELMQERRWT

SEQ ID NO: 737552 - protein, 233 aa, Homo sapiens; identical to SEQ ID NO: 737551

SEQ ID NO: 737553 - protein, 97 aa, Homo sapiens
PPDSHNTPPHSHKTPPRRPLLKDPQSWCRPKAQETVLPRFSPRTWEAAALPSFYPRVAKHLTVVEASKPDQASRPSNVRAPPRVLAPPLGRSRPTPG

SEQ ID NO: 737554 - protein, 375 aa, Homo sapiens
MSGSQNNDKRQFLLERLLDAVKQCQIRFGGRKEIASDSDSRVTCLCAQFEAVLQHGLKRSRGLALTAAAIKQAAGFASKTETEPVFWYYVKEVLNKHELQRFYSLRHIASDVGRGRAWLRCALNEHSLERYLHMLLADRCRLSTFYEDWSFVMDEERSSMLPTMAAGLNSILFAINIDNKDLNGQSKFAPTVSDLLKESTQNVTSLLKESTQGVSSLFREITASSAVSILIKPEQETDPLPVVSRNVSADAKCKKERKKKKKVTNIISFDDEEDEQNSGDVFKKTPGAGESSEDNSDRSSVNIMSAFESPFGPNSNGSQSSNSWKIDSLSLNGEFGYQKLDVKSIDDEDVDENEDDVYGNSSGRKHRGHSESPEK

SEQ ID NO: 737555 - protein, 177 aa, Homo sapiens
QPQKRQRRRRGAGTGPGRGTMSGSQNNDKRQFLLERLLDAVKQCQIRFGGRKEIASDSDSRVTCLCAQFEAVLQHGLKRSRGLALTAAAIKQAAGFASKTETEPVFWYYVKEVLNKHELQRFYSLRHIASDVGRGRAWLRCALNEHSLERYLHMLLADRCRLRYVAGMRTGMGWSKR

SEQ ID NO: 737556 - protein, 198 aa, Homo sapiens
QPQKRQRRRRGAGTGPGRGTMSGSQNNDKRQFLLERLLDAVKQCQIRFGGRKEIASDSDSRVTCLCAQFEAVLQHGLKRSRGLALTAAAIKQAAGFASKTETEPVFWYYVKEVLNKHELQRFYSLRHIASDVGRGRAWLRCALNEHSLERYLHMLLADRCRLSTFYEDWSFVMDEERSSMLPTMAAGSERQYIGVPQA

SEQ ID NO: 737557 - protein, 288 aa, Homo sapiens
AARPSEWFFCATAARIGDPSASTTMPRSFLVRKPSDPNRKPNYSELQDSNPEFTFQQPYDQAHLLAAIPPPEILNPTASLPMLIWDSVLAPQAQPIAWASLRLQESPRVAELTSLSDEDSGKGSQPPSPPSPAPSSFSSTSVSSLEAEAYAAFPGLGQVPKQLAQLSEAKDLQARKAFNCKYCNKEYLSLGALKMHIRSHTLPCVCGTCGKAFSRPWLLQGHVRTHTGEKPFSCPHCSRAFADRSNLRAHLQTHSDVKKYQCQACARTFSRMSLLHKHQESGCSGCPR

SEQ ID NO: 737558 - protein, 95 aa, Homo sapiens
AARPSEWFFCATAARIGDPSASTTMPRSFLVRKPSDPNRKPNYSELQDSNPEFTFQQPYDQAHLLAAIPRGVTNYAIIHPQVQPQGLRRRWQTRV

SEQ ID NO: 737559 - protein, 288 aa, Homo sapiens; identical to SEQ ID NO: 737557

SEQ ID NO: 737560 - protein, 108 aa, Homo sapiens [sequence omitted]

SEQ ID NO: 737561 - protein, 237 aa, Homo sapiens
ESDAEEDTSLRVLVCPPVKLARNKPLTPGSVALSPRPHPMPPAPPSLPGSQEVRGLGGRPLPREAPRWHVGASAPGVSGLRAAHGVPRGLWRGRVLSSQKVRSRPGILARTECISSRAGRVRSGKGGCGQTGAALGQAGTMRPLLCALTGLALLRAAGSLAAAEPFSPPRGDSAQSTACDRHMAVQRRLDVMEEMVEKTVDHLGTEVKGLLGLLEELAWNLPPGPFSPAPDLLGDGF

SEQ ID NO: 737562 - protein, 237 aa, Homo sapiens; identical to SEQ ID NO: 737561

SEQ ID NO: 737563 - protein, 179 aa, Homo sapiens
ESDAEEDTSLRVLVCPPVKLARNKPLTPGSVALSPRPHPMPPAPPSLPGSQEVRGLGGRPLPREAPRWHVGASAPGVSGLRAAHGVPRGLWRGRVLSSQKVRSRPGILARTECISSRAGRVRSGKGGCGQTRRCARPGRHHAAPALRADRTGPAPRRGLFGRCRTLQPSARRLSSEHSV

SEQ ID NO: 737564 - protein, 74 aa, Homo sapiens
PSRHTEAAPGPLRALSTQACSSVCPDGLYSLCRPAGPQPPISGRRLAFPICRRAFFWQGAAAVCALDRKTSFHQ

SEQ ID NO: 737565 - protein, 149 aa, Homo sapiens
ATVGKMAYQSLRLEYLQIPPVSRAYTTACVLTTAAVQLELITPFQLYFNPELIFKHFQIWRLITNFLFFGPVGFNFLFNMIFLYRYCRMLEEGSFRGRTADFVFMFLFGGFLMTQSDRMSKSKELLTQVLQLDTYIFSWKMYFPINLVE

SEQ ID NO: 737566 - protein, 115 aa, Homo sapiens
  misc_feature (99)..(99): Xaa can be any naturally occurring amino acid
WSRRNPYVRMNFLRPSQLPGPLSALGAHGIFLVVGELNHCGPFGYCSWTHIFFLGRCISQSTWWNKNSENTIYFEAIFDQQMRTKYNHYLRNGQKLRWXEAQRLEVAQCHYETQL

SEQ ID NO: 737567 - protein, 50 aa, Homo sapiens
DPSSDRLGVPVVQGVVSGLQPSAATRQGHTLPWDSPHCKVLDILVQPRTA

SEQ ID NO: 737568 - protein, 440 aa, Homo sapiens
MVPEPGPTANSTPAWGAGPPSAPGGSGWVAAALCVVIALTAAANSLLIALICTQPALRNTSNFFLVSLFTSDLMVGLVVMPPAMLNALYGRWVLARGLCLLWTAFDVMCCSASILNLCLISLDRYLLILSPLRYKLRMTPLRALALVLGAWSLAALASFLPLLLGWHELGHARPPVPGQCRLLASLPFVLVASGLTFFLPSGAICFTYCRILLAARKQAVQVASLTTGMASQASETLQVPRTPRPGVESADSRRLATKHSRKALKASLTLGILLGMFFVTWLPFFVANIVQAVCDCISPGLFDVLTWLGYCNSTMNPIIYPLFMRDFKRALGRFLPCPRCPRERQASLASPSLRTSHSGPRPGLSLQQVLPLPLPPDSDSDSDAGSGGSSGLRLTAQLLLPGEATQDPPLPTRAAAAVNFFNIDPAEPELRPHPLGIPTN

SEQ ID NO: 737569 - protein, 147 aa, Homo sapiens
MLGLPWKGGLSWALLLLLLGSQILLIYAWHFHEQRDCDEHNVMARYLPATVEFAVHTFNQQSKDYYAYRLGHILNSWKEQVESKTVFSMELLLGRTRCGKFEDDIDNCHFQESTELNNTFTCFFTISTRPWMTQFSLLNKTCLEGFH

SEQ ID NO: 737570 - protein, 107 aa, Homo sapiens
RCNSYTHGSLQWDRLRPPPVLPPSIYTIRTCSQRLFAAAQSSSYSHMNVKGPLIQPHNTQGPFLTPSLSSLLFHQSSPACTLSAWPLSRYAQPGSALLTTPPRLQRG

SEQ ID NO: 737571 - protein, 120 aa, Homo sapiens
SPDIPYLSHTHPNNISCSLLSLRQPLNFTQPGALFTSCPEPVRTHSSAVHQSVGASLNCGDKQPPNFSGSKIFFLIYLHLMTGQVRGSSVLCHPNTGIQKEGGTVNEIPIAIEKRKKHAE

SEQ ID NO: 737572 - protein, 127 aa, Homo sapiens
MVFGYTQRRRLVGSHRSASSRAGRDQQLFLGDFHSPTPVSEAQHESRREFLFLLFPPSFVSSIPFSLLKCVGWSGMWAEKRGSWRHLILSSSLCKNASELPHTTCTINYKVKLCKPAALLAFCMLVR

SEQ ID NO: 737573 - protein, 106 aa, Homo sapiens
SSEGTLSEGQMDWSGRGPAHSADVPGHSSHVSSLQSGQAAEKCQSLLMRAGQERSRSELAWVGGRGWCKATLRPKACVARTNGGGGGRSGLRAQENEVALLVLPGK

SEQ ID NO: 737574 - protein, 538 aa, Homo sapiens
MNLELLESFGQNYPEEADGTLDCISMALTCTFNRWGTLLAVGCNDGRIVIWDFLTRGIAKIISAHIHPVCSLCWSRDGHKLVSASTDNIVSQWDVLSGDCDQRFRFPSPILKVQYHPRDQNKVLVCPMKSAPVMLTLSDSKHVVLPVDDDSDLNVVASFDRRGEYIYTGNAKGKILVLKTDSQDLVASFRVTTGTSNTTAIKSIEFARKGSCFLINTADRIIRVYDGREILTCGRDGEPEPMQELQDLVNRTPWKKCCFSGDGEYIVAGSARQHALYIWEKSIGNLVKILHGTRGELLLDVAWHPVRPIIASISSGVVSIWAQNQVENWSAFAPDFKELDENVEYEERESEFDIEDEDKSEPEQTGADAAEDEEVDVTSVDPIAAFCSSDEELEDSKALLYLPIAPEVEDPEENPYGPPPDAVQTSLMDEGASSEKKRQSSADGSQPPKKKPKTTNIELQGVPNDEVHPLLGVKGDGKSKKKQAGRPKGSKGKEKDSPFKPKLYKGDRGLPLEGSAKGKVQAELSQPLTAGGAISELL

SEQ ID NO: 737575 - protein, 538 aa, Homo sapiens; identical to SEQ ID NO: 737574

SEQ ID NO: 737576 - protein, 513 aa, Homo sapiens
MALTCTFNRWGTLLAVGCNDGRIVIWDFLTRGIAKIISAHIHPVCSLCWSRDGHKLVSASTDNIVSQWDVLSGDCDQRFRFPSPILKVQYHPRDQNKVLVCPMKSAPVMLTLSDSKHVVLPVDDDSDLNVVASFDRRGEYIYTGNAKGKILVLKTDSQDLVASFRVTTGTSNTTAIKSIEFARKGSCFLINTADRIIRVYDGREILTCGRDGEPEPMQELQDLVNRTPWKKCCFSGDGEYIVAGSARQHALYIWEKSIGNLVKILHGTRGELLLDVAWHPVRPIIASISSGVVSIWAQNQVENWSAFAPDFKELDENVEYEERESEFDIEDEDKSEPEQTGADAAEDEEVDVTSVDPIAAFCSSDEELEDSKALLYLPIAPEVEDPEENPYGPPPDAVQTSLMDEGASSEKKRQSSADGSQPPKKKPKTTNIELQGVPNDEVHPLLGVKGDGKSKKKQAGRPKGSKGKEKDSPFKPKLYKGDRGLPLEGSAKGKVQAELSQPLTAGGAISELL

SEQ ID NO: 737577 - protein, 538 aa, Homo sapiens; identical to SEQ ID NO: 737574

SEQ ID NO: 737578 - protein, 200 aa, Homo sapiens
MNLELLESFGQNYPEEADGTLDCISMALTCTFNRWGTLLAVGCNDGRIVIWDFLTRGIAKIISAHIHPVCSLCWSRDGHKLVSASTDNIVSQWDVLSGDCDQRFRFPSPILKVQYHPRDQNKVLVCPMKSAPVMLTLSDSKHVVLPVDDDSDLNVVASFDRRGEYIYTGNAKGKILVLKTDSQDLVASFRVTFLITKILL

SEQ ID NO: 737579 - protein, 538 aa, Homo sapiens; identical to SEQ ID NO: 737574

SEQ ID NO: 737580 - protein, 500 aa, Homo sapiens
MNLELLESFGQNYPEEADGTLDCISMALTCTFNRWGTLLAVGCNDGRIVIWDFLTRGIAKIISAHIHPVCSLCWSRDGHKLVSASTDNIVSQWDVLSGDCDQRFRFPSPILKVQYHPRDQNKVLVCPMKSAPVMLTLSDSKHVVLPVDDDSDLNVVASFDRRGEYIYTGNAKGKILVLKTDSQDLVASFRVTTGTSNTTAIKSIEFARKGSCFLINTADRIIRVYDGREILTCGRDGEPEPMQELQDLVNRTPWKKCCFSGDGEYIVAGSARQHALYIWEKSIGNLVKILHGTRGELLLDVAWHPVRPIIASISSGVVSIWAQNQVENWSAFAPDFKELDENVEYEERESEFDIEDEDKSEPEQTGADAAEDEEVDVTSVDPIAAFCSSDEELEDSKALLYLPIAPEVEDPEENPYGPPPDAVQTSLMDEGASSEKKRQSSADGSQPPKKKPKTTNIELQGVPNDEVHPLLGVKGDGKSKKKQAGRPKGSKAGGAISELL

SEQ ID NO: 737581 - protein, 288 aa, Homo sapiens
LEDPVSIPLRGDGEYIVAGSARQHALYIWEKSIGNLVKILHGTRGELLLDVAWHPVRPIIASISSGVVSIWAQNQVENWSAFAPDFKELDENVEYEERESEFDIEDEDKSEPEQTGADAAEDEEVDVTSVDPIAAFCSSDEELEDSKALLYLPIAPEVEDPEENPYGPPPDAVQTSLMDEGASSEKKRQSSADGSQPPKKKPKTTNIELQGVPNDEVHPLLGVKGDGKSKKKQAGRPKGSKGKEKDSPFKPKLYKGDRGLPLEGSAKGKVQAELSQPLTAGGAISELL

SEQ ID NO: 737582 - protein, 50 aa, Homo sapiens
MVSMAAAHCGDRQSGVSRGRRHVGRSGSRAQLQSPPWGTPGHAPSPAAVG

SEQ ID NO: 737583 - protein, 106 aa, Homo sapiens
KNRDRYILGGQHHWPGALSTLCACGPRRCLLSGGCSRSPRPSGASGRARAHAWTSPPGPRGTHRHGMAPVHGCVRAAGPPRARIWRARLASGGRGPPREQTRDPRG

SEQ ID NO: 737584 - protein, 485 aa, Homo sapiens
MNEYPKKRKRKTLHPSRYSDSSGISRIADGFNGIFSDHCYSVCSMRQPDLKYFDNKDDDSDTETSNDLPKFADGIKARNRNQNYLVPSPVLRILDHTAFSTEKSADIVICDEECDSPESVNQQTQEESPIEVHTAEDVPIAVEVHAISEDYDIETENNSSESLQDQTDEEPPAKLCKILDKSQALNVTAQQKWPLLRANSSGLYKCELCEFNSKYFSDLKQHMILKHKRTDSNVCRVCKESFSTNMLLIEHAKLHEEDPYICKYCDYKTVIFENLSQHIADTHFSDHLYWCEQCDVQFSSSSELYLHFQEHSCDEQYLCQFCEHETNDPEDLHSHVVNEHACKLIELSDKYNNGEHGQYSLLSKITFDKCKNFFVCQVCGFRSRLHTNVNRHVAIEHTKIFPHVCDDCGKGFSSMLEYCKHLNSHLSEGIYLCQYCEYSTGQIEDLKIHLDFKHSADLPHKCSDCLMRFGNERELISHLPVHETT

SEQ ID NO: 737585 - protein, 485 aa, Homo sapiens; identical to SEQ ID NO: 737584

SEQ ID NO: 737586 - protein, 485 aa, Homo sapiens; identical to SEQ ID NO: 737584

SEQ ID NO: 737587 - protein, 485 aa, Homo sapiens; identical to SEQ ID NO: 737584

SEQ ID NO: 737588 - protein, 88 aa, Homo sapiens
PLRCAAQARSVAARAVRPRSLGQGPGAQGVGRAGRERGRPSTASGSARAGAALPAAVRPREGPRGPSACALGRRRLCVGRPGGPRGTD

SEQ ID NO: 737589 - protein, 485 aa, Homo sapiens; identical to SEQ ID NO: 737584

SEQ ID NO: 737590 - protein, 263 aa, Homo sapiens
MILKHKRTDSNVCRVCKESFSTNMLLIEHAKLHEEDPYICKYCDYKTVIFENLSQHIADTHFSDHLYWCEQCDVQFSSSSELYLHFQEHSCDEQYLCQFCEHETNDPEDLHSHVVNEHACKLIELSDKYNNGEHGQYSLLSKITFDKCKNFFVCQVCGFRSRLHTNVNRHVAIEHTKIFPHVCDDCGKGFSSMLEYCKHLNSHLSEGIYLCQYCEYSTGQIEDLKIHLDFKHSADLPHKCSDCLMRFGNERELISHLPVHETT

SEQ ID NO: 737591 - protein, 485 aa, Homo sapiens; identical to SEQ ID NO: 737584

SEQ ID NO: 737592 - protein, 220 aa, Homo sapiens
MADLEELSRLSPLPPGSPGSAARGRAEPPEEEEEEEEEEEEAEAEAVAALLLNGGSGGGGGGGGGGVGGGEAETMSEPSPESASQAGEDEDEEEDDEEEEDESSSSGGGEEESSAESLVGSSGGSSSDETRSLSPGAASSSSGDGDGKEGLEEPKGPRGSQGGGGGGSSSSSVVSSGGDEGYGTGGGGSSATSGGRRGSLEMSSDGEPLSRMDSEDRSVL

SEQ ID NO: 737593 - protein, 496 aa, Homo sapiens
MADLEELSRLSPLPPGSPGSAARGRAEPPEEEEEEEEEEEEAEAEAVAALLLNGGSGGGGGGGGGGVGGGEAETMSEPSPESASQAGEDEDEEEDDEEEEDESSSSGGGEEESSAESLVGSSGGSSSDETRSLSPGAASSSSGDGDGKEGLEEPKGPRGSQGGGGGGSSSSSVVSSGGDEGYGTGGGGSSATSGGRRGSLEMSSDGEPLSRMDSEDSISSTIMDVDSTISSGRSTPAMMNGQGSTTSSSKNIAYNCCWDQCQACFNSSPDLADHIRSIHVDGQRGGVFVCLWKGCKVYNTPSTSQSWLQRHMLTHSGDKPFKCVVGGCNASFASQGGLARHVPTHFSQQNSSKVSSQPKAKEESPSKAGMNKRRKLKNKRRRSLPRPHDFFDAQTLDAIRHRAICFNLSAHIESLGKGHSVVFHSTVIAKRKEDSGKIKLLLHWMPEDILPDVWVNESERHQLKTKVVHLSKLPKDTALLLDPNIYRTMPQKRLKR

SEQ ID NO: 737594 - protein, 496 aa, Homo sapiens; identical to SEQ ID NO: 737593

SEQ ID NO: 737595 - protein, 496 aa, Homo sapiens; identical to SEQ ID NO: 737593

SEQ ID NO: 737596 - protein, 296 aa, Homo sapiens
LPARPSVLDNGDRPQSSISSTIMDVDSTISSGRSTPAMMNGQGSTTSSSKNIAYNCCWDQCQACFNSSPDLADHIRSIHVDGQRGGVFVCLWKGCKVYNTPSTSQSWLQRHMLTHSGDKPFKCVVGGCNASFASQGGLARHVPTHFSQQNSSKVSSQPKAKEESPSKAGMNKRRKLKNKRRRSLPRPHDFFDAQTLDAIRHRAICFNLSAHIESLGKGHSVVFHSTVIAKRKEDSGKIKLLLHWMPEDILPDVWVNESERHQLKTKVVHLSKLPKDTALLLDPNIYRTMPQKRLKR

SEQ ID NO: 737597 - protein, 274 aa, Homo sapiens
MDVDSTISSGRSTPAMMNGQGSTTSSSKNIAYNCCWDQCQACFNSSPDLADHIRSIHVDGQRGGVFVCLWKGCKVYNTPSTSQSWLQRHMLTHSGDKPFKCVVGGCNASFASQGGLARHVPTHFSQQNSSKVSSQPKAKEESPSKAGMNKRRKLKNKRRRSLPRPHDFFDAQTLDAIRHRAICFNLSAHIESLGKGHSVVFHSTVIAKRKEDSGKIKLLLHWMPEDILPDVWVNESERHQLKTKVVHLSKLPKDTALLLDPNIYRTMPQKRLKR

SEQ ID NO: 737598 - protein, 302 aa, Homo sapiens
PATLEDPHRNPMSRMDSEDSIFCISSTIMDVDSTISSGRSTPAMMNGQGSTTSSSKNIAYNCCWDQCQACFNSSPDLADHIRSIHVDGQRGGVFVCLWKGCKVYNTPSTSQSWLQRHMLTHSGDKPFKCVVGGCNASFASQGGLARHVPTHFSQQNSSKVSSQPKAKEESPSKAGMNKRRKLKNKRRRSLPRPHDFFDAQTLDAIRHRAICFNLSAHIESLGKGHSVVFHSTVIAKRKEDSGKIKLLLHWMPEDILPDVWVNESERHQLKTKVVHLSKLPKDTALLLDPNIYRTMPQKRLKR

SEQ ID NO: 737599 - protein, 287 aa, Homo sapiens [sequence omitted]

SEQ ID NO: 737600 - protein, 225 aa, Homo sapiens
RTLFLLIACRCQRGAVFVCLWKGCKVYNTPSTSQSWLQRHMLTHSGDKPFKCVVGGCNASFASQGGLARHVPTHFSQQNSSKVSSQPKAKEESPSKAGMNKRRKLKNKRRRSLPRPHDFFDAQTLDAIRHRAICFNLSAHIESLGKGHSVVFHSTVIAKRKEDSGKIKLLLHWMPEDILPDVWVNESERHQLKTKVVHLSKLPKDTALLLDPNIYRTMPQKRLKR

SEQ ID NO: 737601 - protein, 496 aa, Homo sapiens; identical to SEQ ID NO: 737593

SEQ ID NO: 737602 - protein, 510 aa, Homo sapiens
MADLEELSRLSPLPPGSPGSAARGRAEPPEEEEEEEEEEEEAEAEAVAALLLNGGSGGGGGGGGGGVGGGEAETMSEPSPESASQAGEDEDEEEDDEEEEDESSSSGGGEEESSAESLVGSSGGSSSDETRSLSPGAASSSSGDGDGKEGLEEPKGPRGSQGGGGGGSSSSSVVSSGGDEGYGTGGGGSSATSGGRRGSLEMSSDGEPLSRMDSEDSISSTIMDVDSTISSGRSTPAMMNGQGSTTSSSKNIAYNCCWDQCQACFNSSPDLADHIRSIHVDGQRGGVFVCLWKGCKVYNTPSTSQSWLQRHMLTHSGDKPFKCVVGGCNASFASQGGLARHVPTHFSQQNSSKVSSQPKAKEESPSKAGMNKRRKLKNKRRRSLPRPHDFFDAQTLDAIRHRAICFNLSAHIESLGKGHSVVFHSTVIAKRKEDSGKIKLLLHWMPEDILPDVWVNESERHQLKTKVVHLSKLPKDTALLLDPNIYRTMPQKRLKRTLIRKVFNLYLSKQ

SEQ ID NO: 737603 - protein, 496 aa, Homo sapiens; identical to SEQ ID NO: 737593
